United States Patent Application Publication US 2014/0057251 A1 - sequence listing, part 35

SEQ ID NO: 37394 - DNA, 3167 bp, Cannabis sativa
ttctctcaaaagtaggagagagaactttttattaatctcctgggtagattctgtggtactaagtgcatagaataagccaaggtagcaaattaaacagtgttatactcaaaagataaagggcactgatacctactcttgatccagcaatatgccatattaacaaagtaataaatcagatctgaaaaaaacctaaagaaagtccaaatttattacaagaaacgccaaccataaggacccatctttttaaattaagtatcattaattcatttgtgtaactatatccctcaaccttttgcttcattcagtttttaagtgttgattaatttttttcttttaatttgagtttttctaaaagaaaattagttttcaaggttttttcaaaaaatattaatgagtttgttagatttttataaataaaattgattttataaattattaaagagatatttcagcaataatgctaaatttttgtgacacatggcatggcaacattaataaccacatcatcagttagcagtttgtataaatgaatgcaatcaactgcaaagacttggtatcataggccgtccaaaaagttgaatataagtacaattactagcaaagctttggtattattgccacaattaagattattaagaagaagaaaaaacccatctagcctggtttagtaaaaatagctactcagcttaaaacttaatattagaaagatataactatgaaagctgtaaatcatcttacatagaacgaacagatgaaacatccaccggaggacctccttcaattgtatttacgatctcagaaataacaggttcaggatcccccttatacaattggaaagcttgcctgaaacaatagaaggaagtaatgaattataggtctagcataaactcttctaaataaatgagcaaaagagagaggggaagattgagaatctagaatagttatcattccaccatctttctaattgttgacaaataagcttaaacattttatgcaaaaaaaaaaagctgcatacttgaacttcacacgagcttgtgcatagtgctccatacgaatcaaagcaagaccccatgcattccatacagggaatatatcaatctggaaaaaaccaagtatttttaaaatctaagcatgaatcaaagacattcagcattaatcttcacaatatctttgaagcggaatatttaccttgcactttttgcaagtatacacagccatactgtaccgttcatccacaatcaacctgtcacggagacgggcagacgactctttatcagcgatatcatctaaggacacagcaattccagagcctagaagactttgaagtagctctgaacgtcctagccaaatgtctgcctgtgataaaacttctgatagctcatctgttgattgactgcccatggtagaactacccgcatctgaagatgcatcatcagtatccctgtttctttcagaattacttgacaaatcactaactcccactgtctttctcaacaaggatttagcatattgaagaccctgaaaatgtcatgaaaagtatttcaatctgaattacaaaaagaaattacattgaaaacactagaacatttgatataaatgaaaaaagtaagtccttgcaataaaagaagaagtgattccttttcttgactgtgccatgatttcaattagcaacatacaccatcatacaaccctgtgattcgagaaaggaatacctgtacaaatatctcagtggcatagtaagcacgaccaataacttccattgatgcattctcgggcaattgccgagagcttaacacattcttcatctgattgacacacaagtccattgcattcttcgctgacacactatcatcagaacacaaagaaagaagggcctagaaggaaaaaagaaaaaaaactcagaagacttactagtttagagtattgtggatacatatagcaaaacaaaaatatgcaagaaaattgtttttctctactgatatacaaattttttctctgctgcaggatccgcgttaaaatttaatttccataagatggatattttatgtgttttttcagagacaaaaacaaacacagcaacaataaactccaactactaacaaaatcagaaaagagaaaactaaacacccttaaattccttcgtatctaaaaatcattcatagtatatttaatatgctagcttatagaatatgaacaaaagcaacatcatgtacatactaacaggcactagtataagaaaaatacatggcaagagcatcatgctagaaatcattatttgttatttagtattgcattaatagtacaaaatgaagcagaaatatcaaaacttaaaaaaccaggtatggtatgtcctgatgatattcaaaactaaactgacatccaaattatgagctaagaacattagccaagttatcacggtaccttgaagagagtaatgtcaggggcactttcatatcggtgagatagacgaactgcatcatccttgatggcatcaccagtcagcatccattcctcagcaatcaacacagaaggaagccgctcttgtccatcaacagaataagttgaaacatgatcctcttgaatgccagccattgcttcccaagcaactctttcagatggggacaatccagaactttttcttttccggtagacatcttttggggcaggcttgtctcctgtattccgtggaccccaagagaacgctctgcgagcctccttttgcaagttacttaagctgttagagaaggatgatctcacaggtgtgcctgttctagttttctgctttggtctcattcctgaaatagaaactctaggttctcttgtaggagagctaaaattgaatacaatcgctttagctgcatatgaaataattacactattgtctcgcaacgatggaaattctttaagaatctgcaaaattcagaatgtacaacaattacataaacataaaattaactaaatgagcattgacgttgaaatgtactgacgagtattttactatcaagtgacaggattctgataagccattggttaaattcacttatgtgagaaggaagaaatagaagcaggtgctgaggtgtgtgcaatgacgtgtcacaagacagagaaagtgtatcagtagcagcatgtatcagattcatctaagaagttatctaaccagcgcagct

SEQ ID NO: 37395 - DNA, 3315 bp, Cannabis sativa
gctgttaaggaactactgataaaacagtgacttaataacattttattaaacttaaacaacccttggactttccacggccacagaataaacttaataataacagtactatattaattaatttaactaattaatcagcaagccagatatatagcttgcgtttatgtatatctatatagcaaaaaaaggcgacaaccgaaagggtagtacaattgtgggtgtggctgacagtgggttattcacatgaagtgttcctataaacaaaaatgtaaaaatgtaaatatatttacaaacgaataaataattaatgatttattatatagtgaagagagtaagtgtgagtgtgtatacagggaacatgggtttttgctaccccattctttggtttggtttgtcagcatgtatgaaaatttggccaacgtccccttcacgagtatgacccatttccaactcctcttgttttcttcttcattctcttccatctgcttgtcgtttcttcttcttggaatgtgtgcttttgatactctacacactactactcattactacactttctctctctacaactctattcttctcttctcttctcttctctatacaacatctcaataaatatatatatatatatattcttcattagccgatgctagctccttgattacagtaataagattgtgctcgacaaccactgaactcttgccttatagttttgaaaaaacaatcaaaggcccccagcctgccccggaccctctctcataaaactacttcggcttaattaactatagacaattaacctcatgatcgatagcaagatacaattttcatcaacagtagaaaatgacatgattttaaagcaagaaaaagaaagaaaagataagaaatgatagaaagaaacaacaacgaaaaggactaaggaaagaatcccttttatttggtgccctccctcgatcatgcatgatagaattattaactaattaatagttacgacaaatgatcactatttaccatataataaaattttatctttagaatttttctttttaccactttaatgtacatgatagaaaaacaaaactgtaattcaaaaacaaaaccctttattaatcctccaataaagatgtaatcaggaaaaaaaaaataaagaaagaaaactcaagtagctgctagtaaaacttgatggtgatgatataataatatatatatctactttatacatgcaacaacactctcccggccaagtacccaaaaacatggacatatcgaacttaattaattacagatatggcagttggtcgcagtattgatcgatcatcttttatatcaccttgatagcacattcacggttgtggtgtaacatatattggttaacccaatatacatttgaccgactctttaaaaaatgtactttttctttgttgtttatttttgtttttcttttctttgaaagagtctctttcgaccacttaagttaattaaactgttgatgttccaaccatggccaaaacccagattggtcatcaatagcacaaaacatattacttaagctctcttctttgaccacatgatgatgatgatgatcattcttctgatattggagttgttgatctgatgatcttgctgaagacgaggtctgaaagagctgagccacatgatgacctgaattgggcctgatggaggttggaaaaagagcccttggatgactcgaaagtgggctgtctattgctgctggtgttcttgagatatccaacttaatatcagagctattctcacttctgttgctgcaagacccttgatctgtttctttattaagattgattgattcagttggctctctattttttagagccgatatctgtgtgtgtccatgtccaaagggttccattattataattatttacaaactaattataacagtcaaaataagtcattacaaaatatacatagcaatcatgacaaagatattattatttattatttcagtatttattgtgttaagaaatgttgtctactgatgatacatcattacactttaggcctctgatcatcaaacaaattatactatatcaatcaatcaatcaaaaaaagttaaagcatctattatcagaaaagggtgttgtactaatcttcgatagaattgtggttcattcaagaaggctggctcatccacacacagaagaaaaaaagttcttaaattatgacagacataaaaagaaagaaaagaaaaacaaaaatatatgctcaattccttaactaaaaggattcttttgctagctaggtgagaaagaggagaagtctaaggttctcgttaaaaatacaaaaatatattcttgagcgaatcaaaagcaatataattataatcccagtaatatataatgtatttatgacgactaactttcgaaaaaattaattacctctgcttgaagtttgtggttctgagcttgaagaacatcattatcagctttgatagcttcaaattgtctcttaagaagatcgtaatctttctcaagctgtttagtcttccacctagctctcctattctgaaaccaaatagcaatttgtcttggttgcagaccaagagctctagctagctgcattttcctttctggctcaagcttattccccaattcaaagttcttctcaagtgtcttaacctgttccatattaagtctcctcttcttttcccctgcttgagatccatcatcggataaatcatcttctcctccattgccttcttctcctagctcgatacccgaaaacgataccgatctcttacctagaaacgatgccactcctgccaccatgaaacaattagtatctcaataatccaaaaaaagaatgaaagaagacagagaagaggcaataagtgaaacagagaaaagaaccatgaaattcttgaggtgtgcagggtggtagattgatctgattcagagaggttggagggtgatgatgagggttatgatgatgatgatgatgatgatgttgatcttcttcacttggagtttgaagcataaaatttgtagggaagaaggccatgccacttccactcatgatgatcactgctacaaccttttttttccttgtttatttatattttttttttccaaggaaagagttcacctaaagataaaaaccaatccaagaagttgagatgatgatcttggttgcatttgtgtaattagctaatatagttagcaaagaatgtggcagaaagactcaataggttttcagagccttagcttatatggaggagaagaaaaaaaactaagagaaatatatagagagaacttgcaaatatatatcaagttttttttttttttt

SEQ ID NO: 37396 - DNA, 3295 bp, Cannabis sativa
taaaatttaagattggaacagggcatccaaaatatttaagacggtcctggttgtcacctagtttccataattgcctaatgagcaatgttataattaaacatcttattgtgcccaataccatatatatccatgtaacacattacgagtagttgatgattttttatattatttattaattcttaaatcaaaatatgtattagaaccaatattaatttacactaatagcaatatatgtcaccttgtggtacttgtcaacataaactgcccgaccgttagcatttttatgtctaatctatcgaagaattggggaagtagttaatctctgccacatgatcaaaacaacaagttaatatatcacattaagctggcaaaaatattcttgcactatgagagcaccaacaatactaaccaagaaagagagacaaaatgggtaccaacataaaataactaatcaattttatttttttcttaatgaaaaataatgttgcagaggtaataaaataaaatagaataaaaaaatataattttattttattaatttgtttggttgcattttaaaatataagaatgtcattttaaataaaatattttttccatcatttaggtacaatgagtattctattttgaaattgaaagaatcactattctaatgtaagatgagaaatataaaaaaatgttggtcttctacaactctgtgctctatggtggtttttttttataaaaatcttggtgtgtaaagctttcagttgtcatggcttctaaggactgtatcagtggatgatattgtcaacgatacattacagttatcggttgaggatgactgggaatgtaacgaaacgccagtggatggactagctttgatgtcagtggtaggacgaattttttacaagtgtgaatgcaaaaagaattttactaaaacgatttttgcacaaatttgggaagtgtccgaggggtgggatgttcaggtgtttgcttatgaggatggtagtacctatgttggctttacattcgatgatgaatagttacataaaagaattcttgatagagcttcgtgaacgtttaatgggggtttgttggtttgcgagttgtggcctcaatcaaggaattggcatgatgcacggttgaacagttttgcttgttgggttcgcatgaccaatttccaccccaaagtgcacaaaaaataacgctatgaaattggggaaattggtagggaaagttcttgatcttagatgggataatgttctcttaatgatgatggaacaagaagttagaattttgattgaattcgatcttcattcaattgcctttgttagaaggtttttgctggttgattggaagaagatttgggttcaattcaaatttgattatcttccattgctctatttttgttgtggtcattagggtcatgattatggaatttgtaaggttgattggattatgaaaaaggatacacaggggtatttggtgttgctttatggtgattagttgaaatctaatgacgataggaaagattgcttctcggttggaacaacgccagattttgggattcgtaaggtgcaagggagtggtttgggttgtggattggatcttgataatgacagtcggaatcaccatggcggcgatggttcatcgacgcttacagtttttctaagagctcagagagaggtgatcgcggcaaagaagttgaacgggattactgaacttgcgcaagaaggaagagtggcgagtgatgacatggaaaatggatttgctaagggggattcggtcaatggtcaaactaatgaggtggctaatgaggtttttatgggtgatgtggccaaagtgaatgtggtgaataagtttatgggtactaaaaatgttaatgggcctgggttcatttttaatgcttcaaagcccaattctaatttagttaatcaaaagataaagaagaatcagggctcttttaactttgatggtcaaattgcagatcgttcaacttggaagaggactagttcttgtgcgacggtgactgatagtacttcttttggggtcctagtcgagcgatataaaaggagcttaggggaggtttgtttgacgggtttcattagtattcatagaggaaataagaagttagtgagagatggagaaatggaaaataatggtttttccttggaattaggagaagagcatggggaattagtggtgggtagtactacgaaggaaggtgttgttgggttggacgatggtaataaaaagaagttgtctcttaaacagcaagctagaaaaatgggagataagtcaggaggtgagtaggtggcggagttgtgtggccatggtgatgatttgtgtagctctaaaggtgaggcaattcattttgaggtggacgatgctcaaaataattcagagtaggtactttctaattcttgtgattgttcttcttttcctattaattctgaaatggcaagccttgacgatcaaggccactgagaacaataaaaatcctttgttggaatgtacaaggtttgggaaattcttgtacattctctaatcttaattcccactatgaggggttgaaaccagatgttatttttatctctgaaagtaaattgactcgcagaaagactgaagatgtggtgaggaaacttgggtttgactatttttttgatgttgatagaattggtttaagtggtggtttgttgttgatgtggaaggaagtgcttggtattagtattgagtcttcttcgaggttccatattgactctgtgattcgtgacactaatggtttgtgctttagattcattgggatgtatggtaatcctgatgcatctcaaagattcttaacttggcagttgcttgatcgctttggtgagggtgtgcgagggccatggttgtgtggtggggatatgaatgaaatcttggataattttgaaaaacatggaggtcctccaaggggtttcgaagctatggctcggtttcggtggtccttggactattgtgcactgaaggatttatctaaggattataatacctttacttggtgtaatggtcactgggatagtgctggttttgttttagagaaattggataggctctttgctaatatggactggcttgagaccttttacatagtggatttttagtacttagactggtggtgttctaaacataaagcgatgcttatttcttttggccaggatgtgaatcagaatggtgttggttctaggagtaggaagcactctagattccattttgaggaggcttggtgtgatgaggaggagtgtgaaatggttgttaaagataaatggcttgatgggct

SEQ ID NO: 37397 - DNA, 2690 bp, Cannabis sativa
ttgatgcatacatgccagaatgggtgacttagcactttttttctttgacttaattcagtctcagctacatataactcctttacgaaagcaaatcttctactaagaaactgttgtgatgttaatatgatgaaaccaaactcttggactcatatgagccatttaaaattggagatgttatggaataggaaaattaccttctgagaaactgcaaatgcagcctgttcaggcgtcatgttctcaaatggtgtcaatgctgttaatagttcccaaagaacaattccaaaactgtaaacatcaactttttttgtatgatgtttttcttggatcatttcaggtgccatccatcgatatgtccccgtgaaaccttttgcactgccacactgtgtttctaaacatgaaataccaaaatctgctactttgacacacatatcctcatcaagcagcaaattttctgatttgagatctctatgaagtattccctgtgaatgaagatacttcatcccgcgtgcaatgtcaagcgctaatttcaaaactaggtggagtggaacagaatgtggttcctggtgatgaagatatttccttaatgagcctcctggcaaatactcggtgatgatgcaaaacacaggaggtttcttacaagctccaaaaaactgcagatcacaatcaagaaaatgcatgctttaagtcgcgaaataaggagaccaaggagttgtcacactctaagtctttcagaaaaataatcaacaaaggttcaatttgggtacacattgaccacaatgcaattaggcacattgaatatacaagaaaagaattcaaaccattctaatatggcaaggtttctgtatctctaaaaatcatccatttcaggattgtgagggaatcaagctacccaagccatgactcaaaatcttgattgagaagatgatcatattaaaagggtatcatcaactatttacattatgtcccttaaaggactgattccatacaaaaaactcaaattcaactaagtctcaccaaccttgtattaaagtagtactgcagaacataaaacaatgaaagactacgtacattaatccatgaaaggaaataaagaatctgaggattattactacattttatgtccaccattatggtttttaagttcaagcaaaaacgtagataatcccaacaaaagaaaagacaatcaaggaaacagaagctcttactgtgatgatatttggatggcataaccgaaagagcaaagcaacctcagagatgaactgattctctaccaagacagccaagttctcatcctcctcaggttggctgatgagcttaatagctacatccatctgcttatatacacctctgtagatcctactatggcgaccctgagcaaatttatatccaatgtacaattgagatagatcagcactccattcttcttctccttctcctttaatcttagcaccagaggagaccaagtacttggaccaagactcagctcgtttgtactctccaagagagagcctcctgctgagtttgccattgttggaaatctgcttaaaccagtacaaattcttcatgggttaagctaaaactaaccaaaaccatcaaatcttaacaccctttaccctcctcaactcaatgcctattatctcaaaagaaaaaaggttctcaaatttcgaaaagaagaaaaaaaaatactactttttcagagaaacccggtacaggtaggaaaaataaagcctcgaacttgcaaaaacataaaaaaaatattccctcatttcatgcagataatgaaaaaagtcgaatcgaaactcagaacatttcacacaagtttttattttattttttttttcttaaaagaaaaattaatgtttccaaataaggaataaaacccaaatgaaatacatagtttctatagcagaaacttctttataaaaatatataattaaaagaaaaacatcaaatccgaaatctatactagctcgaaatcagcacaaggaacccaaaaacagaaaagatgaaggctttaggtcttccaaaaagcaagaaaaactacatcattaaaaacgaagaaaatcctcaagctaatgcataatctgtgggaaaaagatataaaaagaaaagattgagagagaaagaaaagatttttataagtttttcttttggaagagagagagagagagagaggcggttgggttatgatgtttggtagtatatggttttgctgttttctggtagtgcagtggaagcatatggcaatagagagagctggcagttttttctctctctaaaaaagcaactggtgttttattattattatttttctttttctgatgagagtagcataagtatagtatagatagtaagtagtagtagttagtaatagtgtcattcttcacatcaaaatactttctttcttttttctgaaataacgtgcgaagatccacttctgaggagacataatgggtcattcatttgattatgactactttcctttctcatatcccctttttgcccctctgtttttttttttttcaaggaaatgcttcttctcttttataaataataataaaagggctccaaaattacatgcattattaccaataattaatagttatgggtaagtctaccatatactttttgaaggggtattttagtaaactctttatctattataatatttaagaaaaaaatttaattta

SEQ ID NO: 37398 - DNA, 2297 bp, Cannabis sativa
cgagactttaatctagaacataaccacgatttggcaaagcagtctgatgttcaatttcttagatcaaacagaatagtgccagctaaaattggtgagcaaataatgtcaatgagacgatccagaattaaaacatgccaaataatgagtcatttggcacaagagatgggtggtccggatcacgtaccttttcaaaaaagagatctttacaattagattggtaaacaaagaaaagaggatggcaaagaaacaaactctgagggagcgttgggatatttagaatggctggcaaaaagagatgatctattttatgggatctatagcatagatgaggagacacgcctagcaaatcttttttggtgtgatggagtttcaaggcgggattactaatattttggagatgttctggcttttgacacaacttataagacaaatgcttacaacaagccattgctaatccttgttggtatcaatcaccactttaggactactgtcttcggagtgactttgctatgcgatgagagtgaagatacatttgtatgggttctccaacaattccttgatgcaatgtacaacaaagcaccttttgttgtgatcactgacgatgatagtgcaatgcgagaggtaatcaaagaagtaatgccaaatgcagtatcacctatatgcttggcatatatcaaacaatgcagcaaaattgctaaccaatccctccatcacttcagtattcaaccacctaatgtatcattactacatcgatgaacaagagtgggaggagcaatggaaattaatcgttaacaaatttggattacataataatagctggatgattcaacaatatgagagaaagagaaattaggctgagactttcctttgcggtaatttttttactggatcaagaacaacacaaagatcagaatcaacaaattcattttaaaccaatttttgacaagtaagctacaactaagttggacaaactgatgccgcactgcaagcaatacgtcacacagtgatgcttgatgacttccaaagcaaccatacatcaccaaaacttctaacccatgttttaaggaccaccatgaacaatttgcaacatactacacccacaatatgtaaatttttggcttatacggtatatttaaataaaagcatataagggttttatttaattaattgttatacccatatttcaagtaccaatatggtgctgatgcgtgtaatatagctagaatatgaaccggctcaaattatgcaataataaatgtattcagacaactcacttcaagaagtacattcggtagaaatattcgaactcaccttcttggagacaatggcgagacacgaataataactaccgattgatgagaccagcgagacgaacaaagaaaatccatctcaggatacacaaaatacatagcagaattgtttgaaaagggtagataatgaattatccaaagagcttgcagcttattgatccacatacacgtaagtatgttaaaagattaaaacaccttcagcatgattcatctcgcaattgtcatgctgcaaaaagtatctcgcgtatgcctcactaaacatttataggagaacgcaagggatactacaacatatacttagatgctggcttacgataaagtgtttagaaaagtattgttgaattgtgagaaggatgaagcgtagtcagtataaccgcttgtagataaagttaaaagtgaggttatgggaggttacttgtaattatcacatgtgcgtaaataagaaacgtggggattgtctacgtttcacgaacgattacaagtgataagatccgaagggaattgtcatcctagactcctataaatagggttagggaacaagagacgaccaatttgggaaagaaagagaattatacttattattcattttgtagaacaatttattgcattatgtatacaatctatcaacccaaaataagatggactcgcaaactatgaagaattaacttcaaaatcacgttaaaaatcctcttgccatttattactattattattattatcaattatttttcatttaattcctgaatatattaattatataagaaaggcttatttattagttaacgaaaatccgcgttaacagtttgttactttcattaagagccttgtaataaaaactcaacagaacaccctccttgagaacaaattcgaaccatccactcatggcagacgatactcctcaaaatgaagagaatcagccaagaaagacaactaaacgtcctaaaaaagagcatcagacttctcacaaaacaaataccactgggactc

SEQ ID NO: 37399 - DNA, 4164 bp, Cannabis sativa
aaggttataaagctcagcaaagtctttagtgttgaagttctgacgccaccccggcgcgaacaccgtttgccttcccaattgccggaacaacacaaatacataccgatgaatccccaccgtcggccgcgggttctcgtagcacaccacctcttgtcctacacataataaacaattaattaaaaaacaaattatatactttgtaatacaacattatatattataattatttaatatatttaaaaaaaaaaattattaatccgcactattttgtttacagcgttcttaatttaatataatataaaaaatagtaaataagagtattattatgaagtatgaacggctcaccgaagcttggcccggtagttccaggaatatcagtcaccaacctaaaattgaaattgccaaacatgtataattattataattatactatatattataggtcaaagctcaattattagttcaaaaatgactcttagattaccattatctggattaataatatatataaaaatataaattgtggtaataacaaattcattgaaaaagtagtactattatctaatcataataacaaatttagaacactattttaccatccttaatttactgtaccgaatattcacggtaactacaacgaatataactacataaactaataatttaatattaagatagttaaaaagtatatataggacaaaattacgataagaaatattatttttatctttacttatagggcattccctctaattttaaaaattatgaataatgagtatttggctgtgtttttcattttttgtttttaaaattgtgttttcaaatgtgagaattgaaaattattttttattattttaaaaatttaatagtgtttggctcagttttttaagattattttaatttttttttaactaaaaaaataatattttatcatgacatgaactcatccaaccccatattggaccttgaattcaaactcgcgaactcaaatcccaactagaacctatacctggactcagactcaaaccttaacctgaactcgatcctgaatttgggccctagacctagaccccggacccgacccaacccgaaccccagattacgaacccagatccagaactcagatcccggactggacctgaaccctagacccaagctaggtcctaggccagagtccaagagtccagtctggtttcgaggttcgggtcggggtttgggtcaaggtccaggtctgagtctaagttcgtgtttcagggttcagggtcaaatttagggtctgaatctgagtctatgttcgaattcaaattcaggtcaaggttgaaatatgtgtaatttactgaagtagtgtataaaaaatactaataatgccctatacatgtgtatatatattgacatgtgttgatcttagagtatgacacattaatttgtgaaaaccttcttagtgtgaggtggccattttaatggtgggacaaaaggggacatgctatagctagcaggataaaactgattccacacacacagcctcatcccttcatcattcaaaattcatccccaaaccacattctttctcatcagctttttatatattcatatatattgtatattcccatatatcctttcatatatatatttatatagctaacatatatggaatttgtggcttaataaacatgtaaaaagaatttaagggtacttaatatattagctagaaatatgattataataacctagtcactttaacaaattaaaacaagctttagggttagttttacaaaattctgtaattattagggttagttccaattcaaaactgacactaaaagtactttattaattatataatcgacactatcgagtctaagcgtcaattattgacattatcgatttcaaaactgacacattatatatttacacgaaaacacatcgtttcactttatactcaacatatcagtaactaatattagcgtcaatattttttcaacagacacccaactaacacctttataaaatgcataattaatgaccaaaaagtaaagacatattttggtgtagtgaattagcaaataagtgtcacaattagaacaatttcatgcacacaacacatgttggaaataatttagaaaaagttttctctaaaaaaaagaatataaaaagttaagtgtataattaaaaacataatttaaacatatatattatataatttatttttgtattcgttccaaagtttttatacaaaattaaaaatataagcatatacttttgagtaataatagtttcgcatcatcatttactcaaaaaagttattttaattaattattttatactacttatcatgatatgaaaccctcatctattataataataatatataatcaattaattaattagttaattaattaattaccaatgcaaatactcccttaaattggggttgctagggctaggagcatccggatccaccatgacctgtaataattttcaatatatgacattgatcataatataaatagatgaaattattatattatgaatattgaggtaattaattaaattaattaatttaccaaagtgtagaaggtccttaggtcatcaccaccaatatcaacacgaggttggttaacaatttgggaaggtttaagctcataaccattgttgacctctctattaccataactcactctaagagagactgaccttgtaaaaggatccaaaacatctcctattactctaccaaccacaagagggtccctatctctagccattcttaattaattattattaattaaataaaaaaagaaaaaaaaaaaaaaaagaacaacaacagcactatattgctatactctactactccaaacttgttatatattaatatggagagaagaatccaagtttttcgtggttcacattcaagaggggacgatctctatttatattattattgttacacacttttcttatttttatttttattattttttatttttttaccaatttatcttccttttcctcacgttaacatcgctacgagattctgctcttttttcttttttatttttcattgaagatattcttagtagaatttttatttattttatttttgtgatgatatatatgccttcttcctctttcagactaactgtaaagtcaagtatagtggacccattttattttatttttattcgaattcatcatactattaatttttttaaaaaaaaaatgcaaaaatttgggtttctttttaagttgcaaaaaagtcccacggaattaattgtaaaaagtggtacgtactcttatcatgaaatactgataatacagtttccactgttggattcaaattaatatattaccttttaattttacttaaatttttttattttccttttggtctttttttttacttgtggtacttatttaaatctaaaaataacagccattatcatttaacaaattcatatatagtatagtatgagtggtcaagcttagcatcattacataacatatatgcccaaggcacattttctctcttaactttagacctatttgaccaaaccacacatctcctttgtcttgttttatttctttctttatttatttatttttttgagaaaacttcccatttgttttccttttctctctctctcaaactattatatattattatatatttttttacttgttaaaaatttctccaaattaattaaagtatatattcatataccactgcccatttgaaaatatacatatattgtttatatgtatatctgtgcaatacaataaggtcaactgaatgtgttcttattttctccttgttttaagtttggtcttgtttttgaagaaaaagaaaaaaagtttgagtctctcttaagaattcttcgacaataattctcgaagcttgagtagtgccctagctaacaatacttgtactcaagcaccatatctctaacatggtcgaccaccaccacccactaccacaaacttaattaattacactactttttgcaagtactaccatgacccctataaggatcacattttccattatatgttttgtacccataacaacaatcattctttttattgtcaattaattttaaggcattactattgcactggttgtgtctaataacttttagaggtaacgctatgtgatttgttagtgatatt

SEQ ID NO: 37400 - DNA, 1547 bp, Cannabis sativa
agttcatgagacatttttaacgaccttaaaagttcaagagacatgatttggtacatgtcaaagttcaaaagacaaaaatcttaattatactttgtttatataccaagcaagggtgccactaaatctatattattgattccaagcaataggccagcgacgagcaagattcaaaattcaagccattttaaattgtaaaacattaccactaaatactataataaaattgcatcttactaatgattattgatactctataaataattttatattattaaattatatagaattggatatgcatcaataataataagataccttaacaaagctagacactaatgtcttctagtacttctcaaagtttatgtttggtaattttgggttttataggctaaattttgaaaggcaaggactttaaagtcaaaatacgcttaaggcagggattttgttgtgcaaaatagttaattattattattttaattggcactgcaaaaagaagctgaataaagtaaaaacgtgaaggcaaggacgatcaatttcttaagaggtggcggtaattttgtgtgtaaagacatacaattgtaatctgtgtgtggaagaagtaaagccgtcgaaaatggggatcagattcatcttgatggtcaacaagcagggccagactcgccttgcccagtactacgagtatctcaccctcgaagaaaggcgtgctcttgagggtgaaatcgtccgcaaatgtctcgcccgcaccgagcaacaggtctctctatctcccgatcgcaagcaaaattgagcgttttggttttcatatttgacggaatggtgtaggagttgaaattttctgatttttataattgaggaattgaatttgatttggaatactcgaagtaaattctcatgcttgaattttgaaattagaaaaattggaatccctagctgatattacttaatttcatgaccaaacgctgttttgattctttcttcttaatatcggatcctgttaaattctgacattggtttctttatgcggcggcttatgcattattatgtgttttatcgtctccaagtttctgaatctggatcaaatagtgaatcccttggttattgttattctatatcgtattgtgaaacttagattataaaattttgatcatgatgtcgtcagtcattatgatccttgatttgctttgcttgtttatggtttatatctgagcgacttagatatacaagtttatatcattgtttcacaaatcatgttttgtgaagctgacttgtttttttttttttttttatatattaaacagtgttcatttgttgagcataggaactacaaaattatatacagacgatatgcctcgctgtttttccttgttggtgttgacaatgatgaagtaagcttccagatcttttgttattttaaagtgctggcatttttagttgatgaaaatcacatggaatatcaacttctgctgtttcttaatccttcgaacttgaaaatggtagaatcactatttactctcttcagacacataatttataaatgcctgaagaat

SEQ ID NO: 37401 - DNA, 4879 bp, Cannabis sativa
tttgcagccacagccactgagagtggacctccggcagggcaaaccgatgaggaaagtagtcagagtccagggaggaaattcagatgccatttcgagaaagaatttgaaaatagtcaataaagagactagtccagtggataatgaaaggctttcttctgcaactttgagaggccagcctgcaatttcaattaaggataggcgtgctcgatccatatccccaagcttttggagaagacccgctttgggtaagtcttcgactatgacagaagaggaaatcattaagaccttttcctctaggcctcttcctaatgaaaaggataggggggttattgctacaattatgtccaacaatgggccaacctatacccaaatgaccgaaggcccacatgaaaaagtttgcaagtcaagacaaccccattgccatcctgaaatcacacattttccctggcccgattatgcagaggagattgggctagctgaagaacttatgggcccggcccaagtagataaatttgagcctctacctactttgtttcatgaccctcttgatgtcactaacgaaattcatccttgtcctcaaccaagaaaaaggaaaacaagtctgactcttgtcccttatgttcctaaaactgcctttaattcgagggaattctcacaagttctccctaagatggatccattctccccgagtgcttccaactcgacattcaagatgggttctggagcaggatcttcctcgtctacaaggaaggataagcgcaggaggaaggattccaaatcaaccattactacaaggaagacgaagactgagtcgacaaggaaggacttatctgactctgtgaagaatttggaaggtgagatgaatttagtagaagttcgagttgaaagtgtgtcaaattttcatgtgggcgaggaggcggcccttatcaagccccccacgtcccaatgaaaatcctttcttggaactgtcgaggcctcgcaagggactcggcagtccaagccttaagggcttgggatagaaaatacaagcctgattgtatttttctaatggagactaaattgggaaaggatagaatgaaggggattgctagacaattgggttatcatggtgtggaatgtgtttcggccattaatttggctgggggattttgtttattgtggaaatgggatgttagaatcaaggttataagggttttaaatggatactttgaagctcttgtttgggatgataaagaaaataaatggtggaatatatttgcggtttatgggcctccttatgagaatgacaagaggaaattttgggatatgttgtgttcgaaagtggaaaattgtgacgacccttgggtggttataggggacttgaattgtattggaaatgcggaagagaaacaagggggccgtaaggttaatcacagggaccttcagtggttgaacgatttcttggatctctctggtggagtggatttacgagctacaggatgcaagttcacatggcataataagaggtttaaagggggtttagttcgtgaaaggctggatagagctttggcatcgactgactgggtcaacacctatcctaatgcaggggtgcttaattttcctataactgtatcggatcatgctgctatcttattggactcgttcatgtttaaaagcaaaggatttattccttttcgtttctttgaagcttggtccagagatagcacctgcaaggaaatcattgaacaagcttggtgttcttcggggtccgaggtttcgagacgatttctcaaaaatttagacaacactcgtaggagtctccagacttggaagaaacaatgctttggagacatggagaagcttatcaattccctgaaacaacgtataaaatggattcaaagccaagactgtactcctgcccttggtgaagaggaggcggaaattcaagaaaaattagctgaggcttggcagaaaaaagaagatatatggagacaaaagtctagggaagtttggcttaagctcggggacagaaattcgagtttctttcatgccgcagctacagttagaaggcgaagaaatcagatttggtcgatacaagacaagcaagggaaattatgggacaacaaaagaaagattggtaatatagctactgagtattttattgatctttacaaggcttcaggatgtgctaccttcaataatgatgatagcttaattgaagaaaaggttgataatgagtctaatacttctctggtgggtattccttctgatgaagaaattaaagatgcagttttcagtcttcatccgttgaaagctccgggacccgatggcttttcgggatgtttttacaggaagtactgggatttagttgggcagagtttgattgcagttgtgaaagagttttttgctacgggatctatggatgcaagtttcaatcatacctttatttgtttgattccgaagattgagcatccggtcaagatggagcaatttcggcctataagcttgtgtagttttcactacaaggtgattgcaaaaattttggcaaatcgtcttcggcctattatggataatttggtttctcctctccaatcggcttttcttccaggtcgttggatagctgaatcttctatattaactcaggaattggttcacaaaatcaaaaggaagaaagggaaaggaggccttatggcaattaaactggatatgcataaagcctatgacaaaatggaatggggcttcattgatagcgtgctacaattcaatggttttgacagtcgggcgcgaaaacttatcatggaatgtgtcacgagtgtgactttttcagttcttttaaatggcagccctctgaagaagtttagacctcagaggggtcttcgacaaggtgacccgctatccccgtacattttcctcctttgccaagaagtgctgtctaaacttatcttgagagctgaacatagaggaagattacatggtatcaagatttcccaagaagctccagctatttctcatttgatgtttgcggatgatactatcttgtttactagagccaatgtcaaggaagctgaggagattataaattgcttgtcaatgtatgaaatgtggtctggtcagtcttgcagcaaggttaaatcaagtgttctaatttcaaacaatctgccatcatccaaaatagaggacactttatcagccttgcaaatttccaaagcaacgggagaagagaagcatcttgggaacccttttattttcaaaaaaaggaaaaaagatgattacaagaagctcaaggaaagtatgaagaagagactcgaggggtggaagatgaagctgttatcgtatgcagggagattagtcctcattaaatcagtggctgcttctatgcctgtttacaacatgtcaaccaataaagtccctatctctgtgtgccgagagttggatgctttagtgagaagatactggtggcttggtcatatggagaagaatcgttttcttgctttgaagtcgtgggatactatttgtcaaccaaaaggttctggtggtcttgggttaaggagatttgaagacatgaataaggctcttcttgcaaagttggtctggtctttgggtcaaaatgagaaaaaaccgtgggttcaatgttttctaaaaaagtattgcctctaccagaacttttggtctgtttctccaaagagtagtgattctttcttttggaaaagtttgttgggaattcgtccaggtgtgcttcaaagctcaatggctattgcagcttctggttcatcaatagacatgtggattcagccttggatcccttggatgaattatagggagttttgggatacgatggaagccttagatagacacaggataacagcaagaactttagctgatatatcgattcatggctcgtggaatggggagttagtccttcaaatctttggtgaagccctgggaaaaaagatttgtgaaattccaaggatttcatcatcgcatactgatctgatagtgtggagagaaaagttgaatggaaatttttcagtcaagagtgcttatttagcaaaccagagtttcagatttaattcaaagagggatatttggaaatggatttggcacccagcagttcatccgagagcttcgatggtgatgtggagatctctcaatggagcacttcccactagggataaactgccttttattgatgacaagaattgtttgttatgtggaagtgaaatggagacctgtctccatctttttaaagagtgcagtgtcataagaaatctttgggctttaggtgattttcctgtttactgttctaacattccaggggacaacatggtggagtatatagagaacatgttaaccatctttccttccaaggataggggatccataatcaattatatgggttctttattccattctgtttggaatgaaaggaacaggttggttttcaagggaagtaaggttttgatcccgcctcttctgcatcagatttcaaagcagtggttggattactgtgattcaatgagagcttccgtgagttcagaggtagttcctttggggatcaaaggcaatcaatcgaatgctaacatcgtattaatgacagatgcttcgtggaaggaaggtgtagcaggtcttgctgtggtgatggttaatgtttcgactggtatgtgggcttacaaggtaacaaaggcttcggcatactctgctttggaggctgaaacaaaagctatttggctttctctagattgggcgtacaaagaaggttggcacagatgttatgtgctgtcggattcaaaggtggctactcaagccttgaatggtagaaggtgtatcccggattggcatttccttaatctttctttttcagttttagatttaattcagatgtttagttattgtaattttc

SEQ ID NO: 37402 - DNA, 5973 bp, Cannabis sativa
tttttttttttttttgaaaacaaattccttcattcattcaaaacgtcaattacaaggattaggcaaatcttgcaaaatagcgagatttgcacacgggggattaaccccaatccacatagcactagctttgttcatcaaagcgtaattggctaatacatgcgctaccttattagcttccctatatacaaacaacagacccttaacattagcataggacaacaaatgtctaatatgatcaagaaccccatcaatgtctctgcagctttcctccttgttttggattaattggatagcttcaagacaatccgattcaagatagaattgttgtacacccctctgtataccagtctgcaatccaccatggatagccataagctccgcatgaagaggctgatactcacggtgcagaatagtagaagatgcataagaaacacacccactactgtccctaatcacgcaactaacaccagaccagcccctacccctcttaacaccagcatcaacatttattttccacacaccagcagccggcagtacccactgtgctccctgcctcttccccggattgttacctgtaagaccatgaccccgatactcttccatgtattggacacaccactcaaacacctctgttgctttcggctgaatacccccatgcttggtattatttctaatgtaccatagctgccatgataccaccagaaacaattcaaaagtttccttctcccaagccttagaaattctcatcaaaaaggcaagaacatcttcacttccctgccttttaatttgatgttgtatgccaaatctcttccaaacatccttgttagcatggcatctccacaaagcatggaatatgttttcccttccaccattggagcatctggaacaccgcggatcaacatccatacctctagaggcaagagccgcatgagttggaagccaagaattcgccattttccacacaaagtgtttaactttgggagggagtttaagcttccacatacctctccaccaagccatcatgtctttttcattcgattgggtcacctctttcctgagttccatggccatacgatacccactcttgactgaatactccccattctttgtgtaatgccacatgattttatcttctatgtcccaccccgtactaggcaacttaagaatgatatcagcatcctcctcattgaacacagcccgcacaaactcttcatcccagcatccattcggcctcttcaaatcgacaacatataacccccccagaatacttggcttgtcatatatcttgaaatgtcgtggtctcggtagccaaggatcctccattatacgaacacaattcccattaccaatacgccatcgatatccacccaatatgactttcttcccccaatataaactcctccaaacaaatgaggcatgtgtaccacatttcgcatgcaatacatccccattcggataatagctagccttgagaacacggctacatagagatgatggataacggatacatcgccaaatctgtttagcaagaagcgcttggttaaatagctccagatcgcggaatcccaatcccccactttccttcggtttacacagcaccttccatttgcaccaatgtatttttcgatctttgtccgaggagccccaccaaaatctagcagccatgcggtgtatattattgatagtgctcttagtcaatcgaaaacagctcatagtatatgtaggaatggcttgaacaatagccttgatgagcacttctttccctgccatggaaaacatcgagcccttccaccctcgcaacttattccacactctattcttgataacatcaaagagttgttttttatttctgcccacaaaggagggaagacccaagtatttaccatgattgtccacaattttcatccccaagagctctgcaatatccgtcttaagatccgcttggacagtcctcccaaagcacacttcggacttagaaaaattaaccatttgacccgatgctttcgaatacttttccaggattaatttgaaatagctacacgcctctctagttgcatcaaaaaagaccaggctgtcatccgcaaagaagagatgagaaaccattaatccattcctcccaaacttaattccttggagcattccattagcctcagctgcttgaattaatcccgaaaaagcttcagcacaaaagagaaatagaaaaggagatagtggatccccctgtctaagacccctttgtggtgacacagaccccttgatctccccattaatgagaaatgaaaactgaacagacgatacacaccgcatgactttctccacccattccaaccgataccctaaccttagcatcactgcttttaaaaagcgccactcaaccctatcataagctttcgccatatccaatttaagagccaacttttttccattctgaaacctattcttccgcatacaatgaaggctctcatacccaattattgcattatcatgaattaaacgccctttaacaaaggcactttgagaatccgatataacccctcccaacgaactccgcatcctattagccatacacttcgaaacaatcttataaatcacgttgcataaactaataggccgaaattcttcaatctttttaggcttctccaccttagggattagagcaataatggtgctattaaggcaactcaaatcataattatggttcaatatattcaaacacacctctaccacattagagcgaagttgatcccagaatttacgatagaacaatcccggcagtccatcttccccaggcgccttattcggattcatttcattcacagcgtgcaccacatcttcttccacaaactctagcaataactggtcatttatatcctcagtcactctcggccaaacaacctccaaaacttcctccatctcttcattgtaaacatccgaagcagtaaataaatgttgataataatcctccacaattttctgcaccacaaccttgtcatcttgccaaatacctccactatctacaagacccttaatgtcattcttcttccgtcttgccgaagctttatgatgaaagtactttgtattttgatctccccatttcaaccacatagcacgactcctctgcttccaatatgtctcttctttgtcaagcaaaccattaagttgcttctcagtcttttgaatttcagtccacacacctggctgctgcaaggcagagagctctttcaagatctttttcagttgattagtctcctcattcatcgttttctttttctttttattccaaatctgtaaagcctttcccactcgcaccgttttcctcttaaaagaatgggccgatccgtcaatataagtgccatcccattggttctccactatttccttacattccacttcctcacaccatgcttcctcaaagtggaatcgactccttcgtttcgtctgtccacacttatctccccccgttctaaccggaacatcaacaattagagcacgatgatcggactcccaccaatcaagaagttgaatgtccgctccctcaaactgattcaaccacatctcattacaaagtcctctgtccagcctctccataacactatcagtactatgcccatcacaccacgttagctcagtcttaatggaactaaaatcaattagttgacagtcatccaacacctccctaaactcctccatagccttagatgctcgtaatcggcccccagttttttcagccaagctaacgatttcattaaagtcaccaacacaaagccacgcccccactatctctcttcgcatcttacgtaacaactcccatgaaaacttacgttgactcgcctccgggttcccatagaaacaagtaagagtccacgggcaaaaatcttttccagcaacttcagcgacaatgtgtccaggagaactagaatcaattcgcaaatttatatcatcacgccataacaacaacagacccccacttaaaccgaccctatccacagtccacaacctctccccaaactgaagcgtattagctatacgttcagcctgcactcgtgtaagtttactctcagccaagaacacaatactcgggttaaattcccgaatatgggattggagagcacgtaatgtccaagggttcccaattccttggacattccagcttaaaattttcattgctctcggcgaccttgctccgcaaggtgcgccgcttttaaatcaagcttcggggatgataaatctacagtcttagaaatactcacctccgcattaacatcgtgactctctactgagctgagatcagaccgccccccagctccaaacacaaaatttccatccaatgaattcccatcagctataccgtttgtctccttccccatcatgctttgtgaaaccccctgaaccacccttgaatgtcgaacactgagttgccgtgctctgttcttaatagagacttttttcctctgtccccgagtagtcttagccatcgtagcaattccaccattactccctccttcatgattgttctcggcctcatcatccccatcaacacccaaaatttgttttcctttgatttgtgcccgtcgatccctacctacttcctcttgagacaaacgattatcactctttcttttttttacctctgcttcatgaccccgagcatctacttcaccctcttgccctatatgcaaagcatcttctctctcctgcccaatggttggtctattagtattatccataaggccctttgaagtagagcccatcccatcaagcccattaatgtttttaatattaatatggcccaccgtagactgcatgggctgttttccataagtcaacacatccccacccataaagtggtcaacataactactttgccccatattctctaccccactctgcatgacacccataaccgtttgagaaactgatgaatgaacggtttgctttctacagttcgtctgcccatctccggccgatccaacaccgttatcttccaaaagtatagaagtatcccggcggttctcatcacctatcgtaacaccaccttctcgctgtccccgaagttgcgatacatccgtccctcctcctgcaaccatatggcaaatcgattggtcgaatgccattatacaattaggggtaggatcatcttcattcaaccaattcccatacttcggcatttgtcttccggcatcgtccaccaccacaacctcctctctagtgcattcagcttgctcatgaccccatataccacacttataacaaagtattggtaatctttcgaatttgatctgaatccatgttttgttcccccccgcaggaataaaacggcccacaaagatacttctcccaataggaaatccgatgcgcacccgaacatatccattaagcataacttgttgagtggtactccaacggatatcggttacttccccagccatctcgccaatacggcgaacatttgtcaaagtaaaagacttcaacggaaagcctctaatacgtgtccaacaatacaccttatccaacttagcatccttccagtttcccgtcgatggccactcttccaatatgagcattcccccatggaaaatccatggttgtttattcaaaatcactttggcatctcctctggaattgaaattaatctgaaccacccccttatccctctgtttatcaacaattttcatcttccagttgtctaccatcttccacattctactaaaaatactctgaaacaatttcgcagtcatttcacgttttgctacaatcctcccaagaagcgtatgttcaccaaactcagttgctgcttcctcattctcatcccaatcctcctcagcctcaactcccaacttattagtcatattcactaaatcatcaacatctccagatcccatagttaccattacccacaccagaatcacactaccacaattacaaacaaagtcccaacgactagagcatcctctcagggtccgcgcgaccatt

SEQ ID NO: 37403 - DNA, 3772 bp, Cannabis sativa
aagcagaggataagaagactatcttactcatgctgtgggcacacacccatgctggtatatatttcgtccatgtcagtttgtatgtccatcccctcaacaaatgctgtgccagaggttggctttgtaagaccgatcatctgttaacagatgtaactattaaaaaaaaattgtgtgtgtgtgtgtgtgtgtttttgggtgctaaagaagcctgccatattttggccttcaagattattcaccagcacccaaagaagaaagaaaatacacatgaaatataaagaaaacaagatagagtagcacttttggcataattatcaggaaaaaaaaacagtaacaataacataacatgtataaaataactatttatgtagactggaaggaggtatggtgactaatgctgataaagctatatagttgtgtaaagcatcaagccacattttgttttaaaacaacctagagcaataaatttcatctggcttctgtcatcatattctttcagtgaatcacatacaggtttgttgtaccaacctattcataatagatttaaaagattcttataccgtactcaccatattgataaaagaagtcttgcctgcaccgttggggccaagcataccaaaacactcgccacggggcaaagcaagtgataaccctctcacagcaaatttttcaggatttccatcccttcctggatacaccttcttgaggttgtcacaaataatggactgacttgaatctgattctagtagcaactgttcaaccctctctcgctgaaaatgaattcaaagcacggttatctagaatatagggaaaaaaaaaacatgaaatagattccctgaaaaacatatatatctttgcatgtcgcatggtgactgcacataatggtagattgtgtcccaccaagaagtttcacatgatattctgtaatagctagtactaaaagatacttatagtttaaatgaacaagttctggttggattaggaaaatcatgatttgaaattaattaataatgtagcctatccatctaaatgatatatctagaactcctaaccatccattttgatcatggcatagattttctctaaggtgaacaagaactacaatcataagttatgactgagtggaaaataaagaaccgaaaaatctttacctcttgaaggacatcaggtctttccatatcaacaaaaactttggacccctgcttttgtaaactaggacttttaagagatgagccctttttcttcccaaggcttttcaagaaaaataaaggactttttcttcttcctgatgacataatttggtccacgtaatatgcaacaaatagcaccagaaaccattctataatcattataataaatacttctgtcagtccatttttgctgtcacttaaatctccccagcgcatgccatcagtccccaagtagtttccattgaaagcgtattgtgcaaactcatataaaccacgatacaaagcaaaacctggatacaactccataacaataacccagccccctgcaacaaccaataaaaagaatatcattgacatgagctaagctacttttctttctatatataagttagggaaaagaaaatcgaaaataatagcaacaaccaaacgaaaagcaaaataaaaaaattaaataaaagaagaaaaactgaatcttcacaaatatgtatctctcacgatagcctgctggacttgcatgttataatatgaagtgcaaccttgtgaatgcattccataatatatctgacatgctaagcatgagataaaagaatcatacatacttaaattatcatggtggaatgatgaaaagcttcaaattggtcaaaattgcaatcccattcctacatcaccaaagtctcctataataaaagaacatttcttgaatcctgtaaacttttcactctttagtgaatataactacaaggaaggtctatctcattggaaatttaaccttcacaaattttatagttttagcacaggatttatctctatgagacaatcttctgaagtgaccacatatcaattatcattcctgaaacactacttattccacagtttctaaaacatgctcattcattagaaaatcaaacacaacccatcagacaaacatgtttttgtatggaaagtaatggaaacttttacttaagcctaaaacaaatcagatcaggttccctctgccataagttgtaatccagcctttcctgacaattaatttggtcaagaagcaagtccaagttgaagaggaactgtgatcaagttggtcaaacaatcgaataaccttcattttaaacttatgctcaagtccaaacataagaaaagcattcattgaagtttacacttccaacatgaatatctgttttgagttattaaaaagaaaaacaaagtacagtaatacatacttatttactcaaactccttcacttacttgggaaagatgcatcttccacaaaaaactgaaaaagaaagcctcccaggagtcccgttgcaaagacacatatgtaacctataactgtatcatcaattcagtaatagcatgcttgttagttaaatcttcttctgtatttaaatttattgttttacagtggataaagtaaatagctaagatcaaacctgaagcagtcttcacattagaaaacattgcagctgctagaaaagccaatgcaatttgcaaattgataaagatgaagtaaaaaacaaattgaatgccgtaatcatttagtgtgaagaactttaatcctgcaaggaaggtaacttcatgtaaggcaactgaaagaaacatttgttctatgatcagtatgaagtggttaacatattacctactgcagagccaaataccacaaaacacagcatgtagactatcgatacggctaagaagtaagcatatgaaatcatccaataaggcccatcaccaaggccatgcattttcatcatgattctcagtttttgttgcttctcataaaccagtgctgtcaacacaacctattccaaaagaacatactgaggattaagataaaattataataattataaaatatataaatatatattaaaacaagtaccatcatgtattgcaatacactaagaattaaattgttagaaaatcattgataaccttaactttccaagaaaatcattagagaaaaatcaggcaagttcttcgaggtaaggtttacattcaaatatcctagtacaattatattgttgacactgaatttgaattgatgaccatcaataaatcccaagaaatctcacatcaaataaagttatctcaaaagaaaaatcaggttatttgaaatgagatggacaagttcaatttccatatcataactgccttcgttaacatatagatcatattaataatgcattgttgcatgaacaatgaaagaacatccactaagtcttcaaacttggaacaaaatatttggatgaataatcaattacttacaggaaatagctgtatgatgacccacgtaaagaagagtgtaccaagaagagatgaaaagtccaatctaagtcggctttcatgtttgggcatttctttgacaaaatcaaattgaattttcgtaccaggccctcgtagaaattgcaggtaggcattggatgcctgttaatatatgaattaggatattactgatattactattcaatactgattatattgaaacaagaagacactaaaaaaattccacaaattaaaacaagacaacaacatcactgtaaaatttgtgactacataccagattcactgagcgtgggacccgtaa

SEQ ID NO: 37404 - DNA, 1899 bp, Cannabis sativa
  modified_base (28)..(41): a, c, t, g, unknown or other
  modified_base (93)..(101): a, c, t, g, unknown or other
tctaattataaaattgaaaagtaaaaannnnnnnnnnnnnnatgtttttgaaaaatattttcatttttctacttttaaaaacagaaaactgannnnnnnnntgttaccaaacgccaccaaaatatgtaaaaaaagatcgtaagattacaacacagtgctataaaatttaaataagtaaatgattaaaaataatagttttattgcttccttataatagtaaagtttttcaaaattcttaagagttcatgttcaatcctttgtaactacacattaaatatttttttttaaaaaaaataaagaaatagaagttgagcatttattcgttgatctcttagcttgaagcaagactttttaccactacatcatacaatgtttattattaaatattttatctatatattgataatttttcgttttcacaatttcgaagcttgagacgcacgcttactcacctaatctcagaactgactataagtatatagcagtgagaatcatcaaacttaaagatataagatatttgtctgaaagtttatttcctcctattctttaactaaaagattactcagtgcaaaataactaggaatttattttcaagcttttggaattttctagttgtttgctttctacctagaaaagagtagtttatacacatgaacatatataagacacataattatagtgtttagaaattgaaccaccatttgaaattcaaatctaatgcaccctatgattgttatagagccttaattacttgatgttaagggaattaataatgaaaaagatttgagttgttacattgtagcttcacctactagcaagggcctaaactttcacatctaccctcatattttaaaataaattaatttttttagtgtctatatatattttttggatgaaaaaactagaaaatttgaaagaaaaataaaacaaattaatggtgtatagaaaaaatgaagctttaaggaaaattgtggctatatttttttgttgagagaaagatagacaaaaaagaaaaaatgagatatgaaattaggattttgtagacccttgtcatcagacgtggacctccacgtgtatctgatatgtggctaggatagtggagacctatgtcttcagttattgcaaaataaccgaagacataggtatgcaatttttttttcttttccttcttacttttatcttcggtttttattttttgtataataaaaaactgaaaaatatacaccatatttctagtagtggacattcaaaaagtcacaaaccgtttcgctagcttcgagtgtcataggtagtaaaatgatgtgtacatttaaaaattaccaaaattaattttatagtgttactcctaaacaaatcccttgtgtaatagacattaaaccaacatggaaatcatcaataaaatgatataatgtgtatattttttgtatttgactttatgaagtacatcacaatcacattacacaatatattgtcacaaagttgtaagagtactaaaacacacctaattaatatatagtatataatcaaagtagagtacttatttatacacacaaagtgacttttttttttgtattttttcttcttggcataattttgacatcatatgagtagaagttaagttaattaatattagaaatccttaaatggtcaatgctaggttttcaatcaagcccttttaaatgcacatgagaaacataatctttcaaagtggtattgttataaattggggaattttcttgtgataataactctttaattggtctatagagtcttgggctcatatttgtaacgtccccgcttcaaccttccattggacccttacactcacggactaatggctcttatacaattcgtcactctagctgcttcatggactgaagactgatcctacagaccaac

SEQ ID NO: 37405 - DNA, 4076 bp, Cannabis sativa
tataatcataaaagaatgacctggtgtaaatttttgttcgcaagttttctttgcttcttagcagatgatgtaactcttcttctttcattaaacacaatgaaggaatcaagattatctgttaaatcaggccactacagttaggtttgcataaagtaccgttgacaaaggaagaggtaggtaagaatgatcaactagataaacaatcatataccttccacatccttagaacgttgagatggaaaggtgttaaaaaagttatcagcaatattttgcattgtgcattccagcctaccacccaagacactgaaaaagatccactagttaggtgtcttaacatttatcagcagtagacactcacattgtaacttgcaattatagagtgcaatgaagttttcgaataaattattcaaaaactgaatggtataatgttcgttaattatccttatttcacaaatgaaaagagataattgaataaatttcagcatatattgcaaagcaaacaatatgcacaggttttcagtttaggtggaatcaatcataaataattattgttgattgcagaggatagttatataagagaagatgagagaataagtacctgtgtggtttcccaaaatagtctacaaatgagatttgctttttcgtattgagcaccatgccaggtaaactgttactgttattacttgatccaactgattctgcagaaagtagatccacatacaagatgtttgtattcgcagggaactcggcctgcaaacttttttgtacaaatgaaattatttctcagaaattttttaatcatatgctacaacattaagctcattagcatgtactatagcaccaattcatcttaatctaattacatgtagatactaaaaacttttaagagatcacatacacacacacatagtgccaatgaatgaagttaaataactacgtagcaccattttatcattaacgtgtagaaattaataactatgaaaaatctcatttttctatattgggaagacattcctagtttaatccgactgaccccttattacaacctgattgattatgccaactttataagtgaaccagactatacctattggttgaatgatgtccatctgcaatcccaaacttttcaaactcagtatattcaatgcatgataaaccataggcccacttcccatcattatttttcttctcaataagaacattaattccttctgtagcttccaagttccgcttacaggatgcaaagcccaatttctgttacatgttcaaattaaatattacgtaaacgaaaaaataaaataaaaaggaatatcttaaaattggtatgaaccaacaaaaacaatgccagcttctcacagatcaagtacctattgaattcaaagagaagagaagataaagaaaacagccatgatgctatacagagtttcaagttcaattcttttccttttaagtttcttatcaagataaaattatacctttccttcatgtaaaccaattcctgctaatgccaagagggtcaaatctgtggctgcgacaacattactgcagaggttcaccatcattaagagtagaatatatgaaatgttgcattaccattatgttactaggtcatacctgacttgtcgaacagttgctccttttcttctgtgatcatagaaccatttaaaaatgcctttgtcatttgcaagtttccatattacaccatgaccacccggtttgcatacaactgaaaaaggtttgctaactaaccattggccatcttcagcactaacagctggaacaagaggctggaaattcacaaacttccgtgagcaacaatattcatcaatgcaaacttcctcaaaagaagtgtactacatatcctcatagtgatccaataaaaaaaacctgttcaaaaagttggaatcttgattgacctcttccaaaccatccaagcttttcacaaagagaagtgatgtgatcatggttattctttgcagaacttgtcatgattgcaaccggggtgatgcattgtttcccataaatcttgtagtacaaaaactctctcgccttgaaagggaaaaaaaataacaatatgatggtgtaacttaataacagagcatgcactgtaatgctaacagagcattcactttagtgctagtcacattctaattaatcatctaaagactaccgttggttggaaagaatgaaaacaaagatttaggaatgagaataagaatagaatggaataaaatttaataaacataatatatttcataaaaaatataatttttttatcatttccttggactttcttatttttaaatgaaatagtcactctactaaaatggtgaaaaaattattctattagaatgacattccaatactacaaaatgcaaacaaaccataaaaatagaatgaaaactaaatattttccatccctttccgttccattaccccaaacaaaaacactcatggtttcacgtttgacaaacagggaactatacctgaagatctcttattagaccttccaacaaagtccgtccaccataaggaagcatcgcagcaggaaggcattctcctgtgtcaggatcaacaaagccaagccggtctgcagcacctcccaaaggataaatttcacctaggtatggcaaaccctaaaaaaggataagatattgcagttcaagccaacttgtggaacctcgtcaatttataaaacacattaaaaactaccaacctcaattccccataaagcagcctgtgatgcatactctgtattttgagaaagatccactccattaggagaatgaatttccaaaagctggcactccatctgttcatgtttgtgtttggaccttattgtagtttgtgtttcaactcttgtctgggcaagaagctccaaaactgttaattggtatctgcaacatttatgtaataagaccattaaaacgaaacgtataccaattggtgtcgacaaaattagaaaaaacagattcaagattcaaatggtatcaacataattaggaaaagaaaagaaaatccatcaaactaattcattttttttacacgacaaaaacaatgaaaacgattaaataaggaaaataccatgaaacttgataaacataaatggtaaaacttacccaataattcctccaatgctgtcataaaactcttcaacgtctcccaaattttttaaaagtttcttcaagtccacaaagtcttcatcacccaatgtcaaaccaagattgctctcatcaactttaccgccattaacgtccaatttctcaatcatcccaaccagagcatagagcgcactcttaattgagctcctcgtcgactccaattcctcatcctcaaactcaagcccgaaacaaagcacgtgctcttgcccggacgcaaccaaacacttaagcaagaacaactcataggaactcaaattcaccgaagctaaaaccctcgaaaacccattcctactggaattaaagaagtcattaactctccggtctctatcaacaactctgagcttctgactgaagcttctagaacccgagagcctggaacgaagagctttaaggcgtgaaatttctcgacgaatgtcaaactcaggaggaggaggttgggccgcgaattcaaccggtgcagtggttactctggtgatcggaaaacgagaaagcgacggcgacaacgacgaatttgaattggagttagagaaggagaaagagagcggaggtgattttgtgaggcggagaaagtagtgagagtgagagttggaatggttagtggtggagaagatgaagtgatttttgtgattgagtagaggagaagagtgagcagccattgttaacggtctctatagaaagaaaaacagaaaaaaggtttagttttgaaaataaataaaatggagaaaaagggataaaaagatatactcaaagcatatgcgaacccaaactttgggagagagagagaaaaagaaagagcctcaactgtcaaattggagggagtttggaccctgaattatcatctttcctctcaccgacctttttgattggttctctgtatttttaattttctttctctaaagattttataaaaaaaaa

SEQ ID NO: 37406 - DNA, 5130 bp, Cannabis sativa
tctctctctctctcttcctctcctatcattctctctctagctttttccccccttttttaaaacattttttttccttccgtaaaatacaaacccaaaagagaaattttttgttaataccctttatttatttttgttgggtttgttttgaattagtctcgttatttgtttgatttgtggttcaattattgtttgactccgattttttcaacactttggaccactgcccaaaaaaaaaaaaaaagaaaggaaaaaagaaagggtctttttatggctcctaatgtttttttgggcattagaaagtttattgtaagatattttaaagctttgggtgcatgattttgactgaggattaatccaatcccattcgggttttctttgctttgtcctaatatctagagcgtggactcttgaaaggttgaatatttgtttcatttcgttggcatttttgtttggttcaaatattttattagtatctgatgttatcttctcatctatttatataaatatatatatattttaataatttcatatgacgaccattctactgcggctgcttatgtctattacaggttccaaaatctatatctttccctgatccagcataaccctctggtttttgataattttctgggattgtttgggtttttgagctggttatgccatcatctgtggatgatgatctactgagtcacagtatcaaggcaggcagatatatcattgctgtatgattttgaagaagtagaggtttaagtctgagggattagtttaataatatcagggaaaaaaatggagcagaaggaggaagagaactggagggaactggtgagaaagatgctccccccaggtgcacctatgcctgaggattcttctcatcttgattattctatagccatggagtatgtgggtccccctgtcgcctatgatgttccgaaagttgagcccctcgatgttaattcgcgggcaatcccaactgcagaaccactatctgaatctagaaggtctaatctgggtcagccagtgattgaaccaattccactgcctgtatcttgtattgctggtgtgacaagttccctggggcagagtagaagggcatcaggaagttcagagtctgttgtgtctgttttgcaaaaccctgatctttcttcagcctcaccttcagcttctccaggttcagtccataatcctccaaataatgcttccaaacaaggacccaatgaggtcaaaagagctccagttgtcactttcaatactgttgatagatctgagaggaaagaggctgaagtagagaagccagttgttcctgagtatgttggagttatgaaagagaagaagaagaagaagaaaagtagaatatgttatcgttgtggtaaaggaaagtgggaaactaaggagtcttgcctggtttgtgatgcaaagtattgcagcaattgtgtgctaagggcgatgggatccatgcctgagggacgaaagtgtgtaacttgtatcggccagcccattgacgaatcaaaacggttaaagttgggtaagcattcaagggttctctccagattactcagtcctttagaagtcaagcagattatgaaggcggaaaaagaatgctctgctaatcagcttcgaccggagcagctgatagttaatggattccctctgaaaccagaagagatggcagaattacttggatgttctttacctcctcggaagttgaagcctggtagatattggtatgataaagaatctggtctctggggaagggtgagtgtatacttaatagtggatattcaactgaattctttttccattaccttcatgaattggatatgtaagtttcatatccccagaaagttagtaactttaattgtctttacttgatgatattgcaggagggagaaaaaccagatagagtagtaagttcaaacttaaattttactggaaaacttagcccagatgcaagtaatgggaatactgaagtttatatcaatggtagagaaattacaaaacttgaactgaggatactgagagtaagtccttgaccttggtattgaatacatctcagaatgatctcactagcaattttactcataaaaggcctcctaggttattggtattggtcctacttctgttggtccaaaatgcagtgatgatgctcctccgcctatggttacaatgcttccattgtctattccattctcccacttaaaattcttttcaatccaaatattttaaacactagtacaaatgtttgtagttactttttgaatattctttattgttaaatatgtcgaggagaatgcatcaggaaattgcctatacagccatgccacatcttttttgtgtttatattatttagattaaaataaaaattattgttccatccacatgcatgaacacctctcatacatataaaaatgtgtatgaattcatcacctttgatgtcataatttgttgaagggtttgttagaacttgtgactaggtttaagaattttcaacattcaaaatcttaagttggtttttattaaatcatttattaaatttattagagttgttaaattgtctattaattgatcatttttttaggtttagacataagagttgcctaatctctgtggtgctaacttcctttataatatatcagctggcaaatgtgcaatgtccacgtgacacccatttttgggtctatgatgatggccgttacgaggaagaaggtcagaataatatcagaggaaaaatttgggagaaggtatgaagtggaagccatttttggatatttgatttcagagtagattgtttatacttgatatctttatcatactgttttttgctagccaggcgacaacgaggtttgtttgtaccttgttctctttgcctgtgcccaatggtcagccacaaggattaagagacgaggctagcacttataccaccgttcctaattatctggagcagaaaaaggttcaaaagctgcttcttcttggacttcaaggctctggaaccagcactatcttcaagcaggttcagccttttatttataagaaacaaatgttattgaaaaagaaataaaaattggatggcaagttgtcttcaccataaaagaatcagaagttaactggagcagaatgtgattgcagatgtctccatcccaattcaattaaacaaaattgaaacacccttaattcttttatgagaaacagccttagaaacacctggtttttgttttatcttataggaagtaaacatattatcagatattcgtttgttcttgtcatgccaaataatgccagaaatgcattttggagggaactttagtaagaccattacggccattaatattataaatcctactacaaataagtccatgtctatcagaattatagccctagtattttgaattgaagatttgtcttctaacatagcttacatttaatttgcttttcctttatttcacttgaacatctcaccatgaatgggatgatgattgcaaggtttttttatactcttgggtactagctagtagctatcattggttgagttgatgtcaacctcccaccccattaaagatatgccttttgtgtacactcataagtttgtattcgataaacattccttaaattaaatctatctaatcagagataaccttaggcggtaatgtcttgtagagactagtggccaatttgactggtttaggtgaagtttttatggggacggggaatgtattgtactgtcgttcattgttgaaaagttattttaagattcatgaaatctttctttagaatgtcccagtactggtaacacaaattacagaggtataaatcctggtccattgttttgttcttgctattgactaattgccccgtgtcaaatacgttttggttttaatggaaactgttcttacactagaggtttgtcaaatacgtttttgttcttacactagaggtttgttgaacaagttaattcaaatggagtctttgaaggttaaagctgttttcaaggtgtctttgatttttaataatggtgctttcatttttattttgttgttatatgttgatgctaccatctagattgcacacttttgctgctcaagatctctaagactgcaggtcttcttgttgctgtatttaactgtgatgttaattactttcctttatgtaggccaaatttttgtacgggaacaagttcactccagaagaacttcaggacattaagttaatgatccagagtaacatgtacagatatctgagcattttgcttgatgggcgggagcgttttgaggaagaagctctatctaaaatgagagaactaggattctgtgatgaaacagttgaaccaggtaatatttgcatttgtgtgtattagcgtaagtgatatttacttttgtgtggacaccgacacatagaagagaactatgtgtacctttcacatgcaagcacatatctcatgcattggattacctataattcgtctcagttctcatcaaccatattcgctaaagattatagttaataactcagaagccattacttgttttataaaaattatcgtaactatttgagcctacgatcattcattgaaatacagctaaaagctatctcatgtattgttcttgttaatgtggataggggaatgggcaacattctttttcttaaaggcagtaagcacttcatgaattaaaaatatagatgccctaggctcttcacacctactttttttaggtttctatgcttgttgtgtccttgtctataaagttgggagtttcttttaatgagtctatgaagttctgattactttatgtaattttcaggtattcccatctgtcctcagagcagatcgtggaagtctattttttattttattttttgttcggattagatcaagaagtttgatacaactggtgttgtttttttgatatataattctattttaactggattctgagccagatcttcaaaaatatctttagagcattattcctgtgtacagtctatttcttgcagaaattaattacttgaaggaaaaaactcaaaatatttacaagaacttccgtgcgtgacgtcacagtcaagagtcaatataagctgtaggacctctgttcaaggactagcatcttgtatgctgataatagagtgtgaagcttctgt

SEQ ID NO: 37407 - DNA, 1813 bp, Cannabis sativa
atgttgtttttttgttactttcatgttatttttttgtgtttttaaaaaatactgtaaaaatatatatataaaaaaaaactttgaacgtaaaaatatttttttttgaaaaaaagtttgtgattttatgtaattattttacttttttgtaattttaatttgttcatgtgaaaatttatcaagggatttcctccactcatatcctatctattccttgtcatcatcaaagtgccggcttgaacaaaaaagatataccaaaaaagaaagaaaacaaaattaacattgaatcccaagatgtcttatgtattcttgtccttacaaaaaagatataataaaaatcttacataggaaacatattggcatttattgatctctcaactaaacacttttgtcctctaatgttctgtaagttgtgataaatatctcaatactcatttctaaacacacaaaaccataatggctaattggctatggaaggtactactaactttagtactctttctatttggttatattctaaggaagaaaaccaaagggaagaagaagaatcttcctcccggtccaaaagggtatcccctattcggaagcttaaacctattaggcgaacaccctcatcgcgatttgcaaaaattgtcccaaaaatatggtccaatcatgcatattcaactcggtctaattcccactattgttgtgtcctctcctaaggccgccgagctatttctcaaaacccatgatcttatttttgccactaggccgtctcatgagtcggccaagcacatctcatgggagcaaaagagcttactttttgctccttatgggacttattggcgcgacataagaaaaatgtgtactctcgagctactaagtagtttaaaaatcaactcttttaaagacatgagaagagaagagcttagccttcttattgagtccacaaaaattaatgcctcaaatcgcgaggcgattgatttgagcgccaagataacaacaaccaacacggacatgagttgtcggatggtgttggggaagaagtactccgatgatgaattcaatgaaaagggtttcaaggcgattatccaagagggtatgcacttgagtgccattcctaacatgggagattacattccttttcttgctccatttgacttgcaaggcttgacaaaacgtatgaaggttgttaggaaagtgtttgatgaattctttgataaaatcattgatgagcatattcaagccaaagataaagatcatcacgatgaagctaaggattttgttgatgttatgttgagatttatggagtcagaacaatctgaatattgcattgatcgagagaatattaaagctataattctggtatgtacttttcacattcaattttcttgttatatttttgaaactattatgcatttgtagttaaatgatgttaactttttaagtgatttgaaaaattatagtggtacatctactcaaaatatgcttacaaaaaattaattatcgcaattatttaactaattatatttatttaaattgggattcagtgtttttaaccaatcatatttcgatctcttaaaatttttgttcaaaaagactaaatactattttaaactatgagttttgcaaaagttattttttggatcatttattttgttaaataacaaaaaaaaaattaaatttttgaaaacagtataaataagactctaaactgatttttttgtcaaaataaatcttaataataacataatctatatgtgttatgaaaaaactaattacaatttctgatctgtttgttccagaaattgttcaagttagttatatattaaaa

SEQ ID NO: 37408 - DNA, 4855 bp, Cannabis sativa
aaaaaaaaatagtcacatactagagatggaactcaaatcggataagcaaaacccagcataccagatcacatgtcaacctgggtgttgagtgctcattactaagcttcccaggactcgttttggtacttctatggcattcaaaattgcaaagcgggtctattactccattttggaccaagataagaagaatgtcaagagaagaacttacgtttgagcaacaaaactatgtgaactaggtttaacgtcaacttggcgcatggaccagccctaatgtcaacctgggcattaggttcctattttggcctgcagatgctttcgtttgcctcctgagaacacttgtatctttgtcgttgataaaaatggagaaaatgcctgtgagaattctcgggtcaattttcttcttgccatacgtcaaacattaatgtccacatcatgagggccaatttttgattaaatacattcattcatattcctattcttatttctattgttgtgttttcattcgttccaaccaagcgccacctatgagtttatgaccaagtttaattttgttattttcttggttttaattatgagctaaactttttgaattagaaatattaatgaactattataatttgtagttaatgtttgcaagaatgttttaataacttaatatttggatcagtcaatatttatttacattgttgattgatttggtattacttctcaaatggtttatttatcaattaacgcaaacttgattgatgaaattagaatcaccttgcatgacaaaaatagaattgagctttgacatttttgaaattaattggcaataagaatatgttaattaattagaaaattaactcataaaatttttgggaaaaggattatacaagtcgaatccctagtggactagtcatcacattgctttacacctgcattttaccaaaatttgcatattaggaagattgaagaattttagcttgtttcttcatagttttggttgccttcaaatcttccacaagaatagtgggcatctccactaatttgactaatttgccctcttcccacctctccctctctctcaaaatagaattgaattcattttggtttcaagtttcaacaaggcaagaataggcatatagagtatatagctaaggtgaaatccttatgaagatctcaaggaagaaacatgagttcccaactaaacaatatctcagttactcatgttagaaaagccaatgccattcaaaacattgttttcaaagagtatatgagattgctcaaagatgtacatataaaaaaggaaataactcagatcatataagcttagctaaataccagttcatctgccaaacaaggaaacacgatccttttgaactgcctgcgttagattcatatcgaaaagctcgcaccttataggcatctccatctcataaaagggattcttcaagacataatctgtgtatagctcatagatgcttttcaagagatcttccatgtgctgtgtcccaggctctgagaccacaaagaattttgtccctgcaaaaataaaacaatctaagaaattcctagaaaatggaagatgttcactactcaaatttacactaaaaaaacagaactgttaattatggtctaacaaaagcttcaagcaacatttcacttccaaggagaactttacacccctatactttctcaacaaggatcagatgaatcggtacagaaaatatcgttcaccgtggtctatacaaaccatggaccaccttagatatggatcctctcctctgcttgctagatagtaatatggctagacaaagaaccaggctttactaaattaatttagcatcccaatacttgtaagctatagcttcaggtatggtttatcatgttttcacaaattaaagcaaaataataacaagggggctagtagtagtactcaacatgacaaattcagcatgaatagaacctttggtaaatacttcatatttttctctttctgctgcactaaaaattgaacttataactaacaaatttatgaggaaaactatgcatgtaaattattctttaatatcgccccacaacaaaagcaacaatattggattccttagaataaattccatattaagtaagtcattttgacaagaacaattcactggctacccggcaatacaaatctacaacaaaggaccaaatttacaaaatatatttgtaatccccattgtccctattcaatgttcttcgcatatttactgctctctcttctaaacatctccaattaagagatttgaattcatgggaaatcaagcagtgacagcctcaacaaaaatgaaatgtgtatgtttgcataatatcctacttcattacaaactacaaattttcacttaaatccttgattaacacttcataacctattacaaaaaaaaaaattcttgactgtgtctatacaaattgatatgggatattgctattagtaaataagttatcggaccatatatccctctccccagaaaattagcataaataaaaggctcactcacaaaataacaacacaactctacagactcctgctaaaaacaaataattaatgtacccgttagtgattggaagcaatggagatcaaatgtgtcagcttggagaagctcaattccaaaacaacccaaaactggagacaactgctgcgagatagcatgcatcgaatgccataaacttgccactctcaagctatcattggtgtccatacggcctgccgagccataatcctgcaatttccgaaagacacacgagtgaaatatttcaaaaacaaatcagaagcaaacctagaatcttcacgtaacaaattttccatcaaaattatgttttgtcttaaatcccatttactcgggaaacaaatagatctggattgacatgatcatatgatatgatgttattacagtttagtagagaaagtaaataaataataataccttatagaaaattaaacctcctgatttgttaataatatagagactgtagattgctgccatttccaaagcccttccccttcactaggaaacaaattttacagagaattacgaaccaggggtcactgcattaacaaggggagaaattgttagaagaaacaaaaaccagagacttcattagaagaaccaaatttaaaaaaccctaattacacacttggtactctctgtttgtaaaaactactcattttagaaccttgtgttttgttaaaattttagcattctcaaactaccttcattttaatattaatctgattattatattcatttaataaaaataactaaatttataaaccatcatactaatttcaaagtatagaatacaagggaaaaaaattattaattgactttaaaaaaaaataattaaaatatttatttgaaaataaatctagtaaaatgtaattgtaaattattaaaatagtttaatataattaaataaataaatttaaaataaaggcaatccactaatattgtattgcattcatggatatagcctgctcttcttctcattaatacagacaatttcaactgcagcaatattgccatttctatcatattctaatcaaaattaattggaacatctattcaaatcatacccaaatccaagtccaagcatcgaaactaaaagccaataacaaaacaaagtcaaataattcatgcattcaaaattttcatcaactcaagtttaaccattcaagaacccttacatcaaaacaaactgtagtccagaacccaaatcaaatccaaatgccaaaaatcaaactcaataaattcaaacaattcttaaactattccaaaatccatattctcaaatcaatctaacaaaaaactcacaaacaaaatttaaattacagatatgaacccaagatcaaacacctcaataataacacaaatctaaattcaatgtggtgagtgaaccaaaaaaaaaaaaaccaaaatcgtctcaccttgaaaacttagatctggaatctaatccaggtacacaatcatcccccgtccccgtagtcgacaacacaaaactcggcttattcaccttcgtcgccgatgccgttaaccctaaagtacggaacaccaacctcgcaagcaaaagctacctccaactcggcatcacaaggacgacgaccacattgtcgacggcgatgccttgggcttgagaagaggaataatcgagaaagaaaagaagagaaaaaggaaaaaaaatcttgtggaatttatttattaaaataattttatattctgaaatttatatatgataattaataaattacttttcagatataataatcagattaatattaaaatgtgggtagtttaaaaatattaaaatgttaaatgcatcaaaaagtaaattttatttacaccgtataaaatgataaatacactttatttttaaaaaaaatataaatttaaataatttttttttgaataaaaatcataatatctattaattaataaattcgttcaaaacaatagaacacacttcaaaggaacatcacacgaccagtagagaaacaagagtcttttcccaagtaatgagcaacttatttgcagatcgttttacaaaacacaaattgtgaaggcataaaataccgctttgaattgcttagacacacactaagtaatctgctttcaacatgactctatcccacgaatgagttgtaatccactcaatgcttctttaatgccctattatcacagcaatttcgggttgaacacatccaatcttccttttcttgaatacttctactaggggtgttcgcggtgcgggttgtgcggtttttaaccattttttcaaaccaacccgcacatgcggttttcctaattttccaaaccgcacccgcaccgcgatactaaaa

SEQ ID NO: 37409 - DNA, 2013 bp, Cannabis sativa
acttggctcgatattggaactcaaagctaggtctataactttgaagaccaaggattgggtggcttagttctatcgaaccttctaaaattcgagagtttggaattcttacccttaatctctttacaagtttgattatttgctatacattattgcttgccatattacttgcatttatttgattaagagattaattgcatagttttgtgttaaaagttttattttatcaaaattagtttaaatttttaattcacccccctcttgaaaacatatcttgggttaacaccaacaatattggtcacaggcctaagaaatccttatttcactcgaagaaaacatgcaaaccctaacttctacagcagattcagaaacataattaaagatgagaaaccaaagaaacccatgcctggtagtgaagacaaaggatcccatatggtcttcttcggtcctggatagtgcaagtgagcacacctttctcgagaatggttggctaaggcaatcgacaaatcaattttagagtgaatattgtggtttgccagttcactcctttgaaaaacacttgatcactgggggtggatagtttggtagaagacgatttctcagtcgaagagaaattttggggagatcgtcaaagtttggattcattcactacaaaaatctctcattgagctttgctctcaagaaagttcaaactcaggcgaatgaaaatttaaaaatgggaagaagtggtaagtggtagctttcaagaatatttatacccaaaatggttttccacgtgaagaaaaaaagaacgatccagatcatttctccaaaagcacaaacacatcctacagctcgaaagtccagcaatcaagcatgtgaagtatttaatgcccttggaaccgagacataaatcaatgatggaagtgcttttcttaatttttgtgccagtaatcaatagtcatcgaaataaaagtttttctagaaagtgactcttcggtaaacacactccaccactaaatgactaccacatctgatcccataactcaaagatggaagtccaccttccgcgatcaactagcacctggaaagcaataagaatattacttttagcctccacatgtccactcatatggattggggcaacattccacaatacaacacatggacttcaggtcagcatccaaagcccactggtggacccaaagaagataacttgggccaagcctaagtacaacaaaaccttctaggaagacatcttcattcctcactcaagcgagcttccaccaaggacaaccagtgctgcatttttggaaggccaaacagcgtgttcccgaaagcctagcacagtttccttttttatcaaatcgcacagaataaggaattaactctccttaaatatcgaccagaagatcatatcaagctgaaaggagaaactacctaaaatgaagatcaagtaattaattcataattaattatgcacaattataggacactgtattaacaacttgatcgtgttcaacctgcctagtcagcaggcttattgcttcatgagttgggcctcacaaatacaatcctaacttgtttattttttttttatgtaaactcaccactagaggaaaaggaaaactaagtataattcctataaactctataaatactcaacaaatccttcagattaagggttgaatactcttgcaatatttgctcaggcaaaaacaaagaacatatacttattgtattcccaaaggctttctagctaaaatatataataatatcgactcgtggactaaggctctttaacgcctcaaccacataaaaaactttaagtgctgtcctgttccttctctttgaattatttatttcttcagttctaatctcttataattagttttttaaaaatgtcggtaaacaactcagtttcaaaaagatggcaaaaccaattgggaggttctcgccttttttttttggaagttttgtgtatgtaggtattatgtatataattttgtaatgtttttgtgaagatttcaaatgtag

SEQ ID NO: 37410 - DNA, 2723 bp, Cannabis sativa
  modified_base (2662)..(2664): a, c, t, g, unknown or other
ttatttatactattaaaaataaattgcggaatcaagttaaaaaaaataaaaataataataagtatgacaaattttcaagatgctaaacttgtaaaaatatagaggtttccactttcgatcactgtcctttgctccttgacttgatgttgcatactgctgtaacagtgccaaggaaattcaagtttgaaaatgcctgatttcgtgaacccatatgtcatacactcgtggaagatgcatggctatcgactactgatcatcctataactgagaaaatctctcaccgttccagaattttcggtgaatggggtaaaaatttcactggcaacttccaaaaacatattgctgccagtaaaaaaattattaaagctttgaagggcaaacgagatgagtactccattcaaatgtatcaagaagagaagaagcgtttatttgaaattcttactcagaaggaggtcttttggagacaaaggtcgaaacaactatggctgaaagagggggactaaaattccaaataatgctactgtaaaaaccaaaaaacgcaacaatcatattcgtactattcagaatgagtttggccaagtaattgattgggaaagtggggtgcaagaggttatggtatcatactttcagaagctttttagaccatctgattcacaatgggaagatgttgtcaattgtatacaaagaactataacccagctgcaaaatgaacaattgttgtcactaatcgaagataaggaggttctactgaagacagttgcataagctttaccgaactatgcaatgagtgttttcatgttgccaactgaaacaagtagggaaatggagtgtactatgtgtaagttttggtggcagtctaactcaaagaaagataagggcatacattggatgagttgggagaggatgtgtaagccaaaatctaatggtggtctaggctttcgaagcctttatgattttaatgtggcacttctggggaaacaagcttggagactaatcttgcatcctcattctttagtgggcaaaatatacaaggcaaggtactttcctaactgctctttcttgtctgttgaattgggagggaatccgagtttcatttggcagagtattatggaaggccaacctctgattaaaaagggtgctgctataagagtgtggtctggtgcaaacattgacatcgttaaagatccttggctgcctaatgcagaagacccgtatattcacacagtttgtaaatcattgaaggggaaatcagtttctcaattgatgcaagtgggtcaaaggctgtgggattgagaggttctgcaagatcttttcattgacagagatatcaacttaattgttagtattcctcttgacaatgttgatgatgatacttggtactggaaaaacgaaaaacttggcttttactctgttaagaacgcgtacaaagtgctgcgaaaaattcatggacacacggatacagctgcttattcaagatttcggagaaagctttggaacttaaaggtccctccaaaggtgaagaattccttatggcaagcctctacagattgtttaccaactaaaactcaactaagaattaaacatgtaccaatcgatgataaatgtcttttttgccttgctggtcgtgagaccattagccatgttttgattttatgctcattttcgaaagcatgctgggcaggtttatcattggggaacccgtcttctctgcaaggttcttttgtggattggcttcatcaaatgtttgaaagatggagtgggaatgagagatttttgattagtatgttatgttgatcactttggaacagtcagaatggcttaatttggaatcaaaaaagtgttgaagttgctgatgtgttagtgttagcttgaactactcttagggctcatttggaacgaagagcctaccaagttgctaaccagcaaccagccgcagccctagcatcccactgggtggctcagaagaaattcttgctgggcataccgcccaaactctgtatggtcagtcgtccaatccccgatcacaggttccacctgtgggccaagtggtaggcagccaaaccatatctgacaactcatcaggaggggttatacccaataactccgcccagactagcagttctggacaattgaccggccaaaccaacaagtcaatgagacaacctggtgtttcattattcaatagactgggaacagctcatgctctcagggatgacttgaatagaaggaggggtctgaacgaacaatacattcaaccggccacccagcccggtatccgtatctaggatccaactcaaaaagatcttaatgtgacacaaatcagccaagaggctcaacaggttcacccatatatgcaggcacagttggatgaactgaaaaatatgttccaaggcctggccggtcaaaaactcactgatcacgagttagaccgagcacgtgaatcgtcgttcactcctgagatcaacgttcccctcaagttcaaaatgctaacctggaagatgtacacggggaaagaagatcccttatcacatctcaagtattttgaaatgaaaatggatttgcaaggggtacgaggagatgtgcattgcagagtattccctgtcacactttcaaaggcctcacagcaatggtacttcaagttactattggaaattattttacnnngatcttagatctactcacaagtagatcggaagagcggttcagcaggaatgccgagaccg

SEQ ID NO: 37411 - DNA, 1152 bp, Cannabis sativa
  modified_base (27)..(65): a, c, t, g, unknown or other
attattttagaaagttcatatttaggnnnnnnnnnnnnnnnnnnnnnnnnnnnnnnnnnnnnnnngtaaaataaattccaacacaaccctcctcgaacttaaaagcttctgttgaacttagaccccaacccctcaacaaaagacacatcggtctatgatcagagttactagtttgatgagaatagagagcagctttcggcaataaacagagccacgcttcattagctaaacctttatccagcgtcgactttacattgttcaacccccaaccggtgattatcccacgttatcatgtccccctgaatagggttgtcaatgagaccttgggaatccaccagctcagagatgaacggaatgaactggtccctactaatgcccccttcccaatccgactcacggagaacaaaatttgtatcacccataattaaccaaggcccgccatacctatcacccatcttcattcactcaaccgagaaggtcttcttagcatggaaatacgaaggtccatacacacaagagagaagccacgggtgggacggggggttcgaataaacaagcccagtaatattgttgcgggtacaagaggtacactcaaaacagaaaccaagtttccaggctaacaaaataccaccaacagtcccaatacccgacacaaatatatgaatgtaaaagtgaagagaattaagtatacgtaccagtggagcggcatccactttgagctctgagagaaaaacaaaatccggggaccgcaatctcaccagggacttcagcttgagaactgtagaggtctaccctaaccctctacagttccaagctaaacctctcatggctcctgtgaagtagatttgacattctcctccacaggggtataagagtgagcagacacactagaatcagagtcatcaatcacaaaggagccaatcaaatggtttgccttcatgccattcgagcaactcacgacatctgactggtcttgcgaaggatcttccaacaccacctttgtctcatgatcttactcctttacatcccatgggaagtcacggatcaccactgagtgttttcgaagcaacttatagggtcttgagcacacagagaaagaggcttcaaacttcctctttttaaacggggcagttcttgttgggttttatgccc

SEQ ID NO: 37412 - DNA, 1370 bp, Cannabis sativa
tctgtttctttattgatgttgaataaaatagattacattgaaatggaattttatttagggcataaaacctaacagaagacccgctaccagttactaccctaagaaaaatgacttaagaagagaaagaaaagaggaaagagaagaaaaatcacgaagcaaaagatgccatgaaaaatgacacatgcgcaaactactcaattcaagtatgtaaaagcaacatgggaaaaaattctttgccaagtaaattgattaggaatagcaaacagtcaaggaaaggagaatacctttgtaaatggtgtcttcaataaggatcaaacttgaatactcgagctcttaatacaagatcttaaagaatatccactacaaggatccaaatgaatttatgaaagaataaaaatttaataggaaggtatttatagggaaaagaggcaaagttccaagcctttgaatcaagtggcgattgatgaaagagatcattccatatgcccacattgggattcacgcatatcatgattggtcatatctcacttacaacgcggtaccaagattccttatggcatatgtatccctcaaaatgcatgtctcacttttgcaatatgtgcttccaaaacatccagatatgaacatcctttggaatgtaagagtccacgagtacacttaaaaaatatacttgtagacttgggaagcaactgttgacctcaaaaattgactaactattaatatcgggatcatgccagaataaggggaaggtgagaagggaggaggcacaagaacgaaagagactcgcgagacaaaggccttgctgaattttggcctgcggcaccccataaatgagaagagggtctcactaaccctcgtgtcgcgtcacccatcagcaggagagagggtcttgcagacccttgtgtcgtgacgcccgccaacgagagagggtctcactgaccctcttgtcgcgtcgcccatcagtaagagaaagggtccaccctcgtgctgggacgcccgccaacgagagagagggtctcgctgacccttgtgctgcgccgcccctgttgcctcttcgcgttgcgccactcaagcaaagggaggaagtcctcgcttttccttagaacacttgcgatttcatctcttgtttaatcactaccatacttatacttaatttctctatttagtaactaattcaaggttttcggtcctcagttgacaagtttcagtcgtcaacgatatcataagggaattatttagtagtatttcacggacaaaatactagttattttataaaaggaaaatttcattaattgaccctaataaaataccccatttcaaaatttataccctccactaatttatacaaattaattccattattttccaaa

SEQ ID NO: 37413 - DNA, 3814 bp, Cannabis sativa
acttcgagatactacggtttgtttcttagaacaccagctgattaagttgtttccaatgtatattccgtagcctgaagtggacttacgatcgtcatggcaccctgcccagtccgagtccatgtaacccgttagttgcagggttgtagaaggagtaaaaaccaggccaaggtgtatagttccagcgagatatcttaggactcgtttacaggcaccccagtgttctgttgtgggcttttgcatgtattgacttagtcgatttacggcaaacgagatatctggtctggtgttgcagaggtattgaagggcaccaattacacttctgtactcagtcggatttggtaagggagttcctgagttgatggacagtttagagctggcacacatcggtgtggactgaggattggcatctaacattttggtgcgtgtaaggagatctttggtgtatttttgttgattgagaaagatgcagcttgcgtctcgaataacttcaaatccaaggaagtaggtgatggaacccaattgttttaaggcaaattgagactggagagcattgatggtggtatgtatttgagttgaatcatcccctgtaatcagaatatcgtcaacgtacactaataacaagagaagagaattttggtgttgcctgtaaaataaacttgtgtctgacttggaattgtgaaatccccactgtaagagagcatctttgagggtgtcaaaccaggcacgaggggcctgtttgagaccgtagatcgctttattaagcttacacacatgattagggaattgtgggttgatgaaccccgggggttgagtcatgtacaccgtttcttgatgatcgccatgcaagaaagcattattgatatccacttgttggatatcccagttgtgtgtggctgccagtgtaaacatgatgcgaatagtacatggtttaatgacaggactgtaggtctcaaagaagtcaataccgggagtttgctgaaaacctttggcaaccaacctggatttgtgtcgttcgactgagccatcagagttgtatttaattctgtgtatccatttgcagctgactattggggtgtctggtggctttggaactaatacccaggtgttgtttcgggtgagagcttgcatctcaagttgcatagatgggttccatataggactggccaaggcagctttgatgttagttggttcagattcaggggtggacgtggtgagatatatttttggtttaaaaataccaacctttgatcgagtcaccatggagtgtaggttggggggttgtgtaacagggggagggattggattactggactgaggagatgcagtagatgcagaaatggactcagtgatggagtgagtactggtgtgggtagtttgaggagactgttgtgtgatattatgggtagaatgggaatcctgggagtggtttgggggtgtagtgaatgtagggacacgatatgcattgatgtctaggaatgtggagggaggaggagttgtttcagattgggagggaaataattgattataggggaattcattttcgttaaaagtgacactcctagccatgtagatacggccactgctatgaagacacctataaccttttgaagatggacaatagcctaagaagagacatttggatgacctaaaggcaactttgtggttttcatatggtcggagtaatgggaagcaggagtagccaaataccttgagaagattgtagtcaggggcatgtttaaacaacttctcataaggtgtttggtagttaagattggggacaggcagcctattgatcaaataggctgctgagctgtaagcttcccaccaaaagtgaaggggcatattggcttgggcaagaagggtgagacctatgtccactagatgtctatgttttctctcaacacgcccttgttgttgatgagtgtgaggacatgaatttctcttgacaattccaagagtggtgaacatcttgtacagtggttcatattctttgccaaggtcaatttgcacacttttaattttgtgttggaacactctttcaacataagtattaaagtgagtgaacaacatggtggcttcggatttatttttcatgggaaagagccacacatatctagtgaaatcatccacaaagctaagataatacttatatccatcacgagaaggataaaaagaagggccccatacatctgaaaaaattaattcgaaaggcatagaagttttgttttctgtttgtttaaaagaaaattgatgcagcttgccaatttggcatgcatcacagaaaggtacattgttacacttagtgtttggagacacttttgacagcactttagctaaaatgttactcgaaggatgtcctaatcgacagtgccaaacagaagctgtcttggacttgtcttggacaggattactcgaagtggtatggttgtatgctgagggattgactggtgcaagattgggctgttgttgagactttgaagtggggacttgaagtctgtatagaccttcagttagggtaccccgaagaacagcttgcttcgttgtcttgtccttgataagacatgaaacatcatcaaattcaatggttacatgattatgcttggtgaattgagaaatactaagcagatttttagtgagacttgggacatgtaaaatgtcttttaaaactaatgactgatggggaaaatgggtgggaattgaagtgctgccaattttattgatagaaaggttagaaccattaccaactacaactttagccttgcctttatagtctgttgaggtgttcatattgtctgttgtgttggttatgtggtgagttgccccactgtccaagaaccaagctccagatgtatcctgtgcagtgactgtttcagacagattggcttgtggtgtttcagatggagaaaaagatgaagaggatgatccttgaggttgtgtagggccagtaaacgttatgtcaaatctgtgataacacttcagtccagtgtgtccagctctgccacataattggcaaattggcctgttgcctcttccccctcgatttccttgatttcctcgacctcctctgcaaccacgatgaccacgccctgaatttccttggtagccgcctcgattgtaaggattcatattggtgttggcaagattggcttgtacatgaattgaacctcttgaagagtaggattgtctgtgcgagaggtgagattgaccactacagcttcatactcagatccaagacctccaagtatgtaaagaatcaaatcttcattagacaggggttggtttgcagcaactaaagcatctgcatattgcttcattttcaagaagtattcatcgatcgacattgatcctttctttgtggattgcaagaggccacgaatttgaagtagtcttgctctggatcttgttgcaaacagttgattcaagattgtccagatctcggccgatgtttggcaatttatcacatgagcaagaatagcctcagatattgaattcattaaccaatgcataaggaattgatcaaggcgaagccattgattgaaggtgggattaggagcattacctgcaagtgttcttggtggttggggaattgttccaagcaggtgaccatccagattataggctcgaactgcagcaagaactagagacctccatagagtgtagtttgatctgtcgagtcttaagttcagtgggagcaaattgttgtttggtagtgcgactggtgcaacttcttgagcttcattgggttgtgtattttcaggcgcttctggtcgaccggaggccatggctctgataccatacaagaactctttgagca

SEQ ID NO: 37414 - DNA, 7119 bp, Cannabis sativa
agtatcagattttgacattttgtagagcatctggcgctagaaatatgattaagtggttctgaaagtgtcatggttctttggtgagcacacgacgtttatcaccttcgcagccaaaccgaatgtgaaataagccatcttctcccttgtattcagtaatcgtgacggggtatcgaccttgccaatggccagacatttggtcaatgaagcctggtttgtaaacattctggctggtgtgagaaccaaccctcccttgccaaaagggcaaaacctggttggagatcagatgattgtagtgcagcaacttcagggagcgtaagaatagaactttcctcatcagtgagggatagtgtagagtgaagattgtccattacagtattcataaaaaagaaaaagtgataatttagtgcaagaggaagaagccggcgatggaggatgatgaaggaaacattggagggaacagttatcttcaaagatggatttgaaaatagatgaataaaacagttgaaaagagaaaaaaccgttaaaaaaactttaacttccacagaccccaaaagggcaccttccttctcttcgaattcaatttattatcttaaaagtttgatttttattttttcgtagataaattattttaaaagttttgagcatttatatttattattattttttttaaaatatactattatatttttttttatagagttttaaaataaacattataattctaaaataatattatttagttaattaaattatatataatacttttattctaccttcaaaaataaaaacacataacaaaaaaataagctaaacatataattaaatatatgtgatttgaatgtatgcttttttttaatatgctgttatacatctcgagtaattaatgaagattttatttgttgcacaatatttatattccctttttcaatgagaaacttatattatgattataatattaaaacaatttaaaaaagaatgtgagaatacaaatctcaagtaataaaataaataattaaataaaaaaatgcttatgacgtgtaggattttggggaacaaaatctctaaataacagttgattgattatgtatcatctcacaaatatattattttagggtcacactgaaagtctcactgattgccaaatgtcaaaaaataaatcagatcggtgcaaactactctattgttaatattttttcttatttattatttttttttcagtgatctttaaagaattattttatatattattatttttttttaaatttaaggtttagattagtctgacgttctttgaataatttttaagtgggttgttatgcaaaattttaattgcgatttagattactctattaattactatgtgaattttgaaataaatttaaaatgtaaaaataaaaacatcccttaatttttttttttttttttgcaatactagtaggtatctcccgacaacttttatgtagttaataaaatttcattatggagtatgagaaagaacaaaggaattgagagagaaagagaattactatgtattattatgtttaaagattatacaattagatatttatacagaagctcagttagttggaagtaactaacagaggtaaagatcctaactgaattggttaaaactagtacaagctaatgagttgaaaataacagaaaattagctgagatggacaacttgtaatagcccctttcaagatgatgtgtagatgttggatacactcatcttggagacaatattgttgaacggagagggaagcaatgctttggtgaagatgttagccaagttctgttgagatcgaagatggagaatctttagggacccttgctgaatgtcttctcgaatgaagtggcaatctattttaacgtgcttagtacattcgtgatagacggggttctcactgatgtgaattgttgctatgttgtaatagaagaggaatggatgtatattgagtgagatgctgaagtcctttagtaaagcaatgatccatgttacttcagaagttgcattagccatagcacggtattcaacttcagtagaggatcgagagataacttgttgtctttttttatttccatgagacaagagcttgccccaagaacacatagtaaccagaaatggaacgtcgtgtatcttgacaagttccccaatccgcttaagaaaaaaaaggaaagttgaaaattggatggggacaagcttgtttcagcatatgctaagatatttggagaggtatttgaggggaagaaaagaccttgtcctggtgtgcatttgagatactgtaagacatggtgagtggcttgcagatgaggcaatcgaggacaagttagaaattggctgagatgattaacagcgtacgagatgtcgggtcgtggtattgtgaggtagatcaatttaccaattagactcctataggtggtagggtcttgtaatggtttacctttgtccttgctaagttttaggttgggctccataggagtcgaagcaggtttggctccaagataacatgtatcttggagtaattgcaaggtgaatggcctttaagagatggaaattcccttcttcgttctgcctatttctaggccgagaaagaatctgacggaaccaatgtccttaagtttgaacttgttctccaagaaggttgtaaaatgtgtaatggctgattcattgttgctggcaacaattatatcatcgacttctatcaacaacaatgaggatatctggtgttctttttgtgaacagggtgttatcaaatagggattgtttaaagccttcagttttgagtgtggtacttaatttatcgcaccactgtctagaggcttgtttaaggccgtatatacttttgttgagtaatttgcacacaaaattgggtggtgcattatagccagatgggattttcatgtaaacttcttcattgagatcaccatgcaaaaaagtattgttgatgtcaagttggtgtacattccaattatgcattgcagctagtgcaagaaagattttaagggtattgaacttagctacgagagcataagtttggtcatagggaataccttgtttttggttaaagcctttagcaacaaggcaagcattgaatctctcaacttcaccttgttgattgtatttgactttataaacccatttgcatccaatgtctttatggctaaggggaactttgttacagtccatgtatgattttattccaaggcttgggtttcattatccttggcctcgagcaaatgtttgaattgggaggcttctgaataaaagtgtggttcaagatgggactaagcagcaagaacaacagccttgaaatggggatttaatttggcattggagatggattcttccatgggatatgcagctgaggtagtgtgacatacatagtccttgaggtgagggggtttagtgatggttgtaccagtttttgagatgatttttgggggagagctgttgtcaacatgtaggggatcaggaatgttggttgattctgttgaagaatctatttttgtgtgatcctcagggagtttgatttgcatgatgtgcatcaattggttgtgtagtagctcaggtaaggggttggaatactggtgtgatatgttgaaataactggtgtatgtcagtcgtggaattttgagaaataagaggaaaatattctcatgaaatataacttctcgagattggaatatttgttttgtttcaatatcgatgagagtgtaggctttcatgccgtgggggtatccaatggatatggaagcccaacttcttggtgagattttatgccttatggatgagagggtggaggcataagtaaggcagccaaaacaccttagatgttcataatttcgtggtttattgtaaagttgatcaaaggatgtgcttccttgaaatagggcagatggagtcctattcattagataggctgcagtttgtatgaggtaaggccaatagacaaggggtagattggattggaaacacaatgctcttgcaatgttcaaaatgagttgatgtttcttttctaccacggagttttgttgtggtctttctacgcacgaatggtaatgtataatacctttggatgcataaaaagactgcatattgaactctctttagaattatcggatctaatggccttagtgggctttgaatgttgaatgcaggacatgttgtaaaatgtaggaatgatattgtgtacatctacttcagtttttagcatgaaagtccatgtgaatcgtgacttatcatcgacaatggtgaggaagtatttgtatccttcaacacagatgatgttgaagggtccttatatgttcatatgtattaagtcaaatatttgtccagtaaaattgttatttgatgcaaaaggaagcttttttgtttggtaagatgacaaacgtgacaatgttggtgctgatatttaaagaaccagaatgtaaggttttattgaatgtattagaaatgtacatagatgggtggccaaggcgtttatgccattggtctacattattttgaaatggaaagagacaagtagaactagctataggccggggctcttgcggaagaacataaagcttgccaagtttcttagctgtaccaatcaccacatttggaaaaggagcctgtaaaacacatgaattatgatgaaatattaacttgttagtggtattgtcaaggaaagtcgtgacagaaaaaaggtcaatgttaaaaattggaacaaagagcacattgttgagtgtaatgtgcttgtttatattgacaatacctatgcctttaacaaggatattattgccattagggagaataataatttgtggaaaagaaccattatagaagtatgaaaagaaacatttgttggagcacatatggtgagtggctccactgtcaataacccaagtaggagtttggaaagaaaatgagttaccagccatatttgatgcagcaggagcattgttggagtcatcacgggggtctgcttgactcaattgttggctaagaagagagatgagttcttagcattgagtggataaatcaacactggaattggcagcaacatgctcagaattgaaactggcagtggcattgttggcaacagatttgccctttacagacttcttcttgtctccatagcctggtgggaagccatgtaagaagtaacacttatcaacataatggtcaggtttgccacagttggtacaagatgacctaggtttctttaatcgtgggggatttgtagatgtgtaaggtttagcagaggcaacaaggtagggtaaatctcatgaaccaagggttctttgcctttcttcttgaactatcattgaaaatactcgagagaggttggggataggttcattaagaataatctgggccctaacagatgcataagattcattcagcccgattaaaaattgcagaacctagttctgattgtagtattctaggaacaatttcattgctcgacaagtgcatgttatgttaggttaaaattttgttaactcatcccaaatagatttgagttttgtgaagtaagaggtgacagactgatcactttgctgcaatcaagtcaattgagtctgtagctgaaagattcagggcccattgccctcattgaatctttcttgaaggtcatgccacatatctatggcaagatcaaaaaccataatactctgtgctatttcagaggatacagagttgatgagccaagacataaccacgttcttacaatgaatccatgagttaagaagaggaagtggcaggccgaggaagagacccatcaatgaacacagatttgttctttgctgtgagtgccattgttatgcctcgtttctaagattgataattggcatcattgagcacggtggaaaccagaatgagaccaggatgattagctgaactgagaaagaatggactggttacatcctcatgtgctagtcgatcgagcatcgaagatcgtcgaggaaggacaggttgaggattctcatgaacagggtggtcaggggatgattgagctggtgggatgttgtcttcttcggtttgcgattgggatcttgaatttggaacttgtcgaggtgttatagaagtgtgggcaataagtgcagaagtggaatcgggattggatttagattgattatgctcggtggtggataggggaacgccatcttgtgagcgtgtggagggccttgctattgaagaagtggccaagatttcaaatgaaaccatatgagaaagaatataggaattgagagagaaagagaattgctcggtattattatgtttaaagattatacaatcaggaatctatacagaagctcagttagttggaagtaactaacagaggtaaagatctgtactgaattagttaaggccagtacaagctaattagctgaaaataacagaaaataaactgagatggacaacttataatatagagtaaatataaacattaattgaactaggccttgttacataatatatttactagtgcagttaaattaaaacaaataaatataacaataacaattaatatattgttatatataaataaagtacaaaagattttacatttttttgtaactactttaactatttttgaaaactttcccattttgttagaaaaaaaagaacataaactacatagatgtatcaccagtattaaatagatttaattttgataagtaaaattaaaaaatcattaatattacttgacaaacaatagatattaatattattaatgtatgtcacatacattaataatgtatatggaatacttcattatatgtattactcattactgggtaataaataaatttaactataaatattaattttaaacatattaaaccattagattttggtcgatggggaataataaaagaaaaatttgaatttctatgctttatttagctactttaattaaaaaaataaaaagaaatacatatttttacactatatcaaaaatatgtttatatggaaaaatgtttaagtcaaattcaactttttttaacacttttttttgccaaaaaacttattttttattattttttttttcagctgatggatcaatcccagctcatataatgtaaaagtgagaaactttactaattaaatagaaaaattaatcataa

SEQ ID NO: 37415 - DNA, 1418 bp, Cannabis sativa
cccccctccctctctctctctctctctctctctctctctctctccccaaccctatccgacagaaattaaaatttctatttttattgtaagaaattaattaaattaatgccgccaaatgtatgaaacaaactgaattcttttattcttttgtatagaagaaaagaaataaataatgatacccaaaagttgtttcttttccttatctgtcattattgatttatcctcaaatacccatttatctcgctccatgtccaaacatagcaaagactgttcagttccacaaactgagtcttctacacccatacttgaattttctttttgtccaaaggaaggcatcaagttaaacatatggcttggagtaaaccatgtactctcgccttttttagaattgtctttcaacatttgataacaaatgtatattcccattcttactagtttaaacctaatatggcaggcctggcttacttacttttggagaagagctaaagaacatggtgtggaagaagatattgcggaagaaaggctacagttttggatcagtcgtagtgggcactcaccaacttcgcatgatgctgtggatggtaagcttcgttgtgatacttgtaatttacattttttgatttgagttactttgtttgttgccctgtgcatatcttataaggagtgtactgatttagcttttcacctcatttcttctagagctattaggacatgcatgcatcagacgtgttatgtttgagttttaatccaaaagggatagctaaaagcctaaaatggtcaggcatgtagtttgctatgtgggtacttacatagcatttggtatagtttcatgttccctaaatattgtagggttaggcggggatcatagtttcaaagaagaaagttatgtttgagttttacagtttagaaattcatcaagggaacataccatttgtggtgcctcacaaccctagccttgtagtttagttagttcaatgcttctatatttatttatttttccgttgctgcctcaaggaaaagggttaatgatttatttaatcttacttgtggacaatttatgaaggtaattcaaattcattagcattttgttactgttgattgaggactttgaacctgtagtaagcaccacagctactattgtctagtggtagtagtatctttgtgctcttaccgctagttgtccattttcattacatgggaagctggcaaatcattatattgtagactagaataggagcttattctcatgtttgcacaagcttaagattttagtagttagacctactggatacagtcctagacaagtcatatatattgcattttttcttttctttcagcagtttgtttcttctacttattataacgctcttttatggtaagcatatataaattcgagggtggtttattgcagttgagcg

SEQ ID NO: 37416 - DNA, 2483 bp, Cannabis sativa
atagtttttttagggtttaaattattggtttaggaaaaaaattttaagattttctaagtatagaaaatcaaatttccctttagatatagcctctgtgatttattagtgatattttgtaaatatataaaattatatggacttgatatctaatttataaataactacaaataaaaatgaagagttgccttttagcatttctccagtaattatataaagaatatattcatttattatcttctatttttataaaaaaaaatatatttagtactttatcttttcaatgatacttaattagtatctcatatttttaaattgtacatatttgatacctcaaagtaaaatttaattaatataattttatcaaattaaccgttctaagttctatgcaatcaaataattaaatttgactttaaaattcataaaaatttagaaaatttgattgtattgataaaattttataaaaaaaatttaaatttaaagtaccaaaatatgtataattttaaaatacaagagtactaagtattattaaatatagggtactcaacttgtataaacacccaattatgtaagataaatagattttactcttaattatgacacttatataattttatctcctaaattagtataataataattattattatttataaattgtctctcaaactatagaataattacaaattttcttcttttgttgcattttatatatttattgatagacttaagtcttacaattaaaatatgagaacctatttaaccgaaactaattataatgaccttaaacattaattctaaaaggttaattaggatttttattcccccaactttgatatatgctaaatcatgccccctaaacttttaaggtcattaaaaatatccattgaattattgagattgttgaatttaaggacttttatctaattttaataaaacaataacatggataaaagttcaaggggcatgatttagtacatgtcaaggtttgaagggtatgatttggtaaatatcaaagtttggagagtatagtttagtacataaacaatcactgaaataataaaattgaatgaaattagacaaaagttctcaaatctaacaatttcaatagttcagggggaattttaacggccaaaaaaattcagggggcatgatttgatacatgttaaagtttagggaatgaaaatcctagttagccattctaaaattacccatactatttatttatgctattctttttcccttgaattcttgaataacaatattatccttagataagtcttacatcatgaacatgtttgcaaaaatgaacaaaattcaatcaaaaggtcaaatttgtaattatttctttagttcaatttttttcccaaaacaatagttcaatttcaaggtgtaaaaaccttgtattataattttgggagtaaacatcctatttatttttatttcaaattggtaatattttgtaattacactcaatttatatgagtgttgataattaaaaaatgtaattagaatcccttgattatcacatatacactttaaatcaagtaattattttgaattacactaaatttcaatatctttattgattttgttttgtgcatagagatttctatacaaaaatgcagagttaattttggaataataagattaaatatgaacaggggctactgagcataagtaaagaagaaggtgtagtgaaggtactaacagaggaagcagagggtgtaaagttcatgttaacagatggattagatgtgtcccatgaagatggaatgatttacttcacagatgcttctcacaagtacaaatttaatgatttcatttgggacattctagaaggtaatcccaatggaagattgctcagttacaatccactcactaaccaaaccaaagtacttcttcatgatctttactttgccaatggagttacactctcacctgatcaaacttgtctcatcttctgcgaaacccttatgtaagtaaaccacccattctattctacttcacaatattatttcagaaatttttttaagtagggacgtcacttttgttcaaacagttggaatatttaggtattcaataagatttaaatagtgagttgcacgtgtgcctgttttattttgtacgagtgcaactgccttttgtaaattttatttcggtattttaaattattcaaaatttctcgaaaacatgcagaaagctgcttattataactataatgtacaccgtcaacactcttatggtaaaagcaaaagttagaaagctccctataattttacctactcattgattatattatatatgcaggaaaaggtgtaggaagtatcatctgaaaggagagaaaaaaggaactgttgagcctttcattgcctacttgccaggttttcctgacaatattcgttatgatggggaaggtctttactggattggattgtcttcggtaacttaaactataaaaacaacatcatcattaatcattatca

SEQ ID NO: 37417 - DNA, 2061 bp, Cannabis sativa
agctagtaatcttagatgtagaaagaacaaagcaccaaaattagcagtgaagtgatcaagtagccgtatacaacaatgttgtgagctagcttaatcttgtttattgctgtgagtattgttgaaaaatgctaacttgaactatattcaaaagtgaaattgaaaatgttgcacatgaaagatgattcctaagataattgaacaactaagatcatctgaaaaacatttcagtataaatttttcacacacaactattcactcggataaagcttttgcaggggaaaataaatctgtatgtatgaagataaaactaaaaactccacagctattgtattcgtatgagtgtgtgaaatatgcgtgtcacgctcatgatcactgccaaaaggttctgtatttaaagaacaaaatcaaagacgtacgttggttttccggcggccaatttttaaagctgaagccagtctccgaagttgccaattcctaagcttcacgggttcttcttcttcttcttcttcgtcctcatcttcgtcttcgtcatcttcatcaacatctaaatcgtcatctgtcatatcaaaaacccgagcaagttcttcgtcaagcttagcaaggtcttcttcgctaatctcctcgtcgtcgtcttcaccttcaaacaaagaagggtccgccttcttgaggtcttcttctagctgagcgaagagtgcttcaatggcatcttcatctatctcatcctcatccacatttctacccaattttttctacaatggaaaaaatattcaaaagattaaataaaaataattaataaacttaaatttgaattttccattagataaaaaaggggagaaagaccttgttgttctttttcgttagagaagaagatgtggcgggcgtagaattacggtttctacgacgagcgagagtgagtgtggatatggagcgacggtgaggattaggcccaataatcagatgtcccggcggaatgcggcggagctggctcgataggaggtggtcgccgccgaggagagaggcgctatggaggcccaagagaggagtgtaaagcgccgatgctaaacccattttggctcgttcaccggttctgcttttgagtgaggaatatcaacaagaagtctagtctgtctttcctttgaaacgatgtcgtttcacctcattttactaggcaaatgtttttttttttttgaaggaacatcgcattcaataactaaaaaagatagatgggaatcacaaagagaaatttcctcctcttgaaaagtatcagcaacaacacggttagaaattctaacactttttgctaagttgtccacaaaagataaactactacgcttgacaaagaaaaaactacaataagaaaaactcttaattaagtctaaaattaacaaagacaaatttaaaaagttccgattaagaatatatttacgttgatccaaagcttgaaccactacctttgtgtctgataacacatgaacatcctcccatttgttctgaatcgccctagacaaggccaattggatagcttttgcctctacttccaaggctgaggtagttgtagaatgcatatcttgaaagcccaagaaccatcagatgagtttatcattatgacaactgctacagcaatcccctcagactatgaagcatcagtaagcagaataattttagcagtttctgttatgcttttaaccactaatagtttctcaatgattacatcattactatcaccactattagataactcaacccatagctcatgagttttattttgcagcctcgacaagctaataactcctccctcaaagagaagattatttctctagttccaaactactgaataaacatcccatataattaatgatagaaactctatcactaccagggaaggtggaaattaagttttctgcaaaatccatcatagaatgaccaagaatattactactgtaaatatggtactcgcccactagccataaggctttaatcgcatgaagacatgaagacaagtctctaaatcatcaccacacaacacacattttgttagaataattttaccaggatctagat

SEQ ID NO: 37418 - DNA, 2944 bp, Cannabis sativa
tacctcaaaagaagaaaaaataaaataaaattgtagtacctttaaaagttacagttttctggactggtatagttaggtctttgctgctactagacccttcgttcttgtcctgcccgaatcctgaaaatcttactctaaaacaattgtgggtaagctgtagaatgtttatgcttaaaagattacatatttaagagttagaaacaatgaactaccttgtttgcctaaacaaattatccattcttgaaacaaagcttggtgtggaacttctttcttatgtacatggcatcatccataagcaggtgtttaatatttatctgaaatgagaactatggttaggttgatatagcaggtaataggctattattatactagtgtggcggtagagggaaagagccaagtttgggtaatgcgttgcatgcaagtcctgacttgcagcttaagcttctgtggtgaagaaaagtatacattcttttcctttgtgttcagctttttccatgaatatataattatatttatatacaataataattgtatataaacacatattattagcttgcgtattagaaaatatctcagaatatattaacgcagccgttatagtgcttcaacagcaaaaaggtacaacaatcttttgttgcttcattgaaactctattctctttttgaaagccatataatttcttgattgaaatcgtgttaaaactttaagccctttaacagggaatcttttggttttacaagttgactagaagaaaaatcttccaagatcatcttcatatctactatgggtataactttatgagcaagtaagtataagatgaatagtaagtgatgaaaatcttgacaaaataaaagatcatcaactaaaggatcttctatacacacgcgaaggcccttttgtccttgaaaactacaaagacaaacgaatcaggtgcaacacagacaggcgagtaagaatcaacaagaattggctccattaaaggaatatcagatgaatttgtcagctgtaatggagttccgttcagaagcacctcatcactttgaatataaccattttttgcggtcaaatggtactcttctctttgtgatcttctctcagataacttttgaaaaggatagacagagatgacgacatggaagaatgtagaatttgagaagttaatcaagagaagagtaattccaggctgcaaaaaaaaaaaaaagttaagttgatttgagtacaaacaaagaatgacccacaagacgagcatacattggatttgactaaccttattctttgaacaatgggagtaagcacgtaattttggagatccatcatgactggcggcaagtacttcctttcccattagtcggtgccataaaagtgcactgcttaaggaaaaatgcaccaaatggattagatttgaaaccactaagtaattaatgctttgcttaaaatatacttaatgctgtagattctaacccatagtagtctggattgggaacaaaggtggttgtattgagaagaccgtagaaccctccaatcaaggcttgtctgcaatagaccttatgatctaagcttgatgccatgcccagttgatccaaatacctgtttttctctcccctcgagaaaaaatgtcaattgctatttttcaaaacggactttactgtccaaatcattcactatacaaatcaaaagaaagagatggggttttctaaccagaagccatcaacaaatctatcttgaacatttttgcctccactgttataagctccaccagcttctccaacccaagctccggctttaggggaatactttttcacaatccttgagacatttctgtaagtgtgagcaaccttgtctaggtaaactgggtcctgaatccggttaataacaccaggatcaacccctgaaaaattatgggttttgtttgaaccgaatagaaaataagaattatcctcaaattgcaaatacatatgatacatttcctaaaaggtacttggccaaatcatgcaagaaaacaaaagaacaaacttcattatgtcctacatttttattacctgcaccaagattatagatgtggtgagttactccatctactattcctggtccagtggtctctaggaatgtactaaaccatttttcatcatagaaaccagcaggacctaatacttttggccttgttgacgcaattgggtacaattctcttaacaaattttttagcacaattatgtctctaccatattgaacactatttactcttgcagctactccagacccacataactcgtttcctaataacaaatcaaattataaaaagatcaatgctgacccacctcacatctaaattaaaacaatataacttcgacaaaactatctatatatatacctagttcatacgagtcaattttgtaccctttttccagggtgtactccatgagttgtcgagcattttcagggttccattcacctatccataatttgtcttctcgagatgcaatttttccatagagggcattcaaactaaatgtcaccaaagctctacaacaacgagaaaaaaggtgtttctgtttaggtaaacaagtaattgaattcattcatagcttaaaaaaaaaaaaacaaggtatgtagtatgtcatgtcagtataccttgtttggttaaacaaatagttgagttcatcccatctcgtttgggaaaggcaaccattgctgaatccaaacagaccattcttttggagcctaaacttggggcattctttaactgcatttccaacatcgtacactaccagatcttctaacgagcctcccaatcttatcctcagaggattgaatgctgtaatttaagttcaagttagcagagaaatgtgtcagtacaatattatggattagcaaattatttaattatcttgaatttcacctgtaatagcattaacaaatatcttgttctttatatcctgaaaaaaaa

SEQ ID NO: 37419 - DNA, 4665 bp, Cannabis sativa
ttatgaagactcctaaggtcaagagtactatggaggacgtagaagaggaagtagaattctggaggccctcgatcgtaagttatgtgttgggttctaacccacccctgcacattcttgaaggctttgctaacagaatatagaaggagaagatcaaaaaagttaaggtactctctcatggtgtgttcattatcagattttaaagcatggagtatagagatgaagtgttgaatggaggctatattttctttaataagagacctattattatgaagccctgggaccccaacacaaactttaagaaggaagatataaggactgttccaatctaggtacagttagaggatcttgacttgaagtattggggacagagttctttattcaagataatcgggcaagtttgacacccgtaatggttgatgaagtaactcgggaacgctcaagactcaacttccccagagttatgattgaggtcaatatggatcagccatcacctgacatgattgaatttgaagattaattgggggcaaatgttcatgtaggcctacactatgagtggaagccaattacttgtcgacgttgcttcggtttaggccatgccaaagaggtatgcaggaaaaaaggggaggtcaagaaagaatggattgtcaaggaagataagagtggaaaactagagataaaacaaaagaaagatgagaaagatgatgagggtttccaactagtgatgaagggctggaaaaggaaagaagtgcataacaccgaggagacatatactgagaatgctttccaagctttggctgagacaggtcaataagaacatgaaatagaagaggcagaggacaagaggacaaagcacaataaagagaagacaggggagggggagatccctctcttgtcaatggataaatttttgtgctggaatgtctgaggagccaatagtcagcataagcaaaatctgataaagcaatttatttagacacaaaatgctggctttgttgggctcttcgagacaagagtcaaggctcaaaaattgggagccttgtactcaaacttattctcaggttagtgttttacatctaatttaccttggcacaaagaaggaagaattgtcttagcatggaatcctctcattttccaggtaaacatcctaggaagaattgtcttagcatctgcatattatgacagtaggtggattttttagcagctatattacagtgatatatgcttttaatcaaaagcaagggaggctggtattatggaaagaattacagggatacaaaactatagataaattgctaatcatgggagattttaatgacattctagccaaggtggaaaggatagggtagagagaaaaatatcaggctgatatggagtttattaattgcatggaggcttgcaacatggaggatgtcaagtacacaggttgttactttacctggaacaataagcaacatggacaagacaagatatattcaaagattgacataatgatggctaatggtgcttggatggatgcttatcctacagctgaagtgtacttcatgaatgaaggaacttttgatcatgctcctgtaatactttgcttacatcctgatgtgcaaacaagaaagaaaccattttgatatattccaatgtggaaatctcatgcagattatgataggaaaattaaggaagtttggcaagttcaacagggaggaaccaagatgtaccagctggtgacaaaacttaaagaactaaaaaaagttttcaaagaaataaataaaaaggggtactcaaacattcaagcagatatcattcagtttaaaggagagctagaacactgtcagaatgaaatcaaaacaaatcctttagatgctaacttacacaagagaaaacttgaggcaagaaagcaactaattcagagacaagaggattacctgtcaatgctgcagtagaaggcaaagctcaattgggtaaggcatggagatgacaattcagccatttttcatgcaagtattaaagggagaaggagacacaacagggtactatccattgaacaaactgatggatcaagagtcaatgaccccaccaaatttgtacatgcttttcttacctactacattgatctcctgggatcaacactggaagatagaaaataggttaaagcttctgtagttcggatgggccctattctgaatgcacaatatgctgcaatgttaatgaccagatataccagggatgaagtgaagaaagttgtctttgaaatcctaggtctcaaggctccgggagtagatggctagtcaagctatttcttccaggataactaggatttggtggagaatgaggtcggtgatgctgtgctttcattcctagaaacagggaaaattctcaaggagattaattccactatgctcacattgatttccaaaattatatgccctaatacagtgaatgactgtagacctatagcatgttgtaatgtagtttataaaatttctacaattctaatttgttataggctaaagactgtgttaccaagtttgatagcacagaatcagggggatttgtacatgggaggtatattggacacaacatcatgatttgccaagactcatcaagcattattgaagaaaaagcaagaaagccaactgcatgatcaagttagaccttcagaaagcatatgatacaattgaaatggggttcattgaggagattttagaagcttttaacttcccatttcatctcactcagctgattttaagatgtataacaacaccaaaattctctctaatgtttaatggagagatacatggtttctttgcatcaaagaggggactaagacaaggggatcccatgtcccccttcatatttgtgctaggaatgaaatatttgacaaggattatgatgaatgttggtactaaggtacactttaagtaccatgatagatggaaagaattgcaactcaaccatttgagctttgcagacgatatcctcctattttgtaatggagattttactagtgtcttacagatgctacaaggcttgaagttattttcacatacttcaggattgtttccaaatgcaaccatgtctgcaattttttgtagtaatatgcctcagcaagacctcagcagaattttagcaatctcagggttttctcaacaaaccctcccattcacttacctaggaattcctctttgctcaaagaaaatttctagtaaggaatgtgctattcttgttgaaaaaatgactgcaatggtgagaacatggagcacaaggcatctttcttttgatggcagagtagtattgatcaattcagttatattggccactcatgcctattggagccaagtcatgatctttccaactaaagttattaaagaaattgaagcaatttacaaggcttttttatggaaagggcaacatatgttccaaggagcaggggctgtagcttgggacactatctgtcaaacaaaaatagaaggaggcatcggttttagaagagtaaaagagtggaatagggcagcaatgataaagtatgtttgtgctattgctaataaagaagagaactcgtgggttaagtggatacatgctgtctatataaaggacaaagagtggtggagctaccctattccaacaaaatggagttggtattggaggcaattggtagctctaaaaaaccagctatgccccatgattaatactcagcagtttactcaggaaaagtatcaaattgcagcaagttatatactgctatgtcctcctcaagataggaaatactggattgtacaagtatggggtaggttcaacatacccaagcatcgttttatcttgtggttggcacttcaaggaagactaagaacaagggaaaaatcacatagatttgtcatcattgattgcccaaattgtttgttgtgcaacaatggtctagaaattattaatcacttattttttgagtgcagtaaaataaagcaatgcttaatggaaatttcacattggcttggatggggagggcaagccacgactgagctgaatcgtgtctccaagtggattaatcgaaccaaaacctgtaggttttcaaggaaagtgatggttgctggtttagctagccttgtttaccatgtgtggaaaacgaggaatgagttaatttggcaagcaaaggagcctaattgggtaaatcttactgccaggatcaaagaaaatgtaaaacaaatcgtagtttttgtatggcctaagaaagttagtcaaaaggatgagatttggtttaacaatttgtaaatttatgtatagatagacatatcaaggccttagcaaactttgttagggtgcttatagtttgtacaaacattgttgtgagcaataaaaattatactgattcataaaaataaaaaaaaattaaaaaaaaaaaaaaagcaaattattgcaactgtcaaaacttattatttggaatgaggcaccaatttcaaataaggaagcaattgaagctttaaaatacatattgaaagaaataaataatcctagtgtcccttttgttggtaaagtaatagtttttggaggtaatttatgcaaggtattacctgttgttcttaaaggtaccagacaacaaatgattaatgcaagttcagtgaaattttatttattgtccttatttactaagattatattaacagacaacatgggcgcaag

SEQ ID NO: 37420 - DNA, 2674 bp, Cannabis sativa
aaaaaaaatcatctcaaaaattataaataaattttacacagtatcactataattgtataaaataaaattacaaaagagatcatctaacttaaaattcttgaaattctcttcacatcttctcatcatctataaaatcttcaaattttcgaacgataatttttctttataatttttttcccagtaacgaatgggtgacctaaaagcatctttgctgatggtctcttaaggggattagtttcgaaacacctcatcaaaaaatcctttgcctcttcagaaatatgcttacttaattcttcactccactctaatttttttgttaacatatagagaaccattacaccaattgcccaaatatctgagtattgttcttgaattgggttttcacttacacactctggtgcccaatacgccttagtgccttgaatgggagtcatccaatcacccgacatcttcgacaacccgaaatcacaaattttagccacaaaaatattatcttcttctcgctctttgaccaatagtatattctctaattttagatcacagtgaacaattcctttttcgtgaatacacttaacacctattaaaatctcttgtaagaattgtttgatttgtttggactcattgtaaagcggagaatccttaatgaaatcaaacaatgttccacccgaagcgtactccaagaacacattatacaatgtaacttctttatcaatgccattaccacaatcaagaatgctaattgttgtgtcatctccataacactgaataataaaaggacaatttacgaaaagatctagaatcttcttctcattaacgagttcactcttagaaaataacgtagttttgacaaccataggttgatgaaagcgtgcacgcccccttagaacatgtgttgtttcaatcatttcggctaagaaaaccgaaccaaatcctccttttgcaaggagtggacccctaatccatttaggtgcattagggtttacactcttttctacttcttcatcaaaatcaaaaactgatttcttttcaaagtctttaataaaaactgaattttccatcgtttattacttcgagatttaacttgtttattttattttatttctttctagaatttaacttgtttaatgaaaaagtttctcactaatgaaattttcttactcttacgatgaggaaaatacatatatatatatatatacagataaaatatagtcaatgcgaaaaaaatgtaagcttttaaatttaaaattgatctttttttcttttgaaaagaaaccctaactaactttaataagatattttgatttccttaaaattttatatttaattagttcttattagtattttaaaaaaaagtaaaaatctgtattgagattttttagtatctaatttatttggagtcaatttcaaactttcctaatatggaatataatcttttaaattttttttttttacattaaatatattatttaaaaaattaaaaattaatttgtagaaaaacttaaatattatattccattattttataacataaacaaaataaaaatttacgattaaaaaaatattattatatgttgccaatattaccctttccttgacgtgggccataccatagaggttgccatattgtgggccgcgtgtcattaattgggctggcccagttcaaaatgttctaagcccaaaacacaaataaggtcaaaatcacatttctcaatcactaaacagaagaactcttttcatatcgatacaaatttactaacacagcatgaagccttttgttattgataccagggtgatgatgaccaagtctctctctttctctctctttctttctctctctaaaaagatcaaaatacaggatgggaatttgtaacaaattcaaggttatactaattatagaagatgatgatgaagaaaaaaaatcaatgcacaaactaaatccaagaccaaaaattaacaataaaattggcaaaagatgatgatataacttgtcttgatgaaaagacaaagttaggaatagagagagacttacttaaacactactacccttttgtttcaatgtgatcttatctccaagactcaaagcaatgccttgagttttacttcttattcttatgtatccacttagcttaccgtctccttgtttctcgatactcacattcaccaacgcgtcttccccgaaaacactcttcgcgtacaagttagctgccaagaacccgcactccccttccagtgcagatctacaaaaaccccaattaacacccgaatttcatttgaatgaatttcatttcaatttaaacaaagattgagttgagagttcaagatagagaagcttacggtggagtaagacatttcatgtttgttgatttcataatgtggtccaaaattccttctcgttttgaataacagtgttaaccgcaacctgaaataaaccgagcaattgttcggtcagtaaaatttcatgagataaataaattgcaagagtttcagtaaaatacagaaaaaatttattactataatgctcgtttgccactttcactacacccaaatttttctaacctaactgaaagtactccaatcataggatatagtgtagtagtacctccaaaatacccctcaacttctatgaatgttaaaaataaataaaatcttgtcagatggttctctaaagtcacaa

SEQ ID NO: 37421 - DNA, 3513 bp, Cannabis sativa
cttcatatattttaagttcattacaaaagttatattgcattaaactaatgaaataatgaactttttggtttttgatttttggtttttgcccttagtggaatgaagattgaagagtacaaaaccaacacaacaacatcaacaatggagaatggagaagatcatactattgatattgaatcaatggtaagtgacttacaaagaaagttgactggtaataatcttgtcatgtcatcaagtgtcaccatctttagaatcccaaccattcttgctaggcataacaaaacttcttatgtaccaaatgcctttgccattggcccattccaccataacgatccccttcttcaacgcacagaaaggatcaaacaaaaatacttgcttgatcttctttctcgtctttcacataataataataataaccccatttcaaatactcaagctcctttcgattcaatgtggatcagaaaactaaccaaagccgttagtgacattcaaaacgaagcacgcgggtattatgctggtgaaatcgacatgaaagcaaatgaatttgctgacatgttgcttcttgatggttgtttcatcatagagttgtttcgtaagaattcatatcatgatctcattgataaagatgacccaatattcaccatgtcttgcttaattcaatttctacaccatgatctcattttgctagaaaaccaaataccttggcttgttctcaatactctgtttgagctcacaaaatcacaatccacagataagaaaagccttggtgacttgaccttggagttctttcctagccttataaaaaagaaatcccttcgcttgaatctttctgataataaaataccacaaacaaaacacattcttgatctgttgaggaactctttgatttacaattctaatataattgcaaaagaaaagagtaacgaggttcatgattggcagcatatacgtacagctactgctctaagggactctggcatcaaattcgaggctaacaattcagagtcaatattggacatttcattcattccaaaaagaggtgtcatatcaattccaccacttcttattcaagaaaccacagaaacagtgtttcgaaacctcataagtttggagcagtgttgtcccaattacaagcccataatcacatgttatgctgttctgttggataatctcatcgacagtagtgctgatattcaagtacttgagaagaataaggtaattgataactggttgaatgttgatgatgctaccaaattcttcaataggctctacattgatacttatgttaaggaaaactattactacagtcttacgagtgaagtgaatgagtattgtagacagcgtcggcataagtatcgaagaatacttaagcgtgactatttcaaacacccttgggcacttatttcagtcattgctgcctttgttgcacttgttcttaccttcttacaaaccttctatgctattctagatgcatataagggagataattgagctgttcatattacatttatgttggaggtttactcaaattggttttattttcatatttataaatttgtagttttttgagtttcaattgttaattgtgtgaaaaaaagagtgttgagttgtgaaaagaaaagtgagtgtgactttatagtgtggtgagatgagaaagaaacaaaaatgtagttttaaagataagtaatgtatgtttctttgtagggctggtaattttattaagctagtaaacttctttttttgcttatttattatttttctcctttttcccaataatataatgatggatctcttaatttttatgaataattacattgaattgttatacttatatttagagcaattaataaatgggtgcagttgtatgatatcaaatcttgcaattaacaaagctaaccatttgactcgcgcgttaaaaggttcggattcaacatgcacatctcgaaagacataggtagggtgaaatatcaccacagctaaagcgacccgtaataagttaaagtatctccaacaaccttgggtaaaagaaagaaagttgttccttaagagaaggtcgtctcatatgatactcttagttgagaaattatatgtttaaacttatacctattgtttatgaggagaggcaagatttaccaaagacttgctcctgtgatcatcttggaaggtttataatcaggaccaaggtatcttgctaggatcctagtgatcaacttggaagatttgtaaactggaccaagatggcttacgaggaaatctataaaagacatgtatttttcccatcggtgtttgtcccgaggaggaaaatataattattgtaatgaccacatgcttagaatatagattagtaagataattagcactaattaattatattatatggctatatatgattattttattttgtgggcctatttccaagaagtaggcattagggttatattttttaaattccggagattttgttaaattgtaaatgtattatttatgttatgtatgtaatttattatttttgtgatttttgctcggtaatgatagaaatgcgacgacttgtccattagagtcacacaataatgatttagaacctttcttttaatggggtatatttatttgatattggaaatatcgagattagacgaggttgtggtatttgactattttacctttaagctttaatactgtttaaacttggagtaaatggcaaattaatctttttgtccaagaggtaagttttttcttttatgagaatgtagataactccatagctgattattattattattatgttagaattaatcaattatatgattttgcatcatttctaagttaatcaaaatccaaaagaacaaaccaatcccttagtatctctattcgaccaaaagaaccagcaagagcctgtgatttcttcttcaatttttgtggatttgagcttcaattcaaggttttgaagtagttcaaactagaggtagatcttgaacaccgttctatttgggttttgaagatttttctttaagtttaagcatgcaagagtaagaagagatttttgtccgaaactggggttaacttgtgttattttctgagttggttttgctttgttttaagcttgtttaggttgaattcgaggactagttgaattattgagcaagtttaagttcaaggttcaccaacggtaatttttgttattatgagttatagctccttttaatgcttatgttatggggggctaggaatgataaggtatggcaaaacaagtcgacgaatgccccgtatatttttgcatttgctaacagttatcttgctcattggaaagctgttcaaacttcagatttggagccatttctttctggtttggaaccaggagatggggctgaacagtggtgcgttcccaaggctaacgaagtcaaggtaaatgctgatgcttcaatatatggtaataatcaggggtatggatatggacttgtggcgcgaaacgaccttggttacttgctgcagggtatcactcggacgtgtgctggt

SEQ ID NO: 37422 - DNA, 3277 bp, Cannabis sativa
tgagtagatctaaggtcctggtaaaataaattccaacaatcacatcttggatgcaacttttcagttgaattccttaaacaacatcagactgcatgataacattatgccttagtaccaccaatgtgatgcaagaaagagaagaaagtttaagaaactacatccagggcttcaacaccgaagttatcaaagtagggaaagtgtctaagtgtaagtaaaccactttgttgattatcacgttagtgtaaatccaatgcactaataaatcttgagacttaaaatagtttgaagcatataatgatcacaattactttttactgtggtgacaatattataattgtaaataactatatatttagaatttagaagaatttatatattaaacaattaatcatgaaataaacatgtaagcaaaataatcgacaatagtgcaaaaatgatatgccatcttttattgatagcaaataagattacgttgaatttgagttttatttcaggcataaaagctcaagagtatgttaatgatatccttgttataagtcctaactctgatctaatccatcaacttatatcagacttgaacatctcattttctttaaggacttaggttccgtcccttactttcttagggtggagatttctaaagaagctactaaaatgtatctctaccaaacaaaatatatcacagatgttcttgttaaacttcacacaaaagcctctaaatccaactagctcatctactaaattgtctttaaattaaggagaaccatttgaagacaaaatactttacaaaagcattttgggggccttgtaatatctcaccctcaccatgcctattttgaccttcattttgaataaacttagctagtttattcatgcttctactactactcactaggagaggcttgtaaaagattaatgagagatctcaaagggactatttcagatggtctccacttacaccaacaacatcaatctctttgtagtgctattgagatgttgattgggcatcttgtatagatgatagaagatttggtggctatgttgtgtatcttagaggtaatctaattttgtaatctgctaagaaaataacaggtggttacaagatcaagcaatgaaagtaaattcagggccttggccaatgttattgcagaattaaaatggcaggtgtttattctctctaagcttcagttcactcttcaacaacctcctatccgttaggtggataattaaagtgcatcttcccttgctactaactttgtgtttcatgcttaatccaaacacatataaattgatttacactttttcattatggccaaagagttgtctgtgcattatgtccctttcatagatcaaatagtcaccaaaactctatctatatacagatttatatatctcaaatctaaactgaaaacggcttcaatctctttttatttaaaggagaatgttaaccaactaattatttagttacctaattaatgttaaagattagttagttaattagttacaattattgttgcgctataaatctaattcttgattttgtaattgtgtataacaactaatctataaattaaaggttaatatctaatagaagattaagctttgcttcacaaactcttctttaagtatgtttctacattatctcttgtttctttgccatgcaagtgttaagtttctacaatcacaaaagatttatagacaaggagtattggtgacaaagttttgagactataaatatgtgttttatatttgagagagtgtgtgtggagaaaaagagtaagtatgaaaagagaagtgagtacgagtttgttgtgtggtgtgagagtgagaaagaagcaaatggtatattggaatttgagtgaagagattgagatagagagcatatataattttgaagtgataaatgaaatatatttctctttgtgactttgatagttttaccatatccagtaaattattttactttgtttttttttatgatttccctatgtttagaagtttattatttttcccaaggtgtaaactttaatttaaagataataagaaattaaaaccgaaaatctttttatatcgatatcgtactcattggtctagtgagaatactatttttttttgaacaagagaagctgctgaagaagaagaactaaaatcacaagcagcaaaaaagagagatcaaaacaaccccctcttgctaacttctctctgcctgagggcttcttttgcaagaccatgggcttccatattaaactgtcgagggagatattgcaaagaagcataagggaagttggagaagagcaatcgaattcgagagacatgtccagaaagagcagaattgtcttgccaagcactattcactttggaaaccaaattcaaacaatctgaaaagacaaccttaggagacaattgagaatccaaacaccaccttagactctccagaagcgcctggccttcaacaaaaatgggagaaacagcaccaggcaaatgacggcagtgagaagctaatacagtctgaaaaccaagtttgaagatgaaaccggttcctgttaagccatgattttggtcaagggctgcatcaacaaaaagagaaagagtatcaggttgcaggagaggagggtgctgttgctgagccgtacgagaaatggggacagcctcagaagccaactgatctccctggtagttacactgagcagcaatatattcctgtagataagtaataacaaactcttccacattgttaggaataccagatttattgaataaaattgagtttcgagtattccaaatatgccagacaaaagcaatgaaaactggaaagtcctgtttaggaatgttatgcagttcctgaataaaaaattcctttatatcattttgatgataaactaagtaaaactgtttgaatcttgaagatttccaaatggtctttgctttgggaaaaccgataagggcatgggtaacaaactcagcattgttgccacaaatagaacagttgggatggggaagaattcttttgagaaataaatttaaggcacaaggcagaatatggtgaaaggctttccaaatgaaatttttaattttgggagggacagagagagaccaaagctttttccaccaatgttgataagggttggggatggaagaggagggaacatccgcagaagcaagggaagaggcaagatggtaagcagatttgacagtgataatgccagaggggtgaaatccccaaataagagaatcagagaaagttggatccaggggaattttgaggatactttccact

SEQ ID NO: 37423 - DNA, 4029 bp, Cannabis sativa
cagtggtattagtgtataaatgtgttattgtaactagaaaactcaacccctttagttgtaaatctgtttagatatactcaataaaacagttcttatatattctttttcagttgtgtgtttatgtattcaattggcattggagtttgtttgagctttgaggattaattgttcttagatgttcattgaatcatcttggtgtgtgagattgtcactgtcatctctaacaacttgttaccagctgtagcctgtagctataaaataccactctttataattaatagaaaacttctcatttcattcttgtttctctttataattaatagaaaacttcttttataattattttatccaacttttataacaatggaaggaagaagtaaaggaattagggtttactttctttccactcaatcaatgacttaaaaacagagtttagcttcggatacctttgtggccttctctgtttcttgtccacggtacagatgagttttttgtctaaatctacatttgtttttttttattattaaatactttttacagaaacttccaaataaaatattacgaacaaattattctaaatagaaaaatatagttttctaaagactaggtctcataagtagatgtgaaacttgaccacaacaagatatgttaaaataactaagataaagaatttctttttttacttcattagtacattttgttacagtcacatgattaattagtatgagttttcatcccaaagtaccccaaaaaacagttaatatgaccaaaatgaccctcgtattgtgcaagaacaagaccccaaataaaagatacaagcatttatagctaaattttgcaaacaacgagaacatcagattccataatagctcacttctagctaaaagggcagttagagaaagatgtcatatgtattgatgaactaatataagaactgtggccgtaatttcattgttttctttttcaaagtccttttctgcttaccttgtacccagttgtttgtttgtttagatccaaattgttttcatgctcttatcattatgtgcatgcttcagtactaattaaactttctatatgtcccaagattttgatcaaacaaattgtttgtttattcttcttgactttcctaaccccccaagggaattggatatatataaatttaaatacataaagaataaaataagaaagaaaccagtaaaaatgtctttaattatatattgttgttcaccaatcaccatgatggacaaacactagaaagtaaaaaagcttggtcagtagtagtaccaaatatttcaatattcagaggtaatattaaaaaaaaaaaaaaatcttaccctgtattattgcataacaattatttttttccatgaaagtcaaaactaaactagagacatttagatacataatattaatgtgaggttgaggtatgtgtatacaaagttataaattataatagtatataactgtgacacatgcacaagtgtaagagccattcagtgatctagaagatttagtttgataaagtgtgtgtgtgtgtgcatacatattaagtcttcgattaaatgattgatattctcttatatttgcaataatactatgtatcatccaaggaatattgaaattaattctcagcagtgttgataacataaaatgaaaacttagctatagccgtagaaattttctttgaaataaatgatgaacacaagaatgaagaatatataattgttaaatgtttacaatcaatcaaaatcaaaccacgcaaaaagacacacatataagcagagagtcacatgagaataaataaattcaaaagcatcatcataccataggagccgtggacatttggcaatttagtgagattttacacagaataattatatagatcttcattccatgtatgattaaaattgatttgtacatactctagtaatacggagtatgaacagtaacaacaaaccaaattgttgaccaacttagcacatggccgctcagatttatttaagtatatacaaaatccaaacaacaaagtacaaaaaaagagtcgtttggtggtgaaaaatagaaaagagaaaggtaataagaaagaaagtgaaattaataaattctttcattgcgttttcacttggtcacttcacgggtatatatattaatgtatatatatatatatatatcctcgttgattttaattttgtaaaagcttccaattatcaaattcctcctaggcagacgtccaaggaacaattccaaagcaatacaaaacaagtgtctgtctttatacatggccccatatataaatgatagatgcatggctagtactgtggggaagtcaccttagtcagaagtcccacacgaaagggcactttagaagaaatctaatgacaaaatttgtagaccctttcgcatgcattaaatgcaaagttttgtgactaaaaaggacttgaggggtttccttttctgggccaaagtccaactccttggagacaaatcatatagatactatgctttgttcataatcgtaagtcagtcttctatcaatttggtttgtagccaatggcatattattattcttttctttcctaaccagcttttgtacgaatataatatgaatagaggagagaatttaatttgtgacctttgcttattttctttctttattatctcatcgaacgacaggacaattaatgcacaaacaaaatcaatggaggtgatgagaattttggaacttgggaattatgcaaattaaacgaaaattcaaacacgtgacaaagatagaaagttgggttttgctaatcgggcattatgtgttatttttacttaataaatttaaggaaaaaaactcatagaaagtcaattttggattctatatttttcaactttttcgtgttgattaatagacaacaatacgattcacaccatcacccaataaattcagaactgtggatgttttgtcggatgtatacaccacgagctcacattttagaaaattaattaattaatcagttaattaggagagtattttctttgaaaatagtaatcagcaggtgaatgaatatatatgtattcctatgcattggtctaaatttagtatcaactgttgctactattaaccaataatgacataaaatcttaagttaaagattatgtcactgttgtaaatcttttattataaatcaataataggctaaaggcaatatatatctagtgagtgagacaaaggtaataatgttagagtgtagaggttatagggagccgttgtcattggagccctgaataaatcaaaaatggcctggcttaggatcctatatatatacatcacctatgataggtagatggtccacacctcatcctaccacacacacaccatttacatatataatatcatgttgatagactttacagactatcgatgcacaatattatgactaaaacattaatatatttcagtaaaaacactaaatctgtaagagtgtttgtttacatgataaaaatatgatagattttttcatcaaaagtaaaaaaacactagtcttcaaagttagcgataagtcactcacaacggccagctgctttgctttcaagttgaaaaatataaaagccgcacagtcttgaagtatgcaaaaacaagaatacagaaacaaaaacaacaaaaacaacaaacaacaaaaacccctgcttaaccccgaatacaatatttaatttataaccaacaaaaagaaaagcacggcattggttcatgttatcttcgccttggaacttaccctttggctcttttctctctactctcgataccctactctcaccaccccacccctctctatctctctctctcttccttccaacactaaaaaactttctcactaaccaaacaaactaaaaatattaataataataaccaaatttctctttctctcccttctctttttcttagaagtcaaatttactaaaccccacttcactctttttactccactatatataaattaaccaaatactcttcatgcctttcttaacactccccctctctctctc

SEQ ID NO: 37424 - DNA, 5634 bp, Cannabis sativa
gggtgtaaataaaatttctcttaattaaaatacataaattgacaaattacccctatactaagattcttaattactgatgaaactaaacaaggaagcctttttattgtaagcccctccccttgttcttatctctttgagcataagtatattttaatgcgggtctatcatatgtgagctaagagtacaatgtgggatatgtgtatgtaatttccctcttctgaaagtatgttaaaattatgtatacgaactttgcagcttgaatattaacttaaactagcatccagtggcttttgcatgcatgatgaataattaatttaggtcttattttttttattcttgtgtacagggtgttgactcaaagcattggccttctctcatacacattcttgagaaaagaaaactatgacaggatagttgttcccatggtgagtttttttttgtgtgtgttttgcttttatgggtaattgttcatctaatgcctgctatgctactttgttttggaaaaaggcagcaatcgtgtaaagaaattttaatgttcttttatcttgtgaatgtggtagtgtgctgcttgactgtgtattaattttattgcaggttcattatgagtttaatacatcgacgggtacattggatttcttgcatggtaaagagcattttatgtcaaatctattgatgctgttgcagtggtctccttttgcgacagaagcagagcttctaaagcaagtaagcttttacatgatcattatattaatttcttgcttttacatgatcgttatattattttctggtattttgctggctacttttgaggcacaacgtattgtattattgctaatatttccacactcaaaaatcttgaggcaactgagaggtttcctggtcaaggcaaaaaattaaacaaaataataatagtaatcttgtgtatattaatagtaagaaatggcgatggattgatgtggcccatttttcgtgatttagagaattaggaaactacagctgttcatggaaaagctgtgagggatcccttcactatatgggagattttaagggtaaaaagggggatttactcacatgtgatgtgagtaggactagtatattaacaataataataaaattaatcatgttgctagcgtgagggccttaaacataatttattttgaagttctcttttgtagttgcaagtctcattagtttttcctttaccttaagaagaggcattgttctgtacaattcagcttccttcataatttgcagtgtaatgtttaccttctatgggcagcattacgtatagacaagttatgtgtttgtgcattgtgcctatacgcaagaatgataaaatgatatatccattagcttgaaatactcgtgtgtttgtgtgaatgatgaaaggacatatccactcagaaaatgtctttttatgctataagaaatagttgattgttacggattgccatacatatacagttatactgaaaatgtttgctgtgcaaagtgatgtgtttaccgttcattttccatctcgctttatattagctttttgatgttacaacagttcgatgacattgggcctcaaggcacaaaagttattgtctataacctatgggctaatgacgacgggattgtggagctagatttcaatacagatcctagggtaacttattctgcctttattttcgtttcaaaatgtgtcatcattacatgtttaattttgtttgcctattatgcattgattgtcacaggatataattattagtggggatactagaaaaattcagacaatccctgcttggaaattaataaatgaacagcacatcggcaaccggtaccattattctcttcgtgtaagtctatgaagttaagatgaaaaaatatcttaactgttttgatgaataatactctttttaaataattttactttgtgagaacaaatcccataaaaataggattagaatattaaacgtaacaagcagatgaatacaaatataaaacacttatcaaattaaatttgaatttcgtcaagtgccaatctgaaggtatgttcatcaatttttcgtttaattaagtgtcaactatgctgaataggattatgagctatgctaatagcttaattagagttgcataggtttgtcgttttcagttttcaactcgttcatctctcgatttagtccaaataagttcacaaaccccatgtgccatagctctgaacttcgattttgtacgccaagttacctatttgcatgtaaaaaaattcttaaagtaaatttggaactcttgattctctcttgggagaaacaagattgaaatatcaaacgtaacaaacagactaatataatttgaatttgaatctgaacagattatatttgaatttgaattttaatcaacaagaaacttttgaatgaataagcaaatcagaaatcaaaatttttactacagtattcttgttccttcaggtctacttgtccatcttgtatttgcggataccagcaagtttcagaataatacttaggggggaagttgttgaacatcataatatcgctgatgatctcaaatttccacaatttattttgtataaacctcagaatgcaggaactgtagaggttggctatattgttatgtttcaatgatttccagaatgttgttagttcgtagcttctctcggtacttgcaggtctttcatttaacttgaacttctttctctcattattcagggccaaattattacaactattgggtttcttaaagacgctccaaatgtcaatatccatggcttcaacgtctatcataaaaatcgtttaattcttgtaagtatcttgcatattagaagttaatattgtactgtactggaacaccatgatcttgatgtgtttgaatatgttccatttttaatacataataatctatggttgttacttgttaccactacctcctaagcataagttatttaatgggcttcatacaatgcctttatactatagaggctgctcatttcattttctcgattttctttttccatgatgtattcgttcaaacttgaatatatgtagctgtactctttactgtatcctgtacatataattttcatattctgggtctttgcactgtaactgagttgtctatgagttcttttgtaccccttattcgatgccatattctttacttggatttattttctaccatcgagtacgttcaattccatttgataagcatttattttacaactattatttctcaatagcaatttacatttaagaggccttaacttatggtcttttctgcagccattttggccagttgtgagttatgcagacagtaggggaaggggagttgtgggtaaggacctgctacctctcacaatttttattggttttcgtggtcgttagaaatgtatgaatttataatttattcattttatttcttttcaggtgtgctggaaacaaattttattgaacccacacataataaacaagattttgagaaaacttccctttttcagaaacttgaaagtcgtctgaaggagatgacctgggaatactggtgagctattactgtatctctttattcttaattatattcctcgcctaatcctagaatatttgaggactaggaaactataacaattgctatgtaggtactcaagaggggctcgaacctcagaactatcattactgtactatgtgtgaaaggttttattgttctttcagttcttgctttttgtaccattctttttctagttgtttacttgtgtctgcaggtcatacagcttatgctataatagtaataataataataagcatagttattgttgttgttgaattgttgtagagagtttttattttaaaattaattgatactagatgcgaaagatatagttagtagtaacaaatattatgcttagctacagttggctctgattacaaaatagtgtatagtctgtaatgactaactatatcaatgaattgcttgcttgataattatatcttattttacgagttcatttgtgaatttttattgaagtaattcataattattatattggtttattaaaataaaactaattatatcaattaaatttaacacaattagaattactagataaatggactagcttgataaacactaaaaaacattctagacatttatataaagattagatttctacctacctttatgctctatattgttgcagtttgcttctatttggtgtgggtacatttctttacttactgctaaatactctcttttattttctttatattatattatttgtgattccttgagagtttaactaaatgtcaaactgaacaattctataaaactttgacagggatttccactgtggattaattgggtatctggtcaagaaaaagcatccaactcagaatatcccacctcttttaagtagtaaagccacatcaaatcataagtcctctggtgttggtactgcaaaggagtcacagatcagatcagggctctctcttcctaactctaaaagtcgacatgaacagggttggtatttaatttaagaattaaatcgttatcaaattcaatcatacaataaagattcacagcatatgatcctttttctcttttcttatttttttctttccttttttggtaaggccttcaattgaaacgaaaggataattttgaagaaattcagaagctgaaaaggcaggcagttggagtaaatgtaagtccttctgcccagttcatggaatttgcgaaagcagctttcttatcatgtatcattgcttaaataattccaaattcgtctcttccgtttttatgtagaatctaagcaccaatggtcaatcgaaaaatcaagagaaagcaatcgtgttgcaggaaaatgaaactctgcgtgcaaagtgagtatattattatgtgctgatttcttttctacctgacaccctatagcttaatttcatgttattgattatgaaaattttctggcttgaattcttatagaatcacatgatttttcctttccttttcagctgtttgaaatactcgaaagaggaggaagaacttcatgttatggtaaacttgcagtagatgtgtctatgttcattctaatagtcttataattgcctgtactgatataatttaatgctgtgaactgcaattttttggaataccatcttgtttaatcagatattcaatcttgtttctgtgcaggtgacccaactcaaaagcgaaatagaaaaggttgacaatgagtatgcccggctattggctgaattacaagaaatagaaaaagtaaagccagaaaagggtgtatgagtttgtatcttatttaaattcacttttaattctttcatttgttaaatcagtgttgtattaatagatggattggtcatacagcttttaataagagcttaggtagaagagaccaaaattaaaagctgccggccgatatgctttttctctatttttctagttaccggcggctaatgtaaatatcggaagtgaagcttctgtagccagatgagagaatcatgttgtacaacatgtaacatacaattatttcttgtatgaatagaataatcatacaagtaatgcagaaacaaattcacttctcatatgttcttgtttactttattcgtttattatatgtgaagtttttgttcatac

SEQ ID NO: 37425 - DNA, 3245 bp, Cannabis sativa
gggttggacaagatccaatctgatataattgaaatgaaccaattaatttcaatataattatgaaaatttggatatccaattacaattgaattagttattggatgttaatctcaaaatctatttaaaaaccaatcaaatctaattacaattaatataaattaaaatattatttatatataataaaaaatattaaaaaatatatatagtttaattatattttttagagtggctctttatttaccaatatatttaactaattagtctcccttaaatataatttaagggtgtgtagtcttaaatctctaggagaaaacctaatagcttcttaaatcgttttcatgaatatcaattaggttttatgtaattttccttcatgtttttaagtttatttaaaaaatctagtttgtaattgaatactaaattataaaatcaattcaatctaattagtaatcgagttaaagtagattgaattttaaagtttaatcagataatatgatgattttttaaattcattactaattagattgtattgatgagaaaaatgttacattgtatcggatccagagctggtacaaagttttttttttttttttttttcacttttctctctctctctaaaaacttcatcttgcagatgtagcaaatgtatgtgatctaccgaatctctaatggcttctactttctgttaccacttcctcactccaaagctcccaactccaccaactcacaatacttcttcatctgaaaccagccaagtctctctctctaacattgtttcgaaaggcaggaacttgacgatcctttgctgccgcgtctcactaaaacaatccactgaccaaatcgttgcagctcaagacgacgccgttttacgcgtggtcttcgctgccggaggcactgggggccacatttacccagctattgccatagccgacgagctcaaactagctaaacccagttcccaaattctctttttaggcacacccaacagcatggaaagcgcctcaataacctcagctggctacgacttcgaacccatccctaccgtccgattagcccgaccaattctcttctctcttcaaaacctattcttaccttatcgtctcatcaaatcaacaatccactgtttatccaaactacgtgatttcgatccccaaatcgtgattgggactggtgggtacgtctcattcccaacttgcttagctgccgccattaaaggcatcaaggtagtgatccaagagcaaaactctgtaccgggtgttgccaattgggttctttcccacttatccgatatcgttttcgtggctttcaattcgaccgttgattgttttcccaaaggaaaatgtatcgtttctgggaatcctgttaggctttcgtcgaagaagggtgtttcgaaaggggtggcgaggttaagtttctttccagaatggaaggaaattgaggatgatggtgagactaaggttgttttgattgttggagggtctttaggtgctaaggctgttaatattgctatgttgaatgtttatcatcagatgttgatggagaaagagaaggtttttctgatatggcagactggggttgaagcctttaacgagatggagagccttgttaagaatcaccctcgtttgtatttaacaccgtgagtcttcttcactcttttgttttcttcttctttatattataagtggtggagacttgtttaaagttaaacctcttcttttgctactatattaagagttggggttttgcttatagctataacttttgtcttacttttatagtttggtttggataactaagatcttttttaatgaaaagtattttttaaaatatttagactttagatattattaaaaaaaatttagaaaaacttattttaaatctaaaagttaaaaaaagaatttatagaaaataaggcaaataaggccgttggattggattggataagagcttgttatatgaatgaaagaaaattatgaaccagttttgcttagtcaaatagggctattggattagattggataagcgcttgttatttgaatgaaagaaaactatggatacccgtttcgcttagccaaacagggttagtggattgaattggattggaaagaatttgttatttggatgaaagtaaactatggatccgtttcgcttagcttttaatattaaaacaatccatatgaaaagtcataaaaaagtctttaagatttgtagcttctctcaaaataacttttgagaagctatttttaaaattaaaataatttatataatttctaatttactcacaaaacctttttgtaataatatccaaacaaaaattacttttcattcaaaaaaagattttcatataatagttatttaaacggtaaaaataaatcaaatcttattatacttctagctataagtaaaagtagaaatttagcaaaacgggacttatatggaaaaataagtatactgtggattcaaaagagaatgggttgggcagggaactgtaggaggttagacaaatttcttatctaaatttcaatttcaaccctgacaaagtcctcaatattatgctgttattatttatgtcaatgtgattaaacacacatggaaggcctttctctttgctcccttctttatgtcattgtttcaatgcgtacttgttcatacttttcctggctgatataagttattcatgtcatgaagtttcatgcattccatggatttagcataccttgctgcagatgttgttatttccagagctggtgcaatgacttgttatgagctcttggcctttgggaagccttctattatggtattctctccttttgttttgagccaatgtgtgtatctatacacatcccatgactgaatattgcattgtaatcaactttcatttgctactatgcagataccatcgccaaatgtttctgaagggcatcagttcaaaaatgcatctctaatggcagatttagctgatgcacaggttataactgaagatgaactagattcgaccaccctcaaaactgccattgaagatttattaggtatcttccatacaatcgagtcgattccgtgattataagttcattctataccggatcagaccagaataggattatatacattctaattatgagaaggggtcattcgagcgtatctaaatagatactatatttacatatggattcatacgtcgttacattccattttggattaggaataagtgtaatcggacttgctttctacatatctctcgttat

SEQ ID NO: 37426 - DNA, 2741 bp, Cannabis sativa
  modified_base (73)..(75): a, c, t, g, unknown or other
attaattttgttaaacgttctgtaaacaaagctgcacattgtcttgctcgtagctcttgtttgtatccagatnnnatttttagtgaggatgatgttcctgctgattttatttctattgtaatagctgaatcttcttattaataaagttaccattttccttcaaaaaaaaaaaaaaaaaagaatataacttaggtattataccgaaaattaaacttatatatttatttacaaaatatttatttacaagtaaaaattaaacttaaatatttatgcaacaaattacccatttcaacaactattaacttaatttacacattcccatatctataattatttttatactatataatgctttgtatatacatatttttatttatttatttttttgtgaaaaaaattattatattatttgagccaaattccaccaaaaaaaaagaattgagccaaattacatacagtagtggagagaatataatgctttatttatttattttgatgaggataatgctttgtttgctagtactgcaatttttttcattttttttttttcaatctagttgcattataactcgagttgatgaataaaatgaccattttttttttttttttgtattccctttagagagattagattaatcatagcttggatctattcaaaaatatggagaagataatgggtggaaatgtggaagagactaactcaattagttaaggaagcattatttattactaataattttgtccattcatttttcattttcgacaggaaaaatcaagcttgtaagaaaatattattcaaaaaaaattgtaaggaaatatgctggaaaaaaaaaattaagaaatagcatcttatttaagataaaattattactctttgttttttcttggcctctatagagccagaaaccggccaatacattcaattctctagattttgttggtaataaaaaagaaggaagatatcaattgcgaatccacgctctagtgacgacgtcgtttgagactgtccgacacctataaataaagtggctttacaatttgtttcttcacacattcttaacgctactctgtataccaataatcttttttctccgaataacaaagaaaaacaggactttcttcatctcaaggtattattattctgtgtctcttttatctaattgttatatacatacataaataattaaaaaggactctctgtctctccatctctttggctaaaattggatttttttgtttttataattctttgatgtatttatataatattcaaatttctcgttatattgactctgttcaaatcaataattaagacaagaagaagatgaagatgataataattggagttattaatttgttttgggaaggttaatcatttttttttttttaattttagtcgtgttgtggtaaggttgatcttggaagatgcttgtagagaactcaaacagtgttgatatagatacagaacaatttgttgaggttgatccgagtggacggtttgggcgttatgatgatctacttgggtgtggtgctgtgaagagtgtttacaggggatttgatcagaaggagggtattgaagttgcttggaatcaggtgttgttaaacaaattcagttatgatctaaccctcatcaatcgaatttacgcggaagttgagctattgagaacattgaagaacaagtacataattttttgttacagcgtgtggaaagatgatgagcgtaacatcatcaatttcatcactgaggtctgcacctcagggaacttgaggaattaccgcaagaagcatcgttgtgtttcgattaaagccttgaagaaatggtccaagcaggtccttgagggattgaagtacctccacaaccatgacccttgtattattcacagagatctcaattgtagtaacatttttgttaatggcaacactggccaggtaattactgattctaaatttgttaagagataaagaaattagtgatttcaataatatagagttgtgatgttcattgtagataaaaattggcgatctggggtttgcagctatagtaggcaagagccactcagctcattcgatattaggcacaccagagtacatggcaccagagttgtacgaggaggattacacagagatggtggacatatactcatttggaatgtgcttgctcgagatggctaccatggaaataccttatagcgaatgtaacagtgttgccaagatatacaagaaggttgttagtggaaaaaggccattatctttgaacaaggtgactgatccagaaatgtatgcattcattgaaaagtgcctatctcagcctaagatgagaccttcagcctctgatcttctcaaggaccctttcttttctgaactagacgatgagatcactgacgctgctccagttttgttgacatattctagtgaggagttcgcctctttctcacacaattctatctcctaatatgtccaattggatttctagggaaatgctactactaagaacaattaatttcctaaaacgtgaactattattaattaaattatgagaaatgttaaaaagcacaaatagtgtttaacctatataatttaatataataatttgtaagtagtatcactaattaatttaagttgacatgttagacatctctagtacttaataataatgcttttaaaatatttaggacaatatttaattgtaccaacaacaacataatattcatgatagtgtaacaattgtacactaacatttc

SEQ ID NO: 37427 - DNA, 4241 bp, Cannabis sativa
  modified_base (4200)..(4216): a, c, t, g, unknown or other
aaaaaaaaaaaaaaagtattatcttaaaaaatatagataagcaaaacaatattaatgagaattttcatttgaagtagacattgcatactaattaagaatcattgaaacgatattttttacattacaaaaagaaaaatgggatatatatgtttataaatggatttttctggtacgtgaaaaataattccgttgcaaagcacaaaactcgaggcagtacagatcaagtgaagagatgatgatgatgatgatggtgatggtgatggtgatggtgatggtgataatagtgatgatggtgatggtcttagaaaatgtcgagaatctcgagaatgggacgattgcagaggggacaggcacctcgattcaaccacatctctctcgaacacaccctgcaaaaggtgtgaccacatgggatgaaagccgcgcctttcttccttcccatgcacacgcagcacaccgaatcattccccacccctccttctcctactactactgcattactcttctccgtactcccatcacgaccgtccgtttcctccagtaatctcatcaaagacaccctcattggcgttcccggagccgtactccccgccgttcttgacgccgcctcgtccctcgctggggtttcgtttgtttgccggaattgtctttcggcggctaacgccgctgcaagattcatgctcggcgccgaatgagccggatccggatccggatctgaacaaaccggatccgtattattctccgggtgattctgaagtgtcccttggttaaaaatagtttccagagattgtcgttgttggttttctccttcttcgttgttgtcgttgtcgttttcttcttcatcattatctctaacgcttattactgttggcctgaaaccccacgtggccccacagcaacccattcctttcaatccaaaccgttctttcagactcctccttcttcctcttcctccatctcctacgtccatttgttccctcagaaaacacagaatcgttctcgcttccctctctctactcagcgattcctgcagaatcacaccgagttgactcattttcctacacacccagaaaccacaaaatcaattaaaataagataatgttatgaatacagtacagatttagacacaataaaaaaaaaaaactgtttttatatacaagacttacaagtttggatcgcaataaagggtattgcaatgtccatggaaatctcgtgagatcttttttccatgaatgaggaattatacccacctctagattaattcaccagaggataaaacattaaatactgggctggtgagagaaagtgaattaagtttcatatgaagccaactccgtcactgaaaaaaaggggacttaattgaattcatcaaaatttgagaaagaaagataattaattagatgagacgaaagagaatgaagaagaagaagtaagaaaacaaaaatcgaagaggaaaatatggctactttacagcttacgggtgtgtgtttccccctaactagttttgatttcccacctttttttcattcttctcgaacttgggatccgtttgtgacaaatatttgtaaataaatgaatttataatatttaaaacatttaagatattagaatcagagtatttaagtaggtgattaggtgagttaaggctggcctgccagtataatccaagtcaaagccattgaagccggcgcctcaaccgaggtaatgccaagtggcactttaaatcatatgtgtactttaatttcactttacactcaaaattaacactgttattttgtgttcttttatgaagaaaaaattaacagaaattactgataagatttcaatttttcaacttaaaattattacgtaaaagtaccaacatttaacaatcaagtaaaaagatctaaaaataatgataatatttcttcttatgacccaaacaaattctttgtcgatctaaaaaacatatttagagcattgattgcgctataaagtgagaaaaaaagatttcatttgaatgacaattgcataaataaaaaagattctttctcaatttttttttctttttttttttgtttagaagccaaaatgattgatattctattttgtatttcagtgagtgggcctcgtgtttaatattctatgtttcttttttatttttttacataaatattgtattttttttcttctttttgggtcctattcttataaaaggtaccatgcatttatgcatacaaatattctgtcatcacaccataatcacaaaagcttaatattaatcatgctaacgcttcgagataacgtatttgattgaacggtcaatattctgtttccttaatagtactcataattcttgacccaagagatttgttcaagcctagaaggaatgatggctaagttttggtggaagtctcaatctaagaatgcaacaaagggggtgagttgggttagttggaaacgcctttgtcaacataagaatataggggggttaggatttcgtgatcttcgggattacaacctctcttttttgggtaaacaaggatggagattactaactatggaaaatacgcttgttggcaagatttacaaagctcgttactatcctaatggcacgtttctcactgctgatttgggaccaaatcccagtttcatatggaggagtatttgggctgctcaaggactggttaaacaaggtgctagaatttcaattgctgatggttctcgagtgaatgttcttaaggatccatggcttcctcatgattcaaatccttatgtcattactgtgaaccaagggcttcaaaaccagtttgtggctagtctcatgaatgttggggaaagatgttgggatgttgatcttctttcggatatgtttgtggaaagagatgtagacttgattctcaatattcaattaagtgattctgtggtgagggattcttggtattggaacatggaatcatcggggttttactcggttaagagcgcttataaacatcttcaatcgagtagaggaaactggctttttttggaagacaacaactgctggaaactgttgtggaatctggttgtacctccgaaggtttgccatttcttgtggcgagcatgttctggtacacttcaaacaaagactcagctccaaacgaaacacataaatgttgatctctactgtgtattctgtaacagagagcaggagtctattttccatgtgctactgggctgcaatttcgccaattcctgctggtttttttctgcagcagccgtgcctactgctggtgcaccagaggactttgcagcttggttcttcggcctactcgaagggaaccaagttgatgttgtggtggatgctgctatgatcagctggaacatttggaaaaccagaaatgagttactatggcagaggaaaaaccgttcagctttggatgtagtgaagtcggcaagaacagtccttgcaaattggaagattgctaactttgaatcgccccatgcttactttgctacgggtgatgtaactagaagtaatctgtgggctaaaccagatcatgatactgttaaggtgaatgtcgatggagccatctttgaagcacatcaaaaatttggctatggttgggtggcgcgggatagcaatggtacacttattgaagctgtttcagggaaccgtctgggttgtgttctccctgaaattgctgaagtaattggtattaaggaagcgttgagttggatcaagggtaaaccttgggagaaagtggttgttgagtctgacgctctagttgttatccaagcaataactagtactactcatatgccatctcagtttggtttgttggtggaagactgtcgttcaattttatctactttaaataatgtccaagttaagtttgttaatcattctgctaatagggctgcccattgtgttgctagggggtcttgttttttgtcagatcgaattttccatgagcataatgctccttcttctttaagaaatattgtaattgcggaagcaagttaattatcaatgataaattacattttaaaaaaaaaaaaaaaaatagtactcataattaaataccatgttttttttttttgatgaaaaaataccatgttaagttaagtatgtcattttattacaaattgtgttttcatcttatttttatataatttaatgagtgattagagtgtgtgggtcaattagtatgctttaacatttgaggaaattacactctatannnnnnnnnnnnnnnnntcttttatttttaccctctttttta

SEQ ID NO: 37428 - DNA, 2053 bp, Cannabis sativa
gacacatttactatatactattatagaaatctaataatatatagtatgttaatttaaaagtaaaagaagctaataagtttcaccatattttggttttggtcacatcatgatctgaagcaattcatgcaataataacgaaaaaagtacctatatatatttatatataaatcctaggctgtgaacttgtgatacatcacataatttttacgtgcataactctacaaactacacatatccttctacttatgcatgcacgctatccataatataaatatatataattaatatcattacgtacgaccaagaaaacccacgtggtagctatgtgtgtctctaaagtccaatattaaatatacagagaaaaaggaatatagaataatcactctagctgcaaagaaattgagaagagaaagaaattaaagaaaagcttatgtgcatgtgaataatggttacatatttcgtaggacagagatcgagtacactaattaacttcaaataagttcaaatcaaagtagcaataattgcaaaatatattatactatttcatggagaatccacatgcaaaatgaattatacatgagttacctttttctgaaacaaacaaagtctatatatatatatatatgacatacatgtttgtcatttttttagatgctatataaatatttatatatatgtggctcttctctctcatatatattatatacatatataaattgaaattgtttggcttatttttgaacttttgtgatgtctaataggtcacgcagaagatcgaaaacaaaaagatacaaatgtattattgatgcagacaaagaagagtcgtatacgaagtctctgcatgcggctattgccttttccaccgtccaactccaatacccaacatatcatttatgggaccatatatatacatatatatatatatatcatatatcattgctacaactctctctctctctatgtatataaatatggatttagccccttcacatgtatgtactagggtttcccatactttcatgtgatttaaatttgtagaaacatatattttttaatttacatatatatatatatatatatttatattgtagtgaagactccactcttatgatgatatatattttccttttgacccaaatgatcttacaatgacatatatatttaattaaggggaatttttcacctaaactgttacggaattattatcacaaacgttgcaggaattattacaaacttttttattcctatttttgtaatcaattaattggaaatattattattttaacactttatttttacaaaaaaatcataaaagtccaattttttcctatatattagattatattacatttatatatgatttaatggttgaattaaataatttttaaaaaattaaatttaaaaacaaaaacaagttttatttaataatttgttcatttatttaacatgatctaacaatgttcattacaacttattaataaaattctgtggaaagatattaaaatatataaaatctagtttatctttaaacattagattaattaattaagtattagtccatataatgcacacaaaaatttctgattttcttaatgattttagcttttaagtttcaaatgctaaataatgatgatgttaaaaaagcatgcccaaagatgcaattacaactgccaatatatgtcatattgaacctaatgctttgcgagttttaaatgctttacactctacttcttaggatttatcaagttctttttatttaattttagatgatggtttaattaaatatgttattaaattgaatacatatatgtttgttggatcggtgaagtttctgattttattttctctattattatacatatttctaaaaaaaaaacatgcccaaaatttgtatatttgctgattaattacatttgcattaatttttataaattcaacaaaacttaatataatatagatggttcattacaagaaagtacagcaatatatatttatatatataagaaacgatcaaacttacaattaattagattgagttttgtcgtggtattaa

SEQ ID NO: 37429 - DNA, 5206 bp, Cannabis sativa
  modified_base (26)..(42): a, c, t, g, unknown or other
acataaaatattatttctgatctttnnnnnnnnnnnnnnnnnattatattgaaatgagtattatttagggcacaaaagccaacatgatcttcctacagaaacatcacctgaacccactcacataccaactatgccttccccacctcccatatagccccttctctacaacctgttaccattccaaacactcacccaatgcaaacacgatctaaaacaactggtgtttacaaacccaaagcctacctctccaccaatcatcccttacccgaatccctattacccacaaccctacttctctaaaacaagcacttgctgacccaaaatggcacacatccatggataatgaaatgcatgcccttattcgaaacagaatatggacattagtcccataccaacctcatatgaccattgttggaaacaagtgggttcacaagattaagatcaatgcagatgtcactcttgatagacttaagtcaagacttgttgcaaagggatactctcaaacaccatgtatagactacactgagacatttagtcctgtagttaaaccaaccacagctcgactgctgctcactcttgctgtctcctttcaatggtcggttcaacaacttgatgtatctaatgcatttctaaatgggacactcaatgaaactgtttatatgcaacatcccccaagctttgtggatccaacaaaacaaacccatgtgtgccttcttcagaaggctctatacggcctaaaacaagcgccccgtgcctggaatgataagctcaaatagacactctatcacaagggtttctctgcctccaaattcgacagttcactctttgttcatggatcgggcactgatatgatttatctattagtgtctgtcgatgacatactagttacaggccctaatcatgtgctcatcaccaagctcatgactgatcttaacacagaattctctgtcaaaaatcttggtgccttgcactattttttttggagttgaggttcacaggacaccatctggtttacacctctctcagaaaaaatacattttagaattattgaccaggcttcatatggatggtgctaagccgagtccatctcccacagatactgccctgcaactctctcccactaatggtgaatcgttttcaaacccaagtctatatcgcaacacactcggggcactgcagtacttaactttaactcgaccagacattgctttcattgtcaacaagttaagccagttcattcatgcccccaccactcttcactgggaggcatgcaaacggctgtttcgatatctcaaaggctccatcaatgaaggacttctcatcaaacctgccattcgactctgtttacaggctattcagatgccgattgggctagctgccccgatgaccgtcgttccactggtggatatacagtattctatggtggcaaccttgtctcatggtcagctaagaaacaacccgttgttgcccgttctagcacggaaagtgaatttcgtgccttggcaaagtatgttgctgaagtgaaatggatcacctctgttctgactgaactccacattcctttgccatctgctcctattatatgggttgataatcaaggagccgccagccttgcagcaaatcctgtcttccacgctcgatccaaacatattgaaatcgacttacacttcgtccgtgatcttattgtggccagacaacttgaagtctgttatgttccttcgatcgatcaggttgctgatattttgacaaaggttctcagcaaggacaggttgctctacctcaaaaacaaacttcaattgtgtcctacaccatttcgtttgaggggggatattacagaatagttttgttagttgtattctgttatgttttctgtttttcctctgtcagaggttgttacttgttaactgttttgtaacaactctccctttctaaattcttagcctataaataaagataatgagctcagtttgaggctcaagctttttgcaagactttctacccaactatttctttgtgttcattgatagccttgtattgataagcttccatactctcattcactcatttcttctctgaataaactctgtaaaaccagagttcttgaactaagaagaaagaaaagggagagatggaacgagaaagagatgaatgaaatgactaaaaatactcaatcaattaattggccttaagatcttttatttatagaaagtttttacaaaaataagttaataacaatcatagctaaaaatacagttgacaaatagagtctaactaactcgttaactaataattagttaggtacaaaggtattaactaattcctaactacctaaatctccaacatcccccctcaaatgacactcgtcgagacaaagtatcaatttgtcacgaaaaaacataaagggagtggcagttaggggctttgtgaagagatcaaccaactgattgtgagagttcacatatcgaacagcaagttgttgtgctaaaattttatctcgaacaaagtagagatcaatcttaatatgtttagtatgtgcatgaaatactgaattgaaggcaaagatcatgctcctaagttgtcacaccatgaaatttggaaactaagaaacgttgaggtgaaactcagagagtaacgactgaatccagatcacttcagatatgactaaagcaagagcacaatactcaaattatgtgctcgatcttgctatcactgtttgcttctttgaacaccaacttatgagattaccacaaatgaaaatgcagtaacagatgttgatttgcgatcatcatagcaccctgcccagtcagcatcaataaatccttgtaaattgagactgtaagctacattggatgttaaccccatatcaaatgtgccagctaggtacctgagaacatgtttgcaagcactccaatgattaaaagttagagattgcatgaacaggcttaatcgattcatatgaaaagtaatatatggtctggtcattgtgaaatattgtaaggctccaataacacctctgtacattgtggggttttgcattggagtgtcgatcttagggaacgattcggatgtggagcacataagagtacgttgaggtttagagtccagtaattgagtagttgttaacaaatctcttgcatagttttgttgagtgagagtaatggactcattagatctatgaacttcaaagcctaggaagcaactcatgacaaatcctagcactttgagagtaaactggtcatgcaaggtggtaattacttgttgaatttcagtcatattttcccctatgatgagtatatcatctacacactattacaaaaattattattcctgacggtcctaaaaataacttttttgggggaccgtcacttgagtgtttaaaattgtcgggaaaaattagttattcccgatagttttcaacacttgtgatgatttcttcacgatttttaagcgtgtcttaaaaattgcaatttttttttaaagacgaattgccaacagttaaaaattgtggcctatactgtaggcgagggttttaaacggtcgcctacagtgttattcccgataatttttaagcaaaccttaaaaatttcgaatatttttaaaggagaattaccgatggttaaaaatcatggcctatactataggctatagtttttaaccgtcagcaattaattcaaatctaaaatttttaaaataatgtgttttccctcactccaatataaggcattttagatctaaaatttttcaaatcaatacattttcaaaatttcagtctctctttagagttccccctctctctttctcatagatggcaattccatgagcttcatcactcatctctcgtctctcccactctctttctcgctttctctttcttgagctccaccatagacaaaagcatgttcaagctccaccatggtcggccatggccacgagctccaccatgagaaccaccgtcactcgtctctctctctctctctctctctctctcttgtccgaatatagacgagccaccacgagcaccggtcaatcttctctctcttatccactctttctcgtaacttctttattatttttttttattttgggatttatatatttttgagatttttgtatttcatagatcgtcaaaaatctttactattcgggaatcttaaggcaaaacaaaactcgatcccatattggtttcaaggaggatgaatgtgatgatttttttgaggaaatccgctatagcaatggtttgaaacagttggttatactatatagaccacagtttaaaattatcacctatagtataggcgatagttttaaattgtggcatatagtcttatatacccgatagttttaactgtcgggaattcttttataccaatatttttctactatcgcctattctacctagtattcgcgacactcatataggtgatagttatatagaccattgggaattttagggtttttagtagtgacatagactaggagaaaaagaaacttaccattctttcttgtaaaaaatagacgtgtctgatttgctggtctgaaactccaatagttcagacaggttttgagcttgtcaaaccaagctctaagggcctgtcttaagccatagataggctttttgagtttgcaaacatgatttggatgttttggatcaatgaatgcttagggttgatacatgtaaacatcttctttaagatcaccattcaaaaatgcattattgatatcaaccacttgaatgtcctatccataaagtgaaaattatcctgatagtgcaaggtttaactactaaacggtaggtttcaaagaaatatatacctgggcatgtcaaaaagatccatttagttggagtgggttggagctccgatatgacggatcacctctgatccgaaatactcggatacttattggatcttagatcagttcggctcttccccgcctaatttttctatggatcggatctgatccgactcgattttaatttatttgaaaaaaattaattcaagacttgaaccccagactcggatcccttaagacctggacccggacctagacccaaaccgggacccggggctcgaacccgggacccagactcggaccttgactcgggacttggatccgaaccctaatctgggacctggaccctgactggggtcctggactcggacccagacccggacccgaactcggacctggactcggacccagacct

SEQ ID NO: 37430 - DNA, 6453 bp, Cannabis sativa
  modified_base (3327)..(3328): a, c, t, g, unknown or other
aaaaaaaaaaaaacttttacacaacttccatataaaaaccttccaacacagttccatttaagtgtgaaattacgtaaaaaaaacttaaaaatccggataaaagacgtccactctaatagtgtgggtaccttaatttactttgctttgcaaaatattatcacgaaaacaaaaactctaattcaaacccattactctattttttttttaatatatgtgtatcttacatatacttaccaattcaacttattatatccatgatataaatatatgtatatagagagagagaatctaaaacaaccaatgagtgatcttcttgtcgaccgttaccttctcctcaatagtgtccaaactaggtttccaacccctgccagagaactgcctcgtcaaatactccggcggcgtactctcctccaaactttccaaaggaacatactttgtcttattattctcctgatcatcaccagtactaccatcgatcatcttcttcttttccttgatcttcggcaccaaaaccccaagtgatcctccataatccacggggcaaattctagcaaacagaggcaaaaacttcaccgatgagtaacgatcacttctcagaaccgaatttgtcacaagaagaagtcggtggatttcctcagaagaaagagctgccgttctccctcgcttcatcggaaccatcatgtacattttcttagtctccagcttcatgtctgccggcaatggcgtcggtcgttttcccgtaacggcggattggaactcgaccaccgcttgctgagggtgctccaacatgagctccgccgcggtgatggggttttccaattcctgaattgaaccatcccatagaataactttcccattattacaggttggattattttgtgagaccacagagtttcccatcatcaaatttttaatctatataatatatcacgatgttaattaattataaggacatatatatatatatatatatatatatgttagtggtgaaatatatgactaataaagagacagaagtaggatttgttaaaccgttccatctttggtgagttttaactaatttgaatgtctctcgttttggggtcgttgagtttggaggtggatttggtctcaccgttttgactagctctctttagtaacaatactactattatataaatataaatttattagttactactgtgtactacgtacttatacgagtaaatataaatatatataatatagtggcatggacttgatcatgcggttgttaattcttcaaccaagtttctaggttacgaattgtgagaagaagaagaaattaataaaagggtcaagaaccgttcaactacaaatagttaactgcatagtttaatacttacatattaaactatgtaagtagtacgtaacgtaatggttaagatatattttgatattgtgtaaagtataagtatgtttttgtggaaaatgtacttcttcaaataataaaaaaagagtgtcaataataataaaacaaaatgatgcataactcttgggatgaggggagaaatatatatatatatatttttttatttattaatcacaaatactcttatattatattttgttaaattgtactacccaatatatcatgatcaatctctacttaaatctaatacataatttacattaacttaaagataataagaacattatttataaaagtatgtatattttaaaaatatagaaataaaagtaaaaattatgacaagtaaaataaaataagtataaatataatttcctctatatccttacttatttgtcttcttttcattcctatatttgaaaaacaaaaatgcaaaatacctataacactacaaaagtaaggtctttaacgaggataaatgtcctcgttacaagtgcaaatgtccttggcaaaacagtttaacaaggacatgccctcgttacaacgttctcgttagagactcatcattagtaataactttttgtcaaggaagcgaagatgttctcgttaaagactataccgagaacaattgattgttagtaaaagttagataagttccctcgacagttacctttcattttagcccaactaactcatttatattgaaaacattgttcttgatataattttttaccgagaacagaagctttcttttaaaaaataacaccttttttttattcaatattaattttcataataaatatatcatatacatttttattttcacattaatattactcaaataatgataaaaataaaattcgttaataaaaatatcataaatttactcttttctttttttttttttacatttttaagattataagtttagttacctaaatactaaacatgctaaaaaaagggttcgcgaaagaaatagatgctacatataaacataactactgactcagtcctccatcatcgggatgatcagattgttgaggcagattttacgatcccagagtgacataatttgtcctaaccatttcctccaactgtctaatctgctcctggcctgcatatcaactatgacattagctatacaacatatacaccaggctaaggtggaggagtttgagtaaacgtagtggtgcttccatctctcttgtactaactagacggcaataatttttttggtgcccgaaaacagtttggacaaatgatagatctttttgtcttcttgattgatgacattgcctggctcttcaatattttggatggactgtgtttgttgtgtctcacatatgacaatcattttctcctattacacaataatatttaaattaatttacatactcatgtctttctagcagtgtcagtcacccatcattttccctgtttatggtgagtggcgtgccaagcatctgggatcggtgcccatcgcccagacttcgaatcacgttgtgacatagatattttttttattattattcaaagtaataacaaaaaaaatataaatatgataattatattataaattaatcacattctttaataattctttaataacgcaaagcaagtattgaatgagatcctccatggctcaactccttcaatttttttctatttcatgcattgatctctgaatgtttctatcaaaaataaatatgaagatattaatatgtgaaattaaaatagtttagtttagtaaaaattcaattggggttgaataaaactaagataccttcatttcacgttgttcaaaaaatgtgatggcctttttccattaattagtctatagtgtattcaacatatggagttgcaggaacattattttctaagtgttctttgagttcatgtttaaatttgtaatattttttggcacaagatttatcaatgcnngttaagataccaaagagatgatctccttcatatctttctcaaccgatatcgaaaagattgtcctataaaataaacttcattagttaatattatatatagttaatgaaaagcaatttaactctaaaaataattcacctctactctagacaatatccttctcttcacagaattaggtaattgtgcccaatttttgtactctaaatccctgtattatcgtacgagcaatcctaactccctcaaaaaatctaaaatgtacggacctacctccttgtatgtttttcctttaatgtcccactcaataggcagtggacatttgaggttttctcgcttttctcgtgtgcttaatcccttatggggtccacgtttctttagatgagctgttgtcatgtttaaatattcataagttagtatattcacataaatattaataacataagttaaatatcttaaattatataacctcgcacacaatcagctctaataattttcgcaccaataggaggatcacttcctccatcaccccgtgagaacgaacaacatctgtcgtatatgagaaatataagtattcgaaacagtataataatgttaatgtcataatgtaataaaataccaattaacaatatatatatatgtaataatttaccacttattcatcattataagtttcttataaattatcaattttaacgttgttctcattctcatcttcatcttcctcctccgcttcttctttgtcttcctccactacttcttccatctcttcatcatctacttcacctatatgtcttcctcctccatttcatccgtgtcatcctcatcgggtgggttattatctatatccacaaactttattagagcccctatatgttgaaagttaatttttgataatggaccaagatcaataaataattagaaattagatgaagttgtatcatgcgtaatatctacttcaacatcctccaaatattcttcaatttgtagaatatcccacatcgatgatgaacttcttggatgactttccaatcagatttatttttgagaacatcaatgtagcaaacttggttagcctaatttgccaaaatgaatttatcatctttgaacccttcaaaacttgcgttgatagtaatgatgttttgttcaaacttcaatctccttgagggtcgactagtgtcaaatcatttacacttaaataatataatataacatccactaaaatatgacatcacaacaacttcttccaattgtccatactaagttttattttaaactccaattactgtaacaccactattttgagctttcttgctctcatccctattaagacacaaaaaattaatttcatttacaacatactcagggtacgagacgacaagattggaggaccctgatgctaaagagaataactcttttgatgcctctagagatcctaatctttaaatatcacaaagcttaattattataaaaccaagacagaaattcattatgttgtacttgttctaagtgttcaagtcatctagaaagaagaatattcatatgttctctacatcaagtataataaattaagtaattattttaaaaaaaaattaactatttgaatggtttgaattaaactggatattaatatttaaaatacataccgaatatatggtgcgatctcagcgcagttatttagaacataccattcaattattttcttctcttcttcatcacggggtctcaattgtttcttaccgattagacgaccttgacactaagaactgataattttgaaagtgatagagcaacatctacatttcgatctggacgattaaatcgtgtctccactgttttcaagcacattgaaaaaaaatttaatgcctcaatccatcacatatccttctactattgacccttccaaacatgctttattacgaacataattctttaactttttcatgtatctctcaaatggatatatccaacttaagtgaatgggacctccaagtattgcttcttgtggtaaatgtatgactagatgaaccataatattgaaaaaaaaaaagtcggagggaaaatattgtctaacttccaaacaatctcaagtattgatattcttactttttctaaatctgagactagtagagttctagcagatataagtttgaagaaagtgtacaactcaataattagtgtgctaatcgaattatctaaaaatgcattcacaccaactgcaaaaaggcattgcatgatgatatgacactcatgtgattttgaactagtgatcttgttgtcattatcaatcacatttttcccttgtgtgaatgtgtacttttccataggcttttgtaaccggccatttacttttttcagctacaactctggtcttatattcattttttcgaggtctaatctagcattaattgtatctttggtcttattctccaacccaactattgtgcttactaagctatcacacatatttttaacatgcataacatctagattgtgacgtaggttcatgttggcccaatacggaagctcgaagaatatactccttttttgccaaccaataactagttcttctgtacactttcttttttttccaccataattttcatgtttactaggaagagattctaatataaaattcatttgtgtgcatatcttccatacttagttcctccggggtggtctcttttcaacagtgccatatgttttcttgattcttctaaaatagtatataattggtaaaaaattcctgccataataagcaatctatttaagcaatcaaatagaaggcattgccacattgcatgtaggaaaagcataatagcattgaccactccatttagaaagactactccttgctggataattgtttatagtccaacaaggcctctcgaattaatagactcaacatgaattagtctctttcctacacaatcacggtgccaaattataagtcgtcaacataatcgaccataaactgtaagattgactcatgttatgaaaagaattgaatctaacaacagccgaacctagatgcacattccttggttcctttgcaaacgttggattattttgataaaaatctttccaagcctccccatctgcaagatggggcaacacaccttcttctttgatac

SEQ ID NO: 37431 - DNA, 3405 bp, Cannabis sativa
aagggcatttaacaatttgattatttgttaccttttaggatttgaaaaaggagcatgccgtcctttcagatcaagttaagctcaccactagttcctttccagaccctgctgttctgaacactcttcagtttctcagtatgttttaactaataaacactcatacattcttaatcttaactcgatttgttcaattttaaaagtttctttacttttaggtactgaacatgaacttttaaagaagaagtacatcagggaatccactgagagaaagcaactctacaatgaagtaatcgaactaaaaggaaatatcagggtcttttgcagatgtagacccttaaaccaaagtgaaatcctaaatggttgtacgtcagttgttgaatacgattcctctacagataatgagcttcaggtcatttcctcagattcttccaaaaaacaatataagttcgaccatgtgtttagacctgaagacaatcaaggtacgctttcaccaacttcagtttggcttagttgctaattcacttatttgaatagcaaatgaatcttaactgatttaattttgcagagacagttttcacccaaacaaaacctattgtgacttcggtattggatggtttcaacgtgtgcatatttgcgtacggccaaactggaaccggcaagacatttacaatggagggaacgccagaaaacagaggagtcaattacaggacagtggaggagttgtttcgtgtttcagaagaaagagctggtgtcatgagatttgaattgtttgttagcatgttggaggtttataatgagaaaataagagatctcttggtagataacaacaaccaaccagctaaaaagtaagttcttgtgaatatcaaagtagttgactaatatctttggagttgacgactaatcttcccttaaatttgtgtttacaaaggctggagataaagcaatctgcagagggaacacaagaagtccccggactagtagaatctcgtgtttttggcactgaggatgtatgggcactgctaaagtctggaagccgagttagatcagttggatccaccagtgccaatgaaatgagcagtagatctcactggtacttcacgtgatacattgattttattttttatttttttccagtctctgccattacattttgtttatgaactgaaacatgttatttttgctgtagcttgttgcgagtgagtgttaaaggagaaaatctaataaatggacaaagaactaagagtcatctgtggctggtagatttggctggtagtgagcgtgttggaaggattgaagttgaaggtgaaagattgaaggaatctcagtttataaataaatctctctcagcccttggtgatgttatctctgcccttgcatctaaaacatctcatataccttacaggtatctctctcacccccatttatgtacttttgttaagttattttctgttataaacatgtgatcattatatctctcgttttttgataacaggaactcgaagctcacccatatactgcaaagttctctaggtgagcctatatgtgacttgtacaatggtggttattattatggtgaatgaaaaatgtacctttaattctgatcgaaatttgaattatcaggaggagattgcaaaaccttgatgtttgtccaaatcagcccaagttcatcagatcttggagaaacagtttgctcattgaattttgctagtcgagtcagaggaatcgagagcggacctgctcgcaaacatgcagatgttaccgagcttctcaagtacaagcaaatggtatgctaaacaatctgtgtcaaagtctttatcatatcatattttaacttatggtttaaacacagttattgatttttcaacataaaaaaatccacaggcagaaaagtttaagcatgatgagaaagaaaccaaaaagctacaggatagcgtgcaatccttgcaattaaggctagctgctcgggagcagatttgccgaaatcttcaagaaaaggtatttttgtaataattattctcaagatgtgtattttggcgggtagagttagttctattattttgttccttatttcagaggtattcaaagatgtttttctgtagtttgttccttatttcagaagtatttttccgtaacaggttcgagaccttgagaaccaattgggagaggaaagaaagactagactcaaacaggagagtagagcatttgcagctgcttctgctccgacctcatcagtgtctctttttggtctaaagccagccgcacagaagactgtactagagaagaaaccaccattggttcccaattctaagttgaggttacctttgcggaaactaaccaatctcatgcccgttcctcctcaatcccctctaccaaaacgaagacgggagagtagctttatctcttcagcatacggtaaagaaaacattgccaaaacaacagctggatcaaccaccgcaacaacaaacaccagaagccttctccaaccaagacggatctccattgctactaccaggccgcctccaaatagtaatgcaactgcagtttcacacaatctcaagcctagaagacgagtctctatagcaacttttcgccctgaatcgaacttgtcctcctctcacctatcaactccactccgcactacagcttttaaaagtggcagattgtcaatggtgaaagatccacggaaggctcgttactcaaggctcttctccccaatgcctgagatgacaacaccaatggctgccaggagtagtaagttcatgggaagtcctccaccagcaatggcaagttccatttcaaggcaacagcatggcggcagcggggctgtcattgcattgcctcggaaaccagtggtttggagtccactgaagttgagaagcataaaagtcaacaggagaccatcattgttgcctgctcgatcactgccttgaaattcaaattcagtgtcgctgtttatattcccaacacaattttatttttttggtctgattctcctaacagaattaaacaatcatttgcttccttttctatttgtatctgtattggtcgtttgcgttttagcaattagcttgtgtattgtatgctccttgcttacgaattcatatcttccttctatgaatgagattggttatttgtttacatttatataccaaaccaattatatccactttttttctcaagttttgtcttagtgaaaatatcatgacatgtgtcactgataagtaaaaaatatcaaaaaataaaatgaataatgttttatgacttggaaaagaccataaaagtgggtttttttagttctatagatattaaaacaggacatcatttagttaattttctacaagaaaaacatgatctttttagcaaaaaaaaactagtatgatcatacatttcaaaaaaaaaaaaaaa

SEQ ID NO: 37432 - DNA, 6115 bp, Cannabis sativa
  modified_base (40)..(57): a, c, t, g, unknown or other
  modified_base (2521)..(2524): a, c, t, g, unknown or other
  modified_base (5975)..(5976): a, c, t, g, unknown or other
aaagttcatatttagaatgtttaaacaacatacttgtgannnnnnnnnnnnnnnnnntaaaataatttccaacacttcataactcaaagagtcaagaatcacaatgaaggtgaaaatcagatctttttcgttaggaaatcacacattatgcatcctaaaactatcatacagatcaaaacaccaaaaagattacaatctaatgtgaaaataaaaaaaaatattcaaagtggaaaaaagcttcaaaaaaccacgaaaaagtcaaatgaataagagaataatgggatttggaagcttacccactactagaaactattgatgaagacgatgggaagctagaatcgttaaaatggcatgaaaaatcccaagaaacggagcactttgggtgtcggcctctagagagaaggaagagctttcaagaaatgctttttctagagggagatttaaaatctgggaagtgagaagtgatttccctcccataagcttatatagcttttgtgggaccccttatttcacttgccatgcaccatgtaaataaaaagcatgcagaagagtaatgtagctaacttactgctaagaacgtgatcagacagtcaagaaaaaatatttcaaagactagttatatttcaatgtctgccagttaaggcaacatcagtcccaactaagctgaaaagtacctatccgcacaaacatctgcacagggactcgggcgaaaatattatcctgatttttattcgcctaacctagcatgtccacatggccagtatcaatccacgtgggagtacaacttgcaataagaaagccaagccatctactcatcactacagccaatgagaggtctgagtagttatgagggatgacaaaatgatgaactagccacctcaagagggttggccagccacgcctagctggccctatggccagcataggtagactagcttttggacatcatatggccagccagcttgcaccctacatgtgcatggatggccaacttttggcacggcagactttggtacacaattctcatctgtggacaacaagtcaaaccacgaattgggctttacaagcccataaaaatagagagaaaatatcagcaactcccttatttttgaggggcaatttggtcattagtattttattaatttattattgttaccgtagatatttgttaactaaataaataaccttttttgcaataaatacactacaaaaataaatgatattaaataacaacagatattttatgtggttttctaattaaaatctatatactccatgagtccttattattaaggatacttttttggaatacagaatagaatctcaatatttgaaataataagattttctctctattttttaccatccactttctcaaggattctgcccatatttataagaatataggtaggcagttattttaattgggattgattcatttacaactgctaatgaaacgtggatatttcccacgtttcatatattcacacatggaataatatctaataactaccccactgctccttgtatttatcttttaaacggttatgctgacttggaaggttgtagtttgccaaatattagttatccttcgtatccgtcttgagaagaaaaacactaagtgttgaagtaattcatctcgttgtacctctttatttgtattgatgttacaagatgacttctttattgtgtacaatgtgaagcggttgagtgtcataaatttcactttattctcatgggagagtcaatgattctggagatctttggatatctcgtattgttcattttattactctatctaccccaatcgaggaaaacatatatctggccaattgtagtttaatagttttattcttgtctcgcataagactaagcagtcatcgagtttgaatatttctgtcaagcttgtatttaattagaacgagttatttaagttgcatttaatgatataacgtcattattatattctttgagttgattcatattccttttgtaggacacgtgtcagcttttggtacatagttgaataacaattatgtaaatgatagttttatttacctatttttgatggatattagtgatgtaagctctcctatataaagagcattagtcaagccctaaaaccctatgtctcaaaccctaagccttatgctctaagtctgataatgcatctcatctctctctcacacgtccagtgctctattctcacttgagatttaccaactctggtttctatattgtaatcttaagagagccactttagatcccattactatagtgatctaagtggtattatttctggtatcaatacaactaaaagaagagtatgtcattacccactaaataaaggggccgaacctctataaaattatgtatctatttactttcctattctaattgtatagcacgcgacaaacattaatatgaaatttgactcctctgtcggttggctaaatttgaggtcaatacttgttgtgactaaaactaaattagtggcaacttgtatctaaatactatattnnnntcacaaataattttttgttgtgacaaaaagtcatttttagtcacaaaaaagtatggttttgctaaagctacattttttgtagtgcatcttaagatgccaaatactatatgcatatgatacttaataattagttagtagtttcctatattatttactaaataaaaatttgtgagaaccaatattgaaatcaccaataatggtatgccaccatttatggtgtttagcacctccctcaggcggcatttggtttgaggtaaggaaatggaatagaatggaaatgaaacaatttttattccattcttttatttggttttattttaaagtattggaatgtcatttttattttaactatatttttattctttctaacgaaatgtcaaataatggggtgtttgttatgtgagtttgagttggagagagtagacttggagggaatatgaaactcaagtattggaggaatttaatattatcactattttaatttaaaaagtatgatccacttagaaacacaaacctcttagttattaaaattaaatttagtttgatattcctactcccatcaagtataaatctcataccaaatgaccccttagaattttcattatcatcttcaatggatggtgtataatttatgctcaaaaaaatgaatcaatattatatttggtcaaaattatataatagtgctccaatgtaattagcgtaaaattaacatgttttgatagaaaggtgtaaaacaacacaagaaatgttacttctgtcagcatatttttgcaccgataaaagtaggcataatgtataaaaattttctgctaatctccatcagtaaaagaatttctgccggtgcaattggcatttgcatcaataaaataggcttttactgactctgttatgcaccaaaaaaaccagacatcgttataaatttgagacctaaatctgtccatcgacaaataaaataacttttatctagcgcttatgtgcgccagtaagggtttcatgtattttttcattaatgcgtcaaaaaaacctttacctgtcaaatgaattttcgtgggaatgacctatactggcgcacttatgtcctgagaaaagtcttagagtttacggtttaggcgtaagttttgctagcacaaaaatacacgtaaaagcctttattttaattttttattttttttcgtttattatattttaataatttattatagtattataattaattttaaatattaaattagatttgaaagaaatataatttaaaaataacaatattcacatttataattaaaatagtatcctgatgaaagtaaaatatataaacatgtttgatttatactaaagatattaattaagcaaaatattaaaagatgtgaaaataaatcaaatttaaaatttagttacaaaatatatattgttctaacttcgggtaatgtcatcgtcgttattattctgaaactcaggacgatgcgatgacgatccagcatcaggaggagtggggaatggcagaaaatccataggatgtatgttgaaactaggcataacccgagtgagatactcaaattgatcttggaatcgcttggtgtagaattgttgtgtttcatattgcttatttgaatactaaggttccttctgtgcctccacttttttctgtaaggcctcatattgttccatagtaacagtctgtgaggtaaaaaaaatcgtggtaggtgctcttttggtcccaactgcctacaatctcgggagatggccaaagcctctcagatgtatgagatcgctcacccagtacttgtgtcataacatgcaggtctcgtgagtactgggtggaatctataacatccttagcagactgatcctcagtgagcgttggttgatttgcagccaattcaaccatttggtcctaaaaaaattaattaaattaaattgtcaattttaatgcaaaataaattgaaaaaaaatgttcagacattaataaatattaatgtaagcttacatatacttattgcgcatattcgttacactaattattatcatttatggcagaactttcaaaaaatctccacaacatttgaaagttttcttgtcttagggttaacctatatttaattaaaaataagtgtcattattatttattatttttccaaaaaaaaaaataatacttatcaaaactacaagaaaaagacctttttgttggcgaagttcatgaactatgctacaaaagttaacttttgtcgacgcagttcatgaacctcacaggcaaaaggtagccaatttattcccttgggtagcacttatatcggtcacttattttgccagcatagtacattagtttcatcagcaaaaggtggtaaaccaactgccaaaaggtgggaacttttgacagtccaattctattttcccggcgaaaataagtgcaccggcaaaagattattaactttggcagtttaatttcacttttgccgatgcgtaaatacatcggcaaaagtaatgaaatatttggttgtttaattcccgcgcagtaaaaatttgctcagaaaattaggtgaaaaagttttagtggcgtacttaggctagccgaaaaaactttttataattaatgaagtgatgcatttcatttttaatttagggaaaataatttgcagacgagcgtaagtgcaccggcaaaagttaattctaagtaaaacttttgccggtgaacctaagtgttccgacaaaagttgatgctgaataaaatccagcagctacccctttccccatttctttctttgtcttcttcttcttcttctttctctccatcttcttcttccctattcttagtccaccatcatcaccaccctcaccaccatcatctccatcttcttctattcaatctccctcaatctctctctttcttcctaatttttttgtaaattaacaaaaagataaacttaaaggtagcacatcgcccacctctgacggcgtgcgcaccttcggccacctctgcccactttctccttttcagtcaaggtaatctataattttttattttaattttaatttttatatattgatttagggtttaatattgtgtatatatatttatagttaaattgtttagtaaccatcaatggcaatacctattgaaaagtgtttcagggtgcacttttaataggtattacacacatttatgggtaatattatgaaaatttgatttttttatgcttagttttttttatcaaattaaaaaaaatttcacatatttacattatatgagttggagttgttctattggctgaaaaaaattaagaaaaaaagtttttcggcaaaaaaaattgagtttaacttaaatattttgtatataaacatattttggatataatgtaaaaagtgatttttttaatatagctaaattaagcataaaaacacaaatttatcttttattattcgttattggattaaaatttaatagtttaatattttnnaaattaatatttatagttaaattgtttagtaagcgtcaagtaatacccaattagaagtgttcgacatatatttatagggatatgattttgtcccgtgatgtacttttacggaatgtattccgtggtacattagatgggt

SEQ ID NO: 37433 - DNA, 3533 bp, Cannabis sativa
ttttctttttgtctaggttgatgcagaagctcttcattaccaaaatcagaaactccatcagcagatagagaaacaaaagcaagagttgcatgatcttgaagagaaaataaaaaaatcacaagaaaagcaaggttcttatgatgacatgttgattgcagtgaatcaactatggaatcaggttattggatgtattatttagcgcgtgttgttctagtagtctcaatttccagtcaaaatatgatatatgttttttaaaattttctgaaaagtatatgtaaaaatttatatttagctggttgatgatttaatccttctcggagcatgcattggtggagatcaaaatgctttacagaccttggattgtgttgatatttctagaggtatccgtatctcatgtttatgtaaatagttattctctgctcaaatattttgattaatttgagctttaatttctctacatcacacaagatggattgacatgatggtgtacacgttaggttcaattccatcatgtcctgtggaggagatgtttctgtgtaggctcttgcaaaaagattccattgaagctaatgacaatgatggtattataaaatatattgaagaagccctttcttttcgccatgcgtctactcgggcattgttgacacgtgtggaaggtagtgttaacgctcaaatggccaaaactgagagcttatatcaggctctaggaggagttttatttccaaaaggtcaggatatatcataatgaggttcaattgtagtccatttcctcatattaatctcataaactgagtttgttattttctcttatcttttatgagttttatcaagaaataaataaacctcttatcttccattgatgaacagtaagcatgtttgtgcatttttattaaatggtgcttctttctgtttattttttaatttagatgccatcagtctgctatctaagattgatgatatgatgaaagaggaggctaataatttgcgttccgtgattgatgctcttcattcaaagcataaagtatacatagaacagattgcaacttataaaagcaatcaatcgactgatcaatctgaaattaaacgtctcgcaggtaattaagatggttatcaaattagagtgcaattttataaatatgtacatattaaacattgttagcagtttatatggatggatcatatatgccaactctattatggccatgcatttgtcagctaattagaattacccagagactattaaattcatgaaaaggaattgttcctcaactgtaattgttattgttatttttctgacatactttttaaatctgttggatgtatactttttctgttattgataaaaggtgagcttgatgatactatggctgaacttgaagaaagtagaagaaaattaattaatctgaaaatgcaaaaggatgctgcatctgggattcctattcttccttcaggagcagtaaatggacacttgtcacctgagaagtctgccgagaggacaataagtttgcgtgatttgaagatttcgattgaggaaacaaaggtatacatgtggtagactaaataggaaactactaaaatgcaatttactctaattcttacaactaatatacagttaatattctaacagtatttgaatatctaatacagatgctagcaacaaaccgtctttttgagcttactgaagcacaggacgaaaatctaacattgtcaaaacaggtggaggctctccaggtcagtactctttaatgttgttgagcgtgctattgctattgatgctttctcagtgacctgtattcttttctcttataattctatggataattgtttttttaacacaccaaactgttattttgttgatcctggaccacgatagttagttgtttcaatctgtatttttttcttgacaaatctgtattttttctacccataacaactattggtctttttctggatttcgttttatcacataaagaattgtatctatctatgatatgttctttcttgcagagtgaattgaaggatgacaaatacatacattcatctcgactttatactttgttaaatgatcaactccaacattggaatgctgaagttgagcgatacagagctatgattgatgctttgcaggttagattgctttcttttaattccttgtaggttattcaacttctatatttcggcatcttctgaaagtacagtttcaggttggcaggtctcttgtcatcagaagggataaggagctgaatgctaaagtagaatcagcagatgcagcgaggaatgctgttgagattgctgattccagaactgaagaacttgagctccagctacagaagagtattaatgaaaagaatgatcttgaagttaaaatggaagaaactatccaggatttaggtcaaatattatatcttttgagctttgttctttttagtggtcatttacttcaactgtttgaaaaaaaatttacttcaactgttggtttgtaaatggtctcccttctgcaggtagaaaagatatcaaagcagagttccatgtcatggcctcagctttgtccagggaaatgaaaatgatggaagttcagttgaaacgatggcaggagacagctgatgaaacactttctctacgtgagaaagctcaatctttgaaacttttgctcagtaagaaggtgtgcttgaagtctccactgtttttattattcacctttgttagttgcatattttgttttggccatgaaagtggtaatttaaggaagatttacaaccttgagctgagtgtaggtggaattgctaaatggttacttctaaaagcagagtctggctgatttctttttcgaactcatttgaaatcagtgtattatagaaaactgattagtctatatctgatttcttttcacacctcttaccacctgactcttggccacttcttcatttaagtttgatttcttaatcttattattgtccacggactatgactacagtttccttttaatgaaaattaaagaatgaatggaaaaaactgccataatctctcttgtttgaactcctctttccgcctcttgttcatatggaaacatgtacatgaacgaatcagttgataaaaactgaagttaaaatttaaatttttgtttgaatttcgaagtagagtaatatgataggattccagccccaattctcatgtatatcacattccatgtgtatgagatcttgcaaacattgccaatttggtcctctactttttatatattcagttgttgattcttttattttttgtatcttatagacaattgaacaaaagagtttagcagaaaaatgtgctgaacaagtgatagaggtgaaggatctgaaggaaatggtaagatttgtgctcatttaactgatgcatttcatccttttgtttcttccatttcctctgctccatggatgttttcttttttcctcttctttccttgttcaatgtagtattttaattgttatatatcaatttatgtactgaatgatgtcttgtcattttatttcattcccaatttgtttagtatt

SEQ ID NO: 37434 - DNA, 3053 bp, Cannabis sativa
  modified_base (44)..(45): a, c, t, g, unknown or other
tcagcgtcaatcccacgatccttgcattcagcattgatcccacnntctttctgtttatacgcattgtaatgagagaggaaactcttcatcctcaagttacccagccctataaatagtgatgcatattcactgggcaaaggagagtccaaatgcagctaagctaagactatattattatctaagaattatatatcagagatattgttgtaagagctataagaaaaagaatcttcttccttgttcttaagtcaatacaaataacgaggattaggcaattaccgaactgctcggggctgaacctctataaaattcctctgtcttattatcgctttattatatatttgttactacatatcgttttatcgcttataaaatagactcattgtcgttggctaaaagctaagtcaacaagagctttaaaaaaaatcaattatttctctttaaaaaatttatttagatataaaaaaaaaagcatattagatattcaatttgtggaaaaatcaacaagcttgaatctatttttttctccaaaaatttaaatttatttaagtaaaatataatagttttttagtttaattttttaatttatttgttaacataattatatatttttatttgatttttaatatatatattaagatatgagtttttaaagataaataggcttgaatatttttcttcaactaaatctttgttgttttaacatacttattagatttttaataatttttgtttaatttgttaaggtatgcgtttgaaaaaaattatataatagaccaaaaattacaataatacataaatacgaaaaaatttcatttttactctttgaatttttttatttacaaaaatacatcttcagtaaaaataataaacaaattttttagttgtattatagttgtcatgatgtagtttttctagttgtttttagttattttatagttttttagttgatttataattgtcgtgagattgatttctcattgttttttagtttttttcttttaattttttgttgagcaaagtgtatttttgtaattttaaagcttcacaagcatatttttgtaattaaaaattttagttaggccccaaaattgtaaataaaatataaaagaaaggtatttttgaaacttctcccttatttattttattattaattaagatttttattagatttttaatgattctttttttttttttttgagaaataataggaaaaaaaatcaataaaatgggtgaaatttggtacaagtactaattgttatttagcagtaaaagaaatggagcctaacagaagggtcatgataggaatgcattttcacaagctctatattttaagaaacatgttttagacaatatcaaaagtttaaaaggcaaaagtattaattattatatttttaataatttaatatgtgagcttataaattaagacattttttatgtaaattaagataatttatttgagttgatattaaatattaggctaacaaggctgcacattatatggctcatagctcttgttttcattcagttcatatatttaccgagagaaatgcttcgatggatcttttgaatattgtattggttgatgcaatttgctaataaaatgttgctattttatctcaaaaaaatattaggctaaataagtgatctaattaaattagtccaataaatattttatgggttttgtaacatgtaataataaacttaattaagattataagattctaattaatctactatataaggaacactatacggtttggtccctaactctaatctctaagaactcttatccttcattcccactaattaagtgataacccgcaagtggaaggtcataaacccacattttctaattcttatatccaacatcatggaatggaacaagtatgtcatcttcttaattctataggtaatcttgataatttaaataatatcctatatgttcctagatctagttatagcaattggtacattacatccttattttatgttagattattgaagagtatgatgtcataagaggtgattgtcataagtgggttcaagtgaaaagaggtggaagggatagaaaaataatattatgcctttagtgatagtaggatcatttgacactctttttggataggctaattaagatttttacctcttaaattttaatatgtatcaaattatgttctctgaacttttttgactgttgaaaattctccctaagctattcagattgttagatttaaggatttttgtttaatttcattcaattttactatttcagtgattgtttatgtattaaactatgttctacagactttgataactacaaaatcatgtctctcgaactttgacatatactagatcatgccccctaaacttttattcatgttagagaatttttttactaaaattagacataagtccttaaatctaacaatcttaatagttcaggtggaatttttaacggccgaaaaattcaggaggtatgatttaaaacatgtcaaaggttaggggtaaaaattgttaattagccaaaaaagaataaaaatgaaaaaaatgagaaaattagagaatttaaagtagaataaaaaaatttgaaaaataagagaattaaggagaaattgatagaagtatttgaaagaaaaaatatctttaaatttataatattttaaaatttaaattcaaataaaatttatataatgaattttagtacatcttgcaaaacaaattcatgatcacaacaaattaatttaaatatttaagtttaaaattaataatttgttcaaaaaaaattcgttaagaattggtacataatttagttataatttttttttttaaaaaaagaatatgtgtaaatgctagcacatgacatatatataattagatttagggctaattaaatattttattaaatatatttgcattttttctttggagaaaactatttccacccaataaaatgataaatacatcccattattataagaaatataaacttaaataattttttaaaattactcataatattttttttaatgtttttcctcacattattttat

SEQ ID NO: 37435 - DNA, 2730 bp, Cannabis sativa
gaaataaagtttggaactttgaaaattttgaaatgggagaaaaaaatgaagaagagagattgggaatttttgtgatgttttttggagaatgagagaatgaatgtatatataaggtgaatagggagagagagagaatgaaggttaggtgcccaaataatggaaactttggaaaaagggtttacgcgtatgtgtgatggagagttcacattaatattatttatttattattaggttaattttgactattttagggtattttctttcaatattgctactcggtattagtggagcagaatctcttataaatagttagcgataatttataatagttattaaattaaattatgtaagattcaatactactaatatcttttaacatttctcttttattagtgtttaatatcgggaaagaagtgtgaaactcttttactagaacaccatcattttaagggaccgttcttactattatagaggataaatacttataggggtaaatagtggtataagtacttaaagttttgagtttgtaagttgtatatttaatagttttttttactggcataaatatttaatatttgtaaaattataatttttataattacatctttaaggaagttaggagaattagagagcacaattaaaaaacatcaattacctttaaataattatatcattattattattgggtaattacttaaatgttcctcaaacttataattagatattcataattatactcaattctaattagagaataactttccaaattatagcctaaacatattcattttggctaattaagggagtaccttgtatagtcacattcacaactcttcacaataaaaataaaaacatttattatgaattaaatttccaaatagacaacttttattttaataatttatcattaaaatgttataaatagacaactttcacaattttgtatgagatgtgaattttcacaacgtgggtggagtgggtggctatgccttgcctctatatattttggatatttttttagctcattataattttcgtacctaaattttgatatttattaaattatgctttatatatttaatttttattgaccactaaaaatttctaactattaagattgttatatttaagaattttttatctagttttattcaattttactaattcaggattgttcatatactaaatcatgctccccaaattttaatatctaccaaattatgtctttaaactttaacatatactaaattatactctctgaagtttcatccatattaaatttttcttattaaaattaaacaaaaatctttaaatctaataatcccaatagtttatgaagaatttttaacggtcttattgatacatatcaaagtcctattttttttttttttttactaaattaactaattaattttttttgtaaagtacaaatttaattaattaaatatgcagctaataaagttaacgtatgagcctggaattattcccatttaattaataacaatttaatttcaatattttatatttagagtggtccatgcatggattatttatttatttatttaaatgagttttaattatacaagtttaaacagaaacaaataaataaaatatataaaaacagaacacatcaaaccgacataaagacttattacatacgtttgaaacttctgccatacttttcatatttaaaatctctcttaaaatattttattaaggctttgcttggtttaaaataataaaaaaaaatagaaatatttgcagcgaaacccctcaatatttataattgttaaacatataattctaataaaaaaaaatgacaataaaagtaccttatcttacgatttgattgcagttgaactattttttagttgttaagtgttaattaagcatgttaagtagtgtcagctcaaaaacatgtagtgacatattttcttagcttatttaatatatagtctgataatatatcatcacgtgttttttagttgataaaaaaaaatacgattataacaaaattgtaagataaaatacttctatcgctccaaatatcacaacaaataactcatatagaatatttccattttccacccattgatgaaaatataaaatgaaaagtgatgtataataagtattaattcatgaacctattaattatataaattaataccaattttcataaattttttaagttaaaccaaacatcaccttactataaaattccaacatatctcagtccacaataatatatattttttttctattatatatttatatatatatatatatatattcacatgggtatgtatgtgtgtatatatggccaaaaacaagtcatgtcattatttatgattagaaaatcacatgatcatctcttccaagaaatataacagctcatcacaaaatatttcatgcccacaacaacaactaatttgcctttattttcttctttctttatttttattatttatttgatttttaattttgtttaatatcaaaggtcctaatgtaaatttcttttttataaattgaaataatgcctaaaaaaatgaatgaaatttgcaacaacaaaaaaataaactcttttttcatatttttatttttataagtgaaaataagcataatataaagtgcatttaaataattgtcaaatagaaaagtttcttattattatacaaaagaataatctgatatattacaatacacaaacaacaaaagaaattaagtacaaat

SEQ ID NO: 37436 - DNA, 4397 bp, Cannabis sativa
tccacgtgtcaccattcatgtcaccattcatgtgacgccacgtgtgacgccacgttagagtgcaaaaattgggataacaattaagttgttctagggtttttttattattattttactggaacacaatatttttgtaattttaaaactttaaacacggtattgctgtaaagttggtatagtaaaaatatagaaaaaaaaaactacgtgtcactgtatttttgtaaactttctctcattttacagtatttttataaatggcccttaataatatgtatatatgtatatttatatagttagtatttataggatttttacctattttaccctacacacaacaagaacaataatcaatttcccaaggtcaaaaccaacctttcctactgagtcaaagcacagttgacccacaagagtcacaaccccaaacaacggtcttttaatccctagactacaagtagtttaagcaattaaccctaataacttagaaccttctcgaactcattctatcatttacacactcaaacacgaaatcccaaagaaaccctagcagagcagagcttcgtgtttcttttctgaggaacatgaactctgcaacaaaacccagtggaaacccagattcaacccttcctagatcagattaaaacctagaaaacacacacaacaatcaaacacattattaaatgcagaaagaaaaatggaaagtgtgcaccagaatttttatagaggttccccaatgaaatctgggtaggtcctcttcaagatcgcctcgtttccactaatggatcttcaagatcaatgatgtacaaagctggattccaaatcacaaaggtaagataggtaatccttggtatttttacagtgtttatttctctctatctatctctgaatattgtactaattttctttcttcttcttcctgtgtatgttcttttctgatttctggatctccgagccctaaccctagggttccaagacttaccccactataagtctcctcctctctcaatctaatctgatctctatgtgatctgtttaattttcatgtatttatagactgtagtttaactggagagagcatagagttagttgtagtcgttgggcgccaccttttgtttataaaatattttggaattgttttataaagtttaagtacgggattttgaaatttgtaaaatgttttttaagtattattttatttatttattaaagtttaaataaattaaatttttgctaaaccctttaattaggaaaggttgcacagtaattatgaaaatattgtagcacgcctaaattagtagggtgttacagattggctaaacgaaactattacatttacatgtgtaatattgttttggtatagttgttcgtggttttaaccgagcgacaagtggccttctcaagaaggaccaacaagttgtgggcccatcttcagtacaagaaagctttcacaaaaattaatcagccaagtttatgagaaaattagacactataccctttttatattgtcctcttttacttttactttttttttttaaagtctattatttttacttcttttttttaaacgatgtaccaactttgtccttgtcattttaagatactctccatgtgactcatttatgttaaggtattttggatacattacatataaaaagaagtatatttcaattaaaataaaattagaagtaaatttaattaattgataaataaaagaggtattttttaatttagtcccaagtttataccttatttagactctgcgttcggataactaagacatttatccctctgaatgagtgcaacaacaaagaacatacaaactatgtgtcgctgaagcgacctccctcccgaaaggtcttaatgatccaaaaagatctcaacctcttggatataagctacccacgatcccttgaaatacaaggggtcatccaaaattatctacgtgccacatctctgacacgatctcacaaacttttggagtttgtcatcctactgtagaaacgtgcatggtaaaaggtacaatctctattgggattgtagtagccaactagccattacacttgacacacatttttcctaggatgcaaacgacggctcaaacatgacctatcaacattaataatataatgaacaatatcgacttgttgcttgtgagagattggacctcacttactaggccaatgctcccaagttgatatttatcaatatgagttcatatatttaccctatggatgagctattttgcatctaaaacccttaattgggtctagattagtctcgcccaagatgcatggctacctataaataagacatcaccctcaccatgtaaagagtttcagacattaagttttacaatagagaatactctaataaatattgtaattgtaaaagctctattgttgtaagttcaataatatgaatttgtggattagttcattaacaccctaaccacccaaccatgtaaaaaccttttgtttgtttcttttaatctttgtttagtttctaatcatttctttaaattagtttctaaaaaatttggtaaataagtacatatttcgaatgcatatataataattaattgtaattctttataaaacatgataataatgaataattgatataatataaataatttttgagttatttgaagtacatgtattattagagcatcttaatttaataaaaatgtaaataaatcatgcaaaattaaaatataattcacttaattagcaaaagatgtattttaatttttttaatatatcacatttgaattatttattatgatataaattttgtatcaccatatatatactacttttttatttattattttattagtatatttaattataatattaaatgataagacaatttatattatttttaatgttctaaataatgataagttttacaattatatagcagaatgtaaatatattataaaattatttttgtgttaaatatagtaatatttttacatataacaataaagatggttctttggctaatgctaataagtatagatggacttactatctaccacatggggtagaagagacaatgtcttggtgtcattagtttattacttttattattgacgcaaattcttaagtcctttcaaattagtacatcaaattagaaagcatacaaatatctttataaatagaatagtaattaaagtgagttagtttttgtttgtcacatctttcttttaaccacattacaaccaactaccaaatcataaaatctaataagttgatgtagtcggttcctatattatattgtataataaattaattagaattttaaaaaataaaatatgaaaccaagacaaaaaaaaactaataaaaaaatttattgtatctttctatggttttattttttaaaaaatgaatttgtgatttgttatacaaaatgcaataaaattttaaatagtaacaatgaatattactattgggcacctggtgcttagtactagacattttattttgcgattggctaacgataaattaataatattgacacataaaaatgtgctaaacaccaccttttaacatttctcaataataaaaggagagttattgtattagaaaatttcatgcatgcacacaatcgaccgaccctacaaaaataggtaatgtaaatttagagtaattaatttgtgggcaaataaactaaaaataggagtgaaaatagtcctaagaatttgtaaaattataggagaaaagaaacaataaattggtgttatttgttggtgtagctcattatgtgacagtggggcttggcttgttgtgaagagtgtaattaattagagaatgcttaaattattaaaattaagtattagatcttatacattttaatttaataacgctattttagaatattactaactatttataaaatataaaatgttaacttatggtgctaaataatagaatgttaattttgttattaatcctacttcaaaaagaaaatatgtgaactaaaattgaaaaacagctatgaaagtcagagaagtgttgtgattaataagattataataaggttatgacttatgagagagaatgggtaggtcttggttgggtggtagtaagtaatatatatgatatttcataccaagattttgggcacaaaacatagcaatttaattcaattattatgagcctactagttactactactactacttctactctactacgtactataatttattaaatagtgttcaatgcaaagaaaaagaaagttggtactcccaacaaaattgtcgacaccattcactttcaatttaaagaaaacacttccccatataccacaatttttggattagctcatttctcttctatttctattatttaatatttctttaaggaaagcgactttatatgtataaatatata

SEQ ID NO: 37437 - DNA, 6571 bp, Cannabis sativa
ataaaaaaatcactaaattttttctcttgttacaatggaatggtctttccttcctttttaaaatagaatagtcattcaaccaaaatggtggaaagagaatgtcattccaatactttaaaatgtagccaaacaaagaaatggaatgagcattgtttcctttccattccattctatttcattacctccaaccaaacgccacctaattataaattttagcttgtaattgtaacaaatagcctaacactacttgtatataagttatcatttggatgactaatttagtaattagaactcattctcaaatctttattctctttcaattctttttttttatctttactctcttttattgtcttttaagttttacaatgccaagtgttttaacatggtatcaaagcgaaaatttccttgtttatcgaccaacacagtacatatccaccaactctgaatcttgccggtacaaatctaaaaaactagagatgaatctgctctagtgttcttcaattacaaccttcgacttaatgatcaaaattttttgctttggaaacaataagttttttctgcaattaaaggaaataaattacaaaggaacattcatgatgctcccccagctcagtccttgaatgataaagatcgagtttttcataatgttagtgctccatacaatgattaagaaattctaggtaaagttgtgatttcttggctattgtcttcatacacaaaaaccctccgcactcacatggtaggctatgatactactcaacaaatttgggaaattttggagaaacatttcatgctacaagtctcatccaagattctagaatttagaacttaactctaatagctcaagaaaggatctatgaacctcaacgagtttcttctaaaagttaagcatatggtagatttacttgccctaattggagaaacattaacacctcgtgatcacatttcttctatcttcaaagggttaccatgagtatgataccttcatcatctcttgtagtacttgaatagagggctactctgtggctgagatcaaggctttactcctctcatttaaatctcatattgaaaataaagatacagaaattgtaccgagtgcaatcatttttcaagatgctgatcttcttaaagctaatcttgcttatcgcaattcaaggttcggatatcaatctccatctaaatacaatggatctcagtacaatggtccccaattcaatggttactccattagaaaaataaatttagagggatttcacctaatccctcaccttatgctcctctagggtttcctattctgaatctcaaaaatttcaacaaagggccacaaatgaacaagtgatatggtaagtttatggatgcttgcaattgaacacaatgtcagctatgtctaaaattgggacacacagttcacaactgcttctacaggtttgataagtctttcacaggaaactcatctaacatgtgtcaagcaccatctatcaagcaaatgtagttaatcctagttgaggatcaaatgcaaactcgtaccttgtttttggaacaacaaaccactacactcttgattctcaaaacattatattttccaacagttatgatggtccagagagtgttggaacttattttactaggatattaatttacaaacatgtatgcttgattatacatttataatataacatcctaaatatgaaaatcctaaaacaataaataaacttaaaagatcaagataccctacattacttgtaatagaatataatgtctccttcctttcagtactataatccttgtttcattctattgtagagtaacaagtactgaacctgaatctccttcattaactcaaagaattatagttcttcataatcttccataaaggtctaagtatcaccttcaatagtgtggcctaatgctcaactcacctttggaacatattttgagagagaaataggctattgaatttcaaaaatataaaaagaagaagagagaacttttcttgtgccagatctagaaattaggttagaatggaatcacctaagctctctctctcatcacttcctttatataaccaacacttacaggtagatttagaagagatgggcttaaaataaatacaatgggattaaaaatcacctagggcaaaaattcacttaagaaaattcatggatttgatttttgccactttattttaatttaaagaaacaatgtgtctttttccaattttaccaattatctcttctaattatttaaatactaatttgaatttaataattattaaataaaataaaatttaaatacatttattaattagacccacaaagtgtactaattaacaaatatacccctatttttcttttcttctcaaaatggcccaaacttggtgaaaattcttaaataagacataatctatttttgaattctaatttactaattaaataaattaattgagtcaaaaagatgatattatcctagagaatttgagaactatgggcctatgtagccaagttcctaataagtagacctaaaatttattaagtaaatttcttaacttattaattcctcctcactccattatagattcagaattgcactctttattacatagaatgctctatataccaaatatagatacgctatgaattatctaataatacaatctacacaattatttatcctctatagacgatttacattgagtagggataaatttaccattttacccttcaatatatgttatcctaaaaatacttagctacttgtaaatgatatttcaataaactaatgtaattactaaaatgagcgctctatcatttatcacatttagccaagctcaaaagaaaccaccgtttcatttctaaatacttatagaagctatagattctatatctatgatgaatgctctcactcaattgcactaatgagtttactttctattgtgtggacaaacaacaatcataaataacaatatgcttgtgatttaatagaatttatatattaaacatataatcatgaaagtaattatgtgaaccatgcaacataaaatgaattttgatctcatattaattagtaaataagattatattgaactgaattttatttatggcataaaatagcaacaaatttccacttgcactaatataaaactaaaagtgaatttcaattaatctcacctttttgatgtctagatcaagtgtagtatgtgatattgtcattgtaataagatttgacaggttgtattctgcatcaaccttgttcactattacatcttccttagttataaaatccttgactttgagaaattcttatcaatatgtttactcctcttagggcactggattctttactatttgaaaattatttctatattatagggaggtaacactagtggttaatctgtgactggaataatacaaaaagttgtatagaaatttccttaggctgaataattgtctagtggtcgtcggggccactttaatattcaatctcactggtacagtgagaggctccatataagttttcatactccttcaaaattactgctccaacgctagggtaatcaccatcctaaatgtagacttcctatcattaatgcaaatatagaaatttgagtcagtgtagctcaaagagcttcataagttccacacttatatgctaacatataggtcctcctataatcttaacatttatttgaatttcttccattattcctatccttgattatactaatacctactcataactcccactcaacatcagatgtctagtcgaatgcatactggagcatacatgagacctccctgttggaaaatattttaccaggatcttaatttaataatctaacatcttaatatgaaaattctaataatgaaaaaacacgtaagagttgttgaaaacttacagtggttgtagcggaatattatgactccatccgttcagatctctaacccttgattcttgtatgtagaagagtatagtcaagatctaaacctgaattctctttctcacaaaaatagactacatggtgttcctcactacactaacgaggacaaatttttgtgaagacaaacaagagaatttttgaaaaataaaatagaaaatattaaataattgtctttcttttgattcagtttgttagacatgagagaatcataagtctaagaatcaaaggccattatgttttatttataaggagatactaggggttaggttttagaataaatgagctgaattaaaaaaagctataatgactaaaaaacacaagcccatggccaaaatctctctaaggcccatgagtttgaatttattcattattttgtttccttaacgaaataatatatcatttatctattctaattacttaaatgctaactttatctatttagtaaatatatttaattattaaaaaaattaacatttaaatatatttattaattagatcccccaaggtctcttaattaataaatagcccctaaattctcttttcttcgcaaatataccctttcttagtaaaagtcataaataagacatagtcttatttagaatcttaattaataaaataaataaattacttgagaatacaaaataatattatctctgctagtgtggggaccatgggccaatgcgaccaagctcctaataagcaaatctaaaatttatcgagaaaatttcctaacttattaattcctcctgactccactgtagattcataattgcactactgattacatagaacactctatataccaaatacagatacgctataaattatccattatttcaacacaatagttattgatcctctatagacgatttacattgagtagagacaaaattactattttagtctttaatgtattttatccttaaaacacttagctacttgtacatggtatgttgaaaagctaatataactgtcgaaatgagcactctatcatttatcatgttgagccaagctataaagatatcatcgtttcacttcgaataaacatagtagttatagatgtccatatctatgattaacactcccattcaattttactatcaagttcccaagatgtaagtattgagcttgttccatggtaagcttgtaataaacaagtcaaagaactcgcgcaaagttagagcttaaccatctcatgatttaggtcaaatgatctatgatcaactaattgatattgacttagaaaagatataatggtaagtctatgatatcttttctgttatcaatatttgtccagtctgatgtatagccgatacatccgatactagtctactttactaataccctgtaaaagacattccacttatccaagtgtaaataaaccttatcactgactatcacctcaatgtaaatctagtacactgataaatcacgggactatataatttgaagcatagaatcacaattactttccaatgttatgacatcactgtatttgtgaataactatatgttcgagatttgataaaacttatatactaaatatatagttatgtataaaacatgtgaacaaagcatatgataaggtcaaattatgatttctgatctttattgaaagtaaataagattacaatgaaattggatattatttagggaatgaaatcccgacaaactcccacgtgcactaatataaaactaaaattacatttcaatttaatctcatatactcgatgtcttgatcaaatgtagtatttggcataaaatatgtaataggatctgataggttgtatttagcagcaacctactccaccatcacattttctttagccacaaaattcatgattttgtgaattccccatctatatgttttacttctcttagggtatatgattatttattatttggaaattgcatttgtgttatcgtggagtcacactaagcaattattccatgtttggaattatgccaaggtctgtgtcaaactttcccgagtctaaatatttctctaatttccattagggcagccttattattccaccttactataagagtttgtgattctatacaggcttttacacttctccaaaaccactgctccatccctagagtaatcaccatctcttaagtagactttttagcattgacataagtctagaatttgatttggtgtagcctaaaagttttgatagaacactaacatatatttccacttattgtatttcaagatatgttcgattatcttccaatgttccttttctagttttaattgatacttactcacagctcccactcaacaacagatatcaagcctagtgcatacaagagcatacataagaccccctaatattgatgcttaaaaaattcttttcttggcctttatgtcttagaaatagctaggagttagttgatcataactaacttacctaacatactgaactagagcctaactaaaggacacgtatacattagggacctaaacaatatatcactagttctaatttttcaactacgctactataaatacaaacattattaaagagctactaggcaatacgagtgttggataggatggtaaaaacactatctacactaaatgggtcttgatttgttaaaagataatactaaaattata

SEQ ID NO: 37438 - DNA, 3899 bp, Cannabis sativa
taaataaataaataaaacactacaaataatgaaagttgtgaacatttcgaagaactgaaaataaaaggagttactcaatatgaggatagctcaaataattaggtgatttcctcctacaaagtctgttgaaagctatcttgggtaccaattggtatagttctgagtactcaattattgtagggttagatgtttcccagttaaaataaatataaagtaagactaaatatatccaatatctaagtaaactacttcaaggccatgtttgaaaaaaggaatgaaaacaaaggcgttttacatttattcacttatgtgtgtttccttaaacaatcagggtatacataatcagtaaaaacaaggaaggaatatactttatgctagattcattctcattatcaccaaacccttttcctctgcaatttcttttcattaaggtagggtttgccaaaaagccaagtaaacttaaaaaatacttggagttgaatgaaagtgtaaagcaagaagaaagaggcattacccatgtataacttgaaagaagcaggcacagacctcttctctttagcccaaaagataccagatttctttgagtggtacaaacctgaatcaataataataggtcttgccctttggttcctgtaatttaaacacacaaccgaaataattatcaatccatctagagtcattaccatatctctctgtttctctaataaaatatcataatgcttactctttccaaccaatattactactgtgttccaaaaagttcaagtcccttggcaagtatgagaaaacatgcaacagataaaaacaaaaacaaaaacagaaaatatttaagaacaaaagaaagaactttcttccaaagattcattagagaaaaaaagagtttgtgattaccatcttgtgagtagagaggatagtcagaagcactgagattgatgaaccaatcccaatggtgggcagttctctggagcaaaatagcaacggcgtggagtgtagaagcaatcatggtggggcctttaggggttaccaaattgggattattcaccaccatgacattgctcacacccaccaatttgacatagttggtgagctcagctctctcgtcgtctgaagactccaaatcgagatgtacaacgtagtaatttctggggtgaaacacggcttgaagaatcctcttgactcttgaaccatctcctttggttccagatatcaagtaagcgaatctgggcaacttgggaaagacctcaggaccaatataggagcggcggtcgtggttcggttggtggtcggagtaggagggttgttcgggttggttgaggttggaagagaggagaataaggagaaagagtgctgaaacaatgagaagaagaagaagaagaagccatttgtgatccatgtaatgaggaaactggttccttttcattgtaactctttaaatttgttacagttctttagatttagatttaggacttggatttgttgcttcgagttgttgttggtgtcgaaactttagttcgattgttttttttttgtttcttattatttattattatctttttgtcggtattttattattattttgtaaaagattatttttaatattggagaggttactggattggacttttggagttggcgagagggaaatgataggtatttaaatacaatttgaattttctttttgttgagtgtttcctacttcagtgatcatccaacttggttgtgttatttcatcttgatcgtgctgtactatctatttactttatgtttcaatcaagatgaaagataataaatggtattaactaccctacaagcccggaagattaataactaagcttttagggctactttagtagaatagatactttttcaacaattagtttaggtacttccagtaaattgctaaaataatacagtaatatagtttatattttcacaattttgagaaaaatagttttcgaatattgagattaaattctctgctaaatttaacaaatgttaaaaattaggctgaatttagcttaagatataatatttttgtaaaatttgacaaataataaatatatattttttattaaaaacctaagataaaaaaagagaaaatagttttcattgattgaattaattggtacaaagagaagagtaaatatatactacaaagctacttgagttgtacctaactaatctataacagaataatttaacagacttaatagtccccctcaagagagagtgtagaaatttttaacacccatattaaatagaatattgttgaatggagcaagaaagaaaggctttgttaggatgtcagcaaggttggctttggatgatacgtgagtcaacttcagggaaccatttgttattttttctctgaaaatgtggcaatcggtctcgacgtgttttgttcgttcatggaagactaggttctcaaatatatggattgcagcattgttgtcgcagaatagaatcaaaggaagactgatgttgatgctgagttcctagaaaatggacatgaaccatatgagttcacatgtagcattggaaatggcgtgatactctattttgcctgatgatcgaaagacagttggctgcttctttgatttccatgaaatgagttatttgcctaagaaaatgcaatatcctgagattgattttgttgtgtcgacgcatgctccccaatctgcattagcaaaagcttggagcggaagttttggtggggggaagcataaaaacaaaggccttggccaagtgaattttttaagtagtgaggtactcttgttgcagcaagcgtgtgaggtagtctagtgttatccgcgtttctaggaggggacacaaggattctatgtcagtattccagatccatcagtaggaccctcatcaatggtaaggtgggccaagcccatcttaatatttcttttctgggagttatggttccgtactcgagataccttcaaccttctacatatcgatctcgtaagacaactccagagtcgtgaggccgaaaggggaaggcacactgttcccagaagactcttctagtttccctatttattctctcctataaataagggaaaaacagttctcagactggaaaataatatcatatcgcgatgaaagaggaaacttcccataataagtgcaagaacagttatttcagaatattctcccattataatcggatatggttttgacctgatcaactcaagctcgatttgcctaatagcagattgtatccttcaatggctagacttcatgagtaagcccatggacattgctcagttgtaaactccctagtaaaggaaaaaaagaaaaaccttaatgtgattctccaactactataaataccctactaatctcatagattaggagttgaattatcttacatacttttgtttaggcaaatatacgaatatacactctgcgtacttgtgagattattacaagtgatacactactgaataaaactgactcgtggactaaggtttgttgattccccatccacgtaaaaacttgtctattatactttctttatcgtttattatttcttcagttcttattattttactctgtttccaaaaatcttgggaaacattttggtacttttattgagagctgaaggaagcagtgaggatgactctccaattacgttcacgacattatggccctcaccaaaacctagtctggccttcattatactgaccctggtactagagcaagagatatgaatgatcccccgtaagtcaccagtcactagcaaagccaacagaatgaagaccaggatgttgacgctcctattatggaggatactgattagagctcaaatttatacattttaagcctttaattatatatataaaattaattaaattaaatatttttgtagttttctattgtaaaatttt

SEQ ID NO: 37439 - DNA, 3538 bp, Cannabis sativa
ttaattaattagtagtagtgagctaataagactggccaaactcaaacaaaactcttataactcagtggaaaaggataaatataattatttataaaatttagctatgttagtcgatattcttgaccaaataattatttaattgacacttaattaagttagaaaataaagaaggagtaataattatatttatctgttctgtttagttatttcttataacttggatacaactaggaagacacgacgaaggtcatttaatattattattattaataataataataataataataattaatactgttattattttaaaagaattaaagagaaagtgagaggccgggccaccaacctaaaaaaatgagtcaatttaggatgataatcattaaacacgtgctctatctatattatatcaatgtattaaaaataaaaaccatttaatttttattggctttttaaagaagattatttgaacatgcccatctcctatctccttcctataaatatacttggataattattctatgtattattttttttttaatttttttcttttttataaattttgggtttctattaagttattatacaattttcggttgagatttaaattactctattagttgcaatgagttcttattaagagtgttcacagattggtttggtccgaatttttataatttttgaatttgaaccaaaccagtataacggttttttgaatattagagaccaaaacagaccaataaatttctcaaaccaaacccttaagaacggtttgatttggttcgaaacaacggtttaagttgaatttataattattcttatttttttaagtaattgtactatttataataaatttttaattttatttttcaaaatatatatttaacatgataaataatagatctataacatataaataacgatataaaaatattctcaaaaatcaaacaatacataaaaattcaaaatttatgcaataaaaaattttacacacaaaaaagttcaaaattatacatataatcatatataaaaaatatatataaattaattatttattataaacagtccggtatttattacgaactgcaaccgaactaatatgttgtaaacggtccagtttgaccaaaccactagaaatagtttttccggttacgatttatagtggttcggattctcgtagtctgaatttaaatcgcggttttttagtttacatgaacagccctagtttttatgtataattccgtaaaaatatatatataaaaaaaaattgtttagaagtgtaaaaataaaaaaatttcaaatatatatcttatatttgtatcattttatttagatattttatgtaaactttttttttaaaaccgatttttttatgtaaacttgtacgtaatataatatatacataaatgatatatttttgaaagataagtgtaagtgatcaatatttcacgtgtgggtttgtagaaaaagcatatacattatatatatttatatatgtatgtttatataggacctatttttatatattttaaagttttaggatagtggtaggttgggatgagttgagtttggtaaggttttgtatagttaagtctctcttattgactatatataataacttctttatcaatacactataaatatattatttttatatttaatgaataaataaataatttcaaacatatatctaattctaagtgcatatgctcgtgtacaatgaaagtttaattaaaaacataatatttatataaaataggaaaatatatagagattgatgtaaaatttttgtaaagtattaaaaaatagtaacagcaaacatgtacttaaaagaaattgataaaaacttgtagtttacaaaattcttgtctattctagaatttgtgaagtattttttgtttaaaaattaaatttctaaagtattgattaatattttttttaaataaaaagttaaattttaatttttacccaaagcccctaaaccacttggacccaaaattataatttctgaagtattgtgatttgtgaataattctcctcgtgcactttaggtaatattgattatcaatttattatcatataattaacgaattaaaaaaatgtcttttttcatttttacacatttaaatatatatatatttttttttgcatttttacggaattttatataaaaactactattgcaattagcgttgtaacctataaatcgtaaccaaaaatcgtatagaaacctgtattgcaattagtgttgcaactagtgctgcaactattttagaaatctaaactataaatttaaagaaaaaaaaataaaaaacaacatataggataattcccttaaaaaaagtatgatgagagaactcatatattaattactctctaatcacatgagaaagttttataaaaaaatatctatacctataattaattatttagaaatgttaaaaggtatttatagtgtttagcactctcttacatgttaatatagctattggtctaactaaatatcatcttatataatttaatataataatttttaagaaatatcgctagttaatcacaagatgacacgtttaaaaaaaatactataaagtaatagtgtttaataagaatgctcttaattaatataggacattatgccttataattaataattaaagacagctggaatattgatggagattaatgagtgcatgttgaatttttattattaattggtgtaacattaaatgatttgtccattggtgggactcgatcaaagatgctcaagaggataatattattatatactctctctttatatatatatgtaaaaaaaaaaaattaaaaacaactcaaatattttaaacctgctctatcaaaaatatatatacattataataaatcaacctaccgtttaggagataactaattctcatttattaaacatgtgcactaatgattacatgatgtaataattataaaataaattgctaataaagggtactcaaaattctgtttatatatgatgtttgcaattgataatattttaatgagtaatttgtgttataaatatttaagtttaaattttaattataaataaatattaaagtttaatttttagcggtaatgataatacgttatatttttagaactttgtaggtaactgatcgtcaaatgttaagtcattattcacgtgttatttttttttattagtatatttacataatttttatttttttaaaaaaataaaaatttaatgattttgaccaatcaagaattaccacgtaataatttatttaataattaacagctagatacttacagaagttctaaaattataacttaagtaataagtattattattactaccaaaaattatatttaagtatttatttacaactgagaattaaatttaaatatttataacgcaaattactctatttttaaaaaattataaaattatattaatacaaattattaattattgacaagaaagacaaagtttattatgtgccaaattttaaaatatattttacaacacaattaattaaagtcacat

SEQ ID NO: 37440 - DNA, 2419 bp, Cannabis sativa
tagctttgagccaaacagaaaatcaaaaatgtttgacaaagttccgtcaaactataacaaataaattttgacatttaaaagtattagttaagaaaagaaaaagacatttaaaagtattaaatatagagatgtcaaatcttagaaactgtgcccacatacaattaaacaatacacatatctaacacttctaatttcagcaaaggcaacaaactagctttattagtgagtgtgaaatgtttagccaaattatactgtataatgaaaataaaaatagaggacagctttgcatgtgctttaatttctctcttttttttttttcactttcttaattaatttctttcctctttcaattgatattgatttatttataagcaacgatattaatagtttcttttcttattctttaaaatatatcactaaactcttattttttttttttattttacatcaaaattttacattataccatacattaaattttctttcttcttcatattatttaaatattatatttttaatatttattttaattaaaatataaattaataaaaatagaaaaaaaaacaaataaaaaaataattaataagagagaggaagaaaaggacaaaatatttgaagaaactttaaaatttatccacatgttatattagcatttttctttctaactataaggtaacactttataaatagttaataattttttttataattaatataaaattaaaatcaataaaattcgatattaaaacatactaatagtaatataatagtataaaaatactataaatactgctaagtacgatggtacaagtaggatggtacatatttgaatatggtaaatgcaatagccataacaactaaagaaagagtacaccagctcaataaattgataagtaattaaccatggcaatatttagaactctaaaactataaaaatactaaattaaagtgtttattaccagtataaatatatatttatgaactgggagttttccttttttggtaaattgtcgattaaatttaggtaatatgttgattaaacacagtgtaagtggtaggagcatatgtttttatttttgaacgtgcgtaatttaataattacactttttagatgattttgactaagcattccctcaagtctctaacacgacagtcgacatgtctccttaaataaagtaatcactcttacgtatacaatatagagcaagaaccataccaaacaagattttgctttgtttaaataataatgaaagtgtattaaaattaataagcacgtaggctaattcttgtttgtcattattccttagttcccccataccatgctttttcttgtattttaagccttcctcttttggactttttcgtgtcaaatttttatttattctagccaatcaaaatgcctttttaactaacttcaaaaacaaggaatcaagtaaaaaaagaaaagaaagcgaaaatgggaagggtaggttttcatgtcatttttctagtccatgttttcaactaaacaattttataaaaagtattttttcctaaagcttcacatgtaccaaatagtaccttttgaaaattttaaactattaaaaatttctctcaaattattcaaattattaaatttaaaaactttcgtcaaattctattcaattttattaatgaacgcctaatgtgacaattatctaataccgaaacattgggagaagtgaattatatttctactgatggtttagatatctccttgctatgttagatttaggattctctctctcttttttttttttttttttagtaattttattattttttatttgatttattttttagtaaagatttattttaatcttcaggtttcttattagaacattaaaagtgtattttatttatttgtaaaattgtaattatacaagaatggaaaggatgccttatataggcaatagctgaaccagtacaaagaagaatgtaaagtttttttttttttttggaaagttagatgccaaaatatttttttcatttatggtaagaaatttttgcattcatagccgattgtattaccttgtatattcggtttttatcgctcttttctatgttaagaaagatgcatttttcagctgaccttttcttatatggaaacttcttgtaagagaagcatttctcttatggaaagtggatttttaaagaaaactttgattattgccttttttccttattaaattcgattgtgtcttgatacaatcagaatatataaactgtttatggctgaatcaagactcaatagatgatcggattcgtttatggcaagtttccttttctggtctgatttgctgcgtcagatcccgattctcatgttgtagatcgtgtttatcttaggaaagttttgtacagctgtagattcgatcttgtggctgtctctagggtttctatg

SEQ ID NO: 37441 - DNA, 5306 bp, Cannabis sativa
agaaaaaaaaaaccaaattgtgaatagagagatggaaaaggaaatgaaaagactcagactcactttctctctcttactctctctctctctctctctctctcctccgcttcactctctctggttcagccaccattgacgtagctcccatttcttcctaagctacattctcacttggtgaattttccaaccttttttcttattctgatttaaatttaaatcatggtgattcagagcaattttgtgtgtgttcgatttttcaattgttaatttcatttgacattttaagaaaaggacgttttctgttgccctagatttttgtgaaatatgatgatgatcctctgctctgatctgatctctgtttttttctttttcctttttttaaatctctataattagtagtttattagtttttaattaatcacatttggatgtttaaaatgaaattaatcatatttattagtgaatttgattatattatagtgttttgttatatttgttgaaagatctggtagcgattgtagtttgatctttggttattatttgttttttgtttagagttttttggagctttgtattatcagtaagtgacacttaaagcagctatggtggataattgggttgaggaattctggtaatgatggttttctggctaaagttctgtgctttaagttagttggaactcaaatttaagggagttcttcggcatttgcattgccaggcgaggtacttctcttcttctttttttaatttattaaagaaatgaaggtttggggttgcaatggcaatgtgaagagttttggatatttgggtgtggaatctctggagtgaattatgaattggggttttttttggttgagggcaatgtatgaatgtaatcatcttcttttttctttggctaatttagtgaagatttatgggtaattttgattcaggaagccaaggtgaaattcaaggtgggcttatattgcaaatgtcaaagtctcccactccaaaacgccaagaggcagtaccctcatctacttctcggtttaggtcagtaattttcagtctgtagcttctaaatttggtgtctttttctggtattactggactggtcagtgataaatttgcaattttttttcgtgtgaaatgagaaatactaattaactggaaaagagaactgattagcactgtttttcataaattatttttaattttttagaattcaatatcttttttatgggtttcttagttaagaagtcaaatctggtattatttgtatatataatcttttgatgcactaagattggaaacctgatttagacttatatattatatacagggatttagatgaaatagcagaaatggatgatgcagaatctaccatggcaacagttgctcagtttgttgagcaactacatgccagcatgtcttcacctcatgagaaagaacttatcacagcaaaattattagagattgctagaactagaaaggatgctagggtaattattggttctcatgcccaggcaatgccattgtttgttagcattctcaggagagggacccatgtggctaaagttaacgttgcggcaaccctaagtgttttgtgcaaagatgaagatttacgtctcaaggtacttctaggagggtgcattccacctttactatcgctattgaagtctgaatctactgaagccagaaaagctgcggcagaggctatttatgaagtttcctctggcgggctttccgatgatcatgttggtatgaaaatatttgttactgaaggtgttgtaccaacgttatgggatcaactcaatccgaagaaaaaccaggacaaagttgtagaaggatttgtaactggggctttgagaaatctttgcggtgacaaggatggtaattggagagaaacatttgaggctggacgagtggatataattgtgagtcttctgtcttctgataatgctgctgctcagtctaatgcagcttctctgttggcccgtcttatgttggctttcagtgatagcatcacaaaagtaatagactctggagcagtaaaagttttgcttcagcttgtttgtcgggaaaatgatatttctgtacgtgcaagtgctgcagatgcgttggaagcccttttgtccaaatcagccagagccaagaaagttgttgttgatgcaaatggtattccgattctcattgaagctatagttgctccatccaaagagtgtatacaaggggagtatggtcatgccctacaggagcatgctacacgagctttagcaaatatttgtggtgggatgtcttctctggttttatatcttggagagctttctcaatcccctcttctaacagctccagtttctgatattattggagctctagcatacactctaatggtgtttgaaatgaaatccggtttggatcaggagccatttaatacaagaaaattagaagatattctagtgatgctactcaagcctcgtgataataagctggtccaggaccgtgttcttgaggccttagctagtttatatggaaacaattatctttcaaaatggattagccatgcagaagccaagaaggttcttattggacttataacaatggctgctactgatgtgcaagaacatttgatactctttttgacaagcttgtgcggtgatgctgttggcatctgggaagccataggaaagagggaaggaattcaattgcttatgtcactgttaggcctgtcaagcgagcaacatcgagagtatgctgttgaattgctggcaatcataactgatcaggttgatgacagcaaatgggctatcactgctgcgggtgggattcctccattggtgcagctactagagacaggttctcagaaggcaaaggaggatgctgcacatgttttgtggaacttgtgttgtcacagtgaagatatacgtgcttgtgttgaaagtgctggtgcaatccaagcttttttatggctcttgagaagtggtggatcaagagggcgagaggcctcaacacttgcacttactaagcttgttcgaacagcagattctgccaccatcaatcaactactagcactgctcctcggcgacactccaagctcaaaagctaacattattagagttttgggtcacgtactcataatggcatcacataaggaccttgtgcaagtgggttctgcacccaataaagggttgagatctcttgtccaagttctcaattcatctaatgaagagacacaagagtgtgcagcttctgttcttgctgatctatttagcacaagacaagatatctgtgatagtctcgcaacagatgatattgtgaatccttgcatgaagcttttgaccagcaatactcaagttgttgctacacagtctgctcgagcattaagtgctctgtcccgtccaacaaagggaagctcaacaaacaaagtgtcttatatcacaaaaggggatgtcaagcctttaatcaagcttgctaaaacgtcttccattgacactgctgaaactgcagttgctgctctggccaactttctgtgtgacccacaaatcggtgcagaagccttgacagaagatgttgtatctgcattgacaagagtattaagagatggaacttcagaaggtaagaaaaatgcatcacatgctcttcatcaactactaatgcattttgcaataggtgatgtgctgccaggttacagccaatgtcgtcttgttgttattggacttgttgactccttaaattcaatggatatgaatgggaatgatgctgccgatgctttagaagtcatggcacttttggctaggtcaaaacaaggtgtaaactttacataccccccttggtcttcccttgcagaagttccctcaagcctagaatctatagttcgctgcctagttgaggggcctcctactctgcaggataaggccatagaaattctttcaaggctctgcagtgatcatccagttgtgcttgctgatttactagttgctagatctggatctatgagttcactggctgataggataataaactcatcaagtttagaagttagtgttggaggagctgcattgcttatttgtgctgtaaaagagcacaaacaacaatgcatggaagaacttgatgagttgggatatgttaaatcccttgtattctctttagttgaaatgatgaagaaaagtaatagctgctcctctttagaaattgaagtcagaactcctaaagcattcatggaaaaaatggcagaccaggaagggtatgcctttgatgttcctgatgcagccactgtattgggggctactgctgccttgtggctgctatctctaataggctcttttcatacaaataacagagtgcttattatggaagctggtggacttgaagctcttgctgacaagcttgtgagttactcttccaatcctcaggtatgacactgaattttttttttcatattttgtttctattagtatgctggaggacagaccctttaaaagtgatgtaattaaagataaagcaaagtgacaaaaagaaagaaaacttattataaatgggctgtttttttcatgaaggagaattacaaaaattattgttgacttttggtgaaatcgtcaatttatgtttatttgttttttattttttaatatcaaattgatacaaattaatatcatcctgggattttgtgactgctgtcacagctttttctacagtttttttcattttttatttttacttcctgttttgtttactatggttttcctccgccttaagtgaggcttgcaatatatatcaaggggaggccaaacgagtggtctctttgtccatttttcaaaagaaaaaaacaaagaattcaaccccctttttcatttgcttgattaagtaagattttttttctttttagtgaaaaaagttgcgaaggaaactcatactattctttttttttctttcttgcttgctatcattattattgttatttcttactctctttctctattgtatttatttggttatagttttatagtatggttagtttttctttttgtcatccaattgtaacaaactcggtgaaatttttgtatgatctgctaatatgaaaaactatgttttgctgtttatgaacatgaagaagataatcaaaattccctttcaactttcatgtgtatatgctaccatgcaatgtagtcatgtacaaatcaagcatatccaataaatagaagaaaaaaaaaagcacactttactaatttcatgaacaaagctaccgacttctctgcttgcgattctggacaatggataaactagacttaattgtactggatagcttactatttactgtgaaaaggtct

SEQ ID NO: 37442 - DNA, 4492 bp, Cannabis sativa
  modified_base (1853)..(1854): a, c, t, g, unknown or other
  modified_base (4102)..(4109): a, c, t, g, unknown or other
atcaattgggtagctttaaattgttattacaataaatattatattacaagtaattagaataattattactttgtaaccccttcaattttgtaagaaattattatctactccattaattaatccaacagttttatttatctttttcctgttatttataatgaatcaaagcttcaagttcaaccatatcatatcataatcatccacagaattcatcttacactatagtaaaaattgtatctaatactctatgctttagaagatacaatagacttgacaagatgtcattttcacttataaatcttaaaaatggacatgtatgaagagtttcatacaagcactacaagtaaatccacaggagtttcaccaaggctggtatgtgatgcttctctattacttttctttggttagttattgttgctgttatttgtagccaaaggaaggaaactgaaaatgagctgtgttaatttgctttgcattttgacagagacactgaaaatgattttacaggagtgaataaggcttcttcttcttcttctgcctaaaactttggagtggaaatattattaaggctttttgtgagaagatcaacatgaaccatttgtccccccctcattggacttcttccaatatggtacccgacccgacccgaagaagacccaagtgtgattgaagtgagatgactaaatgggtattgtatagctgtattgtagagtcatgtggtagttaaatgtaacaagtaacaacttattcatatacttttgcattgtaattataaaggcaatcccattaagagtaactggtttgatgtaaatacaatctatcatcaatcatgaaaatgatcttctaactttggtcccccacactacagttatccttatcagaatctggaagaaaaggaatttgggacccctagtgtttgcttgctgctgctgaaaagctttgatgcattgcttttgcttcaaatagttacaaattagaaactagtagaagaaaacaataaatcacatttagcaaaatggtcaaacaaattagactcaattttcttatatatcattaaatataagtctcaccgactattataataaagttgagattttaattaggaaagagcatgacacgtgtcatgtgtctcagtcagtcaaaattataagaagaagacataaaaggaaagtacaagagagagagagagagagaatagttctccaacagttaaagcttgaaactttctttgttttcctccaaaggggatgaaatggttggttcagattcaaaaccagaggtgacccagaagaggattctgggtattggttattgggtacagggattcagatgcatgccatggatggctgtgattttcttcctcaaagatgggattggagtggatccctccaccattcagctccttctaagctcagccaatcttcccatggtggctaaaccactctatggtgtcctctcagatgctctctacttctctggccagcatcgtattccttacatcgcctttggaggtactaaatatatatatatattcttatttaacattcaaaaagtcaaaagcttgatcctttttgccttttctaatcttatagatttgtatgttatcatttatcaaaaggggtgcttttttctcaatagaactcatatatgtgttgtgtatgtagtccataaatttagcagtgaacaatctgagttcaatgtatttgcagtgaactatatgtttgctaatggccataaatttgttcaattgcaaatttgcagtattgggttttttaaggatgtttgagtatatattgttaagtaccataaaactcatatattgatattgtatagttgtatatatatatatatanntgtgtgtgtgtgtgtgtgttttgacttagtgatgagagagtgagttgtgggttgttgaggttgtgtgtgtgtgtgtctgtgttttgtgagaagtaactttccaacaaactttaaggacaggagagacaacccgattcgagttgcttcctacagctgcctcctttgagtttctgatgttgaagtgattatcactacttagagaggattatatagtgaaagttgagtttgtcataaccgagaagagggagttgatgatgtctgcaattgaaatttgtcaatcttcttagactcgaagctaaacccgaataagcagttgaaagttgtagttgaagttattggagaggaacttatttttcttcttagggagatttgtaatcttttaattaattggccaaggtagccattgataatacgacaccatgaagttgcagattttgttgaaagattgtgttgtttatgttattctacttggattgatttagaaacacttaaagggtgtgcttttttctgattcaaactctgttgttacagctttcttacaagcactttcatggctggcgttagcgattctctctccctcgaacattacaatattcaccatggccttatctctcctacttagcaatctcggggcttcaatagccgaggttgcaaatgatgccattgtagctgagttaggctcttcctcgggtgagctccaatcatttgtgtggatagcttcatctgcaggaggagtcctagggaatctcctcggtggtctcatcatcaaccgagtctccccacaaaagatgttcctcctttttggccttcttgcatctctccaactctttctcaccatcatggtaaaagagagctcactcaaccttcccaagagggtatccgataatggggttagaaagcaactttcgcagctacaaatcgcgttgaaaaagccagcaattgcacggtcaatcacatggtttgcattgtcatatgcagcaattcctgcattgacaggcacaatgttcttttatcaaaccgaacatctaaagattgactcatcagtgttgggaatctccaaagtgtttggacaagtaggaatgcttgtatggagcctagtctacaatggccctctcaagcgagttgcatcatcaaggaaaataatagcagggcttcaagtggtgatggcattgttcatggtatcagatgtgttgtttgtgaaaggggtgtacagaagtattggaatccccgacggggtgtatgtagttatattctcggggcttttggaggtgcttttcttcttcaagatactaccttttagcgtagtgatagcgaggttgtgccctgcaggctgcgaggggtctttgatggcgtttgtgatgtcggctatagctttggctatgatagtgagtggctatcttggagttgcgcttgcagcttgtgttgggatgagccctgctaatgaattttcagggctaccgaaagcccttatagtacaggcgatttgcaccgttgtcccgctttattggtcatcttgtatcccaaatgacaatgaggatgaacatgagcatgagcatgaagagtcttcatcttcttccaagaccaaaagtgaataagaagaattaatgtagagttaacattaattcttggttaaattgattggatgttggaaattcttcttttcttttcatatttattcattatccatttaatttttattttgtattgtatatgttatgtatgtatttatattgaaaattaatagaggaagatgtatgtatgtatgtattttttttttattagagttactttctatggtttttgtgtgttttttattagttactttatgtttaattactttactttaatagcttaggtagattattatgttagattataaggaagtgtgtctgagatcaaagaagacacaaaaattatatttataaatatatgtattttttgagtcatttatttgcaagtaaattaattaattaatggcttaaaacaataatcttagttttgagtcatattttggtttttggtcaaagaaatatgcatatttttaaatgttttaagtttatataaaaatgagcttatatttttttttttatataaaatatttacataattttttatttattttaattcaaagttaaataaataaatttaaaaatatgattaaaaatatttataatattttaagtattataaattaaaattaaaatttctttatataaaatatcttcttaatttttatttttaaatatannnnnnnntattataaaattaataaaaaataactgttaataaaatccttcaaaaaaaaaaaaactgttaataaaaaataaatataatcgtttaggaaataaaaatgggggcatttatttttaaatataagtaatttattattgaaattgacacaaatatctttaagcaaataattcttcgtgggatattttccattttaaaattatatatttttagaataatactaaaagattaagatatatataaatatctaggtccatgatgaatattagttttcattatgatattatctttgtaaaatatgatagggaattttattattttgtaaaatatgataggaaattttatactgtttgctccaaatagtaacagatatttttcttctctatta

SEQ ID NO: 37443 - DNA, 2758 bp, Cannabis sativa
atagtaggatgttaatcaaacatacttggtagtaaatctagatcctgataaaatatttccaacagtatccaccaggacatcgtttgtatggtagatttcctaacagaaatgttgcacctgttgaaaaacctaatgccaaagtagcaacaatgggggaaaaccatcagctgccaacactatcagcaaccttaagtagaaatctggggaaaacatagatgacaatcaggacttggtcaatcggttgtccatgcagtatcaacaaatcttggcaatgctatctcaaagaacctctgatgttgccataaggagtcaagatgattgtcctcctctggtttcacacttcaatggtaaatcttttccccattctaattctaaagctagctggattattgatacaggtgccactcatcatgtttgtaatgatatttcactcttttgcaccagttgctaagatggttactatcaaattgattattgccttggctgccattcatgattggtttctccatcagcttgatgttaacaacgtttttcttcatggtgatctccatgaagatgtttatatgacactacctccagggtattgtcctaaggggcacactctaccagctaatgtcgtttgcaaacttaaaaagtctctttatgggttgaaacaggcttctacgcaatggtttgagaaattctctaattccatggttgaagaaggtttcaaacactcggccacaaatcattctctctttataaaacactttggtacaagttttatcttgttattgttgtatgtggatgatgcgattgttgtgagcaaaaatttggctgagatgcagactttaaaaacgagattggacagcaggttcaagctcaaagacctgggaggtttgaagtatttccttggtcttgaaatagctagatccaataaaggaatttttatgtcacaaagaggctatgctcttcaattattggaagaccttggtcacttgggatgcaaaccagcaagtacaccaatggaggctaatataaagttgtgggacaatggtaaagattctctagctgatcctaaattgtataaaacaatcattggtaagctacaatacttgactattacaagacccgatatagcctactcggttaacaagttgagccaatttcttgccactcctatatcaacacacttggtggctgcacaaagaatattacagtatgttaaatcttcccccaggagagggactgttctttgctacaccatctaaggtgcaactaaaggcttatacagatttggattgggcagcatccatcgatacaagaaggtccacaactagtttctgtattttcattggtgattccatagtctcatggaagagcaaaaagcaacaaacggtgtctagatcctctgcttaagcggagtatagagccatggcttatacgacttgtgaagtcctgtggttactttccttgctccaggaattaaaaatcgaacacaaggcatcagctatattgtattgtgacaatcgagcagcacaacacatagcctcaaatccagggttttatgaaagaatgaaacacatagaaatcgattgtcaccttgtgcgtgaaaatgttcaacaaggagtaatcaaaacggcacatgtctaaactaaagagaaggttgcagacatcctaaccaagcccttgtttccaactcagttcaaagccttgaaagacaagattgaattgataagtatatacactccatcttgagggggagtgttaggctatgttctgagttagtgtcttggtgttaaatgccaaaatattacatattttatagtgtaaaaatacaaaataatattaattctctataatattttaatgaaattaatgcaatatattttatattgaaaatattttatttaagattaattttatctttgtttataaatactaattagtatttatggcataatagaaaaaaaaaatataaagttaagaaaatgcattgtttttatttaaagaaatacaaattaattagattttaaataaatattttcattaagattattatgatatatttcatgttgaaaatattttgtttggatttaatattgtttgtgtttgattgaaaaaatatcattattaaaagaaaagaaaagatgataaaaatgaagcccaaaatatgagaaaaaagtatttttgcaagtaagaaaacccattgcaaaaatcccataacacaaaggcccaagtcagccctttcttgacgtggcgggctgtgattcgtgcgacaaaaaccaaaaaggagcagcagcctcttgttcccctccgccagccacgcgtgcgtgcggtccactcccctcctgggtcgtgcgtgcgtgccaattcccgggcacgcgagtgggcctcgtcccaccttggtcaccaagcttcaaaaaggaaactttctcctcttttctgcatgcaccaagagtcactcaaaggcccaatttactattttttcagccaacagaagcttgccacgtggcaccgcttgcccaagtcagccaatcaaaatgcgacacgtggcactccgatattaactttatgtatttacattttttacccacatgcaatttgtaataagtttaattgcatattagggtctgtttggaaacaactgtatagttcttacattgtattttaaaatacaggtgtgtttggatatcaagtggtaattacatgtgaattcttaatatcatgtttggcatgatagttagtaattacacagtaaattaatattataatattt

SEQ ID NO: 37444 - DNA, 3719 bp, Cannabis sativa
  modified_base (860)..(861): a, c, t, g, unknown or other
aatcccataacactctttttttaatttttttttatatatttttgagggccccaaaatttaatttgtcttgggcccatatattttcagggccggccctgcccccaccacactacatataatattagtaacacttcaaaatgttactattagttacttatactgaaattaataattaaatcttctgtgactaaaattaaagaaaaataatttataattatttatattataattaaaatgacaatttttatttatgaatgaggaccaatatattagattaattacatatatttatgtataatctcataaaatttattaatggcttgttaatttctccatgtatttaattaattgtaaaccaaaaccaaattattaaacactgattgtataataacattagacctatagttactcaatttaattttagttgtttaattatattttcattatgataaatgagaatataaatatcaagaaaattgggttggacaagctaaagttcggttttccttaaaaaggaaaatattaattaaaaataaataaataaaacactgaaattaatttaacaaacgatgtgtgttatatgctgtacttgtaatgagatcattaataaatgaatgaattaagtgcttctaattaatataattacctttcaacaaaggcaatggaataaagttaataaaattaattatttgcattgaaaacaattgtgggctatatacacacaccaataaaatggtccaaataatagtactagctatagctagatatggccatatatctataaaaacaccaacaaattaaactagctagcttttgaagatcatgcatggaagttaacacttcattctctctctctctcnntctctctatatatatatattctctctctctctctctctctatatatatatatattttcttttgtctaatgaaaaccaaccacatggtccttacatagacagcaacattaaaagtgtgtaaaaatttattattatgagcattctcaataatttttctattctatcttttattattaaatttttactttatttttatattaaactatatctataacttctttaaaatacattattaatttattaattatatatttatttcaaatatataatattaatatatatagatatacacataaaaaataattattaaaacctaaaataattaataaaatatgtttagagcaatgtatacaatattctataaattgtacaacatgaatttttatcgtatttttaatacggttttttaaattttttaaaatttctctattttaaaaaaaatttgtgcataattaacaatattttttaataataattattaaataattaaaatatgtgaggcctcctataaaaaaaatgtcatgtacaataggttggatatttttttttggctgaatcaacatgttttggacaccttaaaattaatgccttataacaatactcaaaatatgatcatataaattatcacaaatgtaatataattcaagagaaaccttaattataatacttcttatcagactatacatttttgctttctaaaccttattttaacaatatatatatgtaattagttgtttgatcataattgggttggtttgaaattaagagtactaatagcactaattattctctttataaattttaacatcttttttcttttcactaaattattggaagaattttcacatgcagtcgtatcgatctaactatatatataaatatatatagctctagggtttctagggtccaattatatttataaatacatatatattaaccgacacatattgatgatcatataattttgaacttaatttatttagttacgtgtatatatatgacgacattgtaaactagtaactaaatcatcctaaaaaaagttaattataggtttttttaatttacatatatctaaaaagattcataatacgcaaaatatatataattcataggcatgcatgataatcacgtgttagagcaaaatataaagtttctttttaattaaaaaatggacaaaagaagacaaaaaaactgggtagcttattagtgactgtatttgcattatatatatttatacaaaattaatatataatatacgtatttatatatacatatatataaatacaattcccttagctattttgagctttttattcgttagtatctaaatataccttgtctcttttggaaatgtaggggaacatatttatgttatctaaatctttgttgttgttttggtcggaaaggaagtcattttttttttaatttaaattttatataaatatttgctcaatcgaagagagaaaaaataataaagaattaataattatcatgcatgatatatatgtatatttaatggtcggaaaggaagttttttttttttttttcttttaatttatagatatttggaagtatatatgtactcatgcatgtgttatatatatatatagttagaatatcatcatgtatacatttaattctccaacgagtatcgaatgctgatacatatttatatttttatatatatatagccactaaaattagtttttgcatccccaaaaagcaaatgagataggaaccaaaccaagccaaataatcatgtaaatagattatatattaatttaactatattcatataacaaaagtaaatatatggcccacttcatatcataatataatacatatatctcacttattcaaatccatctgtataagaatatcatatatgtatatatatatatagagagagatatatagtgcacatttagatttctatataggctacatacctatagctagtatctagctaggtgtgaactataaaactaagttcatcaatattttatttaattatcaaaataatttattggtaataatatattctaacactttttaatacaaataattgtgtagaagtatatatatattattatgtgaaagtgcattccttaataatttaagcctgaataggatcaatgaatcacaacatcatgctataatatatattttgcatatatatacatatatattctatatattattatgcatctcctgaaatggaacttttattttacccaaactgcttattattgaactatatgatatacatagtatctttattattatattataagaaaattaagtataataataatgacatatccatttatataccaaccccaccccatccaacaccaacaacaaaaaaaaaaagatttatcttcaaattatattcctttattataaatttgaagtatttttttgaaaatttacttggatacatgcattaatatgatcaatatgctatttgcacggctttcaaaaaaaaaaaaaaaaatgctattttgcacgtattaaacgtttattaacatttaaacatgtttaattaagatatcatattagttctccagcaatatactatttattatgacataattatttcaaaattatatttatatatatactagattgttattatatatgtgcaatgcaatatttaattgtatgtttagttttcttttaaatcttatattttagttatttgaaaaaggaaaaatcatcaagatttctaagggttggcggtggtatttgttatttcatgtattgcaaatattgtaactcatgtgcattaacaaagtctgttactagagtttgagtctgaacggatgtttgtcataaattttttagtgttcttgtaat

SEQ ID NO: 37445 - DNA, 6474 bp, Cannabis sativa
aaagaagtaagttttcaattaaaagtacatcatgttttatgtataatgtattatgctattataaagtaatcgattactataagttttcggaattcaattcaatgtgacttttctttggcaaacttttggccttccttttattgctaaaataaaaattagtctaatttagagctagaaattctaaaataaaataggatcgaccctgaattttagtggtatgtcccagtattttcaaaatcagtaaaaacaatgtgcgtatctttcaaaagaattttttttgggcttttagactaggtgggcgctaggcacaggcctagcgtacctatgcccaaggtcagtatttttatgttttgacctaaacactctccatggtaatttttcattcaataatgtacaatgagcttagctaaacaagatgttattccctcattgagagaatactttttgttcaatacccaagtatggatttaaattagtgtttttgctcttatgatcatgatctttcttatttgatttgagaaaaattctatagaaacatatcttaagttttctcattcatgtgctcatataacaagatttggttatggatttatgtattaaaataccattgtttatgcatgttgcttgtattaaaaatcaaaaatacaaagacaaaaaaattatgcatatagtactaatttatttacctgaaaaagtctcgaaagcaatgaatgaagtttcattctcagctctgcattgtgaggcatacttttgcattcttgttcactacataaccctactgaatcatgtactcgaagcaagaatcgattcgatgaagtagccagttgttgttccgcttcacaatgacttgatgactcattcaaattagttctttcttcacccgaaacttgcttaacaacagattcaatcttgtcaatcatagttcgttcccttgtcatagattcaatctcaccaacagacggatttttagtaacatcatcaaccaattcttgacaatgtgtaacataactttgtacatcattaggcataggatacaagtctctcacaaactctttcacatttttctcataaattaattgtgccccacacattttcacactcacacaattagtagtactattaatcaattttatagaagctacaacatgacttgctttatccaaaagcccttcaaaagattctcttggtatatatttacaaacacaactattgttgtgttctttcacattgaaaataccaagaggaatttcaatgaaatcttcctctgttgtaaaatgacaactataccttgttgaattgttagtattattttcttgtttttcttgtacttggaaaacaatacataaggcaagtcccatccatgtactcatgatatgattattcaaatctggtggtagttgaattgtaacaaaagattcactacttgagtaactgcaccaataaggaattgtagcttgggaaagaacatttccaaatgcttctcctctataaatatcatcctattatatatgaaatagtaataaattaacaaattatatatgaacaaaaaaatataaaagaagataattgcagctaaactccaatatatgaattaatttacctcacatgatgtatgaagtagggggtaaaaatgttctcttgatactccaactctgtattctttgccttctgtacccaacttcgattttcgaaaatctataacacaaaatccattagatgttgtccatacaatagttccatctagatcttttagttgagtacaatcacgagcattgacatatttgacactaggagaaactattggcaatgattgaagattgtcacaaccattcaatctaagttctctcagcttagaaagttcaaacattttacttggtaagctcttaaaattgttctcactcaaatcaagtagctctaatgatctcaactcccaaaaatcgtccggtatatcttcttcttgtagattgcatttgcttaaatctaatgatttcaaagagactaaacccgaaaatgagttaggtaacatcaagccaccgacggattcagagccttcttgttttgttgttgttacatgaaacaaacaactacaaatgagggagaaccatagcttgttacccgacatgatgatgtcactgcatccgcgaaaagataattgctttaggctctttagttgtgtgattgaggaaggtacttgtcttatggcggttttacttgcataaagctcttccaaacactccaaactaccaagattttcgggcaagtggtcaagacatgaacagcctgagatgttaagagttgtaagattaatcaaactactacaaatgttgtgtggaagactctcaagttttttacaatctttaagattcaacaaagtgaggccactcaagaacttgattgagtctggtaattcggttatggctgtcccattcaaatgaagttgtgttaactctttcatgttgttttttcccacaatctctggaaatttgttgagccttgaacatcccgaaagaattaatgtcttgagagattctaagctcatctcattgatgagtgttttgattgattcacaatcttttagattcagtaaaacaagtctcttgagaaatccaatggatgagtgaatcattgatagttttttgcagcctgcaagaatcaatttttcaagatttggggttgtgttgaaatttggagtcttggtcaagttgtgacagttgctaagattgatcaatgttaacttttctagtacctattgaaaaaaaaaaatcattaagtagagtgtagagataattagatattaaccaacacaaatttgaattttcttaccatgttttggttccatagttctttaatgcaactgtttgacatgttgagttcaacaagattttcgggtttgaaacttgatggcatagatgtcaaaggatatctatgccattccaaaagtctcaactcatgagaaagatatccaagataaccagaaattttgacattagaaatcttcaacaatcttagcttacacatgttcaagaatggatcatcattcaaaagtatttcttcttgtttaggcgatacgaaaaatatgccttcaacagcttttgttccctgagttttacaagccataatatgagtttcaaagctttatttcaaaagaaaagaaatgtaagtattcatgtttgtgattatgatctcttaccgagttcttatcgagtatttcatgaacatccctatgaaggaaaagcctgctgcgcttcccgggctcttgaggagattcttcacttacaatttgcttagctaattcttgtaagagatcatgcatccatattttgtcaccaacaatagttaccatagatttttctgtcaatacttttaaatcgatacccggatagcattcgcagcattctaaaatctttttcacccgaatttcgctctctcccttgaaaaaacaagcaatatccaaaaacattttcttctctgaatgctttaatccatcaaaacttactttgagaggaccaaaaatgtcattttcaggatatttcccaagtctttctaatgcacttgaccattcttcctcacttctttcaaacaaaaaagaccccaaaacttgaagagccaaaggaagtccatcagcatatttcacaaccttgttagttttctctataaattcatttgcagggtggttattcttgaaggctttcttgcaaaaaagcctaagagattcttccttagacaacttatcaatctcatatacataaacattattttctccaaaccttttcaaccattgcttgtctcttgttgttacaatgattctactccctttgccaccaaagtcaccttttccagctaaagcttctatttggtctaacttatcaacatcatcaagaacaataagtacttttttacaacgaagtctgtctctcaaaacatggactcccgttcgaacaaactctacttttgcctcgctttcaagcaagaagtagtaaagtttctcttgcaaatggcgaaggccgtgcctctcagactcctctctaacattgtcaatgaagcaacttgcatcgaacttatgtttaatctttctaaaagcttcttgagcaagcgtggtttttccaatcccgcccatcccccatattcctattgcacgaacatcagatgcctcggtgtccaagcacgacaacagtttttccgttcgagaactcattccaactaactccccatcacttacacaactactcaatgatgagctattcaataaggtaaagatttctttaacaatctcatcaataacttctgactcaggcctgagaaaaaaagaaaaaaaaatgttatataagtaagagaatttctctagtgctctttctaacataagaatcaccatgctccctctctcttttctctttatttctctccttaagcatgagaaagaaagcgagtgagggagcataggacttccccgagtattggtattaggcactatgacacctaacatcacaataaagtgacactctataaatgattaacaattttctatacttattattaacgtaaaataagtagacctgatattaaattgtatgagaatttttctagtgcttttcctaaataaaaggaaacatgagaggaaaaggaaccaacaattgttacaattaggtgaatttctttagagctcggaagcaccattgctttccgttttttttctctttacctttctcttatctcctgcttgagtccctctcgaatccctaaaagaagagggactcgagcaggagaggaaaggatcaccaaagaaactccttataattaattgttagccacaaacaatgaaagaagttggagcaaaaaccaaaacagagctaatactatatacaaaacaaacatcatatgtaagtaaactaataagataatgttgacttttgagtagaaaattaagtaaaataagaaatttacttctttaaactaacaagaaacttagtacctctctttcaaatcccatccagagagattagctatctcaaaaagagatgttctccacttcttcaccttctcaaaactatgatctttcaaagattcatcatcatgcttagcaaaggcctccccgaaaagacctgtttgctttctaacatgcgacggatccacatgataaaaaaccggaaaaacaatctgtcccattttgtgtctgcaatctgtaatctttgaaacctcctccaaacaccattttgagaaggcatagtttggtgagaaaacaacaacagcgaatctcgattcttcgattgctttcaatagctcaggagcaatgctgttccctctcttgagcttatcatcatctctaaaagtatgaattcccttcttttccaaagcactgtacaaatgatcagtaaagctctttcttgtgtcttcacctctaaagctgaggaacacatcaaacttccatgattccttcattgaagccatgataataaaaacaacactcttatgtattaattcccattaatattcagcttcatatacaaaaatttttaggtgtgaaaagttcaattaatcctcatcagtggtgctgtaaagcttaatgctttaagctttttaaaaagtgtagaaaagaaagaaagaaagaaaaaaagaagcacataatgtggaaattttaatatatgtattatatgtccatctaacaattaagatattgtatagattataatcacgttgatatatcttctaaggagaaaaatgaaatattctgtaatattaacatattttcaataaagcaagtgcttagaaccgtccatttgtccttttttgattggtcctggactaaggcaggtctgctccaggtctaatgtgtcatacatcttaactaattagctgtgaatatttgttgtttacaatacactcaattttacttaaataaaagtataataatgtctttaattttttattttaggctctgaaaaaatgtgacccctaaatatgggtttagcctgcttatacctagtgtcggccttaatctgtgcctagagcctacccaccaagataaaaaaaaaaaaatccatttagaataagttttgaattcatgctatttttttaaatatacaattaatagaataatcactaaattatatgagttttttatagtttcaattctgtattttatagttactaacatattatttcattaattgtgaaataataaagttggtattgaaacatatatttttatagttatagatcatgattttgtaactacaaaatagaaaattagcaaagaataaaaatatagaaaaataaaaatacaaagtttttatacgtgataggtcatgcctaaagataagattattagtaatatcttaaatatacaaaatatttggcttatgtatataaaggctatttgagtgacaactagatttaatttatcacaataaataacataacatatttgttcaactttcccaaaataaaaaaattagtcatcaaatatacttttaatag

SEQ ID NO: 37446 - DNA, 6390 bp, Cannabis sativa
accttccatgtcaacctgcacgctaggtctagggtttgccccgcctgggcacaatttttaaaaactcaagtcctagcatcgttctttgttggatttgaggaatcgaaatgtaaagaagtttccgaaaagccaagccctagttgtcgtgtctcccaggttgactgagaatgtcaacctgggtgctgggtaccctggcactcaagattggaaatgttcaaatgttatttctaggcttgtagcttgctttgtggcatgtttctcatgtatctgagtgcaaaggcttagcagtttgcatagagataatggctaggggaaaggaactaatgcattctatggcacaaaactgtcaacttcggcactgggcaaggcccttggtactagtttgattttcaagatgccgagttgacatccttagcttcttggtccattgtttggagtcttgaatgacaaaactttgaaaacgactttgtgggatccaagtgcctactttggggactcagtgtccgagtgacactgcactatcctgggaagcggggccccaaggtttgggtacacgaaagccatttctcttgctggtgacttgggctgaggctttccactatcttaagttagtcaaaatgttcaagtgcccgtagctgtagccaatgagtggactagaaacatttatcctctcctcaacctacatattctatggacactttaacccctaaacaaccttaatacacttcgaagccatctttggcgttcagctctcattgatactgtctcagcggcgttgggcagaatgctttgaagatttttaacttttatagttatctattctttatttattgggtctctttctctttctatgaactcactgttatgtagaacgagggagaagtagattggtgagtggtaagtggagagagtaagtaaaatgaatttttattttatctctacttttcaccggctttctttatttatttctaattatcattatcggtcaacatttggtcatttttagggtgattatcaataaaagacaaaaggaacagaaaaaaaaagaaccattaaaatatacctcagaaaatttaccaacttacaactagatccatttggcacaaaattaatagaaagttagacaccaagagtttacgctcctcagctaccaagcaccaagcatagtggttaaattttcttctaacaaaagaacacgcgcattgtttttcctttcaaagctgtaattcatacgagggatctatcatgttacaaaacttttttacttatataattttgactttctggctctagttctagatacactctgcgttcaatgtatagctatgcactatatacagaaaaaatggctgcactatataattgggatccttcacatcccgacctataatagcgaacaaaaagtggaacctatatttgggttcgtaactgtgtcagaagagactgcatactttcaagtttctgagtaagttgagtgatagtagcaagatttacaggagaatctgaaccttctaaatcacttacaaaagtagcacactgggcttgtgaatctacaatggcttgctcaagtgaagcaactgttgattccaaagttaaacgtgagttttcaccttttaaatttgatgaagttagcccaatactagaagcactagcactgagcttctctggggagaaaatcttgtcaatgccctcgcttcctgcaaatttatactaaatgttatcatttcctaaagaagttcgacatccgtgtgaggaaatggaataatgcaattaatttcttattataattgcaaaatatattcatttctcacaaaatgttaaaagcatacctagattgcttagttgatctatggctgcttggccaacggacccctccagcttgagtaccctcagaatgccagctgttattctacccattgagtcaacttccgacttgcacagaaaagcaaggtgttgcagctcatccttcgtcacaacggcctcaatctataaagataaaatttcatggtgtgagtatagtgtgaaagtagatctttcatacgatgaatcattgattattatgattttctattaaaatagtcacttgaagttaaggatcaaatcaccggttccttgaccgagaatttcacattttccacaatccatttcaccatttcactatcgacattgttctctgatatcacaatgcgagtttcaacatttattcctccaactgtctcaacaggttctttgatcccatttacttgagccacaattgagcggttgtccttttgggcatgaggctttaaggtctgcaagccttcaataccaacctgtaaagacttataatgtgagaccttaggtaaaatgtaatcaatgtgcattgtaacagaaacaaaacgattctggacctagcacgtcaatataagccaacataggcttcaaattaacaaattttcagcaacaaataaatgggctaatccaatttcaacaaatcatgacacatggtataaccatcatatatgcttgcttgatattctagcttccacatattctagaacagcataaatattttcttaagatatgcttctaaacaatcaagttgaatcaaccaaatttccaattaattaagaacttctaaactagagaatggtattaacaatcttataaacacctttaataaactctatcaagcatgcatgaaaacacttactgtaaccaattcaacaggatatttctttattccatgtgtactgccattcttctttggactactttttgcttttactcgtacattctggaaagttgtgtgccaacacctttcttctctgcctaaatgttcattatcagaaaaccaccaactttctgccatttctcgtgcaccttcaagagcaaataaccagtttttcaactctatagagacttccacatcatccggctttcccaagtgcaaaagagtgctttcttttccatctcccaaacttccatctagagaaaagtatgaaggttaataaaaaagaaaaagaaaagactgaatgaaactatatgtaatagagagaaaagttaacttcatgactaagtacatgaaagatggtgacctatctgataaattcaaagtaacccaaataatttctttcttaccgtcttccatatcatcaacaaaagatgatgttttgaaaatttttgacaacggtcctgcctttaagttatccaaccctttcgagagcccttttccagggccaccatcagggctcagtattccaaagcgatgcaacagagcttcagcatagttcattcctccgcctaagcgaacacccgaaatacaagctgacacattcaaactatgacactctatgtccacttcattcaaaggaatgacattttcgatgttaatatccaaaaatggatcaacagaagcaatgccatttggtttctggtgttttggattatgtatccaaagaacagcttttagctgtggatacccagtcccacacatagaaagaccattttcattggaaattagtgcagtattattctgatgaaccaaattaccctcagtgtcaacacagtctacctcaacattatcccagcgcaaaatggatgaaacagcaactgcgccaccaagggttctgtgagtaactttgataaatagatcattcccaacaaactgtaccagaggcattccctgaatattcatagaagtagactccaaaaatctaagcttaaggttcttgactgctaaacttactcctgtatcactaggaaccttatctataagcctttcatgagaagatcccttacagttctttttcctggcattttttccaatgagaacaatcttttcactaactttgccaaagtatgcataaagatccaggacaaaaaataattgttcaactgaagtatttgacaaatattgttcacaggcaactcctattctgacaataccacctggaggaggtacgtttgttaatgggctcccatcagcagttaccatagctacctcaatacaagcatctttaagttcaacacatctccacaggtcagaggcagaattaagaacaattttaaccctagatgattcggctgatgtttcaagagacaaactaagttctgaagctccagcagtccatttcttttgactcgcatcaacaggttgcccttcccagagacaaaagcaagcaggatctctctccagattcagtagcttcaatttaagtgaaggcgactgtgaaaagaataaatcctcaatatgaagccttgctccagtaaaggagttttgagcaataatatccctgttgctagcaggacaacccaatttagctggatccaaaggaactgtaacatctagctccatcagattgaaaataaatgagtttatggaaaaatctggtaaaacagaaccaggattgactacaactccatcagcaaggaaagaagatatgcgcaaacaggattcttcttgaagatgaatctggccatataatgcaaagatcatactttaggaatttattaaagaaagaaatattagatagaaataaaagatgccaagaatagaagtattactgcgcttaccgtaagaggttggcagttaatgactgtttgtgaagcaaacaatggtggaacaggggtgggcttaatttgaagagaatgaagacataatagagggacaccctcaattaattgccactgctgctcttccaacggatatatgagaggacagaagttcttagctgtcatgaaaatcacagtgatcagcttcacagataaaatgaaactttaaccatacatggggccacaggagtaatctcctttctatacgatcagttcataaattttaacttttaccaaagtcaggaacaggaacaggttctttagcagttgcgtgcattgatggttgcactaatgtacatggaggccgtgaaaaggtatccctacattccagctcacacaacattaatatcatctgcaactctatacaagcatcctactctgtactaaaacatcgcaattaaatacgaaatagtatttttttattattattattgttatcattagcacacttggtgcttaattgagaccaactgcttaattgaaccttcgatctcttggtattaatccgaaatagtatttataatactccctcatcaccaaatctcatgaaagagttgagccagaaaggtcaccttaaaaatagtccagaaatcatgactttagtcaagttattgacattttctccatcagaaacgctagcctacaaagcaaagtaggtttgaaaataaaatcttgatagtgaaatgaacatggcactgcagaaacgctatgatattacactgaagcaggccacatccagtatatatataagctatacagaacttaggcatacattgaaaataattatatagtatattttaaaactactcaaaagcaaccaggttagttgggaaaatgctccaatgcacttcttaattgtcaacattttagaaatgtactatggtttaacatatgtcagcatgtatgaaggaatgcgttatttggattagatatacatttaagttagctatatagtttaaactagcatagaagcttatggctgggtggctgcttgcttaaattacaaaatattcaggaaaggtgggggaagaaatttccaccagaaaatataactgaaagtaaaactacacacatacagagtacatacccgagaaaagaagagtgactgcatcaaaagttcaagctggaattctgcaagtaaattgaagttgttctagaatgttaactgatagcatatgcttccagagaaaacaaaatatgacactactgcaagccaatactagaccattttatcaatttataataaaccttagccactagcataagttacagccatatggatcatttttccaatatgtacctagagtgtgtctgtgtgtgtccgtaagttttatattccaagctaccaataaatgcgtgtcattttatgagcatgcatgcttacattaaaagtttaaattatttgataaactaatataagtccaaactcccaagtaagagcacaaaccagcgtccttaatacatagaaatatgtggtcaacaacaatagagataagagaacgcccagctgcttctatagatctctgcaaaagaaagacacaacataattgagaagtcacataatatgttgagcaagaaatatttttctaattcaataaaggcaactaaaacctgctgagcctttggatcaacatctcctctatttagacaaacgtataatccagtcataaagcggagaagagcacgtaatcctgccacattattatacatcagaatcatgctaaaagcttcatacttttagttcaaaaattaaaatatgaaactggaaacacaaggttattcacctggttcactaat

SEQ ID NO: 37447 - DNA, 3771 bp, Cannabis sativa
  modified_base (3349)..(3356): a, c, t, g, unknown or other
tttactagtttcagctagttaaatagactattttactgcaattatatcttatgcgactgcgtcaaaaaaatcaattaaaaaatgaacggcagatttttacctgcgtttatagcaataatcttacttgtccttatattaaaaaccttgattaattttgagttgggtttgttttaaatagtagtaatctttatcttgtgcagttccataccagttgcattgacccttggttacgtcaacaaggcacgtgccctgtgtgtaaatacagagtggggtcaggatgggacgaaagcagcagggagagcgagtctgatgggttagatatggtttaatgatcatttttattatctatccaattgtcatttgtataaccactgaatcaagttatacgtgtcctgtgtgtaaatgtgtatagcctcaagttaatatggtcttctcgtaattgttactatatttgttttaataattgtggattgaaaaaatgagaatctttctgatcgtgtaattcgatgtgttgattgattggagagtttggtttgccgcttgccagccatattgcttcaggcattttagaacacaggatattctatttatcattaattttaatttatttataacactaatttaggcaaacatttaactgtattggctaatagtccttttcaattgattatataatatatgcacacacggatgtttatctgctaaacaaatatattttgtattgaaagcaacgtaagctgattaataagctttttcttctctaaactggtttgtgcagtacacatactaaacttgtgaaaagtcaaacttgtactgcaaagaggaaatggaagattgtaccctcaatcaactaacagacttaactaatttaaaccacataaataaactatcgataatcacaagaagacctcataacacattaatcatcatcaatggttcccactccttccaccatgagcactctcaagtcaacatctctattcatttcactgattctgttgcttcaagtattcatagtcaacggtcatggtggtggtggagacgatgatgatgacgctgctggtgatcacgctcataacttgcactccaaggggttggtcttggtgaaaatatggtgcttgataattcttctggtgaccacctttgcaggtggtgtatcgccttactttttccggtggaatgagagctttcttctgttgggaacacaatttgcaggtggggttttcctagggacatccctaatgcatttcttgagcgattcaaatgaaacgtttggagacctcaccccgaaaacgtacccttttgcgttcatgttggcttcggctggttatcttttgaccatgtttggagatagtatcattcattttgttacaaagtctaatcagagagaagctaaagtagaaattgaagaaggacgaaggaggactccggagcaagctgctgttaataaggatgatcatgatcatgttgacttggaagaagtcaacactgctttcctgaaaacgacgtcgttaggagacaccatacttctcatccttgctctctgttttcactctgtttttgagggtattgccgttggaattgcaggtaattaagtaatcatatttaattatttattcttaattgtatagtcatttgatatatgtctatttaattgaaaagtgaaaaccaagattgctgattagttttgttcttttatgtatggactagtcaagtgataattgtaaaataacttaaatcccgatcaactaaatatatatatttgtagatttttcaaatagattaataaccttctaagtaactactctataggatcgtttctcaaccaatataattgatttgagcttatctctttccaagtgtcaataatactatatgtaatgtgttacatcaccccaaatggcctgattgtcattcattagtttgtccctacttcttggttggctgtcaaaaattataaataaataaaaaagttttgtttattcatacaaattggtccttttctttttcatacgacaactactacttttgcattattatcatttaagttgatgagattgactttacttagtccttaatgtaagatttccctccttcatgatcttatataaattatttggtgtgggccagatactaagggagatgcatggaggaatttgtggacaatatcactacacaaaatatttgcagccgtagccatgggcatagcactgctgaagatgctaccaaagaggccactactgctgacggtggcttactcctttgcattcgccatttcgagtcccatcggagtaggcataggcattgccattgatgccaccactgaaggagctgccgcagattggacatatgccatctccatggggttggcttgtggagtttttgtctatgttgccataaaccatcttattgccaaaggctttagaccagaatcccctaattattttgacactcctttcttcaagtttctctctgtgctttctggggttggagttattgctgttgttatgatatgggattgatatattgattgatcatcttcatcaaaaaattatgtatatcgcccacttttattttattcttcttatttgctctttaattagatttcttgctccatgccttcttgtgtaagaatatatggttttgaaaattttcatataatttttttcccctcattagccacactcggacatattgacaatggtggtcaactttattctcgaaccaatcttcacacacacaaacaaaacacaacactacacagattgaacaaaaataattaatcaaacagtacaagaacataaaagcataaagatgaacacaagcgattttaagaggctcgaacttgttttatcaagatctaaatttagaaatttttagaatttgggataagctgaatgagcttccatctgaaaccaattggcaataggaggagtagtccatttctcttatatattctattatctttctacacattagcaatgtgactctctaacatcctctcaagatgatggctaatttatatgcttaccatcttggacaacacgatcataagcagctttttttttggctcaatatccttgatcataagtggctcttttgctctactttttggatcagtattttttttgtgacactttttattttttggcttactattcctgaatcacaagtgactttttttttttttgactgttttggttcttggataagtttttttagatttttagttgctctttttttttagctctacttcgatcagtttttttttttttgggtcatatagttactagaatttttttcttgctctgataccatgttagaatttgggataagatgaatgaggttnnnnnnnnaaactaattggcaatgggaggagtagtccattcctcttatatattctattttctttccacacattagcaatgtgagactctctaacacaaacatgtatgttgattataattttataatctaacattctaaatataaatttctaaaaataatgaaataaacacataaaagattaagaaattcttacattgatacattgatggcagtgaacagtgaaatataatgacataatgactatgactcattccatttagatctctaacccttgaattatgtctgcagcgaagcattatctagatctaaaacctagattttctctccttcaatatggttagacactgtcatcctcactatgttaggtattgttttgacatgagtggacatactctaaattcaccatggaccacaaaattctat

SEQ ID NO: 37448 - DNA, 4236 bp, Cannabis sativa
  modified_base (4180)..(4182): a, c, t, g, unknown or other
tccctagccttcaatgctgaaatttttgggacacaagaaccttgaaccaattcaacaaaaacaaatggttccttgttctctagttgaaaagttaccatttttcgtttacaatcaatactggcagaatatttagacaagaagtccattctaagtataatatcaaacttggccaaaggtaactccactagaaatgcactcaattctctacccaaaattttgattaacacaaatctaacccactttcttgaaataattaattccccattaggcaactgggttccaaatcccatcacaaaaacatcactaggtctactaggctgattaagtattctcgttactacatatgagcgtgtagctcccgagtcaaataatacagtataagtaaagctgttgataagaagctgacatgtgactagtgaaagactggtggcagcatcttcctgagtgatagcaaaaacatgtgctggtgcaggtttagcttctagcttaggttcccccttcttcagttgaggacaatctttcttgaggtgcccaactgatccacactgaaaacaagcccttcgattacatgtcccagggtgatgtttcttgtagtgcagacatccaatataggaataggtctgatgtcctcctttaccctgattttcgcgaaacttcttactttgccctgaactccctacaggtggagaagttctcttcttctgttcaatattggaatcaccactctccttaccaggaccagggatagggagagtagtggtcccaccagaccaagagcctctcgagttttttgcaaaaattttactgctccttcagctcgaagagccttgcaaccatttcaacataggttgtaacgtcattggtggtaataactagatcatgcttgatattggcattcaaccccgccaagtacttttcctttttgttgaaatctatgggtaccattctggaggccagcttggccaagcgattaaacttggtcgtgtacttagtcactgacaccctgtaccagttcaacaaactctttccacttagcactgtggactgccttgttgtaatatttagctttaaacaagtcccataattcttcctaggtcattctagtgacatcctttgtgagagacgccatctcccaccacactagagcgtcttcttgggactgaaacgtggcacatgctaccctatcattttcgataactcccatgaaatttagtatcctttcgattacagtcaaccattgctctgcttttaaaacattaagacctcctaagaatgttggaggtgctttctttctgaacctctcgtacaaaggctctatacggttgccaacaacaggttgttctgctggcaccgcaggaaccacaacaacaggtggttgcgagagagactcaataggagcatcccgctttctaggtctccaaatttcttcctcttgttgagtgatttgggcctgcatctcaaaatatttagtttccaaaaaactcagtaaacaaatattataattacttaattaattctaattaccgtactaatccataatctaagtatacggtcattacaatatttttcttaagaaagataaaggccataattatttgtttcacctctattcccaaaaaataggctgaggatcctagatattttagacaaaattgatcattgaaaactaaaatgatatttgacactacaattagatcactccctgtgattaaaatatcatttgcatacacaagaataagtgtaaatgaattggctgaatgttaaataaaaatgagtgatcaaatttagatgaggtaaaaccaagagtgcgcatgctattttgaagcttttcaaaccatactctagggccttgcttaagcccatagagtgttttgtgtaatctgcaaaccaaatcatttttaccggggtcttcaaaactgaaggttggaccatatatagatcttcttacaattctccattgagaaaagaattattaacatcaagctgccttatggaccaacctttagataagcaagagtcaaaaccactctaatagttactagtttaaccattgtactaaatgtctctatgaaatttaatccaggctgttggtgaaacccctttgcaacaaacttttccttgtgcttgtgcacagtccgatcttgatttttttatcctatagaatcacttgcaaccaatagcttctcatcctggagggagtatgacaagaatataggttttatttctaaccaaggctaaaactcactcatagctttgttccacacaacttgattaagggcctcttggagagatgttgttcccaggtaacacaaaggctttggttttgtatgccaaatttagatctggtgcacatgtagtatttgtttgattgatcaggagtaggtggacaccctgaaacaacagcaacttgattgtctacaacagtaacatttggacaaactgaactagtaggagctgaagcaacatctgcagcatcagagtgagaggataatctgaagatgtttaaggtaagagttcttcatgtggatcaagtgataaatctggtatattgggagagctaaaaaacatagactgttggtgttgaattatgttgattatcatggggaactttaagcaaaacatcattaatacctgaaggttcacctacattaaaaatagatggttggctaggacaccaactattagtagtaggagaattttagaattgacattgttatctagtaaagcattttgctcattcccaagggtggtacttagtaaatctgacatagaaaaagattgtttgtaatgagagatgataggaataaaggcaaaaactaggaatgatgtgtgtgtcaaaaatttgctcatagggaaaggaaacccctcaaaaaccatatccctaaatatgtaaattttaccactagcatccaaatatttgtaccctttttgattaagactataacctaagaaggtgcaatgggtagatctcaagtttagcttgtgtttattgtatggcctaatattggaaaaaaaattacacaaaaatgtcttgaaggttgtgtaataaggtgtaatattgaacaacatctcaattgggggcttattatttagaattggtatggggattttgttgtaaatgtacacaacagtcctaaaagcttcatcccaaaatttaaggggtagagaaacttgagcaagaagagcaagaccattttcaactatatacctatgtttgcccttagctaaacaattttgttaatgtgttgtaggataggagtgcctatgatgaattccattatcagttaggtacttagagaatgatctaaattcaccccacccaatcaatttgtaaggtttttagaggtttctcaagttgtaactcagcttctggtttgaaatttaagagcatcttaaaagcatatgacttattctttaataggtgcatccaattaaacctagaataagcatcaacaaagtgaatataatacatatagccattaaatgaaggtgtatgtgagggtccccataaatcagatacaacaagctgtaaaagttcagaaataatagtggtgatgcatttagaaaaggaaatttatgaactgtcccaaggaaacaagctgagcaaacaaagtattgagacattttattgctaataggtatattacatgattgtaggacattttgtacaactttctcagatgggtgtcctaacctattatgccatagagtaaaatcattctcaatatttgagtcacacttgatacaatttgattattatgagtaactacaaaggtactcttagatttagagagacaatcactacttctggtatgaagctctttagagtgtttagttgtctcgggttgctcagggttttgggacagaaactaaagttaagttggatcaaaagtatataggttattcttgtgcatctccatcagaaagatagttcaagtcaagttgtccttaacaaaacacatgtcagcatgaaattcaaaaaaaacaaattattatcatgggcaaactttgagacactgattagattttttgtgatttctggcacatgtaacaaattgtgaagaacaagatgctgtatagaatttttggaaaaaaaagaaagattgaccaatatgctttatagaaaaacctgagctgtaatatcccggaaaataaataatatttaaatagacatattttnnnaaatatgtaattattttggtaacgaagtaagattatgatcttgcttagggtaat

SEQ ID NO: 37449 - DNA, 3218 bp, Cannabis sativa
aaatttaaattaccaaccaaatcttattatctgtagtgaatgaagtgaaccaccaaatcaatcagtacagccccaaaagaaaaagaatgaaagagagaagctgtaatgtattgctatggctcacttgttgcccaaaaacgaagctctcaatttatcagcaagaaaaggtagcgttttgatactttcctgggttgtctgctccacacatgactccaaatccttaagagcattgcttttcacttgttgtgacttggctgtctcaaacttgtcttggcacaccatcaaagctctgttcaacctctcctttattattttttttaatgtacaaattagaaaggcaaaaaaatggacatcagtacttacatggaataatacatacatacaggttaaatacacatgaaagagtggaacttgtgttatatctcagcatatgtgtcctacaaccattcttaaccatagccatatatgcttgttatgtgttcttagacaataataatagggaaagaagctgcatttcatcaaacagattaagtttactgcttaaagggctatgaattgcaatattcattttcatttccatttgaataaaaaaaaggaaaaagtctgcctttatgttatttacaaacacaatgcaataaaaaaaaccagcatgatcatttcagcaggaataatagaaagccatttgtaaactaaaattcgattaaaaacaaaacaagaaaagctgaaaaactaatgtctatatttaatcacttgtttttctgtagcaagttttcaatttgcaatcacaatttaaaatacaaagagacattgaaagttgaaagtgtaaagcttgtactgtgtctcatctaatcatgactacaaaaccattcataaattggccaaaaaccaccatgcaaatgcaaacaagggataaccatagccatggccagatcaatatgtgcacttaactcatcaaaaagattaaagggggtagtaattttcaattgaaaaagaagaatgtattagtcttacttgaaacctggccatctcattctcaactctctgttgagcagaaacgacaggaacactgcaatactccacacaattacttatctcttcttgctttcttcttctatcaaagcattcgtgtgcacatttgaagtaggcttgctgtattcaattacatcaaacaatataaaatttgaaaacaatcccagaccccaaaacacaatctttttccataataacaatagatagacagtacatagatatatcatacaagagaaggtgaaagtgaaaaggtgaagggggctacctgaagggtgaaattgacatggtcttgaatgggagctagatgtgcctgtgctgccaaattgacatcattcagcttctgcttaattttctctgtgattatttgctcttctgctgccgctatatgatccatcttcttctccttattcttcagagaaaaagagagacttgttttttattagggtttaaaaggaagaagggtttttggtttggccttctattctttcttcaaaaaaaaataaaaatcctttctttatttcttagtttattacacgggcgcgtggcccacaaagagcatatcaaatattatgcctccaaatttatattgcagttaaaaattctcccacgaatttattaaattgtgtttctaaattttgatgtgtactctcaaatgttgtgattttaaccaactaaaaggtattttgcttgattttttttttaaaaaaaagtattttacttgagcaggatcaaggatgttcatgtatagattaccacttcaataagattaagctttttgatcactagtacccgcaacaaatttacgttaataaaatttttaaattttataatctcaataataaaaaaattttaacaacaacaacaacaaaaaaatgggatataatatagtacatgctaaagtaaatatccagaagaaatatagaaaatccaactcttcataatatgtcagtcacatatttactttttaacaattaaaaaattaaaaatgtaataaaattataaataaaatatttttgctgtcaattttctttaatttaaatacaattggaaatgtttaaattttaccacaaatatccaaaaatcaatacaattttttttttatttctgagttaattacacgcgctatatggtcgcgtgggctacaaagagcatattcttctaagtcagtcaagaaagaaatataagaaaaacacacccagctctgtactccgtcgaagaccattattaaagctcaagtctttgaaaacttgtattatgcaacaatggaagtcaccaactcacaccactcaccctgcaaacaaatcccatctctcctctcctccttcgttgatacattcgttgacttcaccgtcagcggtctcttcctcttaccggaccccaaccctgaaaccccttctgctcctctgcagaccaggtaccccgccgccgaccgcctcatagcagtcggagatgtccacggcgaccttgaaaagaccaaacaattcgctgagaatagcgggtctaaatcaacgactccgataaatggattggagggtcaaccatggtggttcagatcggtgacgtactcgaccgcggcaacagtgagcttaaaattctctactttatcgagaagctgaaacgagaagccgccaggtccggcggaaccataatctccatgaacggaaaccacgagattatgaacgttgaaggcgatttcagattcgtgaccccaaatggcgttaaagaattcgaaaattgggcggaatggtatcaaattgggaacgaaatgaaaaccctctgcaaaaatttgaaaaaccctaaagacccatttgaaggaatcccaatgggtttcaagaacatcaagaaagaattttcaaacggattcagagcaagaatcgcggccctaagaccatcgggtccgatctcgacacgattcctatcccaaaacgtgacagtggtggtagtcggagagtccgtcttcgtccacggcggacttttaccggaacacgtggctaagccgggattagagaagatgaacgaggaagtgaggaattggattaatgggtcgaaaggaaaagaggcaccttcgccgtcttactgtcggagtagagatgcggtggtttggctgaggagattttctcacgaggcggcggagatgtgtgattgttcgactttggaacatgttctggcgacaattccgggagcgaaga

SEQ ID NO: 37450 - DNA, 3922 bp, Cannabis sativa
ttttttttttttttttgtgattggttgctaatgcagtcgacctttgccttgtatttattgtgttcttttgaataaaatttttcttttgttaaaaataataatttaaggaagacgaaaaatataaataataaaaaaacgtatgttcctctctccgttcttccatggcaaagaggaagaagggggcactgaagcttgctaaaacgaagcctgtgattgtggaagatatggttgagatagtccagagtgagctgcctgtgatctaagatgatattattgctccattggaggtgtttctagacctgtgccaggagcttgaaatggatctgaaggacctcgatgaaggttcatctgcccagaaattgaactcgaagacagtgagttaggccaacgagatggagaagacatttggagactggatgccaagcctctgctcctgacatgtggagtaaattcaacatgaatccggttagaaccctttcatcttagttgaacattactaaacccatgaaaattagagatcaatctgttgctaaattagacttggatgaaatcaaatatgaggctgccttctagagaacttcaattgtttgtatagtgttaggggcaaatctccctttcaaagtgttcgaaggcttcatcaaaaggatctgggtgaacctaggagttgaacatgttgttagaatgaattcagggttcaccatggttagcttcaaagatgaagctaccaggaatgtgatactcaaaaatggggttatacattttcacaaaaaattagtggtccttagactatggtaagaagatatggacaccacgcaaatggtgaaatcggttctaatttgggttcggttgaatggattgggtctccaatattgggaaaagaagaatttaaatactttggtgaatactataggtaaaccaataagttttacaaggtaacacttgaaagatccacgatcaaatttgcaagagtgttagttgatgtggaaatttcaaaaaatcgtccaaaaactattgcctatgttaatgaaagaaaacaacttgtggaccaacaagttgagtacgagtggctgccatcaaagtgtgctgcttgtgtattattaggtcacactgttacaaactgtaacaagggcatgtcggttgtttggaagaaaaaatagcaaaacacgaaaacagacaccaaagttgggaatgaaagccagtaggggagctgcaactgttggtgctgatactgatgtaggccaaaaagaagatgctggtgtgaactctgtccaagatgtcgaggtagaataggttatttctgaggttagaactacttgtttggcagttaataatagggagccagattaggcgaaggctgatatggagattagtggtggccataatcgggatgaaggtgaaataggtgattggattactccaccaaaaaggggctcaaattttttttttgattcctcagactaaagctatgattattaatggatatgatgttttaaaaggaaatgtagaggggctggctgagattggtggtacccgttctttacattaatagctataatattttttgttggaacgttagagggctgaataaaaaagagaagcggcgtgagttgttagatagttgcgaggagaataaaattagttttggagcttttgaaaccaaaattatccatgataatgttcatagtgtgatgtccaataatttttgaaattgaaatttttattccaaccacacgatttcttacagaattttattgatttggattgacatgatggtcaaggtggaggttcttgtggatgatagacaatttgtccattgtaaagttaaaatggtcggttatgaagatgatttttacttaactattgtttatggtagtaactctttgagtgagagaaatgatctatatatggaacaaacttggtgacattggttacttgaataaaccttggattatccttgctgattttaatgtgatgtttgctttcgaagatagaagtggtggtagacaagtcaaggctacgaatattcaagatgcttaagattggcttgcaatgggccaagtcaatgagtataggagtttaggatctcgatacacttggacaaataaacatgaagagagggttagaatttactctaaacttgatagagtttttgtcaacaaccattggcttgaacaatactggaacacagaggctagctttagatgggggattctttctgaccattgctactaccttatcaaacatgttaaggttgatagaaattgtaaaagaccctttagattttgtaaccattggagctatatggaagggtacaaagaggttgttctaaatgtgtggaagagttccaatgttgctgacctgaatagtctgtccaagactctttttagagttaagcatgtcttgaagaacctttatgtctctaaaaaagaggatgtcaagaactgttatagcgaggctaaagaatccttcattagagctcaagaagatcttgccaaaaaacctactttgcctttgctcatgcaagccaagaagaagtctcacctagatttccttgctacctaaaaacaatatgctagctatcttcttcaacaatcaaaagtgtctttgttacggttttgggatgaaaacacgagctactttcatgccatcatgaaaaaaataagaacggagaataagatcctatcctattgaattgattgtgctatcactgaagattaccctaaagttgtggatcactttcttaatcatttttgcaactttatggggaagaagagctcaactacaaggagaattaacttggaatgtttagttaataataataaacttagcttgcttcaacaggtttatttaactagacagttcaataagagtgatgtcaagagagcttaatttggcatccattcttcaaaaagcctaggtccagatggttatggagcagagttctttaagggtctctagaatgagattggggaggatgtttctagtgctgtgttgggattctttcaaaaaggaattctccctaagcatcttaatgaggccattgtctctctcatacccaatacggatcacccccataatgcaaatgactacaaactaatttcctgctacaacacaatctatatatgcatctcattatttatgctagactttcagaagtgcttccttgtttgatctgtgacaaccagggtgcctttgtcaagaatagacagttggcgcataatatcttgatttttcaagacttgcttaaaggttataccaggaaaagcacttatgctagatgcattatgaagattgaccttagcaaggcgtatgataccgtggattagacatttgtctctgatttattaaagggcctttgtttcccttccaagtttatcacttggattctaagttgtctccatggtgcttcctatgtcctgttgttgaatggccggttccaagggtaatttaaaggtgaaaaaggtcttcaccaaggtgatttgatgtcccctttgttatttgttttgatcgtggaatacttgatgagacttttgagccaaaaatctaaggagaagggattcggcttccaccccctttgtaagtctcttaagttagggaatctttgttttgtagacgatctaatcattttttgcaagggtaacaaaaattctatcaggcttattcatgaaggcttcaaaacctttagagaatcaacatgattaatggcaaataaaccaaatctttggtttattttgagggtgttaatgatgattgcaaaaataatattcttcatatgttgcaaatggaatagggaaaatactctcttgagtacttgggagtttagcttagacccattaaatggcgagcaccagattgtggagttattcttgacaaagtcaatagaaatcttcataactgggttagtaggaatttatcctttgca

SEQ ID NO: 37451 - DNA, 3629 bp, Cannabis sativa
catgctcggcaaaagtttacatcttttatagagaattaagaacttgcaaaacatacttgctctcttggaatataaaagtaatattgtcccttataaaagaaaaagtaatagtctttactaaagcttccaacaggtcttgtcttctattagcttggtcctttattttgtgtgtgtgtgtaatgtcatttgcattattttgtttgcagatattatgccacggtagattgatccaatggatatgtcagatgtagtgattgtgaaatctacccgattaaagtctgttgtttggaatgactttgataggattaaaaaaggtgatacttgtgtggctgtttgtaggcactgtaagaagaaactcagtggatcaagtactagtgggacatcacatttgaggaaccacttaattaggtgtcaaagtagaacctctcatgccttacctcagttatatacacccagggaaaagaaaaaggaaggaaaccttgctattaccaatttcaattcagatcaagagcagaagaaggatgaggttcttagtcttgtcaattttaaattagagcaagatcatatgaaagaggatggtgttacatatgtacataatagctttgatcaaaggagaagtagattcgaccttgcacgcatgatcatcttgcatggttactcattggccatggttgaacatgttggatttaaggtgtttgttagaaatctacagccattgtttgagcttgtcaactgtgatagagttgaggctgactgtgtggagatatacttgaaagaaaaacaaaaagtgaccgaagtgttggacaaattgcctggtaaaattagtctgagtgctgaaaagtgggcttctttggacaatgccgagtacttatgcttgactgcacactatattgatgaatcatggcagttgcataagaagattttaaatttcgttgcaattgatccttcccagacagaagacatgcattcggaagttgtcatgacatgtatgatggattgggatatcgaccggaagcttctctcaatgacattcgatagtagctctactaatgataatatcgctatgaggatcagtggccggctttctcagaacagatttctctactgtaatggtcggttatttgatgtacgttgtgcttctaatcttatattcatgatggttcaggatgctttagctgcagtgaatggggtggctgaaaagattcgtgaaagcattcgatatgtaaagagtacacaagcaatccaagcaaagttcaatgaaatagttcaggaagctggagttcaatctcagaagtctttgtgccttgataattcattcaaatggaattcaacatgtactatgcttgaagctgccttagagcatagggatgcattttgtctttggcccgaaaaagatgcctcctacacaatgtgcccgactgatgtagagtgggatagagcaactatcatcactagcttcttgaagttctttgttgaaataactaatgttttcatgaggaacaaatcaccaactgcaaatctctattttccagacctttgcgacgtgtatctgcagttaaacgagtggtgcaagaattctgacgattatattagctcattggcagcaacgatgagaaccaaatttgaagaatactgggagaggtgtagcttgggtttagcagttgcagcaatgttggatcctcgattcaagatgaaactggtcgaatattactatgcacagatatatggtagtggtgccccaaaccgaatcgacgaagtttttgattctgtcaagacactttacagtgaacactccatatgtttagcttcacttgaccaagatatggcttggcaagagggtggtagttcaggctgcttacctagggattccagagataggttgatgggtttcgacaaattcctccatgaaacttctcaaagtgaaggcacaaaatctgatatggacaagtacttagaggaacctctgtttcctcgtaatgcagagttcagcatattgaattggtggaaagttcacactccaaggtatcctatcctatctatgatggcacgcaacgttttgggagttcccatgtcgaaacttacgtcggattatactggagtaaggatgctcgaccaccattggagctctctcaacccggccaccctccaagccttaatgtgtgcacaggactggatacagagtgaactagaaaattgaccttttcttgttttgttttctttaatagctataataaatattaggtagtcaactctttattgcctcttgttttgttgaccaaattttaacatgaggaacaggctcgttctcacatggatgaaattcttttttaattgttcaaattggtatggagtttttgtaatgttgctcttttgtcaataatgcctttccctttttggtatggatctcttcaaaagataattttagtgtggtcgattttttttctttttttgagtgtagcgtaatggtattttacaatcagttaatagcctaatagcttcaaggtcctaggtttgaactcatgacctcgctcttttttctatcccttcctcaccactctagccttagtgacttgattttttctctctttgaatgctttgggtagcaccattatttgtgcccaataagaatgtatggtaataagaactgagttaatggaggtggcttgactagcaaataggtgaaactattttatttaatagttatcttaacattaatttagacaattgatgatgtaacctgtttattttaacttatattttctgtgcttaaattaggcagcaaaataaagtatttggaggattattactatttttattatttggaaaacattatttgtccaataaaaatacataaaatgaatttgaatgtttaatgattttgtcctacatgaaaaataataacatcatttttctcttatgaaaactatatatgtgataaaatgagacttgtaaggttgagtcttattaaattacagaaataatctcatcaacaaaaaatttaacaacacatttatcttacaaatctactgacacaaactaccttttgataatatctgccttttgatagaataaaaagtaaaaaaagaaacaaactactatttatttgtatatataatttagaatttcttctggaataatgttacttgaaaacttattctgatctagtttaaatgcaacatgatatcattccactttcaattccaattatttttaacaatattcggtggtaatttaggttcacataattcttgcatgtacaagtttgataactgaaagtttaataattctgtgagattgaaaaaagagaccctacaatatatattattgcactctaggttttgttttcttaaattttgattgtaaagtgaatttcaacaaaattcatgttctaatcaataaaaaccacaatcttcaaaatatgaaatttaccttttaatctgaaattcctgaacattaacatttaccacgtaaggcactctcctttagtatattgaggatgtccttttcctcatccaatttaagcaccttatcgaaatcgaacatgattctatcatgatattcgagtggcttggaagaaattaaaaccaaatattataagattatacttggcaaaataataaagatgacct

SEQ ID NO: 37452 - DNA, 2799 bp, Cannabis sativa
gtttggtccaatgctcttctgaaactatttattgatactaacttgttagtgatacttttcaggtttggaattctttttggcaaatttctatttttcattgtaatcgtctattcggactagtaaatatcactgctgatgctcttgctgaactaactaacttgccatcacaatcgaagctccccacgtttaatgatcggagcttcctagttgcacttgagtgaggaatttatatgtatttgttggaactttttacaaagtgagtaaatttttgacaaaataagtgtgtgtggaataaatagtctcacataggatatgaatttttgtttacaatggtatatatagtacaattatggcacttaggataggattctaaggtaccccaattttgtgtaaaaacacacttgacctacaaacataattttcactaaaaaaatttcatgtgcgatagcatattttgagggtgtatttgacagctctgacccagggcagtggagactcagtacagtaaagattgggttgttttattttgaggatgaccggcaatttttgactacttcctaaatagtgccgcgaacgccttaaatagattgactcaatctgcgacttaatccaaaaatttcattcagtagcagtgtatgcaaattgaattatgggtttcttgtcattgaaaccaaagtgtattctgtttcaatcagatttcatttacaacactgctcagaagtgtgttctggtgcagaatacacattcattcatcaatcaaagtatggtcaaaatcacattctgttttttcttttctatcatatcaaacagcccagagagtgagtagaatgtagagcataacacaaaacaaaacaaaactaggcttatacacctccagatgttcctgatgattcagcaacatcccccaattccaatcccaatgttatgcctacaacttcttcttctgcttcttcaatcatcttccctctatccctatctctatccgccgaaccatccactgcatcgctcagtctcttcaaccaaatatcatagtcaactgcatatggtgttccacacaggctatcaacataatccgcaaatgcctttaggatagctgatacttccccgagctgctgctgaatcgaccgcttagcccacgccctttccctccattgcaatgcagactctatagaatcctgctgctgttgctgctgctggtggctgcccccatccccactaatgaacatcaggaggtaaaccaggctctccgcatctgatgatggacaaagcttcccgtgttgaagtgcatgagatgaagagaattgcaaattgattgcggggctgtctctatcttcaagcactgcgcgcccccatgatatgggcacgtatcttacaccttccttgtccacaactcggattatgttttctggacaaatgtcaccatgttgaacatttcccattgctgcacttctcagtgcagccaaacaatctctgcaacagcgcactgcttcctcgggtgagaaagggccgtccctagctaccacacatgatagtggttcacctactggagatgttacaaggattggagttccacaccatggatgatcacacctcccgcctggactctcctttttacatggaccagaatgcagaactcggccagatgaaactatttcaggcaaatgtttgtttgaacttccctgctgcttcaagatatttagcacttttgtttgtctttgtacatggtaccaaagactcatatcctcccaagagggttccagtctcgatggatgagcgcccacgtataaagccaacgaattcatggggtgatcaagagaaatagcactatagagaaaatagtttcctcctatcacagattcttgtatttggaaacttttctgcccatgttgttgatcatccagtagtaaaatctcaccttgcttaagcttcaaacgtgatcctttcgtcctttgaattaaagactcgccctggtcaacttcaacaatttctccttgttgatgatagccagatgtttgtaagggaaccaaagcattctcgttctcaacagggcgacactccatccaacgtctctgaaggcgcaggctgtgatttgaggccaaagaggatatagatttcctcggtggtccattccattgggcaatagagtagaaggtagccataaccatttgaagagttccctggtcaccccaattgggatttcctagcttgttccatatcatgtccaccggggaaactctgatttcagcatggtttttcatccactcagccacagactcatatggattgattgagttcaagtcaagtttcgtaagatcacctcccaatctcaccactcctccatatctagaatcttgaaccaaaatgaagattgaattgctgtctaaactaatagtcttgctcaaaaaccttgcaacaagtatatgaaaaccgtaaaaaattgcttcacaaataacccgagcagaaaatttcaacccgttccctgacaatatgtcttgtttgtaaagaacaaactccacaacctggtcccaacgaacatgtgaatcgcttccaagtcttgacatcaaagcaaagccacaaagctctctaagccttcctcttgatattgccttgtccacagtgtaaaacttggagccaggataacgcggacaagacaacaagaaaggcaacggccctctcttgtgccaaaatgtacgccacaagccaatggcaatagcatgaaaaaagtcttccaccgcaaggtactcctcttcctttagatcatcagaaacataagatgagcatggcattcggaagagttgt

SEQ ID NO: 37453 - DNA, 1405 bp, Cannabis sativa
ttttggttgataattaatggagttgggatgttctgaatttgcatgttagaatttaatccttttctcaaattttgattaaaggaaatttttttcatgaaaattgtgatcttgcccagatgctaaaagaagagaaaatgtagggaattatgactgttatttaccagagattggttaaagcaagttcccaatttctttttagagttacaaattagaaaacatttgtgtaaactatgacatgtttgtgattataatcaatcttgatttattactacaatcagtgagtacaaaatctaagctcaaaagcttcttgtgtaaattttttgctaagagagtcattttagaaaggattttggaagtgtttttcttggttttgtgaagttttcctttccatatttaaactatgctagcttttgtgtatcacaatataattacataaatgtaaaaagtttgcatttttatcattgaacaggtgctttactggctctcaggcctcacttgctcagatgagaattttataacaaagtctggagcacaacgtgctgcttcaagtgagagtgttgctctgattgttcctgacacatctccaagtaagcaacttttgtaatgtatttatttttcatgtttgaattggaatgacaaatttcgatagcagcattaccagagctgccaaaacttcaatatattttaacactgtaaattctttgtttttcttattgccttagagtagcatgcaactattttgagtgtctgttatttggtatttttgcataaaaatgattcggagggacatgagaaattcactttgtacttcacttcttcatcaaagcctcttcgctactctgaactctacacctatttagttctgtcttgtactctctctatttgcttttctagtgccacttttcttgtttttccggtattaagttagtagtaaataagtgaagtggtggattggccactgggaaggaggaatagggcttatctcgcgtatatttagttattcgacttttattcttttgtaaggcaaaccattatgtcaaagcaatagactttcttttatcctttcttaatctatctaactgtgtcaaagattccacgaaacttgtgtttctatagggtaagtaaaaacacatgcatggttaagaaggaaaaacacttggcttctattttatgttactcataaaaactgattacaaacttgggaaatttgaaacctcatccaaaagttagtagtgttcattttattatgcatggatagtcatgccctggctgtggagtatgtcttactgtttttcttttctttataatttacaggaggcctgaatgtggaaggagaggcagatagctgggatttcggtgtaggtaagccacacaaagctgtttatttttcattctgcataagatt

SEQ ID NO: 37454 - DNA, 3029 bp, Cannabis sativa
ttgagctttttctatttgcataccagcaaggaacttaataaacaaaactataatgaagctacaaagaaacttcaacaatatatcaaaatgcatactcaacatacctaaattattgtcccgtgacaagttctttaaatggtttttgaccattgacttcagctgttcctttgcattttgaagatcatcatcctctctgacataactatcgtttggtctattgctgcactgttggaactgctcataatctgatagtgaattcctctctgcaagtcctggccacaacgtcccattgacaaaggttggttcgtgccccgtttgccttcttgattggcttattattgaagatggaagataagtattttgcactgagtgtgaagaactttcacataatgtttcctgagtgaagggatggtggtatggtacttccatgtcttgtgtatttgcaagttgaattgttggtaaccttcctgtatcaactggagaattaagatcaacgaccacatcagcacccgagttcccttcagccctattctcagaacgcaaaaagcgcatacggttttggatatggtgttggttacgatgaaaattccttcttcctgatactgttggtgccccatttcgggagagtggagaaactgaattaaggtccaagctttcattactataatttgcaatgggtgtggctgctgctaactgatccgaaaaacgagtctgggcaagggaacttgaggatccaagaccaacagctcgacaaccttcacaataccaattaccttcaggtacttccctcttaaggccgacacaataggtgtgcgctggtgaatcgcagagatcacacaataacatgagttcatcatccccaccttcatggcattcagtacatatcacattctcatagggatcgagatagctcctgagttcttcctcagacggttgatatacctgcataatcaacgaactaattataatgctcacatatatgaaaggtaatattcaataggaggtggaaatatgagagagcaatgtttaacctgatcacgttcaggtactgttatcaccacctctctcaaatcaactcctgccgcaaatcttgcaggcttactaatcgtactaaacctctgcttgcacaaaggacaacgggattccacttttgcccattcgacgatgcaggtaaaacagaaataatgagtgcagcaattaagggttcccctcacttttcttttatcttcctctgtaaggcaaattccacatacctgttttaggacttctacttttatttcctctaccttttccttacccttccttccagtagattttctttccagtggcagaaccacattctccacaattttatcactcacgatcaaaggtgagcttctcaagttattttttacacaaaactccctagcttctctcacttgctctctctcttcctcggatatggtgtactcgtattcagaagaacgagaggatgcaaaatctgaatctgagtgacagacagaacgcctccttttccgacccttttttattgcatttttctctctcaaaaccatgtcataatcttcaaaatctccttcgtcgtcatcatcacatcttacattccttttaattccacgtttcttttttaccttccttcttaatggcctttttgaaaccatggatttcctccttttcttaccctttaaagaaaccttcttccgcaatacacgcttgactggttttgcatggttcttcctcttctttgtcacctttgattcttcttcctctgaacaatcatcatcatctggtgtgaattcctcgtcatcatcgtcatcatcattattgggtgtgaattcctcatcatcgtcatcatcgtcattctcttccttgtaagtaaatcttctcctcttttgtgatggtttaaccccatttttttgcctacttgagaaattggtctgcacttttgatcttgttctctttttgacctcttccataccttcatcttcatcttcatcctcctcctcttcttcttcctcttcttcttcttcttcttcttcattagtgggtgtgaattcctcgtcatcgtcatcatcttcttctttgcaagcaactaatctcctcttctgagatggcctaaccccgttttttcgcatgctagaaaagttgctctgcacttttgatctgattctcgtcttgacatcttccaaatctccattctcattctcatcctcttcttctcctgcttctttttcctcatcttcctcttctacaataagtcttctagggcggcttctggattttgatctgccaaccttattcactcttttcacttcccattcctcttcttcctccttttcctcaacaaaactatcaccctcttcttcttcttcttcggcttcttctctttcctcatcttcctcttctacaatagatcttctagggcggcatctggattttgatctgccaaccttattcactcttttcactttcctctcctcttcttccttaacaaaactatcatcttctgatgcaaattcatccactaaaaagggataatcctcatctgaattaccagagacttcattatcctcatctgacacaacataatcctcatctgaatcatcagaacctttgtccatcaacatagctctctttcttaatttatgtttgctactcaacttcccacctctaaccatctgtttttcacaacaaaacaaggtgaagttataaagttaacgtaaaaattattcaaaaataaaaaaaaaaaagtctcaaattccattgaaactaatattaatggtcaaaactaacgtttcaatttatattaaaactcataattaaatgtaaatattaatgtattcaccaaccgaaatccatacatcaaaattcaaatctaatttaattctgaaacttaaaaagaaaagaaaaaactaaataacagatttgaggttagcctatgtttgttttttaggctctattaaatatgttaatacaagaccctcaaaatcaaaatgcaaatagttgctaatcaatcatttcctaactgttat

SEQ ID NO: 37455 - DNA, 2745 bp, Cannabis sativa
tatggacatacccatgatcaaccccttgggtttctgcaaaagcccacccactaattaggtaaattacatagaaatattgactattgggcccctaagaaggcttttcttgtagggcggatggtccgtacagctgggaccattgtttgtgtagggcacgtgttaggaaaaagttgcacctggtagagaaaactctcagaggagtcgtggggcgaagggttcgtgcagttaggaccattgttaatgcaaggcacgtgtcgggcagaagttgcacctgttgatgcaaggcacgtgttagtccatacaactcgtgacatgcttccagtttcccttgtgcaattggcatcagccttagacccttcgtatgacttccaagtgtctccctgtaagctcaattggtataatcttctccatgtcccagagggatgacagagcgtctgactcccggacagtaatttttgttgtggtaaatttctgggcctttcccagatttggacctcttctaggtttgtttagtctttttgcaactttttgcaattaagggaaattaattggtaattactaggatcgttgccttttaccttttgccacgtgtccttcataaaaaatgtggataatatttacgagtaaagattctaggactccggagtggtagtagcttccagtctctttctggattactagggtgcacttgggacacatggacgaatctcgagaatgcagaagcatctcttcatctggcacttggtaattgggagattaaaaaatgttatagtaaacaacttgtattgcctgcgtgtcatgatccttcagatttgtgaatagtacgtgcatgctggaagaacgtttattgcaggacaactcaaatggagaaagagttatgatgtgacaacactttaatgcacatggggctcgaggaaaatgatgattatgattaaatgccttgattctgccaaatgcgtatcaacaagcgcaagatcggggtttacaatcttgagaagtacccaaacatgtgtttccctgttagcacaacatcataatctcctaacctctaggactactggtttttatccactggtttcccagtgaagagggtgtcaaagctctcttaggacttcaaaacaccaggtaagaacctttttcctttgtccctatttaatattcttttctcaccttaaatttatgactaatggaatttttcccatttgtgctagcacctgtgcctggaactcttgtgagcgaggagttgatgaaaagattggccatacacgacctcattttggatagcactttaaacatgagtaacctagttaccactagcctgctccatgaatatgggttcatagccaaattttagagtgttgataatatttgaaacaggggtcttggttacatttacctagaggtcaaggaaaaaattgttgttgggatctccacatttatgaagaagtcccttaaagaggacatacatatgatggtagactgggctcgtcaccatccaaaccctttaaccaaggaaaaggagattgtggaaaggtttgtagttgcatacccggacgagggcaccccatgagccagcatctccaaaagaggtaataggcccttccacttactttatacccccagtttggaccaaatggctcgagtggatcaagggggcttcgatcattactttttgcactaagaaccttttaagtatatcatgaagacttatgttgacaggatagataaaattattaagagtccaagtaatctcgagtcattgtcttaaatgattaaattagatcatattttgtcaatgtcttttctggggtttagagatcatggaaacttgatggatcaggaggacatagttttattcactgcgctagagttctattttatgctcatccttgatttcatatacttgcttttaatatttaaatttgttctaataatgttgtggatttttcttgttgtagagacaccagagtaaaaaatattgatgtcaattgtgggctccatcaactaaaacattgcccaggctaaggaatcgctgggagccaaggaccttaaaagattgctggaggtaaaggtaagggtaaaagtacaagacagtaagaagggcccataaaccaaggtctccaagcactcctcccaccttcggtgcctgggggtctccacctgttaacaagacctttgctagggtagagaaaacccatgtgaacgcgggagagggatcccgagaaatttcaagtggtggaggagttttaaaggttctatgtaaagaccacttagttttaataaagaagttagcagataattagggcttaattatgaaattagattattaattataatttatgaatatatgaagatttatttaaatttagggtgtattatgtatgttatatatgaaattttatattttccatgttttgtgttcgacaacattggaacatagcatttggccaataaaatcacattttagtaattttgtattagtgaggtagtatagttagacattgggaatgtcaggattatgcaaggattagaatgaccaaaatacccatatgtgacaagtttgcttttggccttgggaaagggtacaatggtctttttggccttttattcttttgtctgttagtgatttattttatgtaataagcaaattttaattgttaatataggataattatcggattaacttattttgcaaaaaatcaagaaaaacactttctcttcatgctttctctctctctctctctc

SEQ ID NO: 37456 - DNA, 9253 bp, Cannabis sativa
ttgtcatttaacaaaacacagggtccaatctataacttttgcaaaacacagggtctaaaatagtatttacccaaataataattatgttaatttgtatgtttttttattatttgtcatcaaaatttcttatcaacataattattttatggttattgtatgtatgatttatattttaaatgcatgaattaatttcatatgtatgtttttatattgatctaacagttaaaatttaattacaatagtaaaatcatagacactaattaagttatgcttaagttcagggagggtcgacaacctaatcagaagaaaaagacaatctccagcaattaagaatttcgaaacaaaaaatcctaacataaaatataaaatatttagaaaaaaatcttgtttaataaacctttttgctttgttgtttggtatataaaaaagaaggtatgtaataaaattattatattattcttaaaaatattaatattatattttttttgtaaaattatttagtcatttggtttttacttatttatttgagacttttctctctatttttcttctcaatttggaggaggaaaatgggtggattccacactatatttttcttcccactttggaagagaaaaattagtgagtctggcagcatatttttcttttttatctttatcaaacaattcgattttatttctttttctccttttcactcatttcttctttcctcccatattatttgaccaatatttgcggtcactaatttttttttccttcaaattaggctgctaaattacttaaattatggtaaaaattgtattacagcattaaatacttatattttgttggtatctaactggcgttaaatacttaagttgcaccatttcaaaaaaaaaaaaaaatactcttgtaatttttttttggataaattaatatgaaataagactatgattgttttgttaccatttacatgtagttaaaatttcaagctcgagtgtgctccccaaaaatactgtacttgtacgttaaaaaagacgtactgcataatttaaaagaagttattcattgaatattttgtttcaaattcaataaatctttgcatagccaaaagaaaagaaaaacagcacaccttggaagatagtacatgaaggaaagatcatacaagcaaaaacaacagagctattttttttttaagaaaacagtagaactaattcaactattgcaagctatacaacaacacacaaagtaaataatacaagaagaactttaattagcacaacaaaatcaggaaattgcatagcacaaacaatagaagatcaactagaatgcattccaattatcagaacttttcttaggagatgagaccttaaatggacccgaggagccaaatggatctgtgtcatcgaatgagaaggcaccaccaccactaatgctgcctccgccaaagtcttttgtgctgtttatggagtcaaacctcgtcaacctctgagggtgctgaccaaaatctctggaactgcccatggagtcgaacctcgagaaggaattgtggccgaagtctttcgagctgtttatggagtcaaatcgagtgagcttatcgggctgagaagaaaatccggcatcgtgtgtgctgaaggaatcaaacctcgagaaattgtcgaagtactgatcccctgcctcactgtaccttggtgagttgccgaacctggaaagtggtgtgccaggcacagaatcatcaaaagtaaaagggctttttctctgaaaggtgctttctgcattaggagatcccgttctcactgggtcaattgaaaaactgtctgaaccaaagaaatctctatgcttctcagattccaaatcctgaaggagaaaggatgacatgacagtaccgaaaagagaattgagcttatggaaaaatatgaaatagtctgataatatttctaacaaatgacacagcagtataaaaccaatgtcattattcttttttgcaaactaaaccaatgccatttttagagcttaatagtgcacatttaaaggcaattgcatcacaattaggccttagactcaagtacatccattttccaggcaaaaatagtaaataaatggattttagtgataatttataagcttaaccacatgcccaatcactgattcttgaaaatttccaagcaccagatataaccttcaatataataatacagggaatagggtacaaaatggaagtaggcaaatcctattccaggtccagatgtagaaagtctttaaaaggaaaatacattcttgaaggaaaaaaaaaggtttcatgtatgatatgatcctaaatgtcttttcaaagaaaattgcattttttgacattaagatatcatgcaaaagttcaagtaatattaaaaaaaaatctttttgggaattaaatacccttatttagaaaacctttaggtgaatgttaaacagaaacaaatcagattggttttggtatcaacaaaaaagtgcttcagaagcaaagactcacattggtttttgaagcatcaaatccccaaatggagtcaacatcatcgttattgtcaaaagcaccccatgttgattcatcaaagcttctgccaaagagattttaaatcagcattatcatatggtatgatcaatgactaataaatagggataaaattcaagaggataaacaaagaaataatcaacccctacctatgagtttctgcatctgcttctgaacctttaccataatgagcgtctgaaaattcttgagtcggactttctactgcagctggactatcatgaaagcttcttgcatattcatcttcattatgggacaatattgattcattctcaagggcaccatcggcagagagtatttccctctgaacagaagctgattgagatgttggactaacaggcccatttttcacatcaattgtgaggtcattcacaaatcctgaaagttgaatttttgtttccacataaataaacaagtatcagtcaacatcctttccaaaaatactttacttcaaggtatctgtaaaattgacactgtttattgaagaccaaaaaacaatttaaacaaaagaccaaaccttcatcttcaaacttatcccattcctcatcccaaacagctgctccctcttgaatgccgggttcccagccttgagcaatgcataaatgaaacacaattaagttaactgttaaggcaatataaaaaagaaaataacatgttgcaattatgttacaaaattctagtctttccaattgacaagaaactttcacatactcaaaaccactcccactcaatggaaaatgggaatggtaattaggggcaacgcttactgtgaagcatgaagaagaagtaaattccaagaatgaaccatttgtaagtacctctaagtttacctgaaaccagtatacaggctcatcctaaaacagatggtactttaatatatatatttatatgtaaaggtgtaaatattcttggagaagaacatatatttatacacaaatatgtaagcacgttagcaggtagacagcatgcgcactccaaaaaataatacaagttgtgctctatatatctaacaaaagatcatttgttgaaggtactagcagcatatactagacatcgagaaaggcatgcgcacctttaggaagttcaattattgcactggacttaacatgtaatccatgtttcttgcaacgttcagttaaagctttcaaaagctcctcgagatcattttgtatacgatcagcacggacctataagactgctttgtcagtaaaaaatactttatctagaacttttaacagcccactacagttcattagtcatagcttacctgaaggataccgtcagcactgcctccctgttccattttgacaattgcttgatgcagttccatttttcttgcctaggagggaatcaagagcacatcatcaagagtacataatgttaaaaaaaattgacacatccaataaattgagaaccacattaatacgagagctcttttaaggtaattatgctatgtgagtagccaataaaaaaaaattcaccaataagatgtagcttctaactaagaagcaaatagagtacccttccacatgcaaaagacaaatactttaatttaaaatcagtaaaatgtcagtactcagtagaatttagagagtaggagaaactagtcaaaagaaacaatgctaaacattattgagcatagaaattcatggtgctaaatatatcacctgaatatcacgaaaagtagcatcctcgattgttaatttagatgctatctctgccacttgcttgtacttttcttcatatttcttccccagcaactcagcctgcaataaatattgtaaccatcaattaaacgagccagccactcaagctatttctagaaaaatcagtagatctctagagtacctcacgcttatctgcagatgccctttctgtaatctcatttaatttattatcacatctgcttttgtatagaacctgaaaagaagataacataaacaataacatatgaaaaataaaaagggcgaaccaaaatagaactgataatgacaggcaacagtaacaaacgtcatagagcaactgaagtcagaacaagggtttgtttcaacccaaaaataccatgtttagctctactttatgattcaaagattataagcaataataaactagacaaatttcacaagttcagagaaagtcagacccaagtctgtgaaagctatatttacgtgatttaattcttagacagaaatataaaactgaataagttaattcaaccctccaaacagccactgagtcaatttggccaaaaaattaagaatggatgctactcacaagttcctgcatttttgtgcggtagtactcaatcttttccctggaatccaatatgacattctttggttcttcaacctacaataatcaaagaaacaaaatccttattatccgggaaaaagaatgaaatctcatacaagcaaatgagtagctgccataaatgaagtaaagggcatgccttttgcccagtcgctgctgtttcttcaggttttgatacagcagagctctgatgcccattgtcacgttgatctggaaacaagtcgccaaaagcagatgctcttgaactttgctgatttgattgcactccatcttgcctaggagcattttcttgcactgttggcctcaaattaacattaggccccatcggctgaggacctggcatcccttgtcgctgctgtccaaaacctaaacataaaaagaaaacaaaaaaatcctatcaagaaacatatgaaggggaaagggaaaaatcaagtccataaagaactactcttactagttccagggcttggactccaagctgcattgccatgaggggccctgggttgacctgtcaatgacaacaaggtctcatcaaataatacattgtttggaagagcagctggaagagggcggccttccctaaaccgttccatcaaataaagagcaaagcaaaactccttcaacgaaagcatgctgtcattgtcctgatcagataaatcccacacctgttttaacacctctggtaaagccaatgaagccatgttaaaaatgagagtaaaataaacatcaaaacaaacaatgcaataaaattgggaaaataaattcacctcttggtaacctccaactcaaaaatagatttcgagcctgttcaccagtgatccttccatctctgtcagtgtctacttccataaacactttagtgtacttttggacatcagatggtttcatctttggccaaggaagctgagagtttcctggagtggtggttcccactccaactgaaataccagatgatgtgaaagaggaagaaccagggacagcttgctggcttgggttcaaaggtgcttgtggccgctggaattgattggctgcaggctgcatggcaaatgcatcctgcaatgaattaagtgaactggttttactggaagactggggtgcactagaaactggtatgacggccaatgaggcagaagcactattagcagaatacagagacctagaagagtcttctttaaaatcaccaccaaaacctgaagtggaagcaaacccgtttccagaacctactagtgcttttgggtcagtaactgctggttgggaaagcgtagaaactagagcttgtgatctgggtatagtaggcgatgcaggagttatccctctaggaccagtagggggagccccagacctcccaccaagccaatcatttgaggtactggagttcaggacattgggagccaccatacgacctgtacttgtaggtatggcttggggcggcctcacaaactgattttgctgggaggaaaagctctggttaaagttggcattagaaacacttgggcccctaaacccaaaattttgcgatggcggtgcaactgatcccatctgttgggggatgggggatggggcagctgtgagagcatttggttgtggagcggataaagctggtagattaatttgtgggggagggattttggaagcagcagaaccaaacaatgctgccttgacaatttcaggtgttaaatctcgcttactttgtgccacagtcacaagtctaagagcattaaagaattctgggcggccaagaaaaccagttttggtctgatcagcatacatccatatctgtcaatcataaacatcgcactataatttcgaaattctgttattcaaaggcgataaagatcaataagatggttaattcagaaagacttcttttgtagaaaaacaaaactataacagataataataataatatattagacttcaaatcgaattctacggttttcggcgactacacatacaaatagagtatttaggttagccaatatctcaaatgaagaatcgtaataataacattaataatatttaatagtaatcgaatcagatctgccattgttaatctttgatatcaaggtacagaattcgaaaacagcaatgacaattgagtattatctattctataccctacctaagaatgagtaacacaaaatatgtacacaaaaaacctaaggatgagaagcgaagaagaagaaacctgagcaagaacttgtttgggcaaattagcgccttggaagaaggcgacagcttcagctccactgatcctgccatcgccatccaaatccgctttcctaaagtaagcttcgaacatatccatattcggccccgccatatctgatatcttcgacaaaaatcgaaaccccagatcgccctgtcaaatcgaaatttgatacatgaaaaaggatgagcaagactgtattagaagaaatttgttgcgtgagatcgattcagattagatcggaaaagagaacaggtttcaattttcacatgtagattcaaatttgaaagaagaacaatagagagagagaagaaatgaaatgcctaacctttctccctccaccagggactccgactcgctacttactatgacttctctctctgttctttatctttctttagtttttttagtaataactttaggaaaaattcttggcacaagagttgttcaggtagaatctttatctgtttttgtccttaggaaggttttttagtttatttttttccatcttataattacatgtattgtagctatttatttatttttatttttattttttttttgagaaaaagcgtagttatatatattaaaagatattagacctctcggttattacacaaaatattctccggtaaagagtcaatcggaatagatccatacatatggttgttaaaagcccaataaaccacattatgggctataaaattacaagacctactaatgttcgaaaaattacaacaaataaaaaaaggagaagatttagtacaaaaggagacatagttctctagagcccaatgggatgccttcccattaagagcatcgatcgctagcctcgagtcactctccactataatatacttatgttggagctccatcgcaacagacatcgccacaaagagcatcagagtaatccaaccgggacgtgtgaacactcatcacccttcccagatgattcctagcaactacagctatacacatactctctaagcccacacgaacatcacaattaaatttgatccactccagaggtggtgggatccagctgtccctcatcaacggcgaaggactaggcaaaagagtagtatgtatctctgcaaaagaagaacaaataatgtcaatacatttcaaaacatgaggagggctattgttgtgaaccgctttatttcgcattcgccagatattgtcaacaacaatggacgcatagagaaagacatcctcagccctaacacctctattattaaggctccagatgaacttcacccaatctcaaacacgaataccagtttcactcactggaaaaattccccaaggtgacgagcgccacaagtgcatcgccacatcacaagttagaaagagatgtttcatggtttcctccccccttccacataaaggacattttgtgtcttcaattggaaatctcctacagatgactgctctaaccggcaggacattgtagctatttaaaaccatatctaaattttaaggaaattttaaataatttactgtgttaaaaataatatttttactttaaattctttataccaaaattaatccaatcatagaattataattttgttattttacacaatactttctaatttgacagtgattctcttcttcgaccttcgtccccaagctcgagagtattttaaaaatatatttggcaaaatatcgattggtctagtgtgatcaagcatccgtccatcttttgaatgatgtggtctcatatttataggcagaaatgagtatcgtgtgattccttttttttgctcggattgatccatgtgaattcatccttttagttttctcacgtgctttccctcctgctttgttcatagagctccgctctcatggctttctcgagctcaactcaattcttctgtctttccctttctttaagtaaaacggtatgtttattttgttcccgtcacatcatgtcattagtattgttattattattaaagtgaaattactttttaatcctcaaggttatttttatctcttacaattataacttcagttcatggagaatagaagaaaaagtggtaacatgcatgtatataattaaatgggtaaatagcggcctaagtacccaaagttttaagtttgtaagtggcataatcctaatgtttatttttagcggcataagtatccaatgtttgtaaaacggtaatttttctctaatttcgtcc

SEQ ID NO: 37457 - DNA, 4534 bp, Cannabis sativa
ataaaatagttcaaagcgtaaaagataaaaaaaattttgtgttttgtatatttgtaatttttggtttattacgtaatttttttttcatcgatcaattagaagccctcattcgttccttgggtgaaagagtagggacgaagccaagataaatgtcgagagattattattgattgatttgaagcacgaagaagatcttaatctctattgggtagtcaatgatttatcgattggcttaagttatttgggtgttattatttctcattgtgtcattcatatatgtctattggccctttattttgtgctctaatcttttgtgattgagcattacaacatagttggtcatattattttctttatttatgatctaaataatgaggttgttatgtcttaatttttattgaaagattattagttaataattattaacaggtcgattctctcgtaatgttcatttgatagaaatttagtatttttcacattttagtacttgatcgctataggcttattagacccttaattgaggttgttgtttgattttttttatttggtatgcctattgcctagtattgttgattttgctttatgagttatatttttatataatgaattttatctaatttactttttaataaatatttctgttttttctctaaaaaaagagaaaaagatattggagtttcaaattctaaaaacatgtttgttagtacatttgcttactattttactataagcaattacccatatgtaactatcctagtaattacacgaaaattggcaattacgtcataagcagggccggccctaggcataggtgggctaggcccgtgcctagggcccatatttttcggtgctcaaaataaaaaaataaacaaatttattaggcttttatttatctaaattttaagtgtattataagcaataaatattcatagtttagttggttgaggtggatgacatattattcaaggtcatgagttcatatcccataacactcttcttttgatatttttttttatattttttagggccccaaactttaaggaaaatttacaaaaatactggaatttaggttaacttttacaaaaatactgtcacacggaaaaaatttcaaaaatactgttttttataaaacatcagtagaacacaaaacagaacaactcaaaacaacattagaacaactaaaaaacacaggtagaacactagtgaaaacttaacacaatatactgtagtatgaaacttataaaaaaaatacagtaaaaaagtaaaaaatactgcctgtcagtatttttgtaaaaaaagagcaaaaattagtataccatgtaaattttctaaatttaattcgccttcggctcatatattctcagggctagccctggtcctaagatcacttataacaacttctctaaaaataaagaagttttaaaaaaattaaaaaaaactgtactaaaaacatggtacaaaagatattctaaactccttcatttttatgtttatttaaaatacattattcatgttctacatttatagaataaatattccttgttttaaaattattttattgattgttttgagtttttataattattttttatggagatatatgtatatattaatgttatatatttaaaatgaataaaatataataattttttttgaaaataggcaagatgggttgtaaaccgttagattttgtaaattttggatggatcactctagttttaaagatactgtgatggccaactggagtaaaaggttgttgggtaaaaaccttagcaaaatcatgggcaaacttagtagactgaaacactaccttaagggctttagtaggaagaaatttggtgattttgctcgaaactatcaactggccaaagatgattacattactgcccaaatttgtattgctagtagtcctatagatatcgcattttatgttgaagagcaagcctctaaggagctgtttgcaaccacccataaaagatatgccaactatatgcaacaacttagtaaaatcatttggcttcattatggtgatgacaattccaagttcttttatgctagtatcaataagagaaaggaagctaatcgcataaccacctatatggttgatggtgtggtaattgaggattaagatagaattttatgggggctgaaagttcagctttaagtagattaattgagggatgtttggataatggacatatgttttctttacaacaacaaatccaaattatcagacccttttcgaaaaaagaagttaaggatgctatgttcagtattaaccaatttaaaagtctgggaccagacggttttggtgctgggtttttcaaggggctttgatctgagataggagacaaaatttcagaagcaattctttccttttttgagactgatttaatatcaaagaatctgaaaagaaccaccatttctctgattcctaaatcaaacaaccctactttagttgtggactacaggctcattgcttgttgcaatactctttataagtgtatttccaagttgatgtgttcaatattaggtgagatcttaccctctctagtacatagcaattaagaaatgtttatcaagaaaagattgattgctcacagtatcctaattttccaagattcgctcaaaggttacaccaggaaaaacgtgtcttctcggtgcttgatgaagatagatcttagcaagacatacaatacggttgattggcaattcatctcagacttaatggcttgtgcttcccagccaagttcattaagtggattctggtttgcctttgtgatacttcttatactttgatgatgaatggtagattgcatggctcttttaaagaaaagaaaggtcttcgtcaaggagaccccattttcctcattctttttgtgcttgttatggagtacctcacctgactactttctatttcctcaggaactaatggcttcgggtttcacccaatgtgtaagcagttgaagctcattaatctctattttgcaaatgatttagttattttttgcaagggtaatgcttcctcacttaccatactaaatgaagcattagttgagttttgcaaagccatggggttagctgctattagagctaaatcctccatatattttgggggcatttcggttgagcttaaaaagtgcctgttatatattgttgatatggaggaaggatcattccttttgaagtacttcggggttaaattgtatcctaccaaatagaaataggctgagtgtgttgtcataattgaaaaagttcaaaaacaccttcatggttggagtagtagacacctttcttttgctggtagagcttagtttgttcatacaatattattgggaatcggaaattattggatgagcttattcatccttcttcaaaaagtcactaaggaagttgacaagctttgcagagattttctttagggtatctctgacaaccgaagtaaattacactttgcttcatggaagaaagtgtgtttgctaatggattatggaggcattgggttccgagaagggaaaaaatagaatatagctctaatggtcaaatacattcgggtcatatccatgaaacatgataacctttgagttcgatgggttaatgcaatttatatgaagaatgaagattttgggactttcaacccagagcaaaatactagccggtactttcataaacttgttaatctgcgtgacaagattgataggcatgttgtttttgaggcaggaaagactggtgtttttaaagttaaacacttttatcagtctctattaatagattcaaagatctcttttcataaagagatttggcacaaacttaaagtcccaaagcatagatttattttgtggcaggtcgtgccttcaaaccttttaactcgagatcttttagccagattcattcatcttgattctctcttatgtcctgtttgtgaaagtgatcttgagtctcatggtcacctcttctttgcttgccccttcactaagagtgttatccttgaggtcatcaagtggctgagtcagtttgattggtctcctaatcttgaggattggctgattgggttgaaaggtagtagaaataacgtggttgttaacattaaatcagcagtagtagttgcgatcacctacatagtgtggtgcaataagaataattatgcttttgagagatattgtgaacctgctacggtcctaagcaagaagatcaagtagagcattaaagctagagtgatttatcttaatcttactaaacttaaaaataatgaaaaagatgtaattaacttgataaacaatttttcatttgtatgttggggcttgtcctccttttggttttgaatttgcttggttggtggaataaaattcatttatcttattctaaaaaaaattattaaatatatatatttttctatattacacatatttggtatttttctcaaagtcatgcatttttaaaaaattaaaaggccccaactagcaagcaaccaatcacgttcaatataatatgtgctaattttattatttatttacctattttagaaaaagtagaa

SEQ ID NO: 37458 - DNA, 4086 bp, Cannabis sativa
atcctaatacagatataaaagaaatgtaacttaaacaattaagcttgtaactaaaaacagatgaaccttgataacgttatttttccttaattaattttgtttttaaaatgttttaaattctaagcgccaaataatgttatgtaaacattgggcagcaagaatcaaccacaaataaaattagacagcatatccatctcatattatttattaattgaaaacattccagtaaaacgacaacaagctaggacaaggaaataaccaaaatagatactttaaattaacattactaaaagatctaaaattattacccgttaagtgctcggtttttctgaatattatcgccaagcccactaattcttctgtcattgtccatagataaggtctgctagtaactataccacattatgggttccagcaaaaaaaaaaaaagaaaattaaacactatacccaaaaaacttacaagagacttcatatcatcctcattaataatagttcccaagccactcaattctgacttatttatagtcccagtggattgttgttctcaaacaattaaacatttctcgatctagtgaatggtttagaaatgattaaatataagaaggaattaaaatatgaagcacaatgacatcaaaaattaaagaaatcttaaccagaaacgcacagtgatatattattccctgataaccccattcactaaaattaaaatgcacttgaaattatttttaaaaagaaaatgataaaaattaatcatcctccataggaccatatcttaacttgaaattataatattcaatatcataaataagtaccccagaagatataaatgaactttaaacaagtcaaagacacgaaaagaaaaatataaactgtccagataaaaaccaaacaaaaaattcaaattaaaagatttgacctttcaaaattcgaaacaaacagttacaatgtaatggaaatcacttggaggggaaaaatggaagatcagaacacgaaaacaaagattttcccgcactgaacccagacaatgatagtcaacacttcctaaattcaaaagtactacgatcaaatccaaaactcataaaaacgggaataaaacaagttaaaaactggatcgagctgaatttgaagtgaaggttaagattagaagatagtattaaacaaaacttagtgcaataaaaccctaaaaaagacactcaccgaactgagcttccgataatagtatgtagagaaaccgagtaaggcgaaagtcaacgatgcgaccgagatggtgtgcatttgaacatccagaaaacgaagatttgatggatggagagagagagatagagatctgtaaacgcagaacaagaaatgcagagagagagagagagagagagagagtgtctgtgaactctattcaaacataaagggcggagaatgagttttcaaaccctataaggctatagcgttaaggatcgatcatctttgtttttggacggcttagatttttccgtgctggaatatctaccgtcgatttagatgacttttcctttctcggtcttcattcactatttttttaatgaagaatttaacgggcaaattgttttaattcatcattttcttctcctttttacttttatttttcttttttttgctttaacaagatttcaccttttttcgaaggaaaatttgtcctaataccatacatttattattctctaaaaattattacaaaaaatatatatataaaaatatatatgtatacgtgtttactggtataacttcttatcaattaagacaaattaataacttactgtattaacattaattgaagcacccacactatcaccagcatgaatcattgttaaggttatgtttggtaggaaagatgaaaagtaggatgaaagaaaagaataggaagaatagagaatatgaaggattgagaggaaagtagctctattttatattgtttgttattaaaaatggaattgaaaaaatagaatgtaaattaattactaaaattacagtactattctttttaatataattaattatttttttttaaagacataatactgtattttttttttgtctttttattaaatccctctattttaaaaaggattaaaaattttgagttttgatatctcccttcgcttttccttcgttttctctttcctttttgccaaataaatgattttacttatccctccatctattttcttccgcccatgtccttccaatcttctttccaccttaccaaacatagtgcaagttttatttggtttaccaattcagtccatatggaattatttttaattcccaaatgaaattacttttggcaatcaactccttaaattttaaaattagtagtaattaagtccttccagtggatttatttcacaaatttaaatgaactttttaaattattgaatataatgtagattaataacattttagactttgtgttttgtaaaaattatcgctcgaatcttatgttttgttaaatgacaaattgaactctatattttctaaaatagtacaaaataatactatgagttcaatttttgacaaattttttaatatataaccaatttgaagataatttctaatacgaatagatgcaaaacatgtaactagtcttgtcataacactgatcggattattattaaattttattttaaaaaaataaactcgaggtactatttatgtaccatttcaaaaaatataaagttaaatttgtcattaataaaatagagaatttaattaacaaaaatttacaaaatacaagatttaaattgatatttactcgtataatattatgtgtaaagtatttagagatataataattataaacttttaaagaaatgattcgcaaaatggactttctttttaagtcaatttgtactttaacttagcttgttaattctttgcaaaatgacctcattttaaaaatttgactagtcgtctaaataattcgaccacttagcatgtctagagtgttagatgtcatctcgaaaaaaattatgcattaaatctaggccaaagtagaacaaaacatcggacatatttacaaagttcaagcttttagtttttgatatatgagtgaccaaataagaagaatggttgaacttgaacttagtagtgtcaaagtggaagaagaagaagaagagtgggtggcaactggagtgagagagacacacataagaggtgtttgtttttttaagggttagggtagagacatggtcgaccttgaggtgaggcgagccaggagtgcgcctcaggcccccgcatccttagggctacaagattgtgaaaaaaaataccaatatataaataaaacattaaataataacaaggaatattaacggtaaaacaacttgaattttatgttttttaacacttaactacaaaatcaattttttgactgtgaaacctatcaaattcaaattctatttgctctttacacttccgttcaaaactctcaattaagtgtcacggtggactgcctatgtgtacacaagagtacacgtagcaaaattttagtagtccatttaattttaattttaaatataataaaaattattttaaattttcaaaaaaattatttagaaaaatgaaataaaaagttctttttttctttttttctttttctttttcttcttttcttttctttatttttcgtttgaaataccctaattctttctcaccccacaaccaccaccatcacaccacctttgttaacaccaccaccatcacatcacctccattaacaccaccaccatcacaattattatcacagtcaccaactaggggtgtacatcggtcggtttggtcggtttacgttacatttttattaacccaatgtaaagatcgggttacaaaaatctaagtgcaactcacccaattaagaaaaaaaaaagtttcaactcgcccaataaattggtcggtttagtcgggttaaccggtccaaaccgagcactaatgtttatttttttttttcatattcaattgtttttttttagttattgtgataatgagataaatataaagattgaatttaaatttcaaatcatccgccataaaaaaatatagtagtttgaacttttt

SEQ ID NO: 37459 - DNA, 3252 bp, Cannabis sativa
aatttctctgtactatctgatgcaactcatacgttgtccattcttatatgccaataatatgtaattgtgactagcaaaaatgagttttagatctatagatttaatgcaattacatattacaaattatgttggttttaaagtagattgcagcgaaaataagtggaggattattgttaaattttaatcaatatgataatgaagaggattgcaaccttggttacatgttagcgtatctttactcttcgacacgtaagtcttctaatccaagcctcaccaatggattgacatgcaggaaagataatagtcagtaaaatccagcttttttttttgttgggtattgaaagtaaagaaaagaactctattagaaaaatcaatttgttccaaatatatgatttcaaatgaaggccataaaacctccaacactcatgacataatacattaaaaaaagatctctaaacttcaaaaatctcacactcaatcgaatcaaaactcttaaatcctctctgcaaatctatatgccaaccttaagaattttgaattcctaacaatacattagatatcttaaaaacttgcaccaataaactgaacttctaagatttttgatgttctcgtacgtaacaaaaggccttaaaactttcactatatatttgccctaataactttcagtttcacctaatgaaattgaaaactacagacctcgttattgaattgctctaccacagtcactgctgcataattttagttgatgttatccaaaaaaaaaaatgtacatttgtaattttatagtaaaaggctaagaaacatacctaatcgaactctttagcattagtgccatatctaagaaagttcctcatcattggattaatttgaagtggttcaatgtgcctttctagttatttaatatatatatatatatgtatatttatatatgaacaactgatacattcaattccattttagaataattatataattgaagtactcaatcattttaaaaatcacacgtgtacttccacaaacaggaatcagtattttctgtatataagcaagcatactaggtactattcaagtgtctcataccagtcattcaatacaagcaaaagagctgattgctatagtaaactaatttctggacagacatcatcagagctttacatttcttcaaaagctgaaaggtacgtttccaaatatcaaggtaaaaatcccttcttagaaaaacaaccacttatatataggtaaactcgacaagttttagaaaagaacagatccagcagcactaaatacgtctgagcataatcaccataacagcaagggttgccaatcccatgaaggatgctccaaggctcatatcaacaaaagttgctttggcgtctcccttagcatctgaagaaggtccaaatatgctttgaaaataaccggaaaggctgctaaccatctcagtcacactaagctttacgttcttcagtgcgtccaaaaaccaatttccatccttagcttcctggctcccaggagaggaaacctcacaactctcaccaaaaactggctcttgaaagtcagcaactgcaacagagcacttcaagtaaaaaatccatgcaacaagcagcagagaaaattcaacaatttctgttcaacataatagataattataggaatcttactggattggtttgattccatgaaatctttaagcacaggattttgcaaaacagcattccagacattggggtcacaggcaatggaggctacaacattctaaatatggaacccaaaagaggaaaattagtcagtgtctaggtagagtctaaaacagagattaattaaatattacaaagatctctaatattttatcttcatgatagtgagattgtatgtacgagaagaaagttggtcattcattacctgtgcttcagtgctggtacttaaaagcttaaatgccttgagagcatgatttggtacagtagggcctctaacagtgtcaacaacaagacaagatttagtctccagctcaggatttgaaaacagagatagaccagacacctgatctctagcagctagttcctcagatccagaggatttaggtgaagacagatataccctaaaacatcacgtattcaaatatgccataatagttcttcacaacaacataagtaatcgttttcgtatcagttcagtaaagaatgtaaacgatcatttatgaaaacaagtgcaaaatctcaatctaaaaagccaagaaacagtgaaaagcacaaacttttcaagccattcgaaatatatttcatccaattccatggctacaaccctcattggcctagatattataacacccgcttatgacaataaatgaaagttctcaaaaagagcaattcaatattacatctcttaaagtatcaaaatcaatcgaccgcactatctattactcacaaatttatcaaccctatatacacaatttcctttgataatctccgttacgccattaagaacctttccactcaaatttcataccaccataaaatcattccttttaactttgtacaaaaaaaaaaacagtataattttctcaaaaaaaaaaaaaaatccaaaaaggaaagcacttcccagaaaagaaatcaattacgaaattcgaaataataataatttggataggatacatacttatctaaagcgtctttcaattcaacggtggcctccttagcttcctggaagctagggaccgcatcaaacacaactctcggcaagggttcacccaccgccataaccatatcatcctcgcccccggcgaactcccaatcgttcatctcccacgccggcctctggatccccaccatgtcagcggccgtagccttggctgtctgagacgacgacgtaaggatcgcggagactggaattgaagaattgcgtacagattgctcgacaggcggaacgaccgtggtgccgcgaagaccgccttgattgatgacactgacgccaacgccggcgaccttggaagcggctctcatagctgctcctcctcccatggtcgaaaaaaagaagttgaatgaagaagaactcaagcttttgaaaatatacgggattttatttcacaactcgagtttttgggtagagaagtaatgattatataggcagaaataatccgtactacggaaggcggtagtacgcaaaattaactattttttttttaattaatcacgacatttattaattaataaactccctcagaataatagaactcacttcaaaagaacaatcttccaa

SEQ ID NO: 37460 - DNA, 5577 bp, Cannabis sativa
acgaagtacaagccaatgaagtgaccagattagcagtttcacctttattaacaatagcataaaaagtcaaaacttaaaaccacacacaaaaattgataaacaaattagcaatctttacagtcctaaaaaaacgttcacagaaaaattgtacattaagattcaagctcagaacacaacttctatactatatgagcggcacaaaagacataagttgatacttgcaagaacataacaaaactacatgtcagaagtataaacaggtaactagggggcacgggctcagctttagaatagatgtaacaactacattatggcatgcaatcaagaaagacataccgcagctcggccagtattgctgggatcctctaaaatggaagctgcagccttcttagcatccttgagaaaagctttgagcagaggaacaggaggaaacttgtccacaaggccaacttcgtaagtgaaatgcacagcatcaagttgctgcccttttccaattaattcttcaatcatatctgtaaaaaaaaaaacacttcaccattacaaacgcaacaagtgtaaacattcgaagcaaagaccgataccttgacatgtatagcttatacaaaacagaacatagtttcttcataattaatacttaaagttcataactccatttccgtgccccaaaaacaaatgacacgaacatcatcagacacccttccaatttatcgtaaatagctctcattagtgaatcactcaattagacttgtttgaggtaaaaatcaacaacccataacctggtgagcacatcaatgatctattcctaaatgggtgataaagaaataagtagaatctacaatgaggaagaccacaacatgggcttaatatcaaaaattctaagagagaactcgaatatacaaagagggagagagaagcagaacgtaccaggcattttatcagagagaccaagagaaactgcaagcttaggcatctgctttctccaggcagacccaaccacaagcttcctgtacaaacccacgtcttccttctttacaattccaaaagtcaccaaatgttgaaggaatgtgtggacatctggggtcttcacgttctctatgccaccgcgctcttctaagctcgccttccatgtctccgcaatcttattggcgcgtgacttcacgcttggcgtcaccagaagcctggattttccgataacagggtcgaccaccaccggaatcagcgactccagcatcagaacacaagcccaacccaaatcgttacctctatcgctcttatccaccctcttgtccaccggaaaaacttccgatatcgtttccagaacgaactttgccggatcaacgcattcagccaaagctagaggcatctgagctctaagagcatccaattccttcttcttaccagtcacgaacctccagagaccttctgcatccattttcagacaaaaacatttcagcctcaaaaggaggccctcgccatcgtcgacctctccatcctcgtccccaggacctctatccatggccatgatcgcagcctccttgctcacctcaaccttacctagtgcgatcttgacactaccttcgatggttacctcacgcttctcgagctcatggagtgactccttggtctcgttgtccagagtctgaattttgcgtttgataacctccgacttcttcaggaggctctgctccaacgaagtgaagtgatcagagagttccttccacagcagagtacaactcgtcatcagagaagtctgcctttggaactcatcaaaactcggcggagttaactcagtcaactcgccaggatcggggatagaccccatatctttagcactgtatcaactcagtaatcagtagcctaaagaagaagaagaagagagtaaaggcagaaactgaaaccctagaattgcagagagaaagagaattggcaaagaaaaaaaaaaggataaagctagaggagcaaagaagaagacactgagatgacgtggacggttgataaggagacacgtggaggcggctgtccgagaaaaagttgcaacaagaggcaactctagaatgcgccgagggtgcgtacaggtaaagtttggtgtatgcggagtgagcacgagagcaggctaaagtgcgcacatggtgtgtagagctactatagagtaatattatttttggtaaattctaaagcgggaaatgatgatgatgattagatgaggtggtgactggtgaggttaagataagagaagggagtgtttgggagaacgtatgaagtagaacagagaagagaattagttcttcactttcccggaaatcgaagttagatcatagaaaaaaaaaaaaaaaacaaaaaataaaaagcaaaagtggagtgggccaggcccactgaccaccacatgggtagagtcagataaagtaaagacattgagggatgaatatttatctacactgcctattgtctactactacaggctacagctgctaatactgtaccaagcgtgacccaaaaaaattaagaccatgccacgtacacacacatatcgtggtggtggtaagtttgttcaaaaaaaaatctaaaactagaaataaaaagtatatgttagggagtgtccttggaatctaatcacactgtatttttccttacaattttgtatggtgtttcccaatagggtttgtaggattgatgagataactgttttgagttgggtgtggacccacatagaaaatgccatgggcccacttgaaggcccaatagtttagattcttgacacgtgacgtggacaacccggcccataggattctttggaccactcatggggtcagcaaccgaaatgatttgatgatcctagggaggctaagcaaggattggttttatcatttttttcaattttaaattattttaccaccactcgcgctttcatgggtcccagtcagtactgaactaataatggtgtgcacgtcaaatttattaatatacataatatataatttttttttaaatagcacaaatcaaaacaagatctttccagactacacacaacttgtaaagagtaatatgatattatgtaggtgcagccagaaaatgtggaattaggtaacaataatcaaaatgtaaagccatttcaaagaaatcaaaatgtgaaggcaaatttgataatccttcaacaaagcattaaccctttcagaatccattttgcttgtaacaaaatccaaccaaagtaaagtacaggaaaaaaataataataaactcaacttaaccatcttctttcaacttttacatcaagtaggcataatatgcatatcctcatagtaatactgaagaaccaagcaaacccctatgagtgaaacaaggccaactttttagattcagccccaaactaaacgaataattatttacaaaagagagagcattgcttaagatacaagataattcgttaaactatgacctttcaaaaaagtagagtaaggtacaaggtaaattaacttttcttccacgaggagatttgaaataaaaatgttatgccaaatgcaaaaacaaaatattgtgatgacataaacctcaagaaaaatcaatctgatccacccaaaagagagattagtaacaataatcacaaaaaaaaaaacaaaaaacggcattccaataattataagcaggcatatttaaaatggagctctattggcctcatgacacccctgttggctattaaatttacataaaagcttcaatcacctaccaacaagacagtccccacccacatcaaccataaaaagatcggcaccaaatgtgcttaaactaaaagtgtaatgtgaataagttaccacaatacctcaaaagtcaattttgttcaaagtctatttggttatctgtactccctctggctttcaatcacgattttcttcctcgtatcaaagtcaattttgtctagatcactggcagttccaagataggcatagaaaatcctctttttctctcccgttctgtcatcaaatttcataaggtgtggattgttctcatcatccttgcttcctagtgttaaaggttgtagacgggtccaagctccgcgtcctcggttatcctgatcaaaatactgtgccaagcggttggcctccttaaggcctgcttggtcacttgaaaacttgatgagtgttgtacccaaatggccttctctaccatacaaggattttgacttaccaccagtgcatccaaactctgaaaagacaaagaatgccaaaccaaagacatgacttgtcaaaaataaactggaattgtattcaaatattaaaaacagcacaaggactcggtccatgcactatttccaaactgattgcctggattttatttttttcctttagagtatgtgaggacattggtgtggaggctgcctttcccgtacaacagcaagcataattagtttatgttatttaatttaatggagcagtgagtgtcacaactgactgacaacaattgccagtaagatataaaaaaaaggaataagcagaaagcaaacatcaaatgttgttacatacaacaacaaaaaccttagttcttctacctttaattaaatccaatggcaaatacaccattgcagacaagagaccacaatttgactatataacatagttgaccaaaacccacctaaaactaagtagctttcactaattggcagatttgaattactcacctcacaatcaatcaccaaataataataactataataattaggctgcaagcccaaatcatgcaagttcagaaagtgatagacaaggcgtgaaccaaggaatctagttataagcaatagtctctgttaataaagatcatactagagtgtattgtagcactaattatctaaacaacacagccacattttggatctcaaaaccgccatgttcagataaaaattatggggttcacatcagccatacatttatttttcaaaaaaaagtaaggaaaatggaaccaaaaatcagaaaagccaaatctggctacgattagtgtaaggaaccaagatgacaacagcataccaacatcaaggtggctcataactcaaaaagtaatggaataccccacgagattaacaccatcatcaaaaaagtaaggttaagaaagtgttaagagttaaggggcctcttcatggaaactaaaattggcaatgccttggtcctccatgtttaagaaattcgacaagagacaagacccctacatattccataacagttaatggaataaaaatcctcaattaaatttacatgatctccttaatttgttgatatcttaattaaaaagcagatctgacacgatttgaacaaaaattatcattaattcttctagttgccataaataaaccttcaataaggaaaatcaaccaacaatgtggagaagaacagacagtgtttccctataaagacaactagaaaaccataagcaataacgtagctccaatgttcttgatagtcaacatactgtagaccattcaactactcccttttccaaagcattgtggaccctgtaggctaaaactagttggctttgtaagctctaaccatttttccagcaaagcatcacttagatgtgaaatgtagtaatgtacaa

SEQ ID NO: 37461 - DNA, 7201 bp, Cannabis sativa
aattatagatctcgttttgagttttttaagatattttgaatcctccaattatgcattattaagagagttaagagagttatgtgggcttgacaagaaattgatcagagagaaatgttggatcaaaccagagaattcagagaagaaatgagagtaaatgtgaatctgttattgattattagagcaattgttgtttaaatactatacgagtatgattgataaaatacaaatacatctgtataatataatagaattaagttaactaataactaaccaactacctaacagtcccaagttctaacaccccctccttcaaattatgttaggatagtgtaaagaccgtctaactttaatacaatagattattaaataattaggatctaattatgagaatgagttagtaatcataatttacatatttatggagaattatttgaattcagaatgtgttaattaaagttatatgtgtgaatttcttgtttatcgtgttttgtccggtagtagtggaatgcgacgttgagctactagagagtcacgtttttatatggtttagacttttgttagtagtggggcgacatggttagacattgaaagtgtcgggaaattgttggggtttgaaaatgactaaattgcccttaggtggcacgtttacctttattttatgtcaaggggcatattagtcttttactatgggaattttgtcttttgtggacattaatattcaaatttaataaactaaatttaagtaattgatataagatactcgtaactttagaaaaacctacaatttctctacaattctctccgaaacaccaagaaaccaactgagaaattcagctcatttcaatgtaattctagcagagttgtgtactccaatctaaggtataatatcctagtctccttctccttgattttcttaagctcaagttaacttttagtgcaagacttggagaattagggttctgtggtaatgaagcttgtttatttttgtgttctggagtaatgttaggtttatgagagtttttttaagctgaattagtaggttgtggtgtggtttgtacaaaattgaggttagagaactcaacttggttctctaatggtgttttgagtttctgggtgaattgttgggttctattgcttgaattgggttatttgaggtatatgcaggtattttggaagttattgtgaagattggggttgatttggtgttggggacatttttgggtggttcctgcactgaactggaattccagttcagggggccctgtaggaatcggttgaccggctggtctttagaaaaccccaccaaactggaattccggttggggaaccggtctaccagttggggcaaagcaaactctagctttttccttttttgtgacatttaggatgttgccatgttattcatcgataaggaaatttctagttttgactttaagttcccgaatagtgttttagcgtgtttctcattagaattacgagtgttgtgttatagggccctgtaaagcgtcgagttgctgaccactcaggctgaccgctacacctgagacggaaacaaggtaagattagcattaagtatatatatgattgaatgaatgcatattattatttgtttacactactaacactggaatagttgtagtaccaaggatgttagtacaatgtaaggtatttaagggtagttacagtgttaccaacacgagtactagggggtacgaaatgcatgtggtaaaacactcagtaactcgtgggagtacaataatggccctaccaacactagtacggggtcggtacttcagtgcatgtggtacagcggtcatacttctgttgagaacgttcttaaccttttgatgagccttgcatttgggctcgggatggctaaagtacaaagtcggtattgcattgtctatatatattttatgcgtatcttactgagtctgtcgactcatcagtttgctactttgtgtagtgttgtttcttcttcagaagcactcttttccccatttttcatgaagatgaagaaaatgcacgagttggatcttcgattttatacttggaagtcgctcatattgacaaattgtcaacctagacattgggtgcccaggcaccgggtgctctatatgctaagaaatgaactttctctgaatctaactttgatggctcaattgtgttagtggtatgtcaatgaaaagtttgacccattttcactaagtcggtcccaaaaattgaaaccctagttaggatgtcaacttgggcgttgggtgaaaccctaggtgcccaggctaactttcgagttgcaaggtcggtaatttcagctctcggggcctggatatgattattgcatgtcttcatggtagagaaaaatgaaagataatgagttgaaaatgtgttatcaaagtctaaactctcattttagagttcctaaagttaacacaggcgtagagcaagggacctctcccaagttgactgttatgattcgagactactcagctcctctttcttgccacatgtcaaacatgtatgtccacgtcactaggaaaagtttctgggttaacaaataacaattgtaaggacaattcaaatggttgtagatttgattattggactaaaagtctcagtaaaatcaaaaccatattggtggagatagcccttttcaactaaccttgatttatatgtggaaatggagccatcgggattgggttcaaacttataaactcattttcacctattgattttctcccatgaggcaatggaaccaaggtccaggctttattctttatgagggtcatgatctcattattcatagcattattccattgaggagagtttagggcttttgcaagagtgagaggttcttcagaaaaaattcaaacccttggtttataagtacaaatttggccctagtaaccaggggtgattgttaaatggtggaggaggaatgatggtaaggtaactggattatgtggagacatttggtaagaaggaagatgaggattgagaagaagatgtggtgggagaagaaagagatggaggaggagaaggagaggtggaacctgactcactagatgactaagaaaagaatggggtctgtataggagtagtaggaggagtataagtactcaggggtattacactagaagataaaccaaatgagacataacctatagttttaaaaacagattgagctaatggagaagaaaattcatataaaaaattacatctcgggagatgtatattctaccatttccagccaagcacttgtaccctttatgcttaagactataatccaaaaaagtgtacttaacagacttgaactgaagcttattacggttataggtctggtgtttggataacaagcacatccaaaaaatctaagagtagactaatctgactcctttgaaaacaaaacttgaagaggggtttgattgttgagaataggtgtatgcaacctattaatgacataatttaaggttctaactgcctcatcccaataagaaagagtcatggaagcttgggaaagtagagtaagagcagacttgagtagatgtatgtgttccctctcagtgtcgccatttctttggtgtgtagttgggcaagacagtttgtgactaatgccatgttgcaacaaatatggttcaaaactttgatattctccccccaatctgattgaacaataagaataggacaattaaattctttttcaatttgagttctaatattaatgaatgtgggaagtgtctcagacttggcttttagtagaaagaattaagtgtatctagaataagaatcaataaaatgggtgtaatacttataactactaaatagcagataaggagaaggcccccacaaatcagtgtgcagaacctaaaacagtttgctataaattgtaccagatttgagtaaagaaaacttatgtattttacccttgcaacaaccttcatacaaattgataggcattttattactatttgaaattttacaagagtttattatttgtatcacggttctagcagaggggtgaacaagcctcttatgccatagagaaaaattactaaagtttgaaacaacaaatacatgaggagaatccagagtaacagtattggtggaataggctacaggagaggaagtggatgacacagactcttgaaacttgatctgagagggttgaatgacatatagtgtatgactaagttgaccttgtattcgcactaccttggaagcctagtctttcacaagacaataattacgataaaacacaaaagagacattattatttgcagcaaattgaggcacacttatgcaatttttactgatattgggaacatgaagcattttgttcaaggtcaggggtttggaagagaaatgtgtgtgaaagatagttttaccaacattctgtataggagcaccagctccatcacccatgtgtaggaccaagataaggttctttctgtgtaaagttagaagcatctgtagtgcaataataggtggtgctatagaattgtataccaagcctcatcaagtaagttatcagaagtaccaatgttaacagatagatttagcatcaccgacatagcaatatatatgaccagattgagaacaccttaaggcaatatgaccagatcgagaacacagctgacagactagtctagtgctaagagagtatgcagatgaaggattgggagagaatccacgaccaaaacaagttaaaataggtggggaagtagtattcacaccaccaaatcgaggaggaacagcatagagattccattgtcctcgaccactagaggaaggaatagacctattatcaattgcctaagaaaaatttaaggaggaattacctgtaccacgagaaccacgattagtagcaagattaatcaaagtaagatctttggtgttactatccatacgatgttcttgagacattagtagagagtcaatcttagaaacaatatcatttgtatttcttgaattaacaggaataataaaggtattgtaattagaggggagacctttgaagatcgctgccacatgttccttacaagaaacacaatgaccaatggaaccaaggtaatcaaccaaagctttaatacaaagaagatattcattaatggagagacctcctttcttgcaattttgaagttgattagtaaagaaattaatcttagcagaagtcttagtaacaaagtatactttcattattttccatacctttgcaaaggtctccaatacatcaatctgagtaagaacactatcagacatggaagataacaactaggagtagagaagctaatcatgaaattcccattctaagaattgtgaattgatttaaacttttgcacgatcatcatccatgataagtttaggaggaggctgaacagaattggagacatagttgagaattatacgatggcctttaatggcagagagaacttgaggccaccataacaagaaattgttatcatcaagcttgacagaaactttatgggagaaaacaatcagagtaaacacagaaccaggcatcgccaaagaattagctaaatctgtcgccatggataaaaactcaagaacagagaagataaacgatcaaggagattagactaaagtggaagtaaaaaaaaagatcaatagcttgatatcatgttagatcaaacagagagaacgaggaatgagagtgaatgtgaatctgtgttaatcattagagcaacggctctttaaatactatacaagtattgttgataaatatagttagctaaaatagaaaatacagttgtataataatataattaagctaaccaataactaattaactacctaacaatcctaagtcctaacaagaaatcgaaaactttggaccacgacccaaagaaagttcaagttgttgcggcccaagttgattttaatttttttaaaatgtaattaactaaagggatttttacaagaatattaaattttagacaaaagtttactattttactatcacacaacaaaatagaacaattaaaacaacagtggaacaactattaaacaatcgtgaaacaactgtaaaaatttaacacagtacacagtatttttgaaataaattctgcccacagtaaaaaagtaaaaaaaatttaaaatttcagtatgtggtgtaaaaaaaccttaactaaaggggtcgaaaaagagaattgagatactttttagaatgggtatgactttcaatgatctctccaaagtaatcattaaaaactattttccaaagtaatcattaattataatataaattttatatgacaatgtcactttttgctattaaatgaatataattcatggacattttatattataattagtactcaaaattgaattatcagctaaaaaataagctaccgtattaacttttttatcagagtcggtcttaagatatatgagacctaaggtaaaattaaattttaagactcctatatatagtttaattattatcaaaatgatcgttttagtgattagagtaatagtaaggctttcaaaactcataagagctctaagttcaatccttcatagctacgtatttaaaataaaaaatagaaagtagaggttatatattgatcccttacctcttagcttaaagtaatacccttaccactatactaaacaatatttgttatatttttttcttatttaattttttttttataattttggggccctgagcgttcataggcccgaagcgcatacatggctcgcttaccctaagggtcgatcctgctctctacaaataaatttcatatgattacaaccaagtgtatttttaagattcctattctcatggaggatgttatccaagacgctacagatggaattcaaaatttgattccagacaccctcacctctaactccaaatcctaacttcggaatccaaatccgaccctacattataataattaatgcaatataaattctattcaaatataatgttattcttatttaataaaatattatttctaatacggcgtgccaaataaatcataagaggctattggtatacccaaaaaaaagtgaagaatttattgttgactatacaatttgctattgttattacttatgggtgtttgatgggaatgaaatggatttgctgagaaataatttagtatactacgattaatttaatttaatttaaaaattattatgaattatcgttaactatttacaatgtgttacatttagg

SEQ ID NO: 37462 - DNA, 7438 bp, Cannabis sativa
actacaccaaaaattagaattagtgacatttttattagtgacatttaacaaaaaatgtaacaatagtagtactttagtgacatttcattaaaaatattactttaattagaatatataacatttcatttagtagcattttttttaaaatgtcattattaatatattttagtgtcatttggctaaaaatgtcactaatttattaattattataaatatttaattttaataatgattgaaaaatgtcactaaaatatgtaaataataacatttataaaaatgtcaccaaacattaaaatcaattacactttcaaatgtcactcaaacaaataatatatatatttttaaaaaataattaacaacttaaaaaaatagtaaacaaattattattacttttttgataaatcaatttttaaaagagtagtccgattccattttcctcttcaattttgagaaaaaaaaggtctaacctcaatttccaaaccctaattcccaattttctatattttcagttttgaaatctatctttcttctaccagcctaattgtaatatagcagacaattattgtaactgtgattgtaatgtaatgtgggttaggcttgaccatgcgacaaactgcgctggaggctcgacagttcgataaacgatgagaagaaaatgaaatcggtacactatttgtgggttatgcacacaaatttcattatactttttattattttagtcgtcatctttgtggattttgttttagtgagattttgatgcagcacctgaaggttcaaattcttttggctggtgtcgtgtctagtcctgacttgggggttgtcatgtctgtatattcgtgattagtgggagttaactacatgctaattctactacatttactaaaaattgaaaaggctgatggattatttgtgaaagctctagctctacctgctgttgtttggacagttttagcaacactattatacagttctttggaagaggagggaagtctaccactccatatcgctctaacacaacatcagtatgtgccatcatattataatttttagctgcattcacggtgattcaattatttttaaatactcttgtgtaaaagattggtgatcattaacatgtgtctttccacaccttcttgtgagtagtagtggctttttctaaaaaaagataattgatgcaaagttgtctctcaatggtatattcttctaatttctatatcaatttttctctcaaagaaattaggtcattaacaaataccattttttggttatttttttttatgcaattttttttttataattggtgcctcaatagagcagccaaaccagatagctcttgcaaaatgacactcccaaaggagttggagagagctttccatggcagtagtacaaaaaggacagcttggatttatgcaatttggttaatgcgtttcaagtaaactatgctggtaattcttcttcctttttcttgcaatttcaatatgctaagtatatatatgaacttattttactgtgcaacccatgtatggtctacaattttgactttaatgtgaagaattttgtacacttgttttatttcttttttgattttggtacgagtgagtttgagtcacttttatattttacacgctagtgaaaataatcttaaatggtcatcatgtgaagtgatatgctacaggctttctaccaattccaaagctggatacttcactgccatttatctggcatgttccaaatttactacatatgttgatgccattagaaaataagttaggaaattatgtgaacactagagagaagattatcgtggttctatttccatttcctatttctacttctttagttttctgtttgtgcacaggatgttattaacatgtttaacaattttatgcaagttgaattttatatgtatatacacaagagtaaattggacgccaatatttattggtggatggtgatagaaatgtatgagtaagggcttccactccagaaaaagttgccactgtgaagaaaggtaaatctttctttgacaatattataagttatatatcttgcaatcatacttctttttactataaatatatagttatatatatatatataaatgtattcaacatttgttatttggggtgacctgcttgtaatgcctctccctaagttcaatttgtttttttttttttgtgcattccttaagtagagcatgggaatatgtgtgatagtatgcattgatgtactttactatctttaacacatatgttacatatacactctattttctttatgaaacatttaattattgtacttttagctctccaagtttgatttcttatacatctaaatttgactttttgctattgcctattgactcacattttcatcagtgttgcctcatgatttgacaaacaatgaggtagtgacaacaaccaggtatgtcaaccattgcttcagctatactaaattactaatttgcaattgacatggtcatttttttttttttgaaaaagcttgcttgctgggatctttgacatggtcattttttaatactttgttttagtaaggagatgttatagagaaacaatcatttatacccttactcgagaattttattgttcacagggttgttggacaaccacaaaaatattggtaacacgtttaatttgcataagtagttttacacccttattctgaatttctattgttcacagagtactcgacatttaaaactttgtttatgagtatagttaaatagttgagagctagcctggattaaataatgaagatgaagtagcagctacactggtcacgacaagactattggaggggaagcatatgttgttgtccaaatggatcacttattgttctgtaccgtaggactaggaatatgaagtttatataatcttaaataatatgctatctttattattcaacttatgtacttatgaaactcttattgatataatcataactatgtacagatactatttgtatttgaagatactatttgtatttgagaattgtttcaaataataaaattattatttgtgtatatataaaattattttaatttttgatgtttagcttttattacgtataataaataaataaataaaaataaaaaattaaatactattttctgtttgtattaacagtgacactttgtaaatgtgactaattcctttaagaaaataaaattaatataattaaaaaatatttttattgacatttgaaatgttacctatacaatatatatagtgacatttgaagctttagtgacatgggtatatcttacatttgtatcaaatgttactaattcaataaatgtgacaaaaggtaacgaataacaacattttaaagtgtaactaatgctattttttggtgtagtgagcaacactatcactccaaacaatgacactagaatcttttccatctccaatcaaagtaatcccatctttattggttttaatcttctccttataaactccacttttcacatgaatcacgaaacgacccccagaagatggtgcagcttctatagcttcagaaaccgttttataattcccagaaccatcttgagcaacaacaacatccgcatttactgtcgttgttgcctgaagtagttttctgtctttacgagatatccactttggaaaatctggtgatgattcgtccttataattctgatcagacaaaccacgagatttggtatcgaacggcgtcgtttgaatgcgatttgtaagagctaatgcgttgctgcttaactcgtatagataagacatttttttggcgatatcgctcctaacgacgtcgtttgggacgacctgtccttcctcggctgagtctttacaagcttcttggaaagtcaacgcggcgcttagccatgtttggatgtcttccactttgtttttgttgttaagcgctgttagagattgttgtagccttttctccgataagttcattaaagtttcacagtactcgcctgcatataaatatatatatttttcttatatcttaatattacagcaaaataaataaagtgtaaataacaattgaacagttaaataataaaatacatcttatattttgtttttcgaaatttactttctatattttttttcttcttaatttacagtttggattgtttcggtagtttttacaaagttgctatgtagatttaaaaaaaactgctttgaaatgtataaatgaaaaaactcttatttttgaaaatgacaaaaatactcaaaaaatgtaaccagttttccaaaactcttaattatattattttgaaaaatttaatacaagttccaatcgataattttttcaaacacgggatccaaattagtatttactcataaataaataaatttatataattaaatgaaaaaaaaatgtgacctggttgaggtgatgattggacccctagttgagaggtcaagatggtggaatgagtagtgttgggaagctttgactcagatattgtcttgttgagaagaacagaaattatatcagtgtatcctgctgatgagctacttaagccagccatgtttaaggtttgaacacatatggatgggtatctagttaggctgcaatcttcctcaacaatgtctcttatttggggattggtaacccctaatgcacatattcccattaatgcccaaaacaccaaaaaaatttctaccattctcatcatgatcatgatcatataaaatataaaagaaaaaataagtttttttatgtatactaactaaaagaaagctagcttagaagtgcatgtatatactatgtagtgttgcaagaagagaatgagagggtcttagtatttatattataaattgtaataatatatttttaggttttctttgaataataataatttgtagtggagaataggcgtggctgttctgatgtggctgtacgtattagctaaagagtcatatagcgttagtttggatgtcaattttcactattaatatcatgaataattgacatccctcaaaagtcaacatcttctcaattcgttaagcttattagtctattgatcctttattaatctacttaacttgctatttatctatagaaattttataatataactattttatatttttggctggagtttataaattttttgggtttgactatgatacgtacaagctctcatgtatgcctaacaagatatttgaatcatacttttctactacttagtgagaccatattttaatgtatattttctaatttgatatataatttaggttgattttaccgtgcacccttttaaaagagatgtactgatgcactctctatttgtttcggtatcttaaaaaaaaatttcagtctaatttttttcttcagttttatgtacgttattgttatttaagatatcctacaaaattttgagaaattcggaataatttataatataaaaaacaatgttcaaacaatctattttacacgcgtataaataaaatagtcatgcgtgcaacacactgcttgaacacaatttccagcgtgttaaacttttccgaatttcttaaaattttgtaagatgtttttattaaccataatttacatgatcatgaaaaaaaaattgactaaaaaattattttgaatacttaaacagatagagatgtatcgatgtattccttttaagggagtgcattatagaattttcttataatttattatttttggtggaacaattttaatttaatattaaatattatatcaaatatgaaattaaattaatatattttacttaaaaaatttcatattaataataataattaacttatgatataattataaattttcaacacataattaataattatattaaagaaaattatgcactaatttagtgtagatattcaaaattcaacatgttaaatttggtacataatttgtacgataaatatttcacaccaatatttagttaaatagtgcaccatttaaaatctcatactgaattaaagactcttacactttttcagtttttgttttcattaataaataaatttctattaccacgtccaaaaaaaaaaaaaaaataatctatttacaaacaattaatatactattaataatttatgttgtaaataaaatcaataagttatcgatgttattcattattttaaaattagagtagatgtagccttttttttagaataaagtccttttatttaataattaaagcatgatgctaaaattcttaaaccccatttcgcattattgttatgatctgttcttaccaaacttttttatagtttatagtatcaattatttttcacttattaaattaataatattgaaatgagtaaatacttagatataagtaaagtacaaattgaattacttttttaaaaaatcactgatcaaacaagataaaagtatcttttctattgctaattctacgacaatctcttttaagaaggagggggcaggaatccaaaatttctttccacattcccgaagcaccattatcccttgtaatgttaaaaaaacccattcctttaatatatatagcattaacaatcgattcccaaatattggagtggtcagttaatatatctttcacgcccacttgagatagagtaaaagtttgaataagagttttcacacacctaaacctgagactaattcccctgaatttggaatgacatagagagctccaagcaatagtgtgtatgattttcttctcctcagtatcatcccaccaaaattcctgtaaactcttgtcaatttttgagcaattgaactcgaaatgatttcagaggtagccacataagtcgctaaggaagagccgactaattagattgagcaagccttgccagccttggataagaagtttgttttctagcttatcaccctttgtagaaccttgtcattaaggaattggagatcatttgatcgctttaaaggtctgaaaagtggaaggcccaaataaactgcatatctcttcattcttttcataccaaagatttcaacaatttcaatagctttacaaagcccgaatctctttgaaaaataaattgtagatttgtgatagtttacaacttgaccacgaccaagcacaatactcgttaaggcactttaaaaaggcttttacttccttgatcgatcgatgctttctttaaacaaaatgatattatccgcaaacattaagtgagtgatggcagtttcgttcttggatatcttaaaacccgcaatttctcttttactgttcttggccatgagcggtcttgagaggatgtccgccacaacgatatacaaggttggagataatgggtccccttgatgaaagcagcaggagagggtgatatacccatgaactaaaccatggaaaaggagccccatatttttgacctcaatgcatttatgtacccattttaggggtattcatcaaaccgttcaaaccgctcaaaccgcccgcaccacaccgcaccgc

SEQ ID NO: 37463 - DNA, 1195 bp, Cannabis sativa
  modified_base (687)..(697): a, c, t, g, unknown or other
aacttaatctaaaattaatactaaaaataacctaacaataagtgacattccaagaataagccatgtgtcactgggaccctcagtacgagatatgttatactagactacattcgaagcttaataatttgtaggaactttggaagattagtcatctccgagagaaccctccaagaggatagtagttttgcctcttcctcttcgcgggtgaaactcgacccaaagaagagatagagggctttgggaagcatggcgcaccactcgagggtaagttactatgcacacatttaatacgacatagggaagaacattctactctttattctgaaaagacgtactcaagaatttaaactcataattctataatttcacgatatctcatacattattttggtggctacattattagctatcaagtccgcagtttaagaaaaatcttgcactaaatgtcaaatatagacacacccataccatataggagatgatgctctattcccaaaattttggaaatttgtgcagaggataatttcgacagactacgacaatagaggcttgtttttcttccattatatatgaacctataaataccccaaatactatatgaagaaagaaaatgagtattgctattgggcactagtggtgcctagcacccttaagacgtgtcgctttgcgattgactagcgatactcnnnnnnnnnnnttatattaaattatatgggacccggtacttaattaaaccaatagcggtattgacacgtaggaggctgtttgacaccattggtgccttttagcatttctcaaagaaaatactcataaataaaaataacttgtacactaaggttcattaatactccaactacgtaattttttttttcttttatttgtattaattgttcaacataatctaaactatttgttaccgaaaatctctgtcaacgaaatgagaaaatatgaatattaatagggaaatttgattttctatacttattaaacttaatttttttttttaaaaccaatacattttacactataaaaaatataccaattttttgaaaaccccaaaaatacccccctcataactcaaaccctttctctttcctccctcactctcagccggctctctcaactcaccaacccaccacccacggcacccaccaccctcacccatgcaaaaattattaattactacgcaagtgca

SEQ ID NO: 37464 - DNA, 5142 bp, Cannabis sativa
taaaatcaccaagaatagtccaagctgttgttacatttatcattgacagagcagaccaaagatgacttcttccttctatggtattagctccatagacaaaggtagcaaagtaatcttttttctgccctatcattttgatatgacaatgaacatattgcttggaatcatcaattacttcaacatttacaaacttctttctccaaagtaaaagaatccgaccttccatttttttactagaatagtaatcccagtaagaaaatctactagccatcatatcttgtaacttctccgctttaactttagtttcaatgaaagcccctatccctatctttttagatctacaaacttcagtaactttctcttgtttctcttttttattcatacccctaactttccaacaacttatgttgcaaaaatccatcaatcacaagctgcagaaactacctccccctatatcttcattttgtccccctgttaggatcgcgaaagagttcctgagaacctttttgcttctgtccgtatcttttctagttgagcccgatccttttgaaactcaatttttaggtgccaaccattccccattagtgtttctccctgtagtgacccttccctgcaccttgggacccttgttttcaatttcagcagtatttaaaccagtgtggccagcttcagaattaacatcacagtttgtagcagatcccttgttatcagtgtcagttgttgcagtaacattttggacagaatcagtgttaacttccttctctatagctgcttcattcgacccctctgctgcaagaacaacatctgccacagattcagctgtaattccctttgttaattgctttgattcacttactttagctacctctttctgcttttcaaccttcctacactccgccataaaaatatgttcaaacctgccacaatgtttgcattttaccggtagccactcatattcaatttcatgctctaacaattgcccatattcattaacaaaccaaaaggaacgctccggcttatctgtaatgtccatttcaacaaggacacgagcaaattgaacacgagtttggtccttcgtatacttgtcaaccattattggaatccccacagtacttataagagcgctcaagatttttttgccccaatattgaagtccaagtttaggtagcctaatccaaagaggcaccgatttcaccattctaatcacattccaatccgtcgaccacggtctaacaatgaccggtttcctatctaattggatcataccattctcgagcacctcatctcgtgttgcttcatcactaaatttcaccatagttagaccctttgtcattctagcaacttgaacaatccttaagtgcccccaaattcttcggatgaatccttccaagactaatgctggaacattggcacctaacaccatacaaataatagaggatttccagctttcctcttctattttcacttcctccaagtctatatgagcaatcttcctacgttctctaaccactagttcagtaaatgaaagtttagcatcagagtttagcaccttacctcctgagaattgctgccaatgatgttgcgaagccaactgcagatttttgacctcctctgcccagcttctccttaccgatttgagggattcaacttcttccctaacgtttcccgtgctcgcatcttggtgagagtgaaccacaaattgatccagttgttcgctcgatccagctaggctttccctctcctggtgtaaatacttctccgaccccccaacgtcgagcgccaccttcgttcccggcgtacgaccaggttttttcctcttcgccatggacagagagaaaacgaggtcagaggcgttttatttcgtattttattttgtttagttttaattttatatttattttctaattaatttttggtatttttaagtgtatttattagcaaaagtttagagctaaattgaagaaaatgtgaagaagtggagccaaatttcaaatttcaaaagtaataatcaaaattcggctcaggcaaagcccactcgcatggatcagcaagctcctcatcacagccgtccgcgcatcatcttgtggcccaggcgcacgagtgagtcttaccgacagacaggagcgcgtgaggatctgttccgcctgtccttcctgccaacttccagccgcgtggaccccacatgtcccccatgccagcatcctcaagcgtgccacatggcaccccctgcttcagtcgccactgtcagaagctccacacactcgccacttgtcagctcctcattccaagccgcctttttgaagccatttgttgcttccaagtgtccccaacacatagaaaatgagattaaaataccaatttcgaaaatacactaccatttgcatttatttggctcatttttccatctcacactattttctcacccaataaattgcacatttctaatttacctttttacccttctcatatcctaccaacctcatttatgcaagaaatttctagaaaatgttaaaataattaattaattaattattttaattattttaattcactcactttggctataaatagagggttttggaggccttttaacacacaccacaccttaacaatctaaaccatccacatcctacatcctcttccattactcttctttcattttctctctttcttagaatgtattttctttctaatatttattctaagaaagttatgagctgctaaacctcttaaggttattaagatggaagatgaagcaatatgtaactaaataatacttatggtgtgttgatttctctttttatgctttaaagtttatggaattttcttctttaaatatgtctttcatctttaatatcatgcatttttgattgttagcacatattctcactttgttcttcattgtgtaaaaattataatttactttgattaagtgtggttcattagattgttcacacctaattctttgaatataaaaattacatttttacctaaaaataatatctttgatttgttgtagtttcattaacttgtttcacaactaatgctttgaaattatgctttgacaatactttgtgcttaaatggaaaatatattttaaaaatgatagcttgattgagttcaactatcaagaaaacttgggagtcaatacactattaaatatgattaatatatattgtggattctaaagcattaataatctttcctctaccattcaatcatcaaatcccttttaacttgtttattttaaatcttatttattttcttttcttttatgaaataaatctcatcaattatttagagctaggttagagtttaattaatttggagtttaaaaagttgctcttagatataaatcaactcttttgggttctatctcgtacatacatgaacactatattccatatcctattcgtgcacttgcgagtataaatatttaaaacacacatcaccattgggtgtacaacaagaacacctccggccagagtttgggcaaagggaaaagtattgcccaataagaagtcgcccaaggtggggatgaagatgtgcatccccgacttagggaatcaaatacaaatgtaaggccagtggaacaatttggaagagataatcgacccaaatatcgcaccaggaaactcaaaattggcaaaggtttgttactcgaagtaaaattatgcttaataaaatttctaagagaaaacctagacattttttcctggtcacacgaggatatggtcggtatcgatccttctacaatttctcatgccctgaacattgatccaaacttccgtcctattcaacaaaaaagaagattattggacaaagaacaagcataagcattaaaagaaggggtagaaattttttgtaataacaagttcatcattgaagctttctatccggcttgggtagctaacctcgtactggtacccaagcctaacaaaaaatggtgagtatgtattgattttaccgatctcaataaggcgtgccccaaggactgttttccacttccaaaaaatagatcagctagtggatgcaacagatgggcatgagatcctaagcttcatggacacttattcagggtataatcaaatcagaatgcatccaccagacaaagaacatacaagtttttgaaatagatatgagcatgtactgttataaggtcatgtcgtttggtctaaagaatgctggagctacctaccagaggttggtgaatcaaatgtttaaagaccaggtcggacaaaatatggaagtatacctggatgacatggtcgtaaaatccaagaagggtgggggcatatagaggacctagacgaatgcttcaaaatcctcaaaaagtacaacatgaaacttaatttcttaaagtgctcctttggagtcaacttgggtaagtttcttggttttattattaatgatcaaggcatcgaagccaatccagagaaaatacaagcccttctggatattaaattgccaacaaaaactaaaaaagtccaaagcttaactagtcggatagccgtacacagtagatttgtttcaaagtcaacatacaagtgtgctcctttcttcaacatccttcgaggtaacaagaaatttgaatggacagaggaataaaaagacaacttgcaaaacctttcatactctcaaaatccgtggacggagaagagttaggagtatacatagttgttacaaaatttgttatgagtgtcgtgctgattagagaagagaacaaagtccaccatcaagtctattatatcagcaaaagactcgttaaagctgaaggacgattcccattgatagaaaaacttacgaattgcctaatcatagcaacaaggaagttaaggccttatttccatgctcatcctgttcgagtatacactgacaaaccattacaccaagtattgcaaaaacccgatgcttcggacggttactcaaatgggcagtggagttgggacagtacgaaataatctttcaacctcgaacaatagtcaaaggacaggccttggcagactttgtagttgagtgcacgggcaaagaagaaagcagcttaaaggacaacccaaagccagtacaagaatccataccgaacaacaacgaagataggttgggttttatgccctgaataaaactctttacaatctgattagt

SEQ ID NO: 37465 - DNA, 3456 bp, Cannabis sativa
  modified_base (71)..(72): a, c, t, g, unknown or other
  modified_base (1767)..(1772): a, c, t, g, unknown or other
  modified_base (2016)..(2019): a, c, t, g, unknown or other
ctcaaaaccaattggcaatgagtggagtagcccatgttcttatatatagctcaattctctaccatttattnnatgtgggacaatgtccacaatacagaagctaaaggagcgcgaagatgattaccatcaagccaaggctcgtgctgatctattggagatccgtgtggaaagctcaaggttaaaaattcaaaaaactgagtgtaaaaaaaaaaaattctactctcgaggtggaaagcttgaaggaggacatcattgataaaacccttaaaatccacaactggataggaggtaaaattgctaactagcatccatctgttgtttaagctcaacaagcgatctctgccaagcttactatggtggaagccaacttggtgaaagctgaactgaaagtggctgcagagctagaagccaagaaaagagtgtaagcaaagttgggtgtcaggaagaaagtagaagaagagctgaaggcagccaaagaacaagctaaggagaagctggctacaattgtggcccgatgagaaaaggaattggctatttcgttagtagctattgttcacttataaaaacttgtgctgttgatgaggctgaagagtttgagtcaaaagctaaccttccaattgaagacccattgcaaaaccttttcttcctacttccaacacagatccgattaccagaacttctatgtatgttgacgcttccatccatctatgagtggccttattttttcctttattttttttttattttgggggacaagggttgctccttttaataatgcagagacagtatttatcccttgccacggggctttctagtatgtaaatatttttactctccttttaataatgagatctgaacaactttatttatcatacatctttgttctaatcaattaagtattttaaaacttgaatgaatttttatttgttaatttagtctacttttggacctcctaaggttccagttctaacggcttgaatcttaggatttcaacttttacacttaaacttttatcttaggtttcttgtgatttgcttcacttttgggttccctagagtcccggttccaaaggcttggaccttgagatttcaacaactttattttaaccttacactgaaaagctttacaaaaaattacttacttctagttccttgaggtttcagttccaaaagcttgaaccttttggagttcagatttgtttttgatgttattgaagcctaaaattatttgtattttgttaatatgagttaatggtgacttattaaccttaagtatggtcagatacaactcactacaaaaaatgggaccttttatcccaatttttatgcttaaggaaaataaaaaaatagaacaaaaactatgttgaaagtttttaccccacttttgtgtaagacataagggccatgtttggtttaatactataaaataaaaatatactaaaaaaggttaaaagattatttttttaattactagccaaacacgcccatgatgggtctttaaccacactttggagcaaggaccttgttcgggtggtcacgaaaaaattaatttttcactctttattattttgctagaaccaaacggggtaaaagaaaaattcttaaaagggtttccctaatcatatatgtaaacacttttatgtttaggtttttatttatgtggagtgatattgttagggtttatgtcctgaaaattttataaagatatttctgattattaaatgaagagttaaatattttgatatatgcttgaatgttaaattattannnnnnattattgaataatttatattaaatatcagaaaattcattattcatatatgaggttgtggcttgtagctgtatagataattaagataacatagatatgaataaaatagtcagcatcatattaaagctatagaatctttaatcaacagttgctagtacggttcacagatacctgttcttcagtccaagtaatctcaattcagattacgaatttaatatgacatcaaagtgaaggtattgtatatannnnagattatatatgacaatgatcgatatgaataaacttgtttttattaacatgtcgtttactataaagacctacttcatatcataacaatgattaataatagattgacctaaatcctgagttatcatgaactcttattcatgttattaatttctttaattcactcgttaaagtttctcagaacggatgattccagaaagaggaaataaattcattcatactttttttttgatgaataaggaaatcttgtattgctcaaactaccaattacatctcaagtttttgtacataatctgctatttacagctataaatcaaaagctttttacatattacaaattcagcacccaattcttgtccttctcctttgttttgcttggccaaatccctacaattctcctcttgctttcctgctgtacccgatccacaattatcctgatttgccattgtttttggttccacaacacatcgttacgtgcaccccaaatctggtataccaaggcagccaacatagttaacatcatgctcctccttgttgctgaaatccccttaaacttgctaatgagttgcagtagcttgtgcaattcagttgctttcgtaccccagctcagtctaatcttccattcggcaaggcatttactactgtattcacattggaaaaataagtgctggaccgactcatctgccttcccacaaagcaaacaggttggatcaacctgtgtatcatacttacatactctatcctttgtcttcaacctatccaacaagacaagccataagataaacttgtgtttgggaataacaagtctatcccacacatgtttgcacaagtccttcttctccggcctgataaacaacaagtgatatgtatttgatatactaaatttctgcatgctaaaggtttgccgatccaccttagccttcacctggtttttcactccaactaattttttccaaaaccagctacaatcggtgggggcttcataatcccaccagcacctatcttttaagtatacattatgaatccatctgacaagcaagcaatctttcttgctagctatatcccatacataccttgtcatggctgctgtgttccacttctgaatatctctaaggccaagtccaccagcacctttgggagtacaaacatgctcccaagccaccaaacccggacccatcatcatttaggttcctttccataagtatgatctacagattgcctcaatatctttgagctatttctttggtaatatcataatctgagcccagtatgtatgaatagctataaggacagcatttatcaaggtaactcttcccatgtatgacaagtttcgagagctccaccctctgattttacttaccatcttctctagcaaaatttgacattctgaatgagaaattttctttgaacagataagtatgccgaggtacctgaatggaa

SEQ ID NO: 37466 - DNA, 4389 bp, Cannabis sativa
  modified_base (26)..(26): a, c, t, g, unknown or other
ataaatcacttcaaatttcttatatngataactaattagattgtaaagagttttatttagggcataaaacccaactaaaacttcatggaaaaatgatacgttgaggttacaaccttcaagtggttgtgcatgggtcttcccattactatgttgaatgcagccaaacaatctaccaccaaaaatgtttccatcactgtggagtgtttggggttctctccaatggtgagggctaactctatcgttccaagtagtttgattgagtctccagtagaatcttagatcaatatcgcacatggctttaagtccttgagtcctagtcccatcttcttgaggcttacgaagcacacaatgtccacaaaacttctgttgtccactagcattcgatgcacactcatgttggcaatttggatcacaattaccaatggttcgttcttgcaaaagtgcacacctcttgcgtcctccttagtgaatgttaccgaatcattctctcccttaaaaccctttgatggtctttgctctaggttccagacttgaggatcatgtctcgcttcatgggcatatttctcccttcccttgcaggttctatctctaattttgggtcttcaatgacagtttggatgtccctaaaaacactttgggagcctcttcaagatcttcctactggcacacctcatttggcctctaattctcatttctataccctcctaagtactcgtgttgtattaactcttcaatttcgactttcagatgcttgcactcttttgtgagatgtctgacatctgtgtggaagcaataatacttgtttaggtttctcctagttctttctattttcaagggtagggacctcttgaagggtactcagtgttcatttgtaaggaatatgtgctctcttgagtaggttagctccatgtagtgggtatactcacgaggcagtggttccaactccttcttgactttcttgttttgcctatcatccttgtatacgaaccccttttcttgtgtgactcttcagcttgagccttcctagatttttcgtctttacccgttcctagattctcatgctcgtcttccactaagatgtatctgttgcctctctcattgaaatcttctaggttatctagttctctcttgagcatattgttccatagtttactttttagcctaactctagcggctatggccatcttatgctcttctttggacaacctcccaaccttggctgctttagcattaaagcgctagatgtagcttttcaagctctcggtctccccttgcttgatgttggctaagctcgtcctcgggatgacatagtctcgagaagtgtaatgttaggacaagaactcatcaacaaattgtatccacaagcttattgatccaggagacaatctcttgaaccacatgtacggtgcacctcggagcgtcaccgtgaagcattgacacctcgctttactcgtggccctcttcattttcattatttcattgaaggcatccagatgatattttggattagtgattccctcgtatggtagtatgttaggctctttgaaattgggggtagttattcggattggattccccttgaaaagggtgactcatcgttaaaatcatcctcatcctagttaccttcctctaatgcagcttagactattctccggttgaggtcttccatttctctatcaagctcttgcctcctcttattcaacttctctcgaaggtcctacaacgtatgttttagaccttccttacggtggtgcattgtcaataacgacactctcttcttgacggtttttttttggttaagtttttccctcaagtcattagggccaccttcgagtcgaccttcttctactataacgatggtttcgagtttcttcgagaccttgcctttgacggggacacctccaacatgttacttattgagtactttgactttccttcatccttcggctcgcccttatctttcttcgtcaccttgaattcccattgaataggggttcatcagaatacccctttaagagctcatccaacaccttttgcatgttcaccatagtctcttccagccttaagttgttcattttcagctcgttcatttcttcattgtgcatgcgagtgtaagagcttaacgttacagagtaaactcgtttttcttttcccgccctaggatgtgaggttctgggatcatttggtgtcggtggtggagggtgtctaattagtgaagagactttccgtctttgtaatgctccttctcttgtggcaattatcgaggttgttaccctattgcattgatcacctaccgagacctcctcacaaaaatttccttctaaaccttcttgaggtccttgcctacttgcaccttcactccccacttgaggtctgtgatcatctacaccttcttctctagcgacggggggtggagggtctcatcctacggcaaccaactggttattgttgaggcgaatctcaacatctcgaaggcagcatgagcgtttaggcattttgaaatggttgtgtgtaaagaaacgacttggccgaagcttgtcgttcccatagacagcgccaaactattaaaggtgagaactcgtcaactaacttgtggctggaaagtaaactctatacttcaagtccaaaaatgagatgaagagaaagataaaatgtaattcaaattgctctcttaaaatggagaggataatggaaaaatttcaactgctttcaatatggttttacaagtatgattttctaatctcctgtcacatctgagaatgggtatttataggctataatagcctgaggtacaaagtgatcccaaggggacaaagtgtcgctttcacactgtatgtcgctggtaaagagggtgggcttcttgtttgctgtcaggtggtctccagttgctgtagggtggtcccaagttgcaggaggatggtcccatttgtaggcatgtggtctctggttacaagttgtaggagagtggttgcagcttaccctcggtcgaatccttagacctcgtaagctcattatcggctactcgtacctccttgcttttagagtcttcagaaggcgtgattgtatacttttcccttgtacaccttaaacttataactaccaaaacttataactaccaaaacacactcacacaacacacaaaacgactcgcatgttctttttgggtattgttattctgctcaaatcgaagtagttcattactcaaatttgcttagatagtgatcaataataatttctaattactgcttactttgaaaaagaatatgtgcatattcagccaccaggctattaacatgctttctaacaggcttttctcataacttactaataaaacaaactactaaagcattgaagtcttactaaaccgtgagttgagcttatctctgatgataattgtacatgtcgtgatgatcttcaaaagacaaccgggcagctctaacaccaaattataacaccctactaaattaggcgtgttatcgtaatttaaataataattgtgcaatctggttctaactaacgactttattaaaaattgtgtttaattaaaacttttcataattaacctttaaactttacataatttgatttctcgtcattagaagttacaactgtactacaaaatattaactacaaagttatcgtctagcgactaacaaaatatagcttgttatcccaaagatcggacactccaggtctaactgtcttgatatgtacaatcttcactagctcaaactcactgatgtccagctttagtcttgcccttacctacacatgcaaacaatatttatgagtcgacagactcagtaaaaaaaggcataatcataacataacataaaccagattataactaggcgcccatacacctaattataatcctatctcgcgtcccacacgtactgagtctagaatattcgtatgatagtattattaaccataatgtcagcctatactcggtactctaatcataccaatgtgatagcatcaattagtactttgccaaacatatatccatcgatattcaatgcaactctatgtacactaatacttccattactggtatgttatttaacaagcattcataaacatgcacactaaatatgtaatcatatatgcatattattatactaatcttaccttgatttcgaattcaagtgtgcctgtaaatataagggaaaattgctgctcgacgatttataggctcctaagtcacaaatttgtaaaactgataagtgatacgctaaatcacttttcagggacttaaaattaaaactagaagtttccttatcaatggatagcgtggaaataacctacgcattgctaaaacacaaaaagctagggttccaaaacagttagaatcggtaaactggattcccaaaacagaaaattggt

SEQ ID NO: 37467 - DNA, 8370 bp, Cannabis sativa
  modified_base (1377)..(1380): a, c, t, g, unknown or other
agaacacaaggcatccatatttgttgtagtgacagcatgaacatcacatgctattccgatgcagattgggccactaatactgatgacaaaaaattggtaggaggttattgtgtttatcttggtgatactcttgtgtcatggtcttccaagaaacaggctgttgtgtctcgatccaacactgaatcagaatatcgtgcccttactcaagttcgtgcagagatagcttggatagaatctctacttgaagaacttaagtttcctcagcctgaaaaacctgtcacttggtgtgacaatatgagtgtcagtggtctggcttcaaaccctgtatatcatgctcgaacaaagcacattgagcttgatatacactacattagggacaaggttctcaacaagaaattggaggttcgatatataccatctacaaaccagattacagattgcatgacaaaggggttgtctcattgaagatttcagtatctcatctccaaactcggtgtgaaatcatcaccctctcgtttgaagggtggtgttaagaatgatactctgttttagtcttcttttatttactgtaattaatagtgattaatgtgtgctaatcattgtttagttatatgtgtgtgggatgtattctgttattgtggtctcccttattccaacattaggaccacctgtcccttttttattggtgtttgtattattgatcagagtatatgtagaaaatgttcccctcagcgtccattgagctgagttttcatttctacattttgtgtaaagtttaactatggagaagtattaagtaagtttgtattgccgactcaaccatagaagttgagtaagagcatctccaagaatactaaaaatttacacatcatttaaaaatataatattttattttatctctattccatattatatttggaactcttacttctaaaaatactctaatgtataacattatttaaaaatactataattatgctttcacttattatatttaatatatatcttaatttttaactataacaacattctagttttaattttttattaaaaaaaaataaataacatgctataataaagtatgtatgcaaattttttctccaattgtataatacctcaccaagttttaccattccaaatgctttaagtagttggaagaagcagctaatgtacaaatcgataacactctactctaactaagttgtttttatgcttaaatataggacaatttctatatcttattagagagggagttgaattaggtaaataatttacctattattacccctaattatgagagctcatcataacacgtcatgaaatagattagatgcgtgctttgaaaggagtgttgccttatcatattattattattannnntattattattattacttcttcttcccgtggtggatgatcggaatctaacttctctttgatcccatggccaaagatgctcccgctttcaatcctcatctcattgtctcacaaaaatttctagaggtactttgatttaatttgcttaccaaatgtttgtacaaagtcattctcagttttctgcctctgacccattttcctaaccatttctttctcaatttttgatggacttcagaggacatatacctattccgagaggtaaagtttcaaattttagacttcattattctattttgtaattatcccagtgtaaatttctttgttttttttttttttttttacatgctaatgtttgtttttggaaaacagagatgcaacgctttatgcgctaggtattggagcttgtgctagggatgccgtggatggtgacgaactgaaatatgtttatcatgaggacggccagaagtttatacaggttttactatttgcaacgcttgaatttaattctctaggatacattttgactcataccctgaattcatatgtttttttttctttcaggtattgccaacatttgcggctctattttccaatgggtctatatcatttgagtctcttctaccaggattagagtaagttgtatattagaggcataattctcatgagttttttttttttttttttgaaacatgagtttaactaggaacatgaaagttactgaactgccttataagtgggttttagaatataagtatagaaattgaaatatacatgaccatttcgggttcagggttatgtttttttttttcgtgtgatatgtgaagcccaccatgttttttcactcctaagtgtatgttgacattacaatgcaagtgattcatattgaggtgaagtcaacatgcaaatatttgcccttgggtgtgtatcattgaggtctcttctaccaggattagagtaagttatatattagagacataattctgattagcttgtttacttagttttcatgtatcagaatatgaatccttgacaatcccatatcttaaactagactaactatgaataagaaataaaatgtattgaagttactgaactccctttacattttagctataagtgggttttgggattttaggttgaaaactgaaaataggtgaccattctgggttcagggatatgtttttcccagtgatatgtgaagtccaccatgtttttttgttcccacttttaagtttacgttacaattcagtgattcatattgagatgaagtcaacatgcaactagtgtctttgtcttgttttgtttttgtcaagtcatctagtttcattaccttctctgtgttaaccagctttattatttatgcccatgtctgcaatatggattttggtatttcgtgttaggtgagatagttaaccatactttttctgattttattgctgcaagatatgatccacgccttctgctgcatggacaacaatacatagaattgtacaagccactgccctcaagtggtcgtgtaaggcttctttctaacgacaagccattttggatagtaatagaatgtgctatatacttctcttttacaagtcaatgttgattagattatgccagttgaggctatctcaaattgttggttgggtgtgagtgtgctgcaggttcaagtcccattaaattccgtatgaattagattgttttgctttggacatttttgagtgcctgagtatttataatcgaattattgtctccccttaccagcatgctatgataacaattttattgtcatacagcacttgagtttagtctgttttgttatagaatcaacaaaaccatgattctttttgtatcccgatgctaaatagtatgtcattcttttgttggtgcagatacaaaataaggttgctgtggcaggattgcatgacaaaggtatgtatatctgttggcagaaagtttttaaaaaattcagagcacgtgtgcacaaaaatcatatactaatacatgcattaagaagaacattagacgcttgaatctgatattgcagtcaaaaacataaatttatgttattgatataatgtttggtggctacttttcatcttatctttcttttataggtaaagcagctatcgttgagattgaaacaaaaagttacaatgagtctggtgaattgttatgcatgaacaggtaagcactctttctaatgaactgatacaaatttctcatgcaatcacttagctagggtattatattgtaggttgaccgcctttcttcgaggtgctggtggtttctcaagttcatctcaaccattttcttactcaaactatccagccaaccaggctccagcaattaaaattccagaacaacagccattcgctgtgtttgaagattctactcaaccgtctcaggcatgttacatttgattaactaagagttagaacttgcttattaaatagtgaaagctagatgttctatttttaggtttttaaccattgtcagcatgttagcggttcatataaactctgttactcggggaattccatgtgggtataatttattttttttgcgttggggatgaatagaaaattacacaactttgaactttttacacatctccatgttaatttctgttatttgccttgactttgagataccctgaaatgtctcaacctatttttttccctctctgcaggcattactttataggctatcaggtgactacaaccctctacattcagatcccgtgcttgcaaaagttgcagggtgtgtacattgctaaactcaacttccaaacaactttccattttccaccctcttgcttttccttttcaatcacagctttaattcatctcatggcatttgacatgtaccaacatttgactaaacatgttgctattgtaatttcaaagattttcacagccgatactccatggattgtgcacgcttggatttgcagttagagccgtcattaaacgtatctgcaagggagatccaaacatggtgaagagcatatcaggacgattccttttgcatgtgtaccctggagaaacattgatcactgaaatgtggctacaaggcatgaggtaattaatatcaattgtgtgtttgggtgagttgtgtaacacaacaagcataagtttgaatacttagtaacatggatatggaatattggtgcttctgaaaatgcagggtcatatatcaaactaaggtgaaagaacgcaatcgggctgtgctatctggctttgttgatcttcgtaatttaacttcttccctgtaaaagtaagtacaatgtaaggacttatcaactagaagccccccaactcttgtcattacccacttaataaaatccaaatacactataaatatagggataataggaaaataaataatcttcttatattggacaatccaccctcagtctttgatgcttatattatgaccttggattttgttatgaccatgcttttctttttcgttctttttgaatgagattcagttcactttgctgaggatgggacaaacagtgtaatatattgttgttagtaaattaaatgtattatttgataaggttgtgatttgataaggttttgacttttgagcctctatttggatatttaatttgacaaattcaaggtgcacaaaacgctattttcctaaattcatgtaatgacattatttaatttgacaaattcaacgtgtcgtttttccacgttaattatcgtttcatgaagtgatgtcatttttcaaaattaattaatgtcgattacggcgtttcatgaatttgtatcattttttaaaatttcctctacttttattgtcgatttcatctgtttatgttgttttcataaatcctttcactgtcgtatatctttattcactaggtaataacaacttacaatgcatttgaaaaaaaatattaaaataaatgtaagcatgttacatatattgatgatcataaaagtttgtaaaaattgtgacaagtatagtaaatattacgagttgtttatttttgtttaataaaagtaaaagataaatctaattcaattatatcgttttttaaatataaaatttaactttaaatttaaattgtatcattttttttttttgtagcagtattaattttaatgaaaaaataacaaaaaaattattaaatcaacaatttttgttaaagacccgtgctttatatttaccaagtaatatcacattttgcttaaaaactttaatattttgtttttattaaaaaaagattagttatcatttaaatttcaaataataaaatatttgatatacaataaaataatatattattttttaattaaaaataaataatatactaatatttattacctaaaatctttatcaaatatgcaacaatatttcaaaaatgaaaaataatatattaattaatatatacacattacataaataatatattatttaccgaaatttttaaaaactcaatgtgatcaaataaaagctaaaaaaatgtatcaaaatggaaatttttatgtagttcgagtattaataaaccctagtctattagtcaattgtattggactaaatagccttgaggtattacaccaatattcgtgacaagcttaagaaccctagctttctattatagtatttaactaatgaatttttaaccctttgcatgaaggtataatgtaatatttataggctaggattagggtatagatatactcgagacccgctagggtttgcgtgtaaacatgatccactaatgggctaaatacatataatatatagactttgagcccacaggctgaggcccaaccatggggctgtaatctttcgtacgattggggaccacttgatggaaaaggtggcatgcgtgtgcctcctatgtgtactgtagcttttagagtagtggccttcgaacaaagggtatgttccctttggtggtgtgtgcactcttatggattgacgcaggggagaaagtcctaatattgtgggagttggtgtcagaggatcgccacgtcagccttgactttcatgcctttccagaattatcccaatggctcatccggagggcctcttctattttttctttattgggtgtgatgccttcccgaaactagagaggtccggatcgggatgcaagtgctctgtattttggatggacttgcagtccatctcttcgtggggatctagcccgttaccttaattgggcccgtgtttgggctttagttgactatctttgacttggatatggtatgtttcccctttccaaaaacactgataacatttacccccaagcttctaaaatttgagagttgttaaggcttgcattcttcccttcgaatcgttatggacacgtgtgaaatttaaaaagggggtgaccttttcaacttctttaatttttaattgtggatagttatgagccttctggttctaccgagtggatcacacttggcgttagcttcttggtctatgaacttcaagcatattgggaaagtgtgcaacacctagattagcgtaacgactgaatcatgttagcgtgcgtactgaggagaatatattatcattaaaaccacctcgatccaatgctcagcatttaatgctgaccattctgttcccggactgttggatttgatttgtgttttcttggatgtaatatgagctatcgattcaagggcatgctcagaaaggcactctatgtttcagagattacaagaggcggcacatgtttgaatcttgaaatgagcacctttgtaataagcttggagatcacattgcagagactgattggtctataatcacccatagattgtggtttctttagttttgaaatcaaggtgataatggttttgttgattaaagtcgggtctgaaccattatcgaggacactaagtactgttgaccaaatcaccaacaaatattttaattattatgataaacattaccaacattccatcaatatcaggacttttatctgatctcatagcctttaaagctatttcaactttaactgtagtgaaagtcttcagaagttcaagattcaagtcaagtgtgattgtggaagggataacatcaagtgtctcctgcagagcttgatcatcaatgatggaagatcaaaaaatattctcaaactagtcttgaataacagttgtgatttctcttgttgaagtgacccttacaccaatttcgttgattaaaaacttcatttattatttactttgcgtgctgaacctttagcatggaaaaactttgaattttgatctcctaaattcaaccaatatactctgaatcattattgccggtataccaactcttgctctaaaggtcatcaagaatagcttcataatttttgagagtctgaaaggtcaatggagcgttgcgagacattattcagatctcccactcgagattgcacctttgagactcttcgtttcatttgtccatacttgctaatatgccattgttgtagattcatagcacaagattctgtattttgaaccacaacaccaatatgatcattagaagttatagggagccaactttgagctatgatacccttgctttaagtgtgagacaaccaaagctttttaaatttgaatcttgtatgtcttggattttattgaataggtactgctattggcttgatggtggctgcaatggcatggtgatcagactgaaagtactccaggtgttgaacatgaggggcatcaaaagtattagtgtaatattgattgacaaaacaccaatctggccttttttttaattgtggctacccccatttttaatccatgtaaaatcatcaccctcatatgacagatcatgcaacaagtaatggtccaagacttttcgaaaggcttccatctgtgattcaacccgaagaaagtcacctgatttatgatcatttgacaatatctcatttgaagtcaccaataataagccatggctccattggtgcagcatcaacaagacactaaaaaagaattcaattgtctgctgtattctatgctgcaagaattccat

SEQ ID NO: 37468 - DNA, 7262 bp, Cannabis sativa
ctcagaatcatgtttctcaaagatttttcatttgtaaggagatttagaatacaaaaccttattaagtataatttcattatcctcttgtagcatatcaaattgcatatgtttcttgttagtttcaatatcctatacattattttcattataaaatatatgaagacttgaaccaagaccgcacaacactacccaacccaactattttgagacttgagttagtaaattactgtaacatacttcatctcgaagtgctgaaccctcactatctgctctgcatttgataaaaagattaaatctaacaaaccaagtaacttattgcaaaagaccaatcatgctcaaccaaacaataaaagtacaaagcatttattcttgccttttgttatcattgctccaattagttggagggtcaatatgaagtatggacactggagttctcaaagagaatctgaactaaaagaaagaacggatacaaactaaattacctacattagcacccccagtaccaaaattcaggaatataaactaaaaacccatcaactataatatgaaactaaaattcagtctctatattcaagtagatagcgaacagaatcatgaaaaaactcacaaaacaaaccaagtcatataatcgaacaaaaaacatgacaaagttgtaaaatttctgattactaaactttaaagactgaagtggactcaatcttcactcaactttgttaatctaaaatcgcaaccaagaactacgactcagtataaatcattaatttataatgaataaatcactacccaaattcaaattcagatcctgaactttaaatttttgcaataaagtggattatcaaataatgcaaactgaattctcatttcaaaccaatcataaaataaaacatttgaaactaaccgcatgagaaagatatctattaggccgagagaaagacatcatcggaacaacattagagttgctacccgaattattgttgaatgccaagggcttacgacgccaaacgagagagaaaggtggatcgagagatgagattataataataatatttgtttctttatttttaaaatgagattataaaaaaaaattaatctctaaattgttgaatagaatttttttaaaaaaaaagtcacccactaatttttcataaaccaagaattctgttatataagcacactttatatagaatagattcatctccaatgtattaggtaaaaatgtgcacaaaaaattagtaaatactacattttggccatattttacaattgtgtttaaatacataataacaaattaagatacaaagtaatataaaaaataattatgattaatgatatcaatatattaaatatatatttttaaaaaataatgtaattaaaaagtgtattaaaataagtcattaatgcctggggatggagcggatcattgggcaacacctagtcctaatagtgttaaggtcaatgtagacgctgcaatgtttgaagatacacacagttttgggttcagcatggttgctagagactgttgtggggttcttattcaagggaaaactgtctgccgccaaggtcatgtggatccttctcttgctgaagcaatggaggttagggaagctctcagttggataaaatcttatccatggcaaaatgtcaccttggaaactgatagccttgtggtagtgcaagctttacgcaggtcaatggatatgatttccctttttggtttagtcattaaggattgtaagaatttccttgctactatgtgtaatgtttctattttctttgttaaacggtcagcgaactcagttgctcatgcttttgctagagcttctagttcttatcctgattgtactttcagtttaggggatgtcccaactgttttgctacctatgttggtagctgaagttcaagtttaaataaagatgaatttcattcaaaaaaaaaagtcattaatgctaaatgacaataatataattaaaaaatacattaattgtgtgtcaaatttgacacaatattaaatttgtatcaaatgtaatttaatttttagcatgtattagatttaacacaaaatttagtaatttttgttgaaaaaataaaaatattaaaatatagtgttgcactacagatttagcattctgttgaagatagtcttatatattttactaactcaagatgatatcatttttgtttcatatactttttttttaaatattgtttcaaatacttttaaatgctttgtttaagcaaatgacaaaatgtagaatgtaatactgaaaggtttaccgaaaaagaatgggtttaggcttttataaatagatggaatgtaaatatatgatacaattaaaactatatttaaaatattagtattttttttaatagtgtggtaggctctggaaaggtatctcacttagaagaaggaagattcgacaggatgtatccaaatgccctcacgggtacttccgaatgagcaattcaagaggcatcttggatccaaggttggcgtggtactctcctctggcattgaatcccacaatatcaggactttgtcccttatgtcaaactatgagagtgtgcacaccactaagagagacatgtcctttgtcccttatgtcagagagtgtgcacaccactaaaagagacatgccctttgtccaacctccactacactaacgctactgtacacgaaggcgaaacacgcatgccacctgtccccatcaagcaatccacccatgtacgaacaattgtcacctcacaagttgggcctcaccaaatcgtaccaatatcaatatattacttgtatttaccccactagtgggccatgtttacatgcaaaccttaacggctttaggtataaccctacctgactctagcctataaatataacattaacccttcctacaaaggtttcgagattgatttcttacactcaaaggctaagagctagggttcataaactagacaagaactcttttgtaatactcgaacgttttttttttttgatcaagaagaaggaaacttcattaatctactcaacaaatacaagaaactacacttctccaagagaatcaacaacaaaacaaagacaactaattacacatcaaactatgaagtaatttcttctcctccctagagcctttcctatctttaatcaacaagagtctatatttcacatcacttttaattttgttcactatacaaacaatagagttagaataatgagaaaataagcaagtatttcggttgctccataagtgatacagagctgctgcaagagttaaaactcttattctatccttcaaacccggtcttgtgatgcccaaccaaaccgtccaactatcaaaactgttggaccacccttcaaagcccagccagagaaatatgtgggacaacacctgttgagacaagacacatttgaaaaaatatatggttgtggctctcgggttctatgtcacaaaccacacagttcttgttagaaatagagatgttcaatcggcataattgatccctagttaacaacttggactgaactgcttgccacagttggaaagcatgttttggcacgttgataccgttccagatcgccccagctgccgggaacacaacctggtgaagtatgctacaataaatcttactgactttgaatttctctcaccctgctatctgttttggtgtaggtttttcgcagcctacaaaactttctccaataccagcttgtatccatgctcatcatataagaccaaaaatcattcccttagagataaatcgagttgatccacttaacccaaagtaagctttttttgttcatcaagtcccatatgaacctagataaagaagctttgttccatttagttccatccttaaacccaagacctccataggcttttggaagacacaccctctcccaactaaccaagtgaactctaggccgattatccttcaatccccaaaggaagcctcgacaaagtttctcaatctcttttatcacactttgaggaagaaggaagactctcatccaataattccttaatccaatcaaagtagattgaattaattgaattctgccagcataggacaaatgtttattagcccaagaaaggagctttagtttcattttcttcaatatgggcccacaatcatccagtctccatttagttggtcttagggaaagcccgaggtacttaagagggaactctccaatagagaggtttattttttgagcaagaggaatcgggttagagattcctccaaaataaacctgagacttagcaaagttgatggataaacccgaggttttgctaaactcgttaagcaatactttgatagcattgagagaaccctcattccctttacagatatcactaaatcatccacaaaacaaagattagtgagtttcaaatttttgcataaaggatggtacctgaatttcttatctctggctgctttttgaatgcttcgggacaagtactccatgacaagagcaaagaggaggggggaaataggatccccttgtctaagcccctgttcgcctttaaacgtcccctgaactcttccattcataagtaacgagtacgatgtgtttctcacacagttcatgatccacttaataaacttttcagggatgtaataggccaccaaaagcttctcaagaaaatcccagttaaccgtgtcataagctttacttatatcaatttttataatgcatcttggggagcagttcttccttctgtaattcttcaagagatcctgaaggataaggatattgtaagctatagaacggcccttgacaaatgcaccctggttctgactcactaagcaaggaagaacattagcaagtcgagaacaaatcagctttgaaacgcacttgtataaggttgtgcagcaagcaattggtcgatacttaatttccttagaaggactctcggtcttaggaataagtgagagagttgtgctatgtagctctgtcgggaattggttggtgtcaaaaaaaatgagctatagccatgtgaatatctttccccacctcaggccaaactgactgaaagaaccccgagccaaatccatcagggccaggagatttagtattagggatactaaacatcgcagctctaacttctttgaaagaaagggttttagaaggtgaacctgctgatcgagattgagcttaggccccgtagctatgatctcaggctgtaactccatgaaagtgggtttagcactccccattatgcctcgaaagtgatcaaggaaatgttgaaccacatcaggaaagtgatcattgaagtctccttgctcagtcaaaaatgacacaatcatgttctcttctttcctcttcttcaacatggcatgaaagtaggttgtgttactatcccctttttgaatccagttaactttgcttctttggtgaagaaagctcggatacattttttcctggatttgaaactgattagcagccacaagctccaaatcaaggaggatattgttgttaggattagcctggcattggaattgagctttaatgtaagtgtctttggctttctcataagcctctccaatgtttccaattgtctgtctgttaaaggccttcaatttgtgcttgagtgtcaaagtttttagaaaaatccccttcataccataacacctcaatggcttgccccaactatccaacaccgttctcttgtaatctgggtgttcagaccagaaattgtaaaaccaaaaaggtttgctgccaatattttctgtagcaatcgaatgaaccacacaaagacaatgatccgagagagtctcccaaaagaagtgggtagacgtactattcaaaaaatcatcaatccaatcctcattgtggaaaacatgatcaattcgggaaaaaatcctactatcctgtttattggtccacgtgaaattcgaccagtacgtttcataggcccaacagaagactgagctacccagttattagaatccactggctctgaagaactaataacattcctcctgtctatcatcatgatgaaagaccgcattaaaatcaccaagaacaatccaagcctttgttacatttatcattgatagagtagaccaaagatcacttcttccttctatggtattagctccatagataaaggtagcaaagtaatcttttttctgtcctatcattttgacatgacaatgaacatgttgccttgaatcctctataacttcaacattaataaaattctttctccaaagcaagagaatccgaccttccattttattactagaatagaattcccaacaagaaaaattgttagccatcatagtatgtaacttctcccctttaatctttgtctcgactaaagccccaatgcctactttattagacctccaagcttctgcaactttctcttgtttctcctttttattcagacctctaacattccagcagcttatattacaaaaatccatcaataactcaagctaaagtaactatctccctctgcttcttcattctgtccccctattaaaagcgcaaaggaattcctcagaactttctcacctttctcattgccttttctagttgaccccgaacccttggtcactcgattttttggagcaatccgatccccgataacattttttcctgtaacaatattatcctgatcattagagacttcactatcagtttcagctgtagtactaacaccttgaaccgcctctgccataacattatcaactgtagcagcaacattagtaacttgaacggctgcaatcacaaccccagtagcagccccctctgttacttgctttgtttctttcactttagcttcctcttttggcttctcaaccttcctacattcagccattatatgaccaaatccaccacaatgtttacatttaaccggaagccactcatattctatttcttgctcaaccaactgcccatattcattaacaaaccagcaagtgcgatccgggttatcggatatgtccatttcaacaagaacgcgagcaaattaaactcgtgttcgatccttggtgtgcttatctaccattatcggcttccccaaagtgctaacaatatcactcaatgtttttttccccaatattggagaccaaggttaggtaacctaatccaaagcggaaccgatttcaccatcctaatcacattcaaatccacgaaccaaggtcgaacaataacaggcttcctatcaaattgaatcattccattctcaagaacctcatctctagttgtttcatcattgaacttaaccatagtgagccccttagtcattctagca

SEQ ID NO: 37469 - DNA, 7998 bp, Cannabis sativa
  modified_base (5495)..(5495): a, c, t, g, unknown or other
  modified_base (7179)..(7200): a, c, t, g, unknown or other
gggggggtttcttgctctttttgagtggaccaaacccttttgggctcttaaaagttgcatacaagatgtgaagttggtggtggaaatagcccaaatctaaaatgcgttctctatttattaaatacagatatttgagtggcactctattacgatcaatgagagagacagagagaaaagtgtaccttgtgagatgatgcggggttgaattgggagtactggtttattttcaaatgggtgtcttggcttttccattcgttcattgtgattcactttcatgatcacaatttgaatttgttttgtaagctggcaatggctttctgatctccgtaattgtaactaaacatttattgattttctattttcatccatgcatgctctcatatagttatactttccctaaaaagttgaatttttatgattattaattatttttttagatagtgatgctgaattcgtttttatgatcacaattcaattagttttttaagcttgtgagatttcctgcattaaaatagcataccagtacacttatatgtttttgattatgattaaacattgattattgaattttgttaatgcccgattgtcctattttcttcaagaaattgcatttcggaaactctttttttggacttgaaattatttataagtttctactctacttggggctctagtcttttctatggtgttagtgattagttctggctctggattagtagaatgcataagccttttatgttttaactatcatgaatagaagcagaatctaagacgttttatcttttatggtaatgacacagttggtaaactattcaagattcttgctttttctggattctcccattcagtaattgaactctcatattatagatagtttgtacaagagttatacttggattgtatagagagaaagagatggaacaaggtgcagaagtagttctaaatcttcaacctagctcttcagttactatttcatatcacccactctttggttctcatgatgatataatgctgcttgagcttgatgagaaacttctcccagatactcttagtcaacggtaaaagagcttaaaactttgctttattagttttggcttaaatttagtgagctaccaactctagatttcaatgaagttttgcagtaaggcatccttttttctttttatttttctgtagggtagttgtgagaggacagcccgaccaagatgcagttctttgcactaaatcaaaaacttatgctatgaaatttgttggaacttccaactctgttttactcataccaccatcagatcactcggagtttgctgatagcacaatggattgtgatcagaaagctcaaaaccagatacctgctgcatctgttattaaagttgctcctggtacaatggagattgttgaggttgcttcgaaactcgacaagcttaaatatctcctctctatgaacccttacagctcttaagatgacatagaaatgaaagatttgtcagaaacagaggaaggaccgtttacatgggatgatcttggagatctagttcaagctagtgatgatgagttgaggtctggcttacaagcactctcggctgtagaaattgatacgatgcttaagatgcttttgatcaattcagtgttgaatgactggtctttggatgcactttgatctggataaagttgtcaatgtgctgcaatcagatggttatcttcgcaaacccgcagagcattgcttgtctgtttttggtcaaaagttaatcgaaggtttggatacaggtagtgtctggaagctagatgagaagaaagtttgtgtgcattttgcaaaacaaatcttgaaaggtggaaagaagaagatggagagtttcatagagtggaagaaaaagataccagaaggtttgcaaattaatattgacatgctgaaaggtgaagtcttgactgagaggcttggtgttgatgcatgggtttatgccttcagctctgccatcaactccggctgagcgtttctcttttcttttcaaagagggactgaagtgggagtggaaggacttgcaaccttacacatcaggttaaccaatatttcttctgcacattcatctttcctttaatatattgtttgttgttttacttgataggtagtaacatgtttcttcttttcttgaaactttatttagggatttaattgtaccaggtctctcatcagaaggtttgcttcttaaatatactagaaggacacaacccaatgcagatgcagaacctgtccttggcgcaagataatcgtatagaaatagtctgctttcgtgtgagtttaaactggcctcttgctttagatggatccactgagatgttacagaagtagagtttgtattggtgtatgtttgaactggcctttctagtctagaattagatagatcacattggtgtgcttcttgattgatatattaatgtttaatttatagtccactttgacaaattattctgcaaaaatattgatgtgtttaggcatgctttatatcctactaaggtgttattcttcaatcaataaacaagattcaatttttcagcttgttgatttaaaaaaacaactccacttgacaatattagtctctgttttctaatgaaaatagaagccctccaattagttgcaagagcagcatccatgctccaaaagaaaataaaaggaaaagaagaaatctattttttatacaactcagtttcaaaatatacaaactcttttgcctgtaatgtactattatactgaaaagctcggctagcttagtcctaaaacagtggctactttctcttggatccaccccgaaaggactgccaaaatactggccagttcttcttggcctcattccaacccaagaaagatccttccctaagtggatcccaactggacgacacaatcccatagcttactccaagcagagctgtcccaaagaagataaaagacacaatgaaaggcacccaagtgggcacatcaattttgagaccaactttgagataatagaagaatggaaagaacaagagcccaacaaacaatggagccccaactgtgaatcccatcctgctaatcatcctgttcgtcactatctccggtattacaccctcttcgtcctcctcttcttcatccctcttgtcatcttcatcatcgtcgtcatctttgctcgttgtcttcttggttttcttgctcttcttgggaggaccgaacccttttgggctcttcaaagttgcatacaagggtgtgaaatgtgataaacgagtttggttcttgcaattacaagtgttggttgtggaaatcgggtattggttggctttgagacattttatcaaacagttggtggtgggaggagaccaaatcttgaatgcaatctgtgcgaagatattacacttatcagatttttttttcttttttggacaaatacacttatcagatttgatttcagtaaacactagtaccaatatattatactcatgtacccaaagagtctcctccaagacccaaaagctatgttcatcacagcataattcatcatcaaacatttctatatacataaaagagtaaaagtgtaccttatgatatgatgtggggttgaagttgggtactggagagagccatgaaaatgtcacagcagttgcagccattgatttgggtaactgaaatttgtgtttctcagcttcagagaaatttctccatatcaattttttgttgagctacaaagaaagacgtttttgagtgtttgagatgggataaggtgagtcgactcactatatttactgatttgcacttccaactctttattcattcactcacataaaaccaactgtttgaggggtataatcgtctttgcgcgccacgttaataatcctatggctaccgttttaattcagccaccagtcatatcaacaaaacaaaaataaaagttcagtcaccagacccatcatcttttacttgtaattctttggaaaattatatagttcactttctatgttaatttttggtgtagagcagtatacaaaataattatttaatatattatacaaattttttagaaattttttaaaatttatggcattaaaaataaaatttaaatattttattgtatgtgtatttattttattttatatgcatgtaaaataaattatttaaattatactttttaaaccgtaaattatttaaatttataatattacatgatgttttaaataactacaaaattagccatataaaaaaatttaagattacaataactcataataaaaaacatgcgagaggtgcacaatagaaacttcctaatttttttaacttttacttgtcaaccaaatttgccatgtaagatttaactttcatttagattttttttaaaaaaaaaaataattcaaatttaaacaagaacattgagattaaattcaacaacatagagcattacaaaattaaattcaacaagaaaaacaacttaagtgtaaatgtgcttattgacttattaatataaggaaaaattgtagcataagtccccaaaaatattaatttaatgcagataagttgtaacaatctaaactctaggctgtgacaattatgtaagatccataacttttgggtggtcaaatatcatactttgacccttataagaaaataatacttataaatgatcttttaatttatatcacaaacttatttaaaaataataaattaactcctatatcaataagaaaatattagtaacaagataagaatcactcatcaatataaaagaacaataatattcctacagttatgtagtcactaatagatagatttaataagtcaataaaataccaaaataatatttagcatccatcatttctcatttttaactggtacatagccaatttaagtcttacagaccacccattcaagcttaaatacaaaatcaattttggaatgtttgataaataaaataagactaaactaataacgactttcttctcaacggtaccatcctcatccgctagcatcaaactgggtttctggaacaggagaaaattggggctgagcttataaagcccagtaggaaaataactaatatcagaagaccattggtttaataaaaagtcatgcatggttagctgtttaaaaataaaacatctcatcaccattgtcaaaatgtataagtaaaatagagagaccataaatattcacaaaatcaagcttcaaatgcatatcacatcgtccactaaactcctagctctcaataccaatcatagaaaatgacatccaaaaattggatagtcgcacctgataaccaccataatatcgagactcaaatttaattcacttcctgtacagattctagttgagtgcacaccggatctacctatgatgacacagagactagatcgtaaactaacaatatggctctcatcaatataaccaaaaataggcaaaataataagaataataaaagaacatattctttttttctagaaaatttgacagcataatgattgtattttgaataaacccaaanatcataacctgcataaatatttgtaaaaggtatatttggcactcagtgtcctaaaacagtccagaaaaatatgcaaattaagtttttaatttttttttttacaatttccaaattataaaaattagaatatgtctaatgttattcaacacatataaaatcaagtccaataataaagttgagtctctaccttaactaagtcgttaaactttctccaaaaagacgatcctaagctctcaaatctcgagctccaattatttagtctaatgttagatatcactctcacctataccatcaaatggctaaataattatcatcgttgtattctacattcaaaattgactccaacgacatataatatgattatatttaaagtttagagttctgaaacctcacctaagtgatgcacattaaatatcagtggcggtagaaattgatgtaccaaaaacgtgccaaaagtagggatactatatatcaaaatgactacctcgacgagtatatcacaccatgccagccaatttttgaaacagtgcacgatatcgccagaaagttgctgaaaaggggcgaagctacaaaaacatcaccaaaaaaagtagcaagctggataaaatggcttagtgtagattgttctccttgacaagctgagtctgttggtgaagacgacttggcaaacggataccagaggtggccgaaaaatctattcaaagtttgaacctccaaactttgacttgcgatctggggctaacagtggcgaaaggagtgccactgcttggggttgaggtcatcagcacttgggaatttgaatggtctcgagcgtggggtcggacggtggctggagagtggttgtcagaattatgcgggcaattgggtctgtgggttcttcttttgtggtctagagagagaaagatagagagagagtggcgaatgggggtcttttcttacttaatattttatatacatatatatatatatatattctttcgtttcttttgactcggtaaaaattgaatctttatatctccttaaagaaattttgtaccaattttaaagtacaaccttaagttaaaaattaaacaagtgaggatacttcatatacatctcagactataactctcaagtagcctcatcttctttgtaatttttctataagaccttgactactaaaatctctctgttccttaacacttttagctctctcgccaagattttgacaggttgttcttcataattcacattttcctaaagagggatagcctcatactcaatgatatgttatggatctggagtatatttcctcgacatagacacatggaacacattatgaacatgtcctaactgccctgataagtttaatcggtaagcagcctccccaaccctctcgataatctcaaaaggtctaatatacctcggggctagcttacccttcactctaaatcttgttacaccacgcgtaggagtaacttttaagaagacataatcactaacatcaaactcaacttcccgtcgatgtagattgtcatagtttttttgacgactctaaacaaccttaagtctttcttagatacccttaatctttttagtggtactagtaataatatgggatccaatagggacatgctcatctagttctacccaacacaatggcgatctccatggtctcctatataaggcctcataaggagccatnnnnnnnnnnnnnnnnnnnnnnttgttgtatgtgaattccactagtgataagtgttctccccagctacctccaaaatccaaaatataagagcgaagcatatctttcaatttatgtatggtcctctcagattgtccatttgtctgtggatgatgggcagtactcaagtgaagttcaattcctaaggcttattacaaggccttctaaaatcttgatgtaaatcaagaatctctatcagaaataatgcttgaaggcactccatgtagtcgaactatattgtatacaaaaatttgagctagcatggtaagcttataatcctttatgattgggataaaataagcagacttagtcaaacgatcaacaatcacccaaacaacgtcatgcttcaaaggtgtcaatggaattccagtaacaaagtcatcctacttccattctgctataggcaaaggttgatgtaaacctgaaggtctttgatgctcagtcttaacttgctgacaaactatacacttagctacaaagctagccacatctcttttcatacctcctcaccaatattgtctcttcaaatcttggtacatctttgtacttctaggatgtacaggaaacttagatctgcgggcctcaatcaaaatggactccctaagatcaaggatatctgcaatgactagtcttcccatatagtataggtacccttcgtcattaactgtccacccatctagcttctaaccatcatggattcgatttcaaataagtcttagattttcatctttccactgacgttgcttaacttgttaaagtagcactggtgtagccactatgtta

SEQ ID NO: 37470 - DNA, 3801 bp, Cannabis sativa
gattcgacattctcctccacagggttgtgggagtaagaagacccactcgaaacagagtcatcgatcaaaaatgaaccaaccagggcgttcttcaatatttcggagcagctcggggagctagagctatcctcagaagggtcatgaatcaccaaatcagaatcgtttgctttttgcctagtgtcccagggaaagtcacggacaacttctggatacttgcgcggaactttatggggcctagaacaaagagaggcagacgcttcaaatttccttttcttgaaaggtgtcgttctctcattaacttcagaggaagccgggaccctaatgtcccctcctattttccgtatttcatacaaatcaaggttcccaaagtgtttgaggtcatgcaataagctttcttgagcattaaaaaattgagtcaatgctttttcttcattagagtgctccacggctccatgagagacattaggcaaatgggaactagcctccacatgcccaacattattttgagaggaaaaatttggcccaataccattagcattaatacccaacatagccggccccattaacccacggttaggattagaaaaaacctgagactccaccaaagcaggtccacacgagagagtagcattattaatgagagatggcccactaacaacattacccatattaatatcaaggagcattgggctttttcctttgtccacatgatggacggcctgcccactttcactcacacacggtccaatagcaacagacccaacatcccctctattatctccaacagttacaatattcaaattttcttggttcaagcatttcacaccaattgggtcattacaaacaatcggcccaccttcagaaatgggcccaacatggtgccggttcactaaagaaatgaacccctcttttctacacatattcaaattaggctcaagcatcgaggaacggtcttttgtagcttcagaaataggcggttctattccaggaaaaggttcagtctccttttcattttcttcaaacccaacagcaccctctctacctgatatagcaaccggaggtacaccaccagctggtttcgatttggagacccacacaggatgctaggaagaaccaacggtcagagagccttgcctagtcaccatcctggaacgtctcgaaccacggggagcattggaaaccgatctcccgaaaccaccatcgccatggccgagaacaaccgctttggaaggacgacggaacgaggcaaaaagggcatacccatggtgttctcgacagggaataaaggagttggcgctggagaacacatcccggtaagttgacgacgtggataaccatggcccaaacagagggaaggggatcccgttatcactagtcaccaactccggcgaagaaagtttgcaacctcttctttgatgtcccaggcgtccacaatagtagcaaaaaatgcctacttgttcatatttgaactggagccatctcctgactcccgagtccaagtcgaaaaagcaacccgaaaaaagaggtgttttaaaatctatttcgattaaaatcttgaggtatttactccaagaggctgggttgttctcttgcaagtccacataaatgactttcccagcttttcctcctaataaataaccattttccatagaaaaatattcatgaggaatattgtgtacctgaacccatagtcgcatcatatcactcaaaacaggggactcactggttgaagaccaaacttgtagaaaaaaagtgtagccacggatacaccaagggccatggtccagcgcccagctcctatcttcctcacgtgcaaaacttagctcaaaacagttggtgtatttaggaccctcagccagtgccaccactgtcacaggaaacttccaagctttggccacaaactccactacattagcttcactcacagacatgggggccacgacttttcccagcagacaaaaagtggacagtgcttttcgagaagattcgcaaggaaccaactttaccaactcatcattaacagaaaggcacttacctttaagaggagaagtagaactagaagcatttactacctccataaatgccgacaacaaatgacaaacccaccaaccaccagggacgaaaacaacaaagaaataaaagctatcacacactaactcacactacggaatacccccagacaaggacaaacacgcaacaaaccaacaacagctatggacaaacccaaccacagccccacgaggaaacacgagcaaaagaaaagagagactcagatagacgaagacaaacaaacgagaaaccccaaccagaaaaacacacacgacacagggaacaaaaccaacaaaacagacacacgaaacagaaggatcatacagcgaagaaccccagactaggaagaaacgaacaaagtcaaggagatcaaggaaacgcgacgagagagagaagcacagtagatgaccatgctctcttccactcccctacagctcctggttttacattgaaaccatgccaaatcctatttatatatatatgcactattcctaacctatattgggggatcagtactggcctcctatatttatatatgaatgctcttatatatccttgtttaaaagggtaaatgagcgctaatatatgatagcataaccaatgacttagttattttagaaataagtcaaataaaatatttgtaagcttttattaaatatacaatataaatcaaattctgagacagaattttaacgtaccttttaagcaagcttaaaaataattaatcttttatctccattaatattatagaattgttcttgctcatgtgttgagaaaaacaagaacttcatatacactttttatcccactgacacacaccaattcttgtgtgtggtgaaagatctaaaagatcaaggtatgagtttgacgtcaccgtttcaagatacaacatgcaaaaggattcaagaatacatcgatagagttcaagaagtaaataatcttttcatgttttcactttcaaatttaatatatatacatatagggatcttagacgtatggtgagataataataaaaacacttatttcactacgtacctgatttagtactataaaagcaacatgcatatcttaccaaaatttgttacaactattgttaacatcaaacaaagttctaggtttatatagaagtagtaacatatgtaactaaaatataaactacaaaaaatttcactaatttatatagaaacttttgttgtatcactccaaacaaaatataaaagaaatacaaaatctgacaaattatttaaagttatttaacttgataccaaaatttaacaaacatgtagaaatttgatatggagtatggacttatataactaaccataataaatatcaaaatattaaaagaaaaccaataataaatatcaaaagtgatatgaaaactaataagaaagggtaatgctcatgcctcgtaacaaacatcattgggtgttcgcagtatgggtgatctggtttttaactattttttcaaaccaacccgcacatgcagtttttctaattttctaaattacacgcacatcaaaactaaaaaatcgcagaaacctcactgtaaaaaatagtacagtacggtgcgatttctgcggtttagactatcaccagcaatactcgtcaaaaatactataaggcttgaaaataaatacgcaaaaaaaaaattaatttgaacaatacaataatagtgggctttgagttgaacattcacatattggacttaaataaaaagattatttcacgaaaacataaaaaaaaaaaaaa

SEQ ID NO: 37471 - DNA, 4168 bp, Cannabis sativa
gacttattttatatctaatctgaagtatgcccttcacacttacttcttagctctcatcaatttttttttgcttaacaaagctttaaatttagctgcttaattttagttgtgcttgttcgattttgtatggtctgggacatgtttgtatgcatgttgaacaaaaaatattaattttaagaagttatcttgttagcaagttgttaaatatgatttgaaaagagaaactcttttatccatttattggtcttacttatgtgtgtttgttgtgcaacgtacatttttttgataatgaaatcttacatttctaaattctgctttcattcatcattttagctatccttgtgtggcataccgggtaggggccacgactgaagagttgtggaaactgagctctttcatactaattcctgtatattgagctgtacaggaacctctatggaagagtagtatttttacaagttggtcactggtagtactttttgagatattctccattccagtaccttggtaggagaattaatttcatgttcccattgtacctaccaagcttgtacgcacctttacttattatctttgtaacatggtacgcaacttctcagtttcatccaaggaatcctgctgcaggatccttggtactaaggattgctcttcaaagcagtaagtctcctacttagaatttttcccatgacttgtttattgaagtattaggctattttttgctgataggcataaagctttaagtttccttggactcttctttcttcaattttataaagggattctgccgacaatgtgtggtttacttcttggtcatagtaggcaaaaaatacccttggctaaatatctttttggatagcctttgcccccaagcatgattgccatagatgccttcatgcattaatagtcattcaacttctatctaggtgacatatcttagaagttgtattatgaaaccatatatgtacataacctcgtctagtattagatacatagtagctttcctcctccttttttcttgcttcattcttattttctagcaagatttttgcctggaggtatgccactataggtgtcctccatgttggatggtcatttagcatgtttatctcttttgaaatagtaaggctcggttcttttaagaactgaatgggcaataagttctcctcgtttgtcaaggcgctgctagctaattgagcgagtgcatcgactgttgcattctcttctctaggaacttgccttctagtatagccttggagctgactttataagccttgaatcttgctcaaataggctatcacttttttccttgaactctatattcacctatgacatgatttatgacaaactaagactcattgtatatgtcaaggtaatctgctcgcacttcgtgtgctaacttaaggccaacaattaaaccttcatattcagcctcattgttggaggctttgaaaccgaactctattgcctcgtgcatctggtgccctatagttgtaatgaggcactacttgcaccagacaggtagaaagtacaggttttgtcaacatcaaacttttaggctaatttttatactcttgcttcttctctggttcttgctttctcctgaatcttgagagattttaggagatatgcatgtgcattcatccaggaagtcagcaagagcttagccttttatggccactcttggctagtaagtgatctcatatgagccaagttcaacggcccacttgtgtagttggccagatgcttccggtttctattaagagagtgaagcatgtgtacttctactgctccctttgattttgtggcgtaggggaattgttaagtttcccttttttgccaatatttcgaccatagccattattattgtgtttgcctctattattcttattattagagggctagccggtatttcccatgctagcctacatgttggtcagagcttggggctgtatgacacccttagtctgcccaacactgtcctgtcttcctttctgagcttgtcggatagctgcttccaactttatgaaaccatcagcttgcttaaggaactatttcatgttgctcgttgagatccttttaatatctttctagaatgcactcaacatcatgataccttcacgtatgttcgtatactaaccttcttctgacaggtatttgaccttagtggcgtcgaccatgaacctttgaatgtagtctttcaagcattcactttgtctttcttttatttttacaagatattctagttgtgagggtatttgtctaatggacgagaactgagtatagaattctcaagagaattcttcccaagagttgaaccttctttgggccagtttaaagtaccacaattggattgtgtcagacagggttgcaagaaagatccatcattgcacatctcttattactttctagagatctctttggatctcaaagtattttatgtgcgctaggggatcttctttcccaatttacatcttccaagttggcattttgaacttgggaaggggaagtgcattaatgtatgctataaagggtgatccccttaacttgttcagctctaggtcagatagcttttggccagataggcctttgatcatgtctctaagattatcaaactatgttcgcaagaatggatctattgtattggcctcttatacggatagctctccttggctagacaacctcttctggcgggctagctctcctttacaagctagatccacttgactggccagatttccttggccggctagaactccatggttggccagcattccttggctagtgaggctagtttgtggattgatagtgggtcggtcgtaccaactgcctaggttcggcggatccacctatctaaaatcactgtttaggggcaaaatatagacattctgattctgccttctcgaattagttccctgtgataggaatttatcttttttgccatacggtttatcaggcaagacttatccgtcctcaagtaggatagagtttggccacttattcgaggcacctaaacaggttgtttgtctattgtatacctattggtagaccttggtcttcacatttgtcgatctctcaagcaagggatctctcattagggccttgcccctaaatcctattttctcatttaacaaccttatcaggttgttggcctcctaattacaatggttcatctctgcctagttggcccagacgatggcctcctactcatcaacccacttcatgaatttccatctctacttagcgaagacatcgcacacatcagtgaaggtttcttcctctcctattttagtgacctggcctacaacttctctgagcctaacaacctcaacaccatccccaaggtccaagaagggtttgccaatagcaggttggccaactcttggcccagtttctcttgcataaactcacaaggcattcttattagtattatgagcaggttgttccacattggtctgctcttttgtacatgttgacctcgctttttaccaacaaaagtcagtctaatttagtaagcgacaagtagtttataacgatggaaatataataaagcaatataaagacacgagaattttatagaggttcagccccaagcagttcggtaatagcctaatcctccttatttgtattaactcaagaacaaggagaaaggttccttttcttgtgacccttaaaacaatatctctgaatatgaattcttagaaaatatctctaaagtaaaatctttcgaccctttgcccagtgaatatgcatcattatttatagggctatgagctgggagaggaagtatttcccttctcgttacaataaatataagcagaaagattgtatagtaaatatagaatacaccgattgtgggatttggacaacttgccatatctctacaatctgatccccaagttataggaaattccttgatgactcacaatacgaaagctcaattcgctaagtgttggtcgctctgtgcggattgttgaatgctttgcctcgagcatgcgtatgaggtatcttgttcgaactatatcttgcaagcaaatactcggagttcattccacgtgtcaccatcatgtgattgcacttcagagtgcaaaaattgggataacatttgcccccccaagtctgtatgggactttcaaagttgcgtgtatgacacgtgtcaagcgcgtctgtt

SEQ ID NO: 37472 - DNA, 2382 bp, Cannabis sativa
cccctcttcccgaaacccacttcaagtacataaattatgtgtacctgtggatagtggatacacgtaatcacttgttttaataaactaaagacaagtttttgaactaaaatgcatatcaaataaagaaaaataataatgattattatacaaacctaataacagtacaacgaactcgggtaccaaaatcttgtacatttctgccactaaagagagacccaaaaaaactacattactgttgttcgttgttgtaataaattataaatttttgtaacagttttttcttggttgagagaaaaaaggaaaaagataaaacaaaactttttggactttgtagaaggccaacaacagcaaagagtggtcagtgggtagactttttatgcctcaaagcacttcttttctcttccctaaaaagacaacccaaagaaatctatgtcagtctcaccatgataagataaataatttttcatcaacaagattccagagttaatattctaacaatggagtttttaatagaaagcattaggagtaatatttcacctgattctcgagagttcctctcttgaaggaaattttcttttcctgcctcggggagggtattctttcttcccattttgagtgacatctttcttcccattttcagtaatatctttcttgataaccttgttttcttttacactgtcctttttctcttttcgggcgatcttgatatccttcgaattctctttaacatctttttctgttgctgcttcttcatcatcgccattttcgttaggttcaacatcttgctccactgtttccgttgcttctgatgattcactggctggttttacattgcccatcttttggagctgcaagataccacaaaagagaacatcagcaacttaaacataaatttatagggacttggccttgggacataatcaggtgacaactgaaacctaaaaaatgttgagtttataaatcaaatatatatacctttgcaacaaaaaatccatccatattgtgaacatgaggatagaaacgccttgtcttctctaaagatgtgtggaatcgctgttctctaaaccgaataaacctgttaagaagaaacattagaaacataaaccaattgagcagtaaccctcttgtatgcagtaaggagagagtcatctttttaccctggaaccccaaagtcaagcccacatggcacgagcttaacatttcttctcttgagtgcgtagtcaacaactgcctcattctgcaacgacagcaaaatagttagcagtaaactagagaaggaaaacgaaagacagcaacagcacgacaagaaatctgcaagatgcatcattaacaaacctcagcaaccattatggagcaggtggagtaaacaatgtaccctccagattttgaattggcatcaaccatatcaattgcggcgagtagcaattgctacaggaaaatgatacacaaaattgtaacgcaggcttaaataaataaaacaaacaagaaataaactgttggaaggaaaaaaaaattaatgagttctgtgacactctggtcaagattagtgggtcttgaatacagcttttaggtgaatttcatacacactacttgcattgattttagtattcataagagcactatttatagcaaagcatttccttgtaccttctgcaaatgtgcacatttctggatttcatctaagcttttagtaattttaacagactcatcttttgatataacctgcaaaatacaactgatttagtttactcaagagaaaaacaaggtaattggctaaacagagaaatctattgtcacataatgcagctacttacccctgtcccactacaaggagcatccaataacactctatcaacagcgttgatacccaaaactttaggtagctggaagaaaatgaaaaagaggcgaagcaaacagaaggtgttataattgaattttaatcacattgactccagcacaacatgattttgtgatgattagacatgaaataaaaaaaggattttcagaataacattaatttctgtgaattaaatgagtacaatctgcagaatatagaaaagaatccagcagttctcaatgtcaacaattagacagaataaaatagaaagtgaattaaaaaaaatacaaagacaaaaatctaacctcctttccatcatagttgcagaccacagtattggtcacacccatgcgattcagatttgcagtgagtgacttgagccttggcaccttcatctcatttgcaaaaatcattcctgataaatttatgacagagtacttgagataaagaggaaccacgataattggaatcttccgcaacttagaaataataataataaaaaaaaaaaagcataagagcacttcaagcaaagagagcaaaatata

SEQ ID NO: 37473 - DNA, 5415 bp, Cannabis sativa
  modified_base (5032)..(5032): a, c, t, g, unknown or other
  modified_base (5126)..(5137): a, c, t, g, unknown or other
  modified_base (5365)..(5389): a, c, t, g, unknown or other
attaaacttacgtattgaagtatgtagtatttaagacataaattaatctaatttataatataaaaaattagaaattaaaaataaatttgaaaaattaagaaattaatcagccagctcacctcacctcacatcgtatgagaattgtattattataatacatataacaaagttaggaggtgtctccgaatgcaacgagaaaactagcggaagagaatcaaaatctgacccagtcattaattaaccctccaagttcctcaatttattataacactttctgtctctctctttcggggtttcctctgaatccctcactttttcctcctgtcagaatgcggcaacccaagaccgccgcttctgaattctcaaactcttccttacctctttttgcatctccaaaataaaaaataatcatattaatcatatttttaccatgaaattacaacctccattactctataaggtactattcctagctctagttcatatcttcctcctttgttctgctcaggacaacgatgccggactcacggcaacggctccgccacctgctctggaggactgtaatgggattttcgtatcgtacacgtttatttcaaggacgaaggaatttccacgggtgaaaaacgtgtctgctcagtcttgggcgttcaagtcggaggtttccgttgtcaatgccgggtcggaggagctccaggcatggaaggtttttgttgggtttcagcaccgtgaaattttggtttctgccgatggtgcagttgtcatggacggaggagattttcccgtggatgttgcgaatgggacctacttgtcggggaaccccattacggatttgaaaacttccattgatacagctggagacttttcgcagatacaggcgacaattgcgattactgggacaatgtttgggcttcggcctaaagctattccaatgcccaaaacaatcaaacttgagaatgatgggtttaagtgtcctgctcctcatttacaaggcaagttatgttctggttctttatcttataatattcttccgttaacaacaactttcgattatgtttgtttttctgaaaaaccacttattatacgtcggtggttttcaaagaaaaagttattatacgtccgtgccaatggcggacacgcagacatatatagaaatatataaatataaatatatatctaattaagtaagaaaagaaaatgttctcttcttggaccatcctctgtaaaatatttctgtccattttcgttaactgtaaacttgctttctatatattcatagtttaatttaaaatgcagtgggatctacttataaaatatttttatgtattattaattttcttaaaccgttccttattcacaaattttttttctttgagaaaatagattgttatcaatatatttacaattgtttataatggcatgtcctaatgttatatgttcgatgagaaatggacaggaatccaggagtcgagtccgctatatttaccatattttttattaattataaaccgttactataatttgctttagtggtgtccttttctcgcattttctcgcagctagagagaattgaaagtttgttgcaacaatcatatacattttaatattatttattatttttatattatgtggatgcaaatggctcccatactggatggattatgagtttaaaatttagctgtaatgtgatttttttttgtttaaaaccgtggacaatagtaagaacatgattgtaatggaaaatgtgtttcgtgttatcctaaataaataatatatagaagattgattttatactataagttttgcaacagaaatatatttatcaattgtttcattaattgtcgcttttacagggacaagatccatgtacgtatgctgcagacctgatccaaaatacaaagcgaagaaatcgaaaaggacaaagttcttacctcgtcgaaacggtgacctctcctttacgtacgatatcatgcaagcctatggcggaagctacctagcccaagtaaccatggaaaacaagcacccattgggtcgtctcgaccattggaacttaacctgggaatggagccgaggagagttcatcttcaacatgagaggagcttacacccgcacaaaagattactcgcaatgcatttatggccctgccggaaactactacaaagacttagatttctcccaagtcatgagctgtgacaaaaaacccatcatcgccgaccttcctgccgagcgagctgaggatgagaaagtaggaaagttgccattctgttgcagaaatggtagcttacttccgccatcaatggacataaataaagcaaaatcaatcttccaattagaggtctacaagctcccacctgacgtgggcaacagaactacgatatacccacctcagaaatggcaaatcgatggtgttttgaatccagagtacaaatgcgggacgccaattcgggtcgatccaagtgaatttcccgatccaagtgggcttcaatcggtctcatatgccatcgctagttggcaagttgtgtgtaacataacccgaccaaagcccaagcagtctcggtgctgcgtctcgttctcatcttattacaacgactctgtggtcccgtgcaacacatgcgcctgtggttgttcagaagatcctcatagcattgcgggaacttgtgatgctgacaggcctccgatgcttcttcctgcagaggctcttttggttccattcgccaataggtcagagaaagctagagcttgggccaaactgagacactttccaatgcccaaaaagttgccctgttccgataactgtggggttagtctaaactggcatataaactcggattataggagtggatggacggctaggatcactctcttcaactggagacctgacccatttgaggattggtttgctgcagttcagatgaagaaagcttaccctggttacgaaaatgtttactcctttaatggaacgaagcttaacattaaaggagcaaacaacaccattttcttccaggggttgaaaggtttgaatttcttgatgggccagagtaatggatcgaaccccaaaattgatccaccagtccctggtaagcagcagtcagtgatatcttttttgaagaagaacactcctgggattaatatccgtcgtggggatgggttcccgacaaaggtttattttaatggcgaagagtgtgagattccggaaagttttccaatagaaaattctggctataatgcagccactaatggactcttgtcaactttccttgtttgtgtgttcactttcatgctgatgattgaccatggcttccgttgatgatgattatgaataattttttttgtttagttttggtaaattctgatacacctttacgaaatattaataaagtttaatttactcgcaacatttgttgtgtaagatttttgttattatgataattattcctttctttttcggacatatataggtgggactgtgggagataatacgtgtttcacgatgatgacgcaatgtaactagaattaagacgctgaacatttgaagaagaggatatatgaccatcatgggattatgaaaggtttctctttcctaggaaaaaatctaacatatttataaaagaaagtttaaatactacaagtatctatgtacgggctgggctgtattcattggatttgtaaacatgttttatttctgtggtgtcaagtgtgtcttttttttttattttattttttacaaagagatgttttcacgacataaagtttaatgtaggaaatataaaatgttgactatttaggatttttactctcctaattataactctgttattgtgtcttttaaactatttaatctattacaaatggtatctgaacaatttacagtttgtaaattggttattttgtcaacttttatggtatataataaataaaataatgacatgactacttagctaattgtcactttagtatcacgtgtataatttaaaattttaaaaataattatatattttttaaaaattataaaattaaattaatggttaaaaaaatgagaaaaaacaagaaaatacaaattaggaaaaaaaatttactaaaatacattgagccaactatttaagctattatacagcccacaaacaaataattacaaaaataccacctttaaactttcagccgcacaaaacagaacgataaacaacaaaaagcttcgatcgtacaaacctgcaacacaattgaaatgaaaccaaattcagaggaagaccaccattaattcaaacgaatttcattggaaaagaagacacgaaacgatttaaacggaaattaacgaaaaaaagatcaataaaattgggacaaaactgaaattaaacactatttttcggttttatttgatcaaaacaactcatcctaatatcgaaattcagattcatataatgtagatctctaacaaacagatctggagttctcccatgattttaaaccaggtataatgcaaaaaaccaaaaaaaaaaagagtcatgaataatagatctaataaggtatatacagttgcatttttgttgttgatttttgtgatttccaatatggaatatattaatttacaaacacaataagaaaagaaaattcgaattaatctacagctagttacgtataagtatgtttcatttttttaggttgctttatagttgtattatcatttcatatggtgtttatcaatattgtaggaatttcatttgacggtaaaaaagaaagatcacttcaaaaaagactgcttcaacatggttagttttatgaaaatagttgcatttcgttttataatagttgctaaaacattttgatacaaacaaaaatattgtaaaaatacagggttcacaattggcaataaatgacttgaaataataaatagatttggagctctccatcaatccaaatcaggtatgttgacctcgcttttagccaacgacagtgagtctaatttagtaagcgacaagtagtttataacgattgatatatagtaaagcaatataaagacacgagaattttatagaggttnagccccgagcagttcggtaataacctaatcctcgttatttgtattaactcaagaacaaagagaaatgttcattttcttatagctcttacaacannnnnnnnnnnnatgaattcttagataatatctcttaagtaaaatctctccaccctttgcccagtgaacatgcatcactatttatagggttatgagcttggacaggaagtatttcccttctcgttacaatggatataagcagaaatattgcataatacatacagaatacattgatcgtgggatttggacagcttgacaaattttctgcaatctgatccccaagttatagggatttctttnnnnnnnnnnnnnnnnnnnnnnnnnttcgctaagtgttggtcgctctacgc

SEQ ID NO: 37474 - DNA, 3718 bp, Cannabis sativa
gttcggtttcattattttgaacctgaaacccgtgaaccaaaaacccggtaaattcgcccgatgttcagccatatatataaatctaacaatggtttcaaaatagagtaataactcttttttataatagtaattaccgaatcatatattgacatgatatatgatataattgtacttttcttacctcaagtctaaattctagcatgctggtcaacctgaatggaaatcgctcgacgatccgagtcttatgtcacaacagcggtaaatcggtaaataactcattttaatctaaactaggactaaaactccaaactggaagtttctctatcgataaatagcgcagaaatactctaaatatctagaaaacaaaaaaactgaggcacccaaaactgcccttatctaggtaactggattcaaaacgattaatcagatttttaggtgcatacctgaccattcgggtaaccgaatcccgaaccgtttaactagtttgcaccaaaaaaacaaaaactcacttaccctacctattccaaactcaaatcaccactccaaaaaagttaacatgagctctaaacatattctgccttccagaaactacaaatacacaaaagattaaaattcaacatgggagagcaagctttgagctcaaaagatccaaacttactctccaaaaccaaaacaacagccccacaaccacaagaaaacctcaaaacaaagctaaacatggactttaaattgattctaaactaaacaattaagcacagaacctaaaccttcaaaattcctttttaaattatttaaaaccattaaaaactcaaaggaaaaatctaaaacaacttacctccagcttatatagcttcaaactatccttctaagcctttaattcagcaagaagaatgaaagaaatctttggctcctattgtttttaggtgaaccgagagaaagaaagagaaaaagagagagagacttttctttgtttagtgtttttcctcaattcaaacttaattcaacttaatattcagcaataaatttgtttctagaaaatccacttaactaaaaatattactaatataaagctttaagcaaaagactaaaataccccttatttcaccttaaagtaaccttcaacgctagggataaaatggtcataaccaaataccatgtataaccccattaattatatcaccaacaaaatttcgtgataccacaatcgcacattctaatactaccgtgatatttctggttaatcaatcgagtttccaatattaatggatctaaaagtattttatttcacatatgcatttaaattactcacacagtctaataaaatctccgtaattaataaattacttctaatttgcccatttcttaaaataagcgtagcttttgatatttaatctagtaagattataactttactatttattttcttaatacacacattacttaatattttataaaatatgctttaaataatcacaattaaatatcgggggtattacacctatccgctccttatgaaaatttcatcctcgatatgtacttgaataacctgggatactactctcgcatatgcgactctaactcctaattctcttcctctaccttgcagtttctccacgacactttaactaacggaatcatcttgttctgcaagtcttcctctttcttatcaaatctccaaattccttacaaaggtacaacttaaagaaaaacaaagtgcccaatcagaactctaaatattacgcttcagattagtgtagcttttctgtctatcttgtgaaacgagcatacaagctataattttttctattactttactagtatcctggaccgcttcgggtcaaaggtatcttctttcacccacttcatcctaatggatgggtaatctaccccttttcccgtacaatatttcatatggtatcataccaccgataacctaacaactgttttgtataaaatctcaaccaaagagagatatctattccaggacccttcaagtttaacacacatgctcataacatatctttaaatatctggatggttctcttggactatccatcagtctgaggatgaaaagcagtgctaaacttcagcttagtacccgaaaccctttgtaaactcccccaaaacttggaggtaaacttagaatcacgatctaagataatcaattttggaacatcccaaagtcgaactatctctttagtgtacaaggctgcaaattgatccattgtgtatgtcatccacactcacaggaagtgcgctgacttagtatatctatccactatcaaccaaatggaatcatacaacctcattgtctttggtacctagccacaaaatccatggttatatcttccaattaccactcaggaatcttccaaggctgaagtaatcccgctggcctttgatgctctaccttaactcactgcaagttaaacattttgatacatatccgaccacatcactttttattcctggccatcaatatagtgatttaacatcgtgatacatcttcgtcgttcctgggtgtaacgaatatggtatagtgtgagacttatccagaatctatcgcttaggtatatcattaggtgaaacacaaaatctattgttacctcaataattcagtaacactgagaagtccttcgttgtaccaaccttgaacttttccttatgttctatcaataccaattcactttgttgtgctatctaaattcagtccaataagtctgactgtagggtgatgttagccaatctctcgactagaaactcgattccagctctagtcatatctttcaccaacttcaaggatatttgcttcagttcatagaattgacctgagcctttccaacttaaggcatcaaccactacatttgctttccaagtgtggttgataatcccacagtcttaatcctttagtaactctaaccatcgacactacctcatattcaaatctttctgtatgaaaaagtacttaaggcctttatggtcggtgtagttctcacacttttctccgcataggtaatggtgctaaacttccaaggcaacaccactgctgccaatacaatttcattaggggtataatgttgttcataatctttcaattgcctagatgcatagacaatgacccttttcatattgcatataaaacataacctagccctagttttcaaagcatcataataactcacgaacttctcatcattgtttgacaaactcagcattggcactataaacaatctctgtttcaactcttgaaagctattctcataatgtttagtctagataaacttatgattctttcgggttagctctatcaaaggtgtagaaatcttgacaaactcttccactaatctcttgtaatattcagttaattctaagaaacttttgacctcagcggctaacttaggtcttgaccaatctcaatctgcttcaatctttattggatccatcataatcccatgtttactcactacatgtcccaagaaactcacttgaagcaaccagagttcacacttcttaaactttgcataaagttcatgctctcaaagatgttgcagtaccattctagatgtttttcatgtgcttcctccgatcaaaagtaaatcaagatatcatcattccataaatttcattgggtcgttggttaacccaaaagacataaaccagaaacttagaatatctattccgaatacgagatacaatcttgggaatatcctcttcctga

SEQ ID NO: 37475 - DNA, 3871 bp, Cannabis sativa
atatgtttgtttgtgtgtttattaaagtctgatctgaaagcattttgaaagtttggttctgatcctggttgaggattaaaaggaagacacacagagagaaatgggaagaacaccatgttgtgacaagaagggcttgaagaaagggccatggactgctgaagaagatgagactcttgttgaatatatcaagaaaaataatggccatggaagctggcgttctctacctaagctggcaggttttgactctttcttctcttcttcttcttccatctgttattttctttttcttttctgttttgttttctagctttggatctttgtttgttgtcctgaaacatatgcactatactttggctttttggaagaaaagagaacaaaaagtgtgcttcagattgtagttttgttctgagtaataagacaaagagtttcaaaagttgtgaaaggacctccaaatggggtagtagaaaaaatgaaatgttgtctttaaagaaattaccttttcgttgacttttattcttttgctactgagtcactaagtggtttgtgtttgttcaagtactctttttttctttttttgtttttcttccaggcatgctgagttgatgcaatttttgtcttagtttttgatggtttcattttcattttctcattttcttcacttttcaatgtccttgcttatcttgcttgagctgcaagaaaatctcaggttacctacactacacaatcctttttaggtgagaaaacttgatgtaacactgtataagtctgtaatatccttccaacatggtattttcttggagggaggtatggtttaggtccttcaagttttaaatcaaacggtttcttatctccaatttcttacagattcttttaaagtaaaaaataaataaaggccattgttttgttctttaagctttgaagtcatttgccgttttctcacatatatgcatgcagactaatagcaagttctactagttaacccctaacccttctttttggtttgctttatgagtcaacttaataatcagtatgtaaactaatatcaagttctctgttgcttgctttttctcaagaaggcattttcagattttcttagttcattttttggggtcttagtcataatgctaaatttatgcatattttaaaacagcatctatgctatatttgtatttacaaaaattatcacacctacgagtgaaactgtagtccattaaataaaaatagtagtactgaactatttctccaactgagtctacagtaatattgatctgaactatttctcccactgggtctacagtaataatattcacatttccattaaatattttaggtcttctctttgtttttaggtcttcttcgttgtgggaagagctgcaggcttaggtggacaaactaccttagaccagacattaaaagagggccgtttactcaagatgaagagaagcttatcatccagcttcatggcatgcttggaaataggtacttatatcttatttctttgcctacttcatgtataagaagaaaactaatgtaatatgagatagacttcaatttaataattttagctcaactatttctcagtacatccattcaaaccagttacttatatgatcactacatcatgtaatatgtgtgtttacatttcaggtgggctgctatagcttctcaacttccaggaagaactgataacgagatcaagaacctatggaacacgcacttgaagaaacgtctactctgcatgggactagaccctctaactcacgaacccttcaactcaaattctcattatccacccactgcttcttcccctgcttctcccacaacacgtcacatggcgcagtgggagagtgcaaggctcgaagccgaggcacgcctctcaaaggagtcaaccctctttactacttcttctactactcaacctttcacaacaaaatccaatgactctgacttcttcctacgcttgtggaactctgatgtgggagactcattccgaaaggtagcaggagtagctatcaaagatgaaaaaatggcttgttgcagcccaatttcgcaggcttctgtttcggccttgaccactgagggtggcacgaacaggactggattcgatactccggttaatgaccaagccgaagacatggattgcaagagctacctcgttaagtattgccccaacaatgaagatgatcatcatgtagtgatgggtgcaggctctgattcttcgtgctcgaatgacatggaggatgattcatcagatagttctgcattgcagctgctgttagacttccccatcaacaatgacatgagctttttggaagagaattgcggtgatcattacgcctctgatcacgccatgttgtctgaaaattcattcatctgtcatctctaaaaagcttttaggcttgcgaaagtagttagatgttaggccatgttgatcactgttttttttggttttttggatgttctttttgcattttaagatgtcaaagtgagaaaggattggcaccactggtagtactagttagtaactatggtgattttggcttatgtagttgagaggtagggagacaatggagtcgttaattaatctcaggtcaactaattaggatttagtttttatgtatagacaagacttatatgtataatattattattgaaattatatgatattctagactctaattggaaggagtattctacgaatagtccaagtggaacacggtcttgtcattctatttaaatgctgtttattccacgctcgttattaacaattattgggtttattattatttttggataaaatgagaggaaaggttggtacttttgacaaagacaaatgttaatttttggttctataaagtttttcaccgttgtttctgttttctcctaaactcttggaaaaatgcttgccttggtctatattatatgagatgataaatttatgggtcctgagtcctgactcgtgaaattaaccaagaccttttgttcatcctgaatcgccatttttgtgtaaacacaattaaagaaaacatgctgatgagtctcataaaattgggcagcagcgagagtctaagctcgtgaatcttccaagatggttccttgtgagcaaatgattgttaatcgcctgccaaataataaagcagtacttaagaacactaagtttgtgcgagacaaaacaggaatagaacactctataacaagcaacaagaagagaaagttataaatattttaccttaaacagcccttgtctctcagcctccatcaagggatgatgatccaaggagttccttaagaagctttttgaaataccagctaaagtcactttcgagagtaagacaccagaaatcttggtccttcaagtagacaacattaatttatctcacccaaagacagttttattttattgagagagcttaaatgtcatagccatgagagccatattccacttccttccttctttaaatccaaaatccaagacgactatactttttgggtaagcaaacatgctcccaaaaagtaagatgaactttactacgatttcctttagcaccccaaaaaatacttctacaaagtttggctagaggacatggaggttggataacctggtgtaagaaacccatcaaaggcctggttgctgttttgaacaatagtagctgcaattatacattgcatttggtgtaatataaatagatgtatgtttgaatttgtttctagctatgctaaagtgctaagtaatcagatcaagttaattgtgaaagctagagttaaaggtggtttattttctcatctcagtaaaagggaagttgatattttgtcattaattaacattttttaagttttgtgtttctggcagcttgctttttttttttttttt

SEQ ID NO: 37476 - DNA, 3222 bp, Cannabis sativa
ttatcagttatttatttccttaaatagaaatttatttctttaaatagaaatatatttccttaaataaaaatattcttataaaagcgacatgtctaaaaatactagacaccaccaatatctaataacaatgctcgtttagaattcacgacctgcaatacacacttaaccaataacaaattaatctaaaaacacaaactagaaaacagattacaatgcaacacttggtgatcaaaatgaataaatgcaagaaagataaaaacacaactagttttacttggttcagattcgagtcaatgtgactggtcctactccaaggctaaggcagtgccttgagttgaattcactatataaatagtgttacacactcagatcataaatgatcttcttcactcaagctcccattacagatttatttctctcatctctacaagttctctctctaaacttctctctaaaaatctcgctgtacaattaatgtcttaactcaaagttgatcgggtttagagtcttaatatatatagggtgagaaagagagtagatgagttgtagtcagttgtagcagaattaacagattctattgcaaactgtcgagttgagtcttagacttaagttgacatcttgaagatgcaacaagctggtctgcagatgcaacatgagtttaagtagatgagtccagcaaaggttcgaagaaatagagaccagccctccacagtaataatatattgattagcatgggctcctctacctaattatttgattctattgaatatatatcaggaactacaagtaattcttcagccatcaatgacacctctcacttttctcaaatagcctctcaattggttgttcattttccacacgaccatatccacaacatttattgtgagttagtcttcaatagcttcatcattgaggatggatgcttcttcattcgctaaattgagatcatcatttgttgaggaagcatccaatgtacctaaatttctagccaattcaaagaattcttttggttcaattttaggctcaatctcttctacgttttcaactaatgatacttcttcattgttcaaacaactctcataacattcgttatttgagttattgtcattattatacaccaaatcatgcaccattagattatcacatggagatcttactatgttctccaagtggttactttcttctacaagcgatggcttatactcttcttccttaattggttggggtgaatttgggcaataaggagggtatccgttactccaaccttgagtgatgaatcctagtgccattcgtaatcaaaatatgtcatgtcattcaacagatttgttttatcatcatggcttctccttaataaaggctctagttacatctgatccataatccgtccagctttttgtttcatcaacaagtccattataaaagaactaagtaaaatacccacttgagaaattgggataacatctctttccgagctccttaaatctcccccaagcaaaacataatggttcattgtgttgttggaaaaaattcacaaggtaatcttgatgtaacatattttcttatgtacattgcaagacaaagccatacaataaaaatattagcaaaataaaaaaaataatcaaattagaaataaaattaatttaactgatactgataattttcaatccatggcaacgatgccaaaatcttattcggtaaataagtatacataatcaaaaacaaggaatataataataaataaagtatcgttcccacaataattgaatatcaattgtcaatcaattaattctttagttttatttgatgaataaaaattattggagaaaaagtaaggaaatcaagacaatgattaaaatttaaagaaataacaataataaaaataagaattattataatcatcaactatatcttttattttacttcctaataatgtaataacccaattttttatcttccttttcaattgataagttgagttaagaagtttataatctggttaagacttataaacccaatctatatgaaaactctctataatactacgataagtttaattacaaagatatcattaagcataataactaataaaatcatacaaacaacctaaatactttcgtcctaaatcaatttgcatccataacaatcaaaaaatattcaaatctcacattccagaattttgattcgaattcatagataacaattatagatgatcagtaaataaatgtaaaattaaaacagattgtgtggaattgaataaagagaagaagaagaaattgaacattcgcattaatccataaaataaattcaagtggttcacataataatcattaaaagaaaattagctactaaaagtcattctaagaaaatagaaatcctattaaaaaaacataaaagatagagatgaaaagatagaacaagtcttccagtggtgccttctgctcctagccttcatctatgcttagaatttgctaaattttttaacggtattagatttaagctctgatcccttttaaataaaaaattaggaaggtttctcaaaatccttcaatgcccaaaattagtctccaagttcgaatgatataggaaacctagctccaactcgttttataaaaaaaaaattagaagttttccgttttctaagagcttcggctctctcgttttttgatttcctactatgatgactaacagtattttgaccataactctattgataaagctcagagttagacgattcaagatgtttaaaaacattaaaagagagatttagaactttcattgagaaagtttttcctagaagtaaatggatcatagttaaaaattagattgatgcttaagactttatttttaatcacaaacggagcgtgttgagcatctaaaatttagaatttttcacccattgtatcttataactccaaaattcacgctaaattcataaaattcatattattagcattttttctcttattttaacccacatgatataattaattattaaaacctgaaacaaataaataaaaaaaaaaacaagcgtaaacctgaacaaaaataaataaaaattactaaaacacatactaaagtggactctaaaaatacataaaaataaatctaacactagctatattaattaggctaattagtaattttcctcccgaactattgagattgttaaatttaaggacttttgtctagtttcattcaattttactatttcagtaattgttt

SEQ ID NO: 37477 - DNA, 2074 bp, Cannabis sativa
atgaatgatgattctttttatttttttatgactggtatttggggctatgatgtgatagctaatgagacagttttatgtttatacacactataaatttctttagaatggtaatcttgtggctagctaagcttaaaataagatgatatcaattttattcatgatcctatattgtacttgatgcttaaatctttagttgccgtatacatgtttgagaatgactttaaaatagctgagttgttaacatttttaagacaacattgtaaatggatattccattcaattcaaaaagctaaaaaaatttgttccactccttgaaagagctttagaaaaagagatatacaaacattaccaataacaattatgtaaaaaaaacaatggtttagtctctgccccaaaaacttgtataaataaaactaatatgtactaaacatacttacatcatagataattgggtactgcttcatgaacaacttcaattttttttcaggcaactgcattatataaacttgtggcagagcgaggaccatggagttccttgtctagatgggcactggaagcatacttgaaaggggatgttggtaaagcattattcttgtattcaaggatggctgacctaggttatgaggtagcacaaagtaatgccgcatggattctcgataaatacggagaacaaagcttgtgcatgggagagtctggattgtgcaccgatgcagaaaggcaccagcgtgcacattttctgtggtggcaagcttctgaacagggcaacgagcatgctgctttgctgattggtgatgcatattattatggccgagtatgtcttttaaaatatattataaaagtcgagttgcttgatcctttttttttaccctctcattttaactaaagctttctatgtttttatacttccttaaatagggtaccgagagagattatgaacgtgcagccgatgcttaccagcatgccaaggcacaatctaatgcacaagccatgtttaatcttggttacatgtatgagcatggtcaagggctacctctagatcttcatctggctaagagatactatgaccaagcactagtggttgatcgtaatgccaaattgcccgtcacactggcactcatgagcctttggatacgtaaaaactatgccgatagtttcctggtaagtgtccttccccattagtacttacttgataaaaccccatttagaatatttatacaaagaaactaataatacttgagcatgattgtcattattcccattagtagagttttcagtgtctgctcactgggaatttgggaaaaatcttgggattgctggaatttgctgaataatcaattttaaaggcttttaaatcttagtgcaaatatctacacacagacactaataaatggaacattttaaaaaatatatgttttggatttgtagcttttgttatatatccattgctccccaaactttcacatgtactaaatcatgttctcttaacttttcacacggttaaaaattcctcccaaagtatgagattgctgggttcgaggattcgttcaattttactttcataaagattgttcatctattaaattgtgccctgtgaattttgatatctaccatatcttatcccttgaactttgaagtgtaccaaatggtgtcccttaaactttcatcctaacggaaaatgaaacaaaattttttaaatccaacaatatcaatagttaagaggaaattttaacggattgaaacattcaaagagcacaatttagtacatgtcaaagtttgaagtaaaaattgtaattaacctaataataataataataaaaagtctgaattttactgtaattatttggtgaaagcattttgggtgtaattgtaactaaaattccaacattttttacatgtaggttcactttattgattcattacccgaagcctatccgaaagtggaggaatgggtagagaatgtgctcttagaggaaggaaacgcaactattctaacacttttcgtctgtctcattaccgttctatatcttcgcgagagacaacgccgacaggctgttgttgtagccgccgcagctgc

SEQ ID NO: 37478 - DNA, 5270 bp, Cannabis sativa
ctgatgcctgattttgcaaatgttgcacccaacatgctcctaactcccatctgatagatttcttttgcttagtgggttcttcctgcaaccttgataaactttcttctagtacttttcgtaccaacgacttagcagactctgaattttcatgatctgaactctgtagtttttgaggtgaagaaaacttgtgtaatagcattctcaggctgagcaagtgatagaaaaatatgtatgagtaactataaacacatacaaataccatttaactgtagaagaaaaaacccaaattatgagtgtttgattgattttcctttctaattattgcactacaaatagttgaaatacctgttgacgttcaaggcattggcacctccttcaggctggtcctcaatctcaatgtcctgaggaataggacttccctcccaatttacctcagcggaaacttttacaacggctgtgaagccacaatgtctaagaactacaacacctaaagtcgcagtatcctacaagatcaaatgatgttaaaagataattaaaaacgacttcctatgagattatagaaagcattgacagcaaccaacatactcacatgaacagttgcactttcatctgctgtaacacctttgagtaaatttctctgagcaagctcatcttgtgacattccaagaacctgacttccatcatttttagaatccaacttggtacttgcatcaggcacatctcttgtcaccttaatgattacatccccaaatctttcctcgtgtacaagggagacggtaggatcattcaaggagtcttggttagtgtcaataacactcctaattactgcaacagcttgatgaacggacatgtcaacaaataggctgtgaagcagaaaggctttcctatctctaatttgccgctcttctgctgttttacatggcattgcagccaaaactgcaaactcttttgcccaaggcctatgatcacgttttccatctcttccctgtccaccaccatttccaccccagttttcgtcctccacaggaagcggtgggaaaactgaaggattatcagcaacaacaggaggaacaacccatgtgtttgctcggaaaccataaggaagattgccaaactaaaatgtaacaattgattaagtctgttagttatcttttaccaccaagtgataggcataaaattttcatcagagtttaaattataccttattgtgctcagtaaaagccttcattaaagcattgtatgcctgcaagcaaaattgcacttcaaagattactagggaaacatacatgttatataattctaaaatactcttttgaatagaaacttagaagacataaaactgtgaagaacaaaaacataagaaaaggagaaaatggggacttacagcttcaaatgccctgctgatttgctgaagaagaccaatcaaagagtgactcaaaagaagacgtttcccagaaggataaaaccctttccttgaggcaacaattgtcgttggcttcccattacatactcggacctgcacatacagttacatactattttagtgttaaaacactacaataaaccaaaaataaagtcctcaatttgaatggtaataataacagtagaaaaaatctatagcacacattcaaatgggtgttttagtacatcacctatctatttcgacattttgagaattttttagtctaattagtcttcttaacattagtgtacgttatagttagttatgatatgagtaatttataaagtttagattgttgcttgaacccgaataaccacaacaaagtacacaatcatcaatttttttttttttgtctaaatgcataaatagactttctgtaagaataagaagcacagagcaaaataagctagcaagaaaaaaccttacgtcaattttgaaaaagtcatcttctgtcttatcctcatgaaatggacgattagaccttcgaatatctaccaaaacaaacaacacaaaacatcaaatcaaaaaacacattctcctctccatacaaccatttccacaaacacttcgtacgccacctaaacagaatcaatcataaacaacttctcaactcacagtgaagaggaggcgtgaggtgagagaaagagaagaaatcatagaactgtccaagcttcggaggcggacacatcgagaccgccggatctccacagtctcctcctccagtcttcgcctcattactcgaacttttctgaacaccaccggcgatggcggttgttcccggattcttgtcgccggcgccggcactgacagttgtcgtagtagtagtagtagcagaagcagcatttgaaccggtttccgtgtcgttggaagaagattccttagggcttggtcggacggcgagcttggaagaggaggagccgaaggaggtggtacaggcgactatatcgagaagccgccgtatgtgagccaccgccagctcttccgtataatcctctgttaatattaaataaataatgagcaattatagtgtacggttaattgcacggtaagatgggtggtggtgagagttttgattgaatgaggttgggtgtacggtgtaccttcaacgattgtgaggtggcatggtttaagagagaggatgtccaccgaatctttcagtctgggtcctcgcacctgatcaaaatatacatacaaggttgagagagagttttagtttggtggtgagtgctcacttcaatgatatttgtttttttctccttaaaacaaataaattaaaattcaatttacataaataaattgtcaaaattcattaccatttcttaacaaaaaaaaaaataattatataaaatactaatttttttaaaaaaaaattacatttttacaattaaataatttttttttatatatttttacaatttttttttagagaaacaacactaaaacaacaaaaaaattatataaaaatagcatgaaaataacattaaaataacaacaacaaattaacaagagtacaatataaaaagatcgtattttctgtaaataaaataaaaaaaattgtaaaaatatttaaaattctatgaaactgtatttttgtaatttttttattattttagtgtatttatgaaataatttcaaaaaataatatactgaaatttatattttgagaaaattataaacttaatgtatttttataaaatatttttttttcatttaaaaagttattttatatgaaataaataatatggaagaattagttgaaataacaattattagacaattaccttaaattatttttcttttttttttttaatcattatttttttttagaaccaaccagttaatatgtgaatgcacaatattttatataatttacacaaaataataaatttaaagtatttgttttgtattgcaaactgaaacatataacaaaataataaacgtgtccaaaaaaaaatcaatattaaaaatataactaacatttctatacgtatttattagactcaattctcaattaatatgtagtcatattaattagatgcacaaatatgcaaatatatctatactagtatatccgccgtcctatattattgaataattaatatcaataaacaaaacagattgagaaattaaaagatttttttttttttttggtatatttttgggttaaatggcatttaatttcgggtgtaaaaaaacaatttattatgtaggatttgttatgtaattatacttcgaagaggtaaataaataaaaataaaaataaaaataaaaaataataacaatgtcatctcaattctttttcttaccccttcttctaactttgtaaattttttatcttaatacttcacataagaatatttataataattttaaaaaatatgttttactcaataataaaaataataatttaaaatatattaacatgttaaaagtgcaaaaaggagtgacttgttttaccacacatatgaataatatacatttttttttacatttttggagaaattaagtttagactttctatttctgagaagaaatgcataccatgttttcaatatttggttctataatttcaaattgtacaatactttggtatcatgagtttaaattagtcgacaaattttaacaatatattaaattaagtaactaatttttttctcaaaaaaaagtaactaaatttgaattgaaaatccataaaataaagggcaatttagtcatgttgataaaaatttgagttcatattattaaatatatgtataattttaaattacaaaatactaaacctgtattctgataaaaacacaaacaaacattcatccaaaatacaaaatgtattaaatggtgcattttctttattactaaatactcaattggaaacttttcacatgaacaaaaagtaagaaactcaaaatctaactttttaaaaagtagattttgttcaacaccaacaacaataataataatggtagaattatgaaaagaaaagagaaaagaaatagaaattaagatgaggatactatttaaagctattgtttaaagtaaaaataaccaaaaccaaccatataattaaaataagtattggattattaattatgatagttgttaattaagagagagattagaaggatggattattaattagtggtggtgcaatgaagaaaagtgagtattaaagattaggtggggcccagaagatgacacgtaagcagtgtcggaatgagaaacaaaaccaatataaatatacgtacctcatgtgataaggagtaattggtcaaatgacatgtctccacatgcactcccaacagctttctcacatctaagatcctgtccgtagatataccctaccatatgatatcccataaatttataattaacaaattattacatacaatacaatacacccaaattaattaattaaataggtagtaataaagaccatttatcatctattcaaaaaacaaatactaaccttaagggtcacttgtgactcttctggtgtttcaaccgaaatttcaattaccgttggcaaaactgcaaaacaaaatattagtattacattacattattattattatttaagaaactacttttaaaagctgtatacatatatataacatacacttaagtctaataaatattaataatacgatttttcaacttggcctgactgaccccatatgagctgaattcaccactaattaatgataacataaccacataaaagtacataaatataataataatttttgctctttttagaaacaaactgaaacgaaattataatacatgatattacatatacagctataga

SEQ ID NO: 37479 - DNA, 2147 bp, Cannabis sativa
atttgtcattaagaatgggaacataaactaagattctagacatcataaaacccaattatgaagacaaaccttagaaagaaaatttgaaataatcaaatttgaaatccttggccatgtcaatctcccaaaactgtgtatccaagatccatttcctaagcatatacttttgcagacaaacttgatagtctgaataattcctgaataaatagtctccccctcattctcaacctgaagattggcaaaaaatatttcagtagaacacccaaaactcacaacaagcataatggttacacaaccactttcaaatagataagctacaattgaagattttccttctattcaatctaaccacagaactaagtacttgcagctggctcggatgcttgagtaagtgaatgaatggtccagagttaaagcccccccataaatatatctttagaaaaatacacattatgctagccaatatattcaagcaatcaatcaaaagcttagaaaaaaaaaagagcagtctaccttcgaaacacttaacggaactatctttaatatcgctcccgtcagttcctcagagtcttgaaccaattcttctataaatgaaacaggcgatttgtaatttacagccggagagatgacatatttgatcaacaaatcggctacttttgccagcccatagtccaaaattccaattacctatcaaaaaagtaaaccacaaagtaattttcaccactaaatccaattgacacattgaatccaaacataccatagttacatagtttacacaatcaaatctcatatccgtaacacaatgttctactacacacaatgattcccatgctttaaatcattaattttcactgagtaatgggtgataaaaattatggcattgtggttaacttacgtctaaagcctccagaactgtacggagctcaactctatcaattccgccgtcactaagaaaatattccactcgaactgcattcgattcctgatcaaaccgcaccgcctttgccatgaacttcaaaagaacctcttgaatctacaaaccgaaatcgaattcctctaaaaaacacaatcagaaactcaaataaaaatcaccaagagcaaataaatatgaacatcaaattagaaacagaaacgcaatacgatttccaaagaatgaaactcaatttccattctaccattctcctgtacctcatcgaagcaatcataccactctttcctcaacaatccgtacaccacgggctctccctcgtctacttgatgatcaccaccattacaggtcccgagagccttcttcaggtccctgagttcctcggctgcaaatctcaaccgcttacacctcaaggcctcctttgcagccatcaatttctcgttgatttctacgatcatcttcaccaaatccaacaactcccttttcgctctaacttgctgcatcttcgcattcatttccttgacggtgtcggaaatctcggcatcgatcgggcggtcggaaatggtactgaggaggttggagacatcgccggagattcggtcggagcgggaaacggcgtcattggaaatggagaagaggttagagaaatcctggtggtgagagatgatgtaagactggattttggccttgatttggagggagtgagattcgagacgctgtatgaggaggcggagatcgggtgctgagagcggtgtggtggggtcactgaggtcgtgcgcggataggagatcacgaacgttgattgagtcaaagagggcgtccattttcggatgatccgacggctccagcttccgggaagacggagaagatgaagatggaaaagctgttcacggttcagagtatagtttatgatgatgacgaggctgttgggtaacaatggccactgagtctgattcactttttagcaccctcttaccaaatataaagcccaagttttatggcatcgcacgagagagtgttaatattggaaaattaaaaaaaaaaataaataaataaaaagtatggtaactagttacctatttggttacccaaagtacctgattaatattatctttattttctcatatttctaaacctttttctcaattttcctatgaaataaaaaaaaaaaaaaaatcatatttttgctatttttaaaaaactcgagaccgcagtcgtc

SEQ ID NO: 37480 - DNA, 2341 bp, Cannabis sativa
  modified_base (1829)..(1830): a, c, t, g, unknown or other
ttacatttttgttaatggataaaagtaataaagaatggaaggggtttccagcactgcccaccaaagttccaaaccaaaatttcgtgcaaccacatacttctcagtccatgagtttataccttttctcttggactccggcaactcccatttgtatctctattatagtgtgaagtggtatctgagatagaacaagtacaataagtaaaagaactcataataacacaaaatcttcacaaaaaaatccgatttgcaaatcctgcggttcccaatttcttaggtattaaatcaaatatgttgatttttttattttaaagttataaattacctcgatatggggaatttctttaagaggcctatcagcaaagtaagcgtataatgccctcaatactgcctgtaataatattaataaagaaatatagttgttatactttgtggtaaaatattagaaactgaaaaagcaagttcggagtatatggtgaccaacctggtgagatattaccacgacaggtgctcgttgacgttcaagttcaataattacaggctccagcctgcagttacagttggactttaattcaagaattcattggcatcaaaataatttaaatgaaactaaatttcaggattgcaacaatgtcaacctttggataacatccagataagactccccacgaggatacctgtacctcagtttatccttcttccgcgccctgtaagaaaaaaaaatgatagtaaaaagaacacagtattgaaagagcccacaaaaatggttttaagaagcgggtcatgatttaagagagaaagtgagagatgcaacatactcatactcctctggcatgttcttctttatttcctcgtatgtcattccatcacaaactccagcatttatctcatccaaggcgcgccattgtatctataattatttttagaaatggtgaaaccaactaatctttaatccttggttataataaaacaacagatgtaatgtttgtttgattttaatagaatgaacagacaaaatgacatttacagggcatccacttagagacctttttagtcttaccttggggaatccaggaatgtgactcgctgtcagaatagttcgctgcagtgtgctagtccatatctagtcaatgcaaatattgaccagtttatacttaattgcatttacaataaagaggaagaaaacttaaaagaaattacatcagaagtaaaacattagaaaattagaattagatatcagatgattaatcaaagatatgatgcttacagaagcagcacgttctgatttcagccgcttttcgacaaaggtatatagcttctttgcgtaaatctctccagcatcactgttaaaaaaagtgattgtttctttctagtaagcttcctcaatcagttggaaataaaatttgacaaaaaataaatggtgcgttgggtaatactttttttaatcagtaaagtgaaaatattttccaaaatcatgttctttaaaatttaaaactgtttttatttttcaattttttaattaagaaactaaattttaaaaacaaaaaaaatcactttttaaatttttttaaaccgatttttcttcatcaatattttggactccgactccaacttagaccttggaaaccgaacctggacctagcccagacttagacccgcccccaatctcaatcttggacccggactcggacccgacttaaataaaatcaacaaatgaaaataaaaatgaaatttacaaaacgcttttgttttttaattttaaaattgaaaaacaaaaatagttatagagcacatttttgtttttcaaaaacaaaaattttatttttatnnttgtgattaaaaaatttaaaaacaaaagtactaccaaacaccaccatgaaaatgaaatgaacatgtcatagcataacgcattcaaaaaacacaagcagaatttaacagcacttttgaaatatgctagcttcagcatcatatccaaagcagcctattcaatgtctacaacagggttctttaaaaggacagcaactgcagtgcaaggcgttctctttatttgattttagtttttgtttagaaaactgcaatgtgttcttagtttagtctttttagagattctctcaactcaaggaaaacacaaacgaatgattactatgcagcttaaattatattcagaaattttttattttaccaaaaagttcaaaaaatcaggtaccattggaatggtgcaactccgaggaacaaattgaattttaatatacagtatgacatttgacatatatattttttaggacaagaatataatgcaatttcaaaaataatatatgaactctatattacaggaaaaaaa

SEQ ID NO: 37481 - DNA, 3384 bp, Cannabis sativa
tatgtatttagggaaaaaattttaagattttctaagtatagaaaatcaaatttcccttatagagtttaaagaggttaagaagtgaataagtgttagctatacacatgtgtagtgtggtggcataatatggcaaacttgaaattgttttgattatttgaactcaattttggggaagttataaatgcagctcacatgatctgactcctcttttgttttaacagatctatgaacagtcaaaaatgtcacgtgccttcttattatgtacaaacttcaacactttaacacaattttataaaatattaaaatatattttaggaaattcaaatagtatacatttttttttattttagtaaactcttcatatgttttaaaaaaaaagttagtttttttttttttttttcataatcacttgcgttataactatttagaattatttgtaaatttttaaaaatttcaaatagtttacaagatcaaaaataaaattatttaccacgtgtataaaaaaagataatcgtacacaataaaatatttaactttactcgtaattttttaaaaatttataattattcttaaataattataatatatatgatgataaaaaaaattctttggaataccacaacaaataatgaatttatcaaaacacctctttatagatgtgtactaacgacttgccctatattttatataaagatttctcttataaaattaacctcctcttctactcggaaacccacttatcttttctcaatctttcactaaattaaaataacactaaattaaagtactatagacctaacttaatcccataatgctccactaccaaactttggtttcccataacctatatgtatatttacattccaatccctacttacacgtactcttttacacacataattcaaattaataaatactaaatagcaagaaagaaataagaattagaggaaaaaaaaaacttaaaatcatttttagactatgggtatggcccctttgactaaatttaacttttgctttttatacctaaatttgtatgagataataagtgaaattttgatttattattttatttaaataattgttcatatatttataattatttttacatattttaaagtatttgaatattattaaaaaattataaattaaaatattaataaattattctaattttaaaaatagtttttcaataactatgtcttttttttttcaaaaaaaaatatccaaaaataatttcaaaattattaataataataataaataacttttttacttttcattgaaacacttctatttttttgtatgcctaaagatatatatgggataaaaatacaaatttatagagttattaatggatcaagattgtactatatatataaaaaaggctcaagactattacttaacaccccttcttcacaatcatcaaaaattatatacaattgtaaattttccattaaagaaatggcaaattagtaaaatcatttacattcccttctcttctataaataacacatctcataatcaattcccccaacacgtgaaattctcatttcaattttttttttttttttttaaaaaaaggcacgatgtcgtcatattcaccctcgtccgtactcctcctcctcctagtaatattcatcttcggcggctcatcagccgaagccgccgaagcaccactatcgagcgcggcgaaggagtatctccaggcgcacaaccaagccagagccgcagtgggagtggagccgctagattggagcgagacattggccaacgcatcgagccgagttgttaggtaccagcgcaacaagatgagctgcaatttcgcgaacctgactaacagcaggtacggcgcgaatcagttctgggccggcggcggctcgagcacgccgcgtatggcggtggataagtgggtggaagagaaaaaatactataaccacggaaacaacacgtgcgctccaaaccacacgtgcggggtttatacacaagtggtatggaggaagtcactccatttgggctgtgctcaagccacgtgtaccaaggatcagaccacaatcgccatttgtttctacgatcctcctggtaattatgttggagaaaccccttattagttgagactttttcaaccttaattaattaagtatgtttaattatatgtttagtgggttgtattaatagtagtagtaattgtgttttattttatgttccacgtggcacgtgtaaaccttaattaattacgattggttattattataatttagtagtgtgatatgtgatccaaaacttgtgctgccaaagatctaaataaataatatgaccaaaccaaccgacaagtaggacgaaaaataatttaactaaatttataagaatgacagaatggtggggtcatgtggtaatggtaatttataattgaccttaaaaaggatatgtaattgtgaaatgattatatatcaatcaatgtattgtattgaaagagttgttttgatatatatatatggtatggagtatggaatagtgttttttatgtttggttttggtaccattattattgagtattattgattgttagttgttttgtttttattgagcaataataatttattaattttgatatatattgctgtcttgttctataacactaaattcaattggatgacttatttgatcttttcagagtgagacatcactaacaaattaattacactcttgtgaaatgagaatgtgcattgataaaagaaaaaaatagattttttggttattataaaaaatattaaatgttagttggtataaaaaatatcgataaacaaccatactatttatgagtgaaggttcactttatcatattatgaactatgaagttataaattctaataatactagaaagtaaacacaatcacattgcaactatgcatttttaactcgtttttcaatcagtttcttctagctattattcagttttatgtgactttaaaatgtgtttggttgaactaaagatgatcaaattttaatatttgtttgtttgtttgtggggtattcaaagtttaattgatcaatctaataatatgtaccatatattttgcaaagtgggaactgtattggattgaaaagttaaaatctaacttttgatgtttaacataaccacactatgtgttgtctggtgtactagtaggtaggggacggagctatatattcagattaatggacctcaaatataattattttaagaaaaaataaaaaaggattttttcaattaaatttttataattagttttttatttatttataaaaatagaaataacataattttgaaataataatagcataaccttgaaatagaaacaacataagctcaaaatagaaataatttttatgaaaaaaaaaaaaaaa

SEQ ID NO: 37482 - DNA, 3365 bp, Cannabis sativa
ggtatggatgcttcctctgagaacagttttgatgaaacctctttcaaggatgagaggtttccgaccccactcctgacgatagtaattttcttacttttacttgtatttagtacttataacttgtattctaactttgttattttcttttttgttcatatggcttccaggatgaaaaacctggtgaagaggtcctcaggtggctcttcttctggtcggtctcatgccaaggtggccaagactattgggtcttctgatgtgacccaaaatggcttgcctcctcctctttcaggtcttccaccgcccaactagctcgtggttatatatcttctttcgagcactgctcttcctcctcctccttaaagaccatcgggcaaggcagcccaaaagcacagtcgggcaacctgctcaactaagcgtgagaggatgaaagatattgcgcacaactatataggcaaatgcttgccaagtgttgatgagcaactccaggacttggatgttgacaccctgaattatctaacaaccaacactcttaaagatgttactccgtaagttgtttatttgtcttactgatatttttcatgtagtcctttcatacaccttttcttgtttattttttatttcagaccttgttgaagcttagccatgcccatgacatggctaagggctctactatagttttcaagaagaaacttgagagtaatgatgccaaactcaaggcaaaagaggctgagcttgtagaggtgcatgctgatctagatttgacatcgccccagctgaaggaggtctaggatcagtatgacggtgttggtcaactacttggtattcataaccaagaggagataaacatgacaattgataactccaaactaaagatggaattggagaaggagtgcagcaagaagcatatagccctcatagagaagcaagaggcccttgatgggtaataagcgatcagagacgagtatggagacttgtccatagaggtcctttatgaggtatttcttcataaccctgaggccaatctttcatacatggagttgtcccttcgtgagagctaacttgctcgagggagggtgttatatgagagtggtaaccgtcagaccaggccgcacagggtgatgaggtgctggctagccagacccttaatgcttctaccgaccagcctactagagcattagccagtcaggctatggatgagatgccatctggctagccttccattggccagactacagagtctacatcaaaagctcaatctgtcgagcgtttggttgacttgaaatcgcctacccctgtgattattcctgaagatgtctagagacttatgttttttttatgcttttattttgcatactttattttttgttcttgtatggcctataggccctttacttttgaacaatgttcgtgtatggcctttggaccttttactttcaaacaaatgactggatagacggtctttaatcccagctttaacttcttttgttagacatgtaggtgtctaggcttacatttttttatgtctaatctgaagtatgtcattcaaacttacttagctttcaattttttgcttatcaaagctttaaattttgcttaagtttaactgtgattgttcgatgttgtacggtgtgggtgcccctaagtgatcgagcagacttatggtctcttggtcatttataattcaccaagtactatagacctttgcctgtgtattttcttgtagggacttatttgtatgcatgtggaactaaaataatgaagattaactttaagaagttatcttgttagcaagttatttgacacaattttgaactgaaacaatgtttttattcattaattggtcttacatatgtgttgttgttgtgcaacatacattttttttattctaaaagcttacaaatctaaagtctgcttctaaactcatttttttggctattcttgcatgacataccaaacaggggccaccactaaatagtggtagaaacttagctctcttacactaattcttatacagtgagctatacgggaaccactattgaagagtagtgtttttacaagttgttcattggtagtactttctgagatgttctccattccactaccttggtagggaaactaattccatgctctcattatacctgccaagcttgtatgcacctttactcgttatttctgtaacttggtacgaacctttctagttttgtctgaacactccggatgcaagatctatggtattcaagaatactttcgaagcactaagtctcctacaaagaatttcttttccttgacttgtttattgaagtacctgataactttttgctggtaggcatgcagatttaggttggtttggtctcttctttcctttattttgtcgagggattctgatagcaaggtgtggtttgcttcttggtcataatggttccaattcaatgggcaacattgcttcatatccataggctaatgcaaagggtatctgactagtggctatcttctcggtggtcctgtgtgaccagagtacctctgggagtaagtcaggccaattgccttttgcctcttctagacgctttttcatagtgtctttgagggtcttatctacagcttctacttgcccatttgtttgaggatgcgtaactgcggagaaacttttaatgatgtcatgtctgttataaaagtcagtgaagatatcactgtcgaactatttcccattgtctgacacaatctgctgagagagtccaaatcgacatatgatgctcttgacaacaaagttgaggactatcttagaagttattgtcgccagtggctcagcttctgtccacttagtgaagtagtcgactacgaatacgacatattttacacccatttttcccttagagagttgaccaattaggtctattccccacacagcaaagggccaaggggactgcattagtgtgagctcgtttgttggagatcttgggatctttgagaatctttggcacttgtcacatttattgacatagtccattgaatcatagtatgtgaaaaatacccttgcctaagtatcttttcagaaattctttgcccgcagcatgattgttgcaaaagccttcatgcacttctactaagtgttgtggaatctgaagtggctctcttaagattataatatgagaattgggttggcaaatctcatatggcgtgtgagagagagaagagagagatgagtttcaaacttagagcttcagagcttagaactgagagcataagacttaggaaattagggttcaactaatgctctttatttagtagatcttacataattaatatcccttgaaaataggtaaataaagttatatttccataattaaataattgtaacaccctaacta

SEQ ID NO: 37483 - DNA, 3643 bp, Cannabis sativa
agccttttattcgtaagtttcgatacagatttcacttagaaatttttattttcacgattgtccacacacttttgagaacataattttagtgtattggaattgattagtcctactaccatcactacataggtgaactgttataaatcttggttttttttttttttttttaaaattttttgtgattatatttagccaaattaattcagcttagtgctttcacttttaacaattttcttagatgagttaaagaaaaatcgcattaacacaacttagtacaaatattaatttttgagtattcttctattcctagacattttgccataatttaccgtttccttctttgtccaacttgtttatggttggagaaagaaattgagattttatcaaaattcttgggcaagaatcttaaagaatgttcccacaattcggtgccactgcggagactttgagcaaggcctcaacaatggtgtttcgaatcggcacggatgcccacctatacgacgatccagaagatgtcaacatacctcctctcctcgacagcaaattcgactcggaaaaatgcgaagctctaaagcgcttgctcgctctcatcgctcagggcttcgatgtctccaatttctttcctcaggtctgctcgattaataaatactgtcgaattttattcatgagatcctctttggctgcttactaaagaaaatcatgaaattgatgtgaaaattgcaggttgttaaaaacgtggcgtctcagtctttggaagtaaagaagctggtttacttgtacttgttgcattatgctgaaaagtatgctatgttgcacactgtaatttctgaaccactgcctaaaatttcataatattcttactacaacattaactatcccattttgtcgaacaagactagatatttcaatttaatttatacttcttacatgaaaattcatttcttattatttttatatgttcgagttgtctttgttttagttaataatgggggtcttcttttgcaaattaggcgcccaaatgaggcattgctatccataaattatttccagaaagatttaggggatccaaacccattggtgagggcatgggcgcttcgtacaatggcaggaatcagactccatctcattgcgcctattgttctggttgcagttggcaaatgtgcaagagacccatctgtgtatgtgcgaaaatgtgcagcaaatgcccttcccaaactgcatgatttgcgcctagaggaaaacacagtgacggttgaagaggtatggctggcttttatttctattttcttttgataggataggagtagtgatatgtggatccaaaatatgcagccaaaaattatacacacccgtgtcacatcactgtatttagcgttctggttcatattttaagtgcacataccattacactttttgatagctatagttatataacaaaccttatatattttagttttaaaaatgcttggatgattatcacttatcgaaatagattgcgttcaaattttatgttgtatctcttaaaatataccaaagatactattttataatcatagtttttcttcactagatgcagttttacagaaaccaagctgtctatgcaatcacactttttttcaaaaggcctatactcgtttcttagcaaaaataaaatgaaaagagtttaacaatgctcagttttcttgcagattgtagggatactgctaaatgatcattcccctagtgttgttggagctgctgctgcagcatttgcttctgtttgtccaaataatttgcctcttgctggaagaaactttcaaagattatgtgaaattctgcctgatgttgaagaatggggccagataatcttaattggggttcttttgcgctatgttattgcaagacatggacttgtaaaggaatcagttatgttttctttgcaccattcagagaattgtaaatctgaaaatggtagcttggagtcagagatgaagttcccgttggcagaagacagtaattatgaatctgaattagcacacatgatctcccactgctatattgaaggaccggacaaatatttatcaagattaagtgacatgaataaagatttttccgaaatcagatggcagtgtgttacatctgttagaagtaatgaagatgtaaagctccttctgcagtgtaccgcaccattgttatggagccataatagtgcagtattactagccgctgctggggtacactggattatggcatcaagggaggatgttaaggggattgttaagccactattgtttgtcctaagatcatccattgcctcaaattatgtggtacatacatacatttccttaacttcattactgtagattaatttacatgtgggtctatttgtgttttgtacattatttccttcttgatctattgtgttttatgtagttgagtttcatttcttagcagtatgttcaatgttgttgtggattgcttcttcctagttaatttgttttatattataaatcttcccgactttaaacagactttgtaaagtattgttcttaaatgttgaacacaagaaaagctgattggtgattctcaatgtgcaagttgtaaaattagatattgtattgttgctactattatgctttttgctgtttacatacattgcttccttttttctggtacactttataaagcatttttcttaaatgttgcactttttttttaatgttccacctgagaaaagctgattggtgattttcactgtgcaagctgtaagatcattagatattgtactgctgcttctaatatgtttcttggttgcttttaacctacatggtttcatttctcttggtgcatgttttatcggtctgtcagtttggaaattttggacaccttcattggccagtaatcctataaagatcttgttattcttagtgttctttaatatttccattattttaattgtggacattgatagtgaatgtcgtttattggtttactcttcaggtcctttgcaacattcgagtgtttgccaaagcaatcccctctctctttgctccctactttgaagactttttcttatgctcttcagattcttatcatataaaagcgttgaagctggacatactggcttctattgcaaccgattcatcaatttcacaaatatataaagaattccaggtaagtatttttatcccaccccatgagaaagtattccatgtaggatgtgtatactcatagatgcaagcatgccttagtatattttgctgatttattatgatacacactgatcaggaaaatcacagaaggcagaacaaattcactatttttttttattatttttttataaactagggctggtattgtaccaagaacgcgagagataaactagtcatttccagaccacacacataccccctaaaatttcttagactgtttccaataaattttcgttacattcctctcttctattccatatcagcacaaacatacaataaactagtaaaagagtcattaaacagagactaaaagctaactcagttatttgttcaaaagaaaaaaaagctaactgagttatataaatagacccccaactcacatacggtctaattctaaggccactttaactaacaaatacgaatctagttctaaaactcctaaatcgtagttg

SEQ ID NO: 37484 - DNA, 7407 bp, Cannabis sativa
  modified_base (78)..(88): a, c, t, g, unknown or other
  modified_base (4201)..(4210): a, c, t, g, unknown or other
aaataacaacaaaaaatagcatactgataacaaaaaatcaacaacaaattaacaagattacaacataaaaagaccgtnnnnnnnnnnnataaaatcaaaaaaatcgtaaaatgtttaaaaatccgtgaaaccatattttttgtaatttttttgttgttttaatgtttttgtgaaataatccctatgtaaatattacaattaacgtactttttattattaataccaatgcacatatcataattttatatacacaagtatgttttactaatcaagtacaataacacaaagattactttaataaaacaaatcattcatataatcatacctttagttactaaaatctaaaaaaaaaaccaagaaacctaaatcttaaataaaactaatatttacgtggctcggcacgtaacattcacctagtgtatatatatatatatataacaaatgatattgttaaaaaaattactaataatgataaaaaaataaaatggaactctctaatctatgtctattgttatctaattatataatcaaattatatttgaaaaaattataactattcttaccattaaataaaagaatataatagtaattaacaaagaaaatcagtaatttttttgtaatttactttggaaagccaaaacacatattctcttttatagagttatgattatagatatatatatatatatatatacattgttgattaataaatataggttatacttctgcacaatatagaacataaatattatggtttgcagtactatggatcaactcaacaacacattggtaattgttattagctggccaatgagggtgagatgagatcttgcaaatcaaagagaatatattattgtggtttcatacttatgatagtactgcaaatgcactagatgcgccggtaaaatatacgataggggagtccttttctttccttgacgagccaaagtgccttagtctgtacacaccaagcataacatcatctggaatatcccattctatattagctaagctgtacaaaccactttcatccaatttgtatttaaagaacaagctgaaatcatcatcatcataagctggaatccacccctgtccttgaataagagtctctacaacagcaaaagttccttctgtcaagagatcatagcttgggttggcactccaaaatgttgcatagggtctgttctcatgatcccctctcttaaagaaccctctctttggtacttttatgtcctctttcatatcaccaaacttcactcctgagggtggtgaatccccaaatggtcctatctgggctctacgttggatagtggaaagatcaggtggagagggacccttgctgattgtttctccagttgccattgctttcgctaatttcttaaactcttggagatatgctgacaatgtatgaggaccatagagagttgaagaagcctgaaagtaaattaatttgaggatgattgtgtatatataacaatgagtcatatactcgtttaatacattgtattataagtattgtattatttaataccatactatatatatttggtattgactttattaataggtggtgtaaaattatataatatttatcataaacccaactctgacctcgacccccaaatatagacccagaccttaaccttgacctcagaacctgaaccaataccccagacctagacttaggcaccaagccacttaattagaaggttacagaggttaattgtagcctcccaaagaaaaatttacatgtataaaatttgttaagaaaattaaatacattgattagcccctcttaaattaattatcttacaatttgtccccctaatatgtttaggttctccctccgtcggtgcctagactccggatctgaacccgatctcgaatctcaaccacagtctcggatctcggtcctagtcccgaatccaaacgcggatgaggacctcaccctggccctggactaggaccctgaactcaaactccagactctatacccaaacctagtctcggacctcggccccggtgttggatcttggccacagtcccgaacccaaatctgaattaggacctcgctccaaccttagacctgaaccaagacccatagatcccgaccttggatctagacccaaactgttgactctagacttggacccagacccaaacttgaactcgaacttagaccttgacacaaacctcaaatctggacttgacctgtgatccaaaccctggatcatttttaaatattataatacaagctaatacaaattatgatctttaaataataaaattcatattgtattaaaatttatagtagaaataattaatacaatactatattttgttatttagtataataggacgcccaccaaacgagccgcaaatattttatatgtatatatatatgataagttttactataattattacctcatatcgttgttgtgtgtattcttcaaaagtagcaatgtattgtgaataagtgttcgataaaccagctataacaacacgtgtgtcgtcttcaaattcacctctaccatagcttataagtgtctccttaactgcttctcttagccgtcgcccggccattgtagtaaactctgcaatttattaattccagtaactcagaaataattaaagaaaaaagattaattaacggcaagaaattcatcatgctcttattttataattaagaaacccaacctcctggaacagcaagtatgatcagatttcccaaccttagcatttgaattggaataatcgcaggctgcatgcatatttttatgtatatatataaccataccattaatatattaaattattgatatcaactctataattttctaatgttaattatctttgctatatgtagagtcttaccgcccatgcataagggtcaaacatttcaccagtgtcgagcaaaattggcttagggtgctgacaatccacttgatattggcttggttttttcaatatgtccctttcttttctccacttctcacttatctgtaattttcagaagaaaaaaaaagtaatatgaagagattaagattataattataattatataaatataatatgtatgatgactgacctctttatcaccttgctgaaagccagcgaaaccaggtccatcagtagttccagcagcaaaacctggtccaagagcagcaggacaggtatggactacgttgttgttgttgttgttatctaactcaacttcaatattagtgaaattaagatacacatgacgataatcgatcttcccactcacttgttctgtagccgaagtaaatagatcaacagccttttgaaactgtctctcgccaatgatcttggtgctcagtatttcatctggatacctgttaaccatggaaaaccaaagaagaaattcccactcattataaatagatatgttgttatactatgtacattataattagagttgacattaaaaaatgtgtacccgggtccacggcccaagcaaatttggttatcgccattacaagaggagtgattaaaatcacaaggttttccagtgtcagtgcaaaatgctcccaacacatttggtgtgacatctcctacattggattggcaaaaagctcccacgaatagtgacccgtcgttttttctcaccttaaaccctttgcttgtcgtttcaccgcatagccttcctccagtggctttaattcgatgcgctttctcaactatcttaccaatatcttatatgcagagcagagccatagaaaacttaatcaaacaaacaacaatttatagaatttggcacccaaggaaaaaaaaaaaaggtcattatatagtttgtctaagcttcaacacatctccaatagaagttgtctattgaaaacatacattttcttttttttttttccaaagaaaaaaagttatttttaaccagaaactttattaatttaatatttaaaatatgatataaaagatcatggggataaattttgcaattgtcaactatggagtactttttataaaaaaaaatgtatcaaatcttatataaatgagaaagaaaataaaataaaaaaaaaatattttagaatgatgtgttacttatgacaactataaatattattttttattatttttgacactcttacttctaaaatcactctaatagtatatcacttttaaaaatattataattatcatctcacacattattatttaatttttnnnnnnnnnnaattttttagttttaattttttattaaaaaaatattgatagcatcaatgctactgtagagcattcacacatatttttataatagtatttttttcttctaatagtataacatctcaatattttgtcacttcatctatctacctaagcaagcatctcttaattttttaccaatggagatgctcttgtagttagaagtataaaataaatatgagctttgacttatttttactttttgaataactattatataaaaaaaaatttaataaaaaatatttttgaaagtgtttccatattattaaaaaatgaattgtaaataaattaaaaattatgtaaattattttaatcttaaaaataacatgtgaaaagtctttttgaaaaaaagcaacaaattctaatttcttcaaaaagaatttttaaattaaaaaatgacttcattttcaatttaaacatccctcgaaggagttttttaattaaaaaaaaaaaaaaacctatgaaagttaagttaaacaagaagggaagatatattttataaaaaaaaagggggggaagaattacttggggttgttgataatgatttattagtagttgaatcagcaaaccagtcctcaaagaaccttgctgcagcgcccttattgtcaccactgataagcctgttgtttttggtcattgaggttccatgcgtgggaaaccagttgaagcttccaaggctcttaccgcttgcgctgtccacaaatttcaaaagtgtcattaagctatcaacgttgcttttgtatcgacctctttcctcctctgggtttagcagataagcacttgggctcctgtttattcctcccttttctacatcccctgtaagtgtataataatatttaaatgttagaatcaccctgtcctgttatatatatatatatatatatatgttctttaaaaaaaaaaaaagaattatcaccttggttgatgaaaattgaacctggtttaaggttttcatgagcctgaattaggctctgctcaattgcatttacaatagcatcaaatgattgttgtacaaaaccaagagatgtaacagagtaaaccagatactgcaaataacccccgggtcctgagtgtgtgtgaataccactaattgccacattttcttctctgtataaatttccgtacctgttcaacaacctcatcaaatatgtcagggtggtaatttatgttcataggttgtgttcgtgttcgtgccgtgtcaggcttaaagtatgacaagtaaatagtaaactcaaagttgacacattcattaatcttatcagaaattaaaatctaaacccaacccctttataagtgaattgatctaacctgacttgattaacctatttatataatatgttataacaaatttaacatgttcacatgtaatgaatataataaatttaagagtttatactcttatataggttattgttgtacgagttagacgagtcgacccgaaaatgattcgattaataaataggtcagtcatgtcaaccgaaaatgacctaaaccaaatccattttattttgtacacatttcaagtcatattgccgtgtctaacttaaattttcatatatatatatatatatatatatataagtattgctatatatatataagtattgctattaggcaccatattaggcaccagtagtgcctagtacttctagatatgtcgctttgcgaatggatagctatattctttaaaagttattatattaaactatgtgagacttaatacttacttcgaccatagtattgacatataagagggtgctaattgtaatttctctctctatatatattatatcacattcacataaccaaagtaagttatctctctatctaacatctatattctataccttgatttgatcctttccagtagtttaatggtgacgagttgtgaagccattccagagtcaagattaacaaaagcaaacctgggaccctgtgaatcctcatcggccactatgaaagtcctggcacgtagtcgaaaatggacaccagcagtggtttggtaaatgttagcatagcccatcatgttgaccccagctgcaggaccagtcatgtcgtagctcccaactccaatcaagtattccccattactcaccctaatcatcagattattaatattcacacaccaaattatcactagtgataaaacagaagagtagtggtaatggtaatgtattttcagtcccctcatgatgcctttgttttcaaaattgagtacgtatattgttacataatgaagtatatatatatatatatatatatatatatatattatctgtgtgtgtaattctgggaattttaggattcttctttccacaaatcaaacataatattccatgggttatagctacctttggtgctgtgattgtctttagtttgatttggcacaagagcatcttcacttggttgctccgaaagtgagtgattgacgaggtttttttcttgtcctttattttgaatattttgtacgtttaaccgccaaatagcatccaaacaaaacattattaagaattcagtgtttggtataattttgaagtttaaagtaagtaagactgtgtttggaaaatcactctataattaaaattgattgtaatagggagtaattactagataaaatgttattttttatataattatttactcatttatcaaatataaaaatcaaaattcatattgaatactacgtaacatctaaaattctaatataccttgtatttttaatctaagtagtattacactactttataattacatacttccaaacaagtcataatgttattatctatgtaattgcaaccttatttattaaatataaaaaataaaaaaattcatacgtaattagtacttgaaatttaaaggcattttatgttttaaaatagtgtaattattataataattttgctacttaataattatcaattacttctaaatgccacttaaatgttatgtagcaacttttttttaggaaaatttacggcaaaggtcttcaaaaagttcaatttgatacagataagttcttaacgtcgaaaaatagcggcaataatcactattagaaaattgagatttagtgactcacattgagtaactctaaatctatttagtgacacttcaccgcgcgtcactaacgagggtgactggaaagactgtttttagtgacacttcacgcgt

SEQ ID NO: 37485 - DNA, 4746 bp, Cannabis sativa
cataaacccacctaaaacactaattagctatagaaatatgtttattatatcataattcatgatgaacttggttttagttatatagtacttctattaaaatgtactaagattaatgtaacattcaatattcatcaaaatttaatagggaattttatgataattatattaaaatatcattgtgtagagagtttgaatattggttgaaacattttctcaatatcatatagttaaataataatatttgataaataataaataataatgtaattatgtaattatattaattgcattggcttattctcctacgaagacagaagtaagcacataaacgataagccaaagccatgagaagcaagacccaaacttcttggaagccaccattgagattcacagtatcaaatgaaggagagctttgtaaaggtttgcaaccacttttgctttcacattcatacaattgttcacctgagtattgtacttttaggagtaatctaaatccatagtacatgaatgataagtactttaaccactgcataaatattggtatgtgctgcaaaccaacaaaaaaaaaattaagaaaaaacatcactccattatactaattaaggaaaaaaaaagataagagagaatttcgctaaagatcaattcgatcggtcgtgtaattcaatgtcggatctcatatttcgcgtgtgtgttgtaggtcctgtgttcaggtcctagattatgcattgtaatataaatgtttaaatcaaaaatttgattagtggtgtagtttaatataagatctcatatttagagaaaaaatttaaggcattagtagtattaagcattaccataaggtaggaccgaccttgaattttagtgggtcttggaaaaaacatcttttaggcccttattttaaaaaaatatggtaattttaaaattaataagaaaactatgtatttttattaaaagaaaaaatatcttttttggctcctgggctaaatgggccttaggtgcgggcctagcccgtcttaatttagaatcagccttgccgtgaggtttcatattgttactggtgtaaattcatatcaaatctcacatatttttattttaataaatgttatgaaaaattgctaactactcgtaaaacattatcttataatagtgttggacaatgatataagcactactaatagctaataacaatactcataataaaatataatattttatgtaatgaattatgatactctaaaataaatattgtgtttgtgactcgaatatgtttaatatctattggtttcgatgtcttgttaagatttatcatgaataaagtaacatatgttcttataaattaatatcgtaattcttataaatatgatacgaaaaattacctgcacatagtaacctccggtaagaagaaacaacattagtaccaaagatgcaaacattccagctcttttaatgctcaaaacagcagctccaaagagttctccagctccctaatgattacatgaacaaatttatattaacactaaaatcgatcaaacataacacaagcattcacactcgagaaagatagctcaaacattcaggcatatatatgatttttgctcgaaagaacgattcaaaagaagaagaaaaaatcaatagtagaatttttgaaacttacttgacttgtgacaactaccaataatattgcaaataatgtgagaaaaaagcaaggaactgttcttctgaaacccgccatgaagtagagtatgatcatgaagaatgtagggtaacaaacatgagctaccatgtcacacaatgtgctacaaacatagtacacactcaatctatacatgtctgctttcctttctttcactaagtagatcttttcgaatggaaagacataaactgcaccgaaaatcgatgaagatgtccaaaatatgcaaatgtagaacattagaccaacctaagaaacaaaaatgttcgttataaaattattatattgtccttatattattcttatttttcttttctaccaaacatagcgtaataaatttacccgaatttattacctgatctctaaggtgtgcttcggtatcagtctttgacttccaccaaagaagacctaacaaaacagcaactccaatggcttgaactaatctcaacttatcaaagtaatccctacacctttctctgaaagttctcttagacaaaatttgaaattgatcccaccatgacaatgtccaatctttcttcacttgaatggctgcatggagttgttctgagacctttgtgatttgatgattctcttgcttctccattggctccacttgagtcttgtatttgtgttgtaaatactaacacaatagtaaaagcaataacataattttgaaagcgagtttctttcaggttgaaccatgtaaaaattcacttctttgagaaaataaaaactcgaaaatagaaaaaaagaatttacataatagacaaaaaatttaaaaagaaattataaaaatacatcaacaatgaaattttttcactctttgaacttttttatttacaaaaatacattttcagtgaaaataatgaactatttttttagttgtttgatagtttatttatagttgtattatagttatcgtggggttgatttcatgttgttttttaattgtttttttttactttttgctgaacaaagtatattcttgtaattttaaaactttacaagagtattttgtaattaaaaattttaggccgtaaaattataaataaaacataaaagaaagattatttatgaaaattcccccaaaaaaggatttcttcttttgctcttactttgatgacggctttctcaaactctggtgcgcctcggggagttgagaaatcggatgggacactgatgtcgttgacttgaccggtggctaaatcaagcaagaactctgcagggttcattggaatttcggggacaaatcttaaggatgaaaaataatccattgattctgtagcttttccatagtaaacagggtagccttctgatataagcaaaagtttatcaaacatttgaaacattctacttgatggttggtgaattgttgtaattattgttcttcctgcctgcaatttataaataattatttttaaaataaaaaagaaaaattaactcccataaaaaattgtaatattaagattaatgcaaagttgtttataataagaattatggcatgttgggatgaattagtagagcatttctagaaattaggagcttgagtacttatgccacaattttttatattaggaatttatgttgtaaatgtgatagtcagagccctgtgatccgaagaggaaagatcgagagttgtacaattctatatcgcctagggaatgtcatgtgtaatgattccgagactgtgtaggtatgagactacatagttgaagagggtttaaatggattaattggtactacctatatcaacaagattttccttaataaataaagttcttatatttgtgttacaaacagttgagcggaacacaagtaccttagcaaggcctcgaagtatggcgaggagtctattcgcggaggtggaatcgaggccagaagtcggctcatcgagcaacaacaatgaaggatccacaagaatttcataccctatactagttctcttcctttctccaccagacactcctttcacaaaccctccacctattcttgtgtgacgacatctaatcaaataagccaaaacaaaaatcttttcaaaaataccaaaaaaatttgatcatttagaaaaatacaacttccacctacctttctaggtttagttcctttataatcatctcaactcttccatacttctcttgttggctcatattgcttggtaaccgcaaaaacgccgagaaaaccagagtttcctccaccgtcagttgcggaaacagcacatcgtcttgtgtcacaaaaccaatcctactcaaaaaagtaaccgaaatgaaaagaatgaaactttgcaaaaataccatatattttcaaagatggtaacttgtttttgttataccttctcttaagagctgggttatagggtatgtcattgtaagttattttgcctttaacattttcaagtaatcttcctccaatgactttcaataaggttgtttttccacttcctgatgggcccattaaggcaagaatctcaccaggcccaatacttcctgttatgcctttcaaaatgtgcttataattatcttgatccatgttgagttgtgatgacacttttgatacaactgattttactggattagatgttgttgatgatgatgcatgtttgtttctcaccttgtacttcacatcttcaaactgcatttttgttacaaaaatcatgttaagaggaaaaaaaaccaaaaatttagattgtatagttgaaacttattacttataaattattttaagatcccaagcagggtcggtccaaatattttggagagttttgtgcaaaaatttaaaattgtgtcttttataaaaaataatgaaattaaaaaataaaaaataataaaattcaaattgtgccctttattaccaacgttttttttatttaagatacgtttctaaactttcaattatgaaatttttatttatgtatatataattaaaaaaaaaatagatctttttctttaaaaaaaaaataagaaaagttaggccttaaaaaataaaaaccttgtgcaatggtccaaactgcctaatactgaccaatcttgatatcaagtatagagatgtgtgacaatttcatt

SEQ ID NO: 37486 - DNA, 3485 bp, Cannabis sativa
  modified_base (3324)..(3326): a, c, t, g, unknown or other
aaaagaatatgacgctctagcaaaactgtgcgcagtcataatagcagatcgtttaataaaaaacaaagaaacattgtttaaaatagatagaagctgtcgacagttcatcgccactcccccaaaaggcgaaaccatggtgatgttactttgaatagcttggacaattgaattaaataattatatatcataaaaaaaaagcaaaaaaaaaataacttttttaaaatttctaaaaatgttatagttgcaatacatataccgaaaaaatcaatcacactaaatttataatatatatacacttaggctcatttgggatacgtcgtattgtattgtattgtattgtgttacattgtattgtattgtatatgtgtaaggttataatatattttcaataaactcgacctaaacaccaactacgggttgtgtccgagtctcgggtctaggtttgagtctaagtctcgggtctgggtctcagaaagtgatcctaggtttgagttctgggtccgggtcccgaatctaggtcttggtccgagtcctgggtttgggtcccgagtttggtcatgggtctgggtttgagtgcaggttcgggtcccaaatcctaagtctgggttgtgggttcgggtcaggatgcccggtctggttcaagttcaggttttgggtctaggttatcttgggtttggttcaggtccgggtctagttcgggtaaaggtcccgggtcctattcaggtggaggtcctaggtcttgggtcctggatccagttctaagttcgagtctggggtttgggtttcgggtctgagtcccaggtccggtcccgactctgggtttgagttttgattttgggtctaggtccgggtcccggtccagatcctgggtctaagttcgagtcaggatcaaagattggagttgatcccgaatcttttgtaaatattataatacaagttaatacaaaccatttgttatgtattatataatacaacttacattgtattaaaaattttgataatattaattaatacaatacattactttatctaaacatagtattatttattatttaatacaatacgacccttatacgacctaccaaacgagctcttggtgtatttattttttcataaattgtataactgtttataatttatttaattttgcagatttatactcatatttaatatttttttaattttaatttaattaaatatgaatgtttattctatttaattttattagctaattaaatagtaataatttctatttcatgtcttgtataaagtttatgcagtgtgaagatttaatgtgccaaaattttttggctttgataccttttaaagtttttgtgcttatttgtatgatttgtctctaattatttatgatagtataggtaatagtatgttgctacaagccaaagggtaacacctttggcttagtatttttatgtttcttcattaatttttacttgatagaatcaaatggtaggctgagaatttagtattttagtaatatattattttatttgtagattatcattctaatacaatttttttggtgtttgttttgtgatgttttcaggtaatgtttatcgagatttttaaaaactaatataaagagagcttaaaaaatagtaaaatgcagtattaaaggaaatgaatattttcatatggttaaagcattattaaatgagccagactattagtctcaaagggcgtatttaatatttttacagtgtttatgcaagaaatcataactctgcaccctttggtttctcttcaagaagaggaaagcttagagtaattttagcagaacttcgactacccttctttcgatcccccttttgtatgaaaatagaagggtatttgtaaggggtgggtatggacatgctcatgacttgcctaggatttctacaagatgcccactaatggggtaaaatacatgtaaagagctgactattgggccccttaaaaggtattgtgctcgtgcgttgaagcaactggataataggagaccaccattcgtactggacgcatgttgccaaaaggtttaaccttgaaaagtaaatgccttgaataaccgtctggcaaaaaagtgtaggggtatgcacactaccatgacttgacacagggaacaagatctgatcttgtgttagagaaagcataatcgtcgctggacgatttgggtttatccccgaggtagacgtccgcatttcttttaggaggtcagcatccgcgataggcctacgagcacccttctgggtatcacttgggcaagctttgggtctgggccactctgaatctcggagtggttgtaagtcttccatgtcctagaagctgaaataaggcagtatagatccccgcatatctctcggtcttgacctgttctcgaatctgcgaagcttccctgtaacttgatttaattggggggatttaattaatgactatttgaagcggtagctttcttcttgtgccacgtattttttattgtttaaattttcgagaacagttttgtctcatgctattttttttcttttgtagttcatagttattcaaagcatgcccttcagttaaacaatgaattcgataacagatatcagtattgtatattccaatagtgatcatcatcactatgtaaaaaagaaactaaatattagttattttactggtgcagttagaatataagttttagtaccatgtttggcactcccactcccactcccactcaatgcctttgttttagaattttgttgttaaacaaaagttggtattttaaagttaaagtagccttagtttaagggagcggcggggttgggtattccactcaaccaactaaatcacaaaagtatattaatgtaatgagtgatattaaagttaaagccttggtctaaatagaaacggccaatagctacactaatttaattgccaagacaagatgtctccttaaagcattcacatcagcctttttattcttttctttaaaatactaaattaaaattatacttttttctatattttttcaatactaacttttgtattatttttcttcttatattatttaaataatataattctactaaacaattaataaatattatgtatattataagaaaactttataatagactattttaaaatagatgtaccgatgcatcttttatctatgtagtctaattttttttcataatcacgtacattttagttatttaaaatattttgcaaaattttgaggaatttgtaaaaacttaacatgccaaaaatagagttcaaatataatcttttattttatatgtgtgtaaaataaattatttgaacattgatttctatattgtaaattannntaaatttctcaaaattttacaatacgtcttaaataattattacatacatgaccatcaaagaataatttttttcctagaagccaaaatagtaggggatacaccgatacacttttttttaaggtaaattataaaagcaccatatattatgtatatatatat

SEQ ID NO: 37487 - DNA, 3366 bp, Cannabis sativa
aaaaaaaaaaaaaaccaaatatttcttccactcccttcactttttctcttattatcatgcatttttataatgtgtctgcatgaacattgaacaatatatgtaaattaatttaacctaatttatatttgtcctttgtgtttttgctttcggtgcttacgtattatgtcatactttactaaattgttaatatatattttttttaaaatggactaaattgttagtgacggtcaaatacaattaataaatattaaatgtaatgcaagccaaacaaaatttggtagaaaaataacactgatataattgcagaagtagtatctctgatattcaaacacctcgatggtcccacatcgatgacagactcacatgcagaatattaacctctttctatgagtagtcaaagtttaactctagcagggtcaaactcatgttgggtctaccattaccaaaaccaacacagtgaaactcaagtaaaaactactttttatttcatttactacctaggaaattaaagacgagagttcattagggaaacttttattattgactactgagataggaagttaaagatccaagctggcaaggtatgtcgatgcagagggccgggctgtgaccttgactactaattccctagccaaaatttatgccttgagccaaaggtagttcacttccataattgatcgtgctgtaaaaaaaaaaatagtaatgtaagtagtttttttagtgttttgtgttacagacaatttcatatgactatgtttttcaccagcaaactttgagctgtacaaaaaacttaccaagttgaacgtcgcatgtattgcttccaagagtcactccctgcttctcggccgccaccggttgccttctctccaccgaaggcaccgcctatctcagctccattagttggtatgtttacatttactatgccacaatcacttccacgaggcctgtgtaaaattgaaatacatgagatatgaacaaagtagatctgaatcaacttgtattgataaaatgggaatctcaatggcagtgttggattgcagacaatacacaattccagtttctcttgaggcattttaaggaggttatgacttacccaatccatttaaagatagcttctggcctgctagtaaagattgaactactcaatccttgtggcacagaattgtttaattcaattgcttcttccagagactgcaaattatgaaagacaaatttgtgatcgcatcagagaaacagctcattggtgacagtaaacaaaaaggttcaagaatatatggtaccttaattttcataacatatagaactggagcaaatagttcttctttcactacagaagcactagatgaaatctcaacaattgtcggttctacaaaattcccctctgactctacaattgatccaccagtgaggattttccctccctgcatatacaagtaaagtaaacactaggaaagtaaatacttgtctcaaaacatttgaccaaaagtttaacaattctaagagccagagacatccagactttaaattagttatacaacatactatacatgcctgagattttatggttgaaatccccttcacataattttccctagaaccttgcgtatgtagtggaccaacaagggttccttcctccaaaggatctccaattttcacttgtttgtaaactccaaccagttgatctaatacactttcatatacacgttcatgaagaaactgtagccagggagagtggacagatgaaacaaaagcagaaaaaaaaaagagaagtatgaaatcagtactttttgagagccacaaacagattaaaacatagtcatggacaagaatgcttttaccaatctacgacatgtagtgcagcgttgaccagcagttcctacagctgcaaacaaaatagaacgcacagccagtccaatgtcggcatcatccataacaactatggcattgtttccactcagttcaagcaagcatttaccgaacctttcactaacagtttgttgcaccatcaaacccacctatacaaagaaacacgggaagaaattcttcaaagaattgtacataaaagccacaaatccacaaaagttggcctcattcccacatacacgtacatgtggccagttggaacttgtaaatgaccatggctattggttttatttttttattttttgaaggaggctattggttgatacactagtgttatcaatattcttattaatttcaaatttaaaaaacacaacaaaaagtacttttatgtgaaagaattacctttgagcttccagtaaaagaaactagaggtattctagtatcttttgatattgcttgaccgatttctgcacctccacaaaaggaggtgaatattgcacctggcaagttgttcttctcaagaacctcagccacaagctttgtgacagcaatagttattaaaggagttgtgggtgcacctttcctacaatacacaacacctttagtggctacttcgttcagaatatgtgatcttcttgaaggaagaattacaaaagacacgaatgaactcaataaatttaacaaatcaccatatcagcatttggttgaagagaaaaatgttacttcaactgcaagtagaagacttaaacttaccacacaacacaatttccacaaactaaggcgagacaagcattccatcctatagcgccacaaaaagaacattgagattagatgctctgcaatagtctttttacaatataggcaactaaatgcaaaaatcttcccattatgcatgacaaaccttaaaccagaaacaagttcaataattttttgtgaagttacgaagaaaagatttctgagaaatactatcttcaaaatccaatacaataaacctcaaataaagaataaccacatgattaagatttaatgatactactttttattatatggcaaactagcagataaccaaacgcaccaagaacagcacatgggaaattgaaagcagtgatcaccccgactattcccagtgggttccacacctgtcatataaacaccctataatcaaaacctcatcttttatgttcaatgcatatttttttttaattagttaactttcagatttgaaaacattgatggtccggtgctggtcttacctcaagcatcatatgattcggacctgcagagaaacataatagctaaatcagataattcacatcccaaagtttagattctgtcttaatacatgacaaataaagtttaagttcatttgcagtccaagctaataacaacacagcaacaaattcagtttactcatagtcactagggaacatttacagtgtcaaaaaatataaaacaatcaaagaatagtaatctcacgttctgaagggattatagatccattca

SEQ ID NO: 37488 - DNA, 3853 bp, Cannabis sativa
taccccccccccctcaagatggactatagatatcatgtatagacattttgctaatatgtgtttgtagtgtagttgatggtaacggtttggtgaaggcatcggcaagttgaagagtgttgttgacatggatgagacgaatggatgaatttttgattttttcacggacaaagtggtagtctaattcgatgtgcttggtgcattcatggaaggtggggttgttggcaatgtgtattgccgattggttgtcacaatagatgaaggcaggggtcggctgagcaatctgaaaatcacgaagtaagtattgtagccatgttatctcactggttgtggcaaccaaggcgcgatactctgcttcagctgagcttttggaaatcgttggttgtttctttgttttccaagaaacgaggcaatcaccaacaaagatacagaagcctgttgtggagcgtcttgtgatggggcaggaggcccaatctgagtttgaaaaaccttataggtggagggaggaagaggcagagtatagtcatccttgaccgggggagtttttcaagtatcgaagcacatgatacagtgcagtcatgtgagatgtgcgaggggcagacatgaattaactcaatgtattgacgacaaatgtgatgtctggtctagataatgtgaggtagagaagtcggccaatgagttgacgataagtagacagattctcaagaagttccccttgttcttcgtggagtttgacacgaggatccatcgggctctttgctggtttgctaccagcatagccagtgtcttccaacagttgtaaagtatatttgcgttgggagataaagagggcgccattagcccgagctatttcaaaaccaagaaaatatttgaggggggccaagagtcttgagctgaaattgttgattgagattttgcggcagttcatggaggatggatagattaggaccagcgatgatgatatcatcgacgtagacaagaagggccacaaagttatcaatagagcctctattgaagagtgtataatcggcctgggactgtgtgaagccttctcgaacaagtgcatcagtgagtttcttataccattgtcttgaagattggcgaagtccatagattgatttgtggagtttgcaaacgaggttcgtacctgtacaagaaaaaggaatagtgaaggcttgtggtatttgcatataaacttcttcatctagatgaccatttaaaaaagcattatttatatctagttgaagtctgtgccattgttttatggtagagatggcaagtaaccacttaaaagtaaccatcttggcaacaggggaaaaaatgtcaaaagaatcaagtccttcttgttgagtatagccttgagcaacaaaacgggctttgaatcgttctacactcccatcactgttgtatttgattttgtagacccatctacaaccaatagctcttttgtttggtggaagaggcactactgtccaagtgttgtttttgagtagagctattatttccacatccatagctttcaaccaatgcttatattagatggcttgcttgtaattttgcggttcaatagcagctgtaatggaaagaataaaagcttgatgagatttagacaattttgaataagaaatgaatttatggagagggtgaggagtggaagtttggtcctgtatagcagaataacactcaaaatcccttagataattgggttgtttagtgattttgttggttctttgaaggggtgcagcagcatgttgggtggttggtgcatttgttgcaaatggagaaggtgatgtgtgctcatgctgctcggtattgtctgctgcattttctgcagcagtatctgtattactggaagccgtatcaacctggaaagaggggttaggagtaatattgctaggaatagctatagtgtaatcagcaataggagtatgtataatgtcatgtgaaggcaagacaaaagtggagaaaggatcaatatgatcatggtcaatatttattttatgaaaaggaaaaacattttcatgaaatatgacatttctagaaatgaaaaattgctgagaaatttaaatcatataaacggtaacctttaacaccagtaggatatcctatgaagacacaagctttagcacgaggttcaaacttagttctatgtgaggtgagggtagaggcaaaagcaagacaaccaaaggtttttagatgagtgtaatcgggttgtttgtcaaaaagaatttcacgaggagttttattttgtaaattaggtgtgggggtacggtttataaggaaggcagcggtcattacacacttcgttcagaacttaatgggaattttggcttggaaataaagagctcttgcaacatttagcaagtgttggtgttttcgttcagccacagcgttctgttcaggggttttaatgcaagtgaaatcatgcaaaattccatgttttgagcataaatctttgaatgtgagttcaggagcattctctgatctaaaacatttaaagatgcaattgaattgggtctgaatgtaagataaaaattgtggtataattgctatagcatcagatttttgctttaacaaatatatccaagtgaatcatgaatgatcgtcaattaaagtgagaaaatatttatggtctgagtgagacgtaatgtgataaggaccccaaatgtcacaatggattagatcaaaaattttgatagcaaagttgtgtttatttggaaaaggcaactttccttgttttgccataggacaaacatgacaaggttcatctttgtgtaaatctttactgctacattgtaaagtatctttgagtaaatctaaacatttataggacaaatgacctagtctagtatgccaagttgcagtagaaacagaaaagacagatgcagcagctggtgttggttccaaaatgtagaggccatttgtggaatcactttgccaatcatcattttgctgcgtttttcttgtatgcaaaacttgttagcatcaaaaattatggaaacatcatttgtatttgaaaggcaacttacagagatgatgttatatgtgaaagtggggacataaagaacatcttgtaagataagattgttggctaaacacacagtgccatgtttatgaaccatgatattgtcattgttaggcaaaattaattttacaccagcaatagaataaagactctgaaaagatttaatattagagcaaatgtgccttgtggcacccgaatctattatccaagaacatattttgggttgtatagagttatgagataaaacaataccattggtacctctagaagtctcaggatcggtagtattcgtactttgctgctgcattgcaagaaggttgagaagttgctgatattgtgcagcagagagttggggaagcatagtgagattatccccaacagtggcacacttctcagaatcgatttgaacttgatttgctgcagcttctttgggcttattaggcttgctataacctggttggtatccatgtatcttgtagcatttttcaatggtatgaccatgaaaattgcaatgagtacagaagggcctgcctttctttggtggttgctgccttgagttttgattatccttgctccctgaagctttatcaccatgaaaagaaaatgcaacattcggatttggatctgtaatgggattatgtccccttctttgattttcttcttgtgtaacaagatgaaagactctgttgatttcaggcaagggatccataaccagtatattaccatgaacctgagtaggggtgtgcagaaagtcatccagtccaatcccaaccgatccaatagaatcggatatccaatcataattggatcggatcggatgcaaattttaaa

SEQ ID NO: 37489 - DNA, 3179 bp, Cannabis sativa
gagatacttaatcagatatggaaattgaaagggaagtggaaattcaaaactatgaaaccaggtgtgtggggtatctttttttgacaaatctgaagactgcttggccattctccgaaatagaccatggaccatcaacggaaaactccttatcataagggagtggcctaaagatggggactggtatcatttgaatatggggatctctgttttttgggtaatggcatcagctacccacgccctacctcaatgccattaacacacgcacgattgcttccaaagcagggcgttttgtggggagtgaccttgcaaatcaacgtaccatttcaagaaggggattcctaaagtttcaggtggagttagatacttcccatcaattaatatcaggattcttcctggacattaagagggggcgaaaagagtggatacagttcagatatttcaagttacctaagctatgtttcaattgtgggtttcttgggcatgataagaaatcctgcttccgttcaacagcgtatgcttatcctcctaaaggtgaggcggttccagcgtatggacctttgatgaaggccgaatcaacgattttcagttgctttaatactcgcaaccagcttgagtttttcagagaagaatcagatcggattattcctccggcgagacccccagcaacgattgagacgttctccaaagctccgggaaagagacatgtcgtggacagcaatggaaaactgagtcaacacaaatcagcaagtaagaagcctgcaaagaaagtgatcagggtcaactcaaatgattcaggtgctgttttgggaaagaatttgaaagtagttgagagggaggaggttaatcctatggataaaggcaagaaacttatgtatgaaagggtgcaaagctctgagcatcctgggagggaaaggaggacaagatcagtctcgcctagagcactacaaaggcacattaaaggtaataaaaaccctttgtctgatgtagaaattctaaataaatactcctcaaggccccccccaaacccagcagataatggtatacttaccaccattatggccaacattgggcccacttataatcaaatggtggacaaggcccatgttgagttatgtcaatctagacaaccccacaaacaccctgagcccacccattttccttggcccatttacgctgaagagattgggctggctgaagaattgatgggtccagcaccagttgacaaatacgaacctataccaacactatttcatgacccagttgatgttactgaattggtccatccatgtcctcaacctcgtaaaaggaaggccagtctcacgttggttccatatgttcaacatacagaggagaatacgatggaattttccactgatgtccctgatctccctggtttctccccagcaccgaatactccattcaagatgggttctggtgcctcgtcctcgtcagttaaaaacgacaagcgcagaaagaagggaacccgcgagagaaagtctagagtgaaagctaccagtactcatgataaatcccttattgctgcagatgatctgaatcgaaacaattgtgtaagttcccctagaaatctcattgacaatctcaatttgattgaagttcaagttgaaagctcccaaaattttcttacgggcgaggaggcggcccttaccatgccccccaaagccccatgatttgcctttcgtggaattgtcggggcctcgcgagagacccgacaccccgagccatctcggtttgggctaggaggtttaaggtggactgtatttttttgatggagacaaaagctagtaaaagttatatggagaatttatctagaaaactggggttctcaaatatagtaagtgtaggtgcggttggtatggcagggggctcctgtttgatgtggaacaacaatttgaatttggtagtaaactattgtgctgaaggcttcttcgatactactgtatgggatttccaaaatcagattcattggaaattttatgcggtatatggtactccttattcgaatgtaaaagaagtcttttggaaaagtatggaaatggaattcttgaattgccattatccatggatgttgattggggacttgaattgcatttatagtcaagaggaaaaggtgggaggccgtacagtctcggatgtggatactaaatggctaaaaagctttatggatactacaggtggaattgatctccaattcacaggtaacaagtatacatggcagaacaaccgtttttcgggtggactaatcagagaaaggcttgatagagctttatgctctccggaatggctactggaatatcctactgctggtattagaaatttacctattgctatttcagatcacgctcccatcatttttgactcccatctgtttgctgttcaggggttcatcccgtttcgtttctttgaagcatggtcttgggaaaattcttgcaaggaggaaattgtcaaagcctggtcctctcgtggagattgtgccactgtggcgttcattcggaatatcaataattctaagaaggccttactagcctggaaaaagacctataaaggagtccatgaaggagaaattaaagatttggaaagaagactagaatggatccagcaacaacctcggccagatgatttcagaaacgaagaagtgagtatccaatcgcaattgacagccgcttggacaaagctcgaaagtatgtggagacaaagatcgagggagacttggttagcattgggagatcgtaacaccagatattttcatgctgctacggtaataaggaaaagaaggaacaatatttgggctttgaaagataaaaatggcaaagtatggaaggacagaagacatataacaaatgttataaatgcatatttcctggatctcttcacttcgtcggatccgtgtatagatgaggagtttgatgagctctttgtaaagaagattgatgataacactaatgcaacttttgctaagactcctacggagattgagatcaaggaggctgtgtttgaacttcatcccttaaaggccccgggaccagacggtttttcaggatgtttcttcagaaaatactgggatgtagttggatcaaatttggttgagacggtcaaggaattcttcatcagcggcattctaaatccgaaactcaacaacactttcatttgtctcattccaa

SEQ ID NO: 37490 - DNA, 5116 bp, Cannabis sativa
taccaactaaattcaacaaaataacatttgcatatatataatggtatagcttagtgacctactcactttagagcatgctttaatatattatgaaaactataattttcatgttttacattaaattcttacattatgtcatacctccatttcctgaataaaatattttttgcctagaggagtagaaacttatgtgggtcacttaagacttcacactaggtgaacacacattttcatattagtttttgagtattgccattatgagaattaattagtctgacatatcttatattatttatttattttataatcatatcattttgtaactattaacttcaaacatatctatatttcactaaatccattggtgaataaaactagtcagttcattgatgaaatcaaccactcatactactttggatttttgctaaattactatttaattccgttttccatttcacttccttttattgtcatcatcgttgtcttttctcaaggtgatgttcatatgtttttccgcgttgtcattttcaagttaatgtcgtttaaagttccttagtctgattcatgtcgtttatgcaaattattgtcgtttcaaattgatgtatgtcaatttagagtattgtgttattaatgcttctgttcttttgtatttacaagtgtctttattatctctttgcttatattgtccttttccttatgtcgtttactatacattctccaacgcttaattttttatagataaattatcatatttagtcataagtcaaacttgagtaattaattatttgttttttttgttattataaacacatttcaacaaaataattaacttatttactccccattttcttaagaaaaataagggtgaagactgaagaggtacgaggataagagaaaagaattttagaactagctagctcctttatttggtactaaatttgctcatgttcaaagttcaaagttcaaactaaaaatgctttatgtattccaataataatcaaggaaagtacatatagaatgatgaaagaagattattgcaatggtcaccagttaataagtcatttcaattgcacttataataaaagtggggcctcataactattcaaaagtctggttattcattattattattattgttatcaaagtataaattaaatcaatggttgtaaattggaaccaaaaaataaaaataaaagataaataagagaaagagtacataatgatagggtccctttcttgaaaaagtgaggagtttggagagccataagatgcctcccccaccccattattcctctgttccttacactatttgacatttgttatattttctgtgttggtgtttggaccttgttaactggaaactggtagtgtcatgagttgaatatgaccccaccatggcattgccttgccactatatatgcatgtcaccttctactaaaagcatttgtttttgctctcttcttctcctcggtccctttttacatttgtattttatatactctctatcttttgttttggacatatatacttgggttggttttctaattaggcttctctcaatgaactctcaataatatttattattccttctaatattccacattaatcaagtttaattaggtaaactctgtgtacaataattattattctgtcacgtcatgccaaatattgtttctattttttctttttcccttactatagtgctttctttgtctttattaattatggtattaactccttatttcttttctcttcttttttgcagcacatttattaacacctttctcaaaagtaataaaaatacgtattagaatttagaaacacaatacaattaattggttaataaaaaaagagaaaattataataatttaaccgagaaatgctcaaaataactctataaaaaaagggaaaaataaataaatcacaaaaattgaggagtaaattttattctcactcgatagtctatatatgattatcaagacttccaattctttttttaaaataggtacagaacattaagattcgtagtggacatagaaaataaatataataaaaaagaaaactacttatacagtaaagaaagaaacgagaaaattggaatcgaaaaattctcaaaactccatagcaaattaatataagagtggagctcaagtcgaaattcagaatcataattgggctcatttgcgaccgagtgaactcaggtgaatcattgccctagaaaaagaattgcccatttccacaaacctcttccatgacccatctatggtctctttgttacacccacccataacccattcccttacaaaattcataaattaattttataaataataatatattttataaaatacgattccctcgctcttcaattttaattctctaaataaatttaattaattaatataattattattttccaatttattaaccatcgaaaccggtctgcctccaaaccgcatcacgaacccggctcatgtcccgtcccttaagagtccgacccacgccttcgaaaaccgacgtcgccgccggttttcggctgtacgcgtactcacgcgccaagtactcgtgcggtgggaccatctcggactcgtattcctccaccccatcgtccaactcgtgaagcgagtcgaccgagtcaactcggagaatcttgctccagtccggtacgttcacggggagtgacgtggctaattggtgacccctaggggaagacgaaacgctgtcgtttccacggaactggtggaggattcgagacgacgtcgttgtggtcttactcgagtcaaaagccaacgacaacccaccctcgggttggattcggcgccggctacggattgacatagtagccatggcttcggctgtggcagagactgaagcttcggaagggttccaatctccgttggagtgatgatcgaccatgtgatccgttgaagtttcgaccatggaccagacatcgtcttcgccgagctcggatgaatcggtaccactggatccctggctgtgaccgtagctataggcgttgctaccgagaaacctttcgctacggctagttgtgagtttgcgacccttcgccattatgacataataagaatcggaatcgggaatctggaaaaagttgggggggtttggggaatgggaatgggtaaaacgacagcaagggacgtcgtttggtttgtgtactgagttctcaggacgccattgggtttaaggccttattttggcatagtttttggtatgaaggggtggttgtgtatatatagccacgcccactcccactcgcaggcccacttcattcatttcatttgaatttcgccttcattttgtctgcatttcataacttaataataataataataatacataaactcctgaatcagatctatggtgaaatttttaaggaacgtcgataagcttacgtaactgtaaaaacattttaattattaattattcttatatatatatataaaaaccaatccaaaatggtttcacgcgccttatcatgtacgtgtatactcacttgatctcaatcaatcactttttttcttcgttctttatactttagactaatcaaaaaatttaattgttccaaaatttcacagaattatacttttaaattttgtagacacttaatttttttttaactattattaaaattattgaatttaaaaaaaatatattttaatacatattaaaattttgaggcaccataaatttcaaaatttgaaagatatctgaaaaaaaatcctaaggtaacatcactggcacttataaattacattctaatgaacaatttaccctaaaatttgtgtttttctctatgagaaaaaaaatggttttttcatttttaaattttaaaatatttttttttgtatttttacagaattgtacataaaaattcttatttcaactaggtagcaacttaaatcgcaactaaaaattgtataggaacctacatagaaactacaagagaaactattttaaaaacctaactctaaatttaaaaaaaaaattaaaaaaaataatatatgaaataattcaaataaaaaaaaaatagaactaaaattacttttgttaacaacgttcaacaaaggaaaattttgttcttcatttgaactgagtctttgtctgagcttagggcactgagaaaatgtccaacctttatttggcaattagcttttaccatatttggtcatcgtctctgtcatatattgttagtgtactttaaaatagtctataaattattctcatattaccataaagaaaaaagagagtaccaaatcaacttaatcatataatttgcaattttatttaattagttctcttctcaaacgaaaaaacatatcttactaaatgaacaattaacagtatttgttttagaaaatttactaatttagactgtctgtttagtgcaaaatgtatgtgatctatctttgtattttgttaatagataatttacacattttataaaatagattaaattgaaataagtacactgatatcaacttttttcagcgattaattgctgcatatttgactaataaaattgagcacatgccatcaatttaattcattttgtaaattacaacaatatataaaagcctttgacgtgttcatcctacattgaaaaacaaattatatacatttttcttaataaaaaacagaacaattttcggaaatagtaaaatttgttcagtcggaactcatccaccaaacgtagattccctccggcgattgtttatcacgcgcaaaatattttatttaaacttgcatgcatatgtaactatatataagactgtaatttaaaaaatggaaatggtagaagggattggtggtatctaagcatcttataaggttatatggtgtaatattattattagttattgatgttaataatttttatagagtatcactaatataattgttattagatataagtattgttaagtacttcttaagaatagtgtcctgtgcttagagaaatgctaaagcatttatagtgtctcgcattttttctgaagtataatattaatattagtgtaatttaatattaaatctcatatatcttattttaataaatattataaaaaataattacttaattataaaatgatattttatt

SEQ ID NO: 37491 - DNA, 2375 bp, Cannabis sativa
tacatacatacaaatacatagaatataattatagttacatgtcttttcatctcaactatataaacatctaaacccaaccttaaatttcatccttaattacttgaggaaggaaaaaagagatatcacaaaatgtggttgttgagtaataatcagaacaagtggcaattaatctttttcggcctaattgtcgttttgggagcttgggcctataacgaagcttcggcccgaacactccaagatcaagaggtgtccatgtacgacaggtaccggacctggatggcccaccatgggcgtgtgtacaaagatgaggaagaggagaaaaaacgtttcgagatattcaagcgaaacgtgggccgtatcgatgactttaaccgggcctctaataagtcttacaagcttggtgtcaaccagtttgcggaccttactaatgaagagtttggggcctcaagaaatagatacaaggcccacgtttgtgattccactagaacgacgtcgtttattcatgagaatgttactgctatcccttcctctttggactggagaaaactaggagctgtcactcctatcaaggatcaaggcgattgtggtaattttcattaaaattgtttattaatagaagattttttatttttacatttcaaaacagtttttttatttttatggaattttacataaaaatatttattgaaactagcgctgcaacttaaattgtaacaaaaaatcgaatagaaacccctattgcaattagcgttggaaccactttagaaactcaaaccataaatttataaaaaaaaaattaaaaaaacgctaattccccaattaactatttgacaactccccacttcatatttataactaaaataaaaaactattatattgtgttgtaggatgttgttgggcattttcagcagtggcagccatggaaggagtaacaaagttatcaactgggaaactaatctcattatctgaacaagagttggttgactgtgataccaaaggtgaggaccaaggctgcaatggtggattaatggacgaggccttcaaattcatacaaacaaaccaaggactaaacactgaagcagggtatccttacaagggagttgatggaagttgtaatgctaaaggtgaaaccaaacacgctgctaagataagtggacacgaagacgtgccaacaaacagtgaaaaggacttgcttaaagcggtgtccaaacaaccagtctcggtggccattgatgctggcgggtttgacttccagttctactctggtggagtgttcactggaccttgtggcaccagcttggaccatggtgtcacagctgttgggtatggggttgatgaggttgatgggaccaagtattggttggtcaaaaactcatggggtgagcaatggggtgagcaaggttacataaggatgcaaagagatattgaggccaaacaaggactttgtgggattgctatcgaaccctcttaccccactgcttgatatatttattttatcatatatacacatcctctcttcaaacctactgttactgtgtattatatagtgtgtatgaatactctacttgaaaaatacatgatattatgactttttaaaatcctatatacatagaattttcagaatctacataaaataccatttggatattctagattttctacacaagcttgaaatgttcagcactattactataggatacctaacatttttaatttattttctctaaatttcttgtactcctaaaataagcattaatattttctcgatttttcacagtgaaattggaaggactttaagaggtataatcagatctatcaaatttttatacttttctaatctaacctaacaaaggagagagaatattgtctttgaaaaaaataaaaaaaaattattactattattattacttcacaaaccttgtaaaatggcaaagttatcttcgtgtgcttaattttgcaaatatcttcggcttatgcattgggccagtttggagataaagtcctccaataaaaagattttgaatatcttttgagggtaccactaaatatcatgcagattgatcttaagagatcatcccaatggcttggacacaacatagtatccaaattgcaagatttctccactgaggtacatgattattatatcatgtacatacatggagaggcaaagcttaataaagtttgcaataatatacatttttcaacatctaatttataataataatgttactattattactgacatgtcacgtcagctaaatttaacattatctgaagtacctaatgttttcttttttattattattaatttatttttatttttctgcatttttaaaaatatttttttagttattaatagtgttgataagaaacca

SEQ ID NO: 37492 - DNA, 5384 bp, Cannabis sativa
aactcaaaattttttaattttaccaattaagagtgcacccatatatatattttaaaaaaataaaattctacaatatactataaataacataagccaattgagttattaaaaaaaaaacataactcaggttttttttttttcatgtcaattcaattgtatcaattaattgtggtccaacactatatttatttatgaaataacaaaatacttaaagttatacatagtattcaatatttagagatttagagggttttttttttgtttttctaacttaagttgagtggtggtatgttctcaaatatgatttattttcatggattttaaaatccaaaaaccctaataccattttaaagtttaatcatattgaatggattatccctccttatgttacttcactattattgttattatggttatttcatatttaatattctttaatcatctaactaaatatgttttatctacttaagtatccacagtcaatgcataaattatagaatatggttcaaagattgtggatataatttatagcttttatactaagagaagagctaaacaaatcatcttttacacttttcttttcatcttttatataaatatttgtacatcattattattcaaatattctacattttaaaatattaaaatcaataaaatatcactactaagccaaaaagattttttttttgttatataaaaaaatcacacctatctccattattttggactacatttggctccacaagtaagatccagcagacccaccaattattttattaaacttcaaacaagaaggaaaatacaaaataaaataaaaagagagaaaagagtctcatatggatgaaaatcaaataaaaccaacaaagtaacccaaaaaaatgaaacaaatattcaattttatttttaagtggttactttatcaaagaagtgttacattttttaaaaccctttcataaaaaaggaaatatgttacacaaaaataaaaaataaaaaaacaaaatccaaagcaaaataagaaaaacagatatttattttattactattttaatattatataactgttttagttttgtttttcatgacaggaacaaaataaaaagagtgttttacaattaaataataaaacatacaaaatgcatggtaataaatatagtatgttataaccatacagtggaaaaccaaatctaataagcaaataattattgtacaaattaataaatctaagtaaacaatttttttttgaaattattttacaaatatataaaaataataaaaaaaattataaaaatacgattatacaaaatttaaatatttttataattttatttacagaaaatacgattttttaatgtatttttatgttgtatttttattaatttattgttatttagatattatttttatattccttttatgcgtttttttattattttcttattgtttttattacactgtaaaaatatataaaaaaaataaaagtgaaaatgtaaatttttttttacataaaatagtgtattatataattatttttttttatagtaatatatccataatattaaaaaaaaaatagagagaataaaatatattatatattaacaatttcattagcttcaaaattttcaatcttggtattgagaattttaatttattaattcaagtattttttttgcaaaaactgagcagacctatttattatttattatatattatattatttcttccctccacatagtttttcgttctcaaaatcacagactcacagaaagagaacgatcttcaattggtttctccattgttaatacacccaaaacctcattcacacccacaactatataaataccccaatctgtggatcgccttagctctgtcatattcctcatttttgcttttgccttattcccctttcggaactaagtaaaggcgaaggcgatcacgaagtttctaaattttgagttccgtttctcacattttacaggaggagagaagtaaagcctgtatctttactttgattctcagctcattaaagcctctctgctcttccagatcttgctctggctttaattttcaggtccgtttagtttgtgttcatatctgtttcacactaatttcatttctatttgggttttaactgaaagaagaaaaaaaacgagaataatgaagatgggtttaccttctttttgcttatttttggctttttgaattcaaataacgttaacattgaggttttgtgtacttttgatcttggtcagtttttttttgtttttcccctttctaaaacatgggatctttccgttatttgttaagttttagattgttgtttgtattggccgtcttactttttgtccagttattggtccttggtattgtatgaaataaatatttaagtttgattgaacttgatgaaaaatgtttttgatgaccaagacttttaggagttatcgaaatataaggtttcaatttgttgagctaacttaattcttgccttttaagtttatattcttggttttctgttatgtgtcttcaacattaagcaaccctataatcaggaaactggtctgcatgaatgaaaaattgaagggtttattacttcattgctcaaattgggcacgtggttacttagatagggaggtacttgattcataatttgatgaaacaaaaagttattgaagattcacatttattgctcttgagtcttgattgtcaaagggagcacatgattactttttctgtagagtaacttgtggagggcaatgtggaagaagcatacgaataagatactacttgtttatgattatgatcaacttgggtctgaggaatatgactacatacttggtctgaatgtggagtctgcaattgtttcggtttaaaagtcaactttgtgacttttatatctagccaggtttagctacgtgatagactgctaatgtttgtgtgttactaagagaaagagagaaagagttgttgcagtaaattatctgaaaggataatgtaagggaagctggtgcttttttgattgtgaattgtcacacactcacacattcataagcttcagtttattttattttttttaaagaaaaaccaaatacaatcaaatattgtcagttgaaggaaaactgctaagcaattcattctaattagtatctcccaacacttccagcttgattcattttgctgtacttaaatcttacctgtatttttgtatatgtctcacaatctcattaggtattctgcttagaagaatatgcaactcaaaacctgttagatagtgcaagactgcagatgagctatagttactatcttgaggcttatttttttgttcaacatacaatcagaagtttataaatagtatgggaatcctttcgcgcaggtttaatcttcaacggtccatttccatttgaaattgtttctcttgaaattattttaaaggtcttataatgtgaaactgagcactaatgtaatcgtatcatcttgttaactgcagttctgcaagtagaaaaccgaatgaaactatgaggcttattgtaacaactttttttggagtagttttgggtttcttcataggagtatcatttccagcattgtcattaactaaggtatactgtactatacaagttatggttttctgcttttattgttaagattagatttttttttttatgttcatatttttggtgttgaacttcttataattactcaccgtgatgcttgtttgtcatattttgccagctaaatatcccatccaacttccttcctgctcctgttcagctctcatacagcgatgagacaagttcaggtctctctactcagataaatgagtggtcttctgcaaagattaatgatagcagctcaaaacaagaccagcatataaatgatccaacaaaggtgtacctcgcttctttctatatccttttagaattaatataaagtcaaagttggttacatgttttacttgacctttaaattttttttgcctaaagcaacttaacgacgttaattgatgcttcaagcttctttgtttattgatattgaatttgagaactcgtgtacagtaatatacttgaaactacaattttttcttttctcggcacagttatgatgcatataagattcagggcattagtgggtaaattatatagtgggcattggtgagcttgaaatgttgaagtctttttccttctcctccatgcgtattgagtgttgtcaagtctatggtgtttttaattctcctgaaagttttagggcctcgtattacaagatttagattctgtcttgcacttggtcaatggactaatgactttacttaattactaagcctttcctttccaagctgctaaacctttagtttgttctcattgtagtttgtgtgaaagtgatctccatatccgtatgaattcatttaattttggcacatatctgctatttgctatgttgaggcttaagtcaatttatctttggaatttgttttatatttctgcctattgttcttgatttgtggctcaatttcttactatgactgtctgctgcagatttgggtaacatcaaatcctaaaggcgcagaaagattaccaccaggaattgttgaagctacatcagatttttatccaaggagattgtggggtaaccccagtgaggtttgtactctactgtcacttacatatttgacgtagtaacaacttggatttgctggactgtttcgtaatagatataagttagtttaagagggaattgatacatgtgaagaagagtatgtatgaatatatgacaaatagatgttcactgtccacatatcactttatgatatctcaaagtaagaagtactagaataataaacaaagagaataataggatgatttggaaaatttccaagttgatgttctcttctttggctgagtaatgctgcatactttgcttatgcattggaactaggatggtcatttccttgtactaaggggtctaatcgagctggcatttgcaggatttaactagtcatccaaagtaccttgtcaccttcaccgttggttatgatcagaaaaagaatattgatacagctgtgaaaaaggtatactcttactctcgctctctgtttccgtctctttctctttcttgtgttttgtgtgtagaatatcaagactcaatatcctcttccacagttttcagaaaattttaccatcctcttatttcactatgatggtcggacaactgagtgggatgagtttgagtggtcacaccgagctattcacgtgagtgtccggaagcaaactaaatggtaagaaaccattgctaactagtgtggatattttgaagggcgtatactttattccattttattttatgctaagcttgtaattttaacctgtaactttttgaaggtggtacgctaaacg

SEQ ID NO: 37493 - DNA, 4832 bp, Cannabis sativa
ctcatcactttgaaagggaaaaatgagaataaataaatttattgatagaataatagtaaccccatatccatttttctgtggcagatggattctggtgaagtaattgaacatatgaatacaagtaaagatatatctgttgtgaactctgttagtgcagaagtttgtggcatttatgatatctttggagattcagaaatacatcctagagttggtgatcaataccaagttgtaattccttctccaattacagtatctgactataagactctgactgatgttaaaatggagaatgatggttgccataatgttctcattggtttgcccataccaataatgtggataaatgaggagagtgagaacaagaaacatgaagaacaggaagctattcatgtcagcaacaaaaatgagtctttaaaatttgaatgcatcaatgaggggggaatagttcaaggagggagtgatttgaaacctaaagttgagcctttagattttacatcaggggatgacacaaaagaggttgaaccagagaagttagctttggagaaatatatgataatggctgaactgcaaccaaaacatggaggagaaggccacttcctagttcctgggtgcttgagtgacatttggagtaatattgaggatgaagggtttcttcttgggttgtatatctttgggaagaaccttgttttggtgaagaatttcattgggagtaagcaaatgggagacatattgacattctactatgggagattttacaggtctgaaagatactgtagatggtctgagtgcaggaaaataaaaaccagaaagtgtatttatggacaaagaatcttcacaggattgaggcatcaagaattgttgtctcggttgcttcctcatgtgtcacaggattgccaaaacactgtacttgaggtagttataaatcctactgagcattatgcttctatgcatctttgttaaactacaccattcctatgcagattaccacagtttcctctgctctatttgcattttattttttgttgggaaagttctacatgcttgcttacacacacatatcaattagtttgtttcctccattatgaagttgtgaattcatgtaaaaaaatgtaaaaataccttaaagataaagattttcaggacatggaaatggagagtaatttcaaaatagttgtttctttaaatcaaagtcagtttactagattttcatttatggttatggctttgtaatgcagtcatcattagcacctgagatttatgtatgtataaccttctggccttcaattatatactctacattacatttttataagaaataacacataacatatagtttcctacattttgttaataattttctttcaccattttggcagtcctctaagacatatggggaggggaaaatttcactacaggaatatgtgttcactttaaaggcttcatttggtttaaatgctcttgtggaggcagtgggaattgggaaagggaagcaagatcttacaggaatcgccatggagactccaaggtccaatcaagttgcacatgttcgcccagagataccgattggcaaggcatgctcagcattaaccaccccagagattgtcaactttttaacaggagacttccggcttagtaaagctcgatcaagtgatctattctgggaagctgtttggcctcgtttgcttgcaagagggtggcactctgaggagcctaataatcatggtgttgttgctgtttccaagcattctttggtcttcctaatacctggcattaaaaagttctcaagaaggaaactagtgaagggagagcactattatgattctgtaagtgatgtcctcagtaaagttgcctcagatcctagtcttcttgagattgaaagttgcaaaatcaatgaagaaaatgtgtggattgatgaaacaaaatcggaccaagaagatttttctaatcaggaacgccattgttatctcaagccacgcactcccaatcatactactactgatgacatgaaatttaccgttgtggatacaacaagtctggcaaatgggaaagtgcgtaaggtgagggaacttagaagcttacctactgaaataatctacacttctacctcccttagtgactctgaaaaggatgatgaagacagttttgaggagtcattaagtaaatccagttcagctgataccttgtgctcagagaagattgagactaatgatcttacctgtaaaacagtaccttttggtggcaaggattttgattacaacactttagaacagggcttttcagataaaggtttggctaccatgtctgaaaaaatccataaggataaagaggctaatttactcaacaacagaaaacagttgaaagaggctaaaaagtccaaattgatccagaaaattatttctgaaaatgaaaatcatctagctcctattgtaaaacgacgacgaagattacctcatatttctaaggagatgagtgataccacaatcaacagcagcagtgttgattccatattgcaacaagaagccagtagctgtgtcgacaattcatattttagcgagaacattctctttcgggtggatcaatctcaagagactttgtcatctaccagttcatctagaggaggcagcccaatcactagagctgaaggcattgctaatagtaaccatatggatgctgattttcctcatgataaacctccaacccgtacattgattgacttgaacttacctatctctccagatgttgaaactgatgaatctcaaatgatggatacagcagaagggaaagatcatgaaatggacaatccccatgtagtgaaattctcagaatgtgtagctatctctgaggagcaggaagctaaagtagtaggttcacgtagacaaagcacaagaaatcgaccactgaccaccagggtgctggaagcttttgcttgtggatttttggacataaagcagaagcgaaagtcaaaggatgcatttcttgaggacaacttaaagttgagacccccctcacgacgtgctcgtgctagggtgacaacaacacctccagaaagtttcgattccattactgtggatttccctatggaggaaagaggaagttctatccaaaataccaatggtgatgtattcaacaagcttgacatcaatactgaaactggttacaaactagagaatggtgcttcttaattctctatctcatagttcttcactcaagaagtcaattcttttggctgctacataacacatcactctcttactcagcatttggcatttcatgtgattatcacaaaatgttatcggtggaaatatatctcttcaatgaagactatgtcgactgatataaaacacctctcaagaaattacttaatgaaccattcttttgggacaaattttaacttttgtagagttcatgtttcacatggtaagttctaattattagttgtcatatgattccacggtgagtcggaaaagaatgtggatgctctattgtattgtgaaaggcatgaaaatcaacgtcgacaaggtggtggctaaagagatttttgactgtgcacactgagtcaagggaatgttgttcttcccatgcctaatcacagagttgtgtagatgcgcgggtgtgccaatgatgcctgaagaggaccctgtcccaagaaaaggagtggttagttttgggcctgctcgtgcccgaaatgcgccaccacatccactgcttctgcttccacttcgagtgacccagtgatggagcggttggccaagtaagaagccttgcaacaacaaatgctccagcggcagtcgcagatgtgtgagtggctgcattcccattagaactaggagagggagcgagatacgtggatgatgcgagctcttcaccgtaaccagcctagagcaacagctgcattcccagctttccctgagctgcattcccagttgatgacaaagaaagggactcccgtggtcgagagctcgattattgagacaatttctctttttccttagtttaattgttattgtgtttgtgtgtgctgaactaatgatgttagttaattgttgccactgtttgtgtttgtttattttgtgagtacttttgttgttgtctattgtgtgtaataaacattatgtggattagatttgtattaattatgttattttgtcaatatttgttatgtttagttttagcttgtaattgagaaagatagtgcatttattttcagcttgggttagcataccgctcgatgacgaaaagaaaaaaaaatattattattatcatccatttcctgccattagtataagttttgatttttcgtgtgttgaaatgtctagttaagtgttattttgtctaaatgttagtttatgggtaattctttcaaataaatgtgtacttgtgctatttcactatgctttgaataattagaatgattaacaccttgagagagtttaagtttctgaaattggttggtgtaccccttgaggcgaaatcctagctagttttacaacttggaaatgatctaggcgatttttgaacgattgaatatttcaagctaacccgagaatatttacttattaatagtcaccctatttgagccaatagcctaattcttcttaacacctatcaaagttaatatactcacacacaaattttctccttcacaacccaaacctatttgcctaagctatcaagtatcaatcaaacattaatggggtagggaagtgaggataaaattttgcaaaatttggtgaaacaaatttatattggagataaaagtacctatcaaggaccaatcaaacattaatggggtaaggatgtgagttcggggttgtgagagttttgactcacct

SEQ ID NO: 37494 - DNA, 4931 bp, Cannabis sativa
  modified_base (4891)..(4893): a, c, t, g, unknown or other
tctcattattcattaatacatgtaatccccactccattcagagtgggtatacgtccccgcaagtcaaatttccatcactaaattatgctctagttgagccaaagccaaatgagtaagtaattatatatatatgtgtgtgtgaaaattgttagataagggcatcattttgcttttattatggtgcatttcttattttctttatataaagaaattctaattttttttgtatatgactgtatacatcatagtgatgcaatatgggtacaactaacgattctgaaatttatttttcatctatggggtggctgcctactataactatagtgtagactgtcgtttcaaaaaattgaaatatagtgtttataggtactaaaaacagaaaacactcatacgggagagtaaaagtgatgcccacacctaagaagcttcccgtatatatatatgagtccgatggacacagcctttggactgaaatttttgagtgggggtgcaagttattgccacaaattgatagtaggtatggaaaaatgagggtatactgaacaatggcccaatgaaacataagttgggtttagacttggttatgtcttgagtggttagaagtttcagtattgtgtttagttctgcaattgtagtccataagtaagttattattattattggaaactcgaggcttaatatagttttactatttgatgtttgtagattttcctctgaagatgtctctgcacaaaaccaggtgaaggcatctgtacagcgcagaattcggcaaagtattgcagaagaggtaactttctgtgtcagtttatttaagttcaaacaagtattactattacataagttttgattcatgtgtctgtatttattttcgctttcattgctgcccctccagtaaatatagattttttaacacttagttgatttcaatttcagtatcctggacttgaacctgtgttggatgatttgcttccgaagaaatctcctctgattgttaccaaatggttcgtcacactcactcggttgctccttgcttgttttcattcaaagagaagagaactttgtagtctgaactttcttttgcatctaacatccctcttaactttgcagtcaaaaccatctaaatttggttgtggtaaacaatgttccactgtttttcaacattcgtgacggcccttatatgccgaccttaagacttcttcatcaatgtaagaatttcctgcttgcagaacaataaattaaaataatgatgacacaataaatacttcctaataaattggtgacactgtgaaactcgtgctgttttttttaacgaaacttccacgggtcagtttggcaaatgattctattataagtaccagtctttggctagtctgtagatttttcgcatttgagtccagcgggaagggggttattaaagtccttactcttattcacgaaccaatgacaactttggtacagagtgtgaaattaaccaaataggcagaagagatagaatctaactttgccccaatttgaaatggactttcgtgtagattttctcaaaccagcccctgaggctagagacaaatgttagagcatttaatttaaatttaatgtgtagtcagttttatctgtattggatcttggtcttttttcagtttgattttcatttaatagtggggtgttcctgaaattcctgtttttctgtttgtagcttaaatacatattggggtgttactttttgcacataattaaagcctttacttgaaaaaattatgggatctttgagagtttggcaaaaatatggaaagagtttatgctttgttattgattgagtttagctttactattgagagggaaattttcaatgcagacaataagctgtgttaaaaagtaaatcagaatcgttttattttatctcctttacataattaggaaacttaatcaggtaacaagtgtatgagaatcattaccatacaaatgactcccattcctctagatatgataataaagcctttttctttctttctttccctatatatatcattcttatttcttattactggaattctccacttgatttcaaaaccccagaagaagatgatagggatttcctaccatttagtgtgtaaacagtggcaaatcaaaggcaagatagccaaacagtagcaaagagaattataatagctattatattgatgttacagtgacaaagataacaagctgggatgagacccagctctctcccaagagcaaaaggctcatttaactaaaatcattcacaccctttttccttcactattgagtcctatatataataacaatacccctattacaattacacttatgccctttttatttaatatcccaatgcttatcaataccggccgcccgaaaatcaccttgtcctcaaggtgatggagatcaacttgtaacagcagtaggtgcatcccgtgctcaccccttgtcaaagaaccaagccaacaaatgctaggtgttcgagtcatgagaaagacgccactgctcgcgagtctacctcgatcaaaaaaccagctgagcaaattaatatttgctctctgggtgtacagaacaagttgaaagagggccactgatttttgcccaaaatgccttgtcttgcccctgtcgaacacccagaaacaacccactccagtagataaatgagaaaaacaagagatatacccccaaaatccatagatgtttttcagaagggacactccaagatctatttctttttgttggtgcctatcagaagattcatgctatgctttcctattatttattctgcagatccaaatataatgaaaaaattacaagttgataggggagcaataaaatttgttctagctggtgcaaacattatgtgtcctggtcttacatctcctgggggtgttctggatgaagaagtcggttcagaaactcctgtggtatgaattttacataattattcgctattttaacattgcgaatatttccatgttctgataaatttttgaagtctgaggttcttaccttaaatcttaatactctcaggccataatggctgaaggaaagcagcatgctcttgcaatcggttttacgaaaatgtctgcaaaggatatgtaagttaatctcgaccggatatatgggctgttaaatcattttaactgaccaaccttgtgaaatgttgctatgctatagtttcatttcgtcgcatattatttttttcatttacagaaaggcaatcaacaagggcattggagtggacaacatgcattatcttaacgatggtctttggaaggtaaaaaatgaaactcaaatttcaacctctctttatcttatttgatatgtttctttgtaaattttaataatagagtgatttttattatattactaagcagatggaacacttttcttagattgagaattttgaaatggaatattgacattcacaagatcagatggaacaaaaaggaaaaagaacttgtttgatgaagctcttataattccatggattctctttctctttttttgggggtgttagtattattctcaagaggtatcatcttggcatatatatatatatatatatatgtatatgtatatattttgatgaggccttcttgaaagttggttaatgttttttccttctttccttttcttttatgataatatggagttgaactgtttatctatctatatttatatcatgtataaaagagagaagagaaccattttttgttggcattttgtacctaattttaacatacatatatatatacattatatgttaaaaaaaatggatttttagaaaattatgaatagattaagatgataagatttaaaagtttattatataaataaaaagcttatcaaatcaactatgtttattactattaataataccaaaatatgagagggaaaaaaatcataaattgtttaaggtgagtctatactacatttcccattgatttgataggctttttatttattttggcatttaaagagagttgatttgataagcttgatataaaataatattgtttttcatgttgaagcaacgtaatataatgtaacagtaattgcaacgtttaataaccgtctgtatttttatgtattataattcatgaaaatattaaaagaaatttataaatttttttaaaaaaaatattacaatgtacacctttgaaagggatgtatagatatactgttatttgttttggtatctataataattttttagtcaattttttattatttgttttgtatctaaaataattttgtcaatttttttttatagttatttatgttttagttatttaagataacgttaaatttttttaagaaattcaaataaatttaacacgttgaaaatggttgcacacgtgattattttattttataagcatgtgtaataaactgtttggatatttttctctatgttgtaaattattttgaatttcttaaaatatatatgttatcttaattaactatgacgtacatgaatataaacaaataggcatagagtgcatcaaaacatttcttttaagaagcacacagttctctttttttttcgtatttattttgtttaattttttctataaaataaccttttagaaaaaaaatatataatttttgtaaatttataccttaaaaatcataaaaatgaaaattctcctaataaatatggataatttaaaaaaaaaaaatacaaaaacaataaaaaaaaattacaaaaatacaatctgtacggagttttcaatatttttacagttttttagattttgttaacgtaaaaaacagttttttcgtgtattttttatgttatactcttgttattttattgttaatttttagttatttgtatattattttttaggctattttcttgttacgttttttttttttttttttnnnttttttttttttttaaaaaaccataaaataagttaaaa

SEQ ID NO: 37495 - DNA, 3325 bp, Cannabis sativa
tgtaactacagaaaaactgttttcagtaccagtttcattattccacatttaattaatcacttaattaaataattaacctgaaaatattaaagtaatatatcatactatatactaagaaggcataatatgccccttaaacaatctaacttttcaacacatttccaaccatatcttccttttttgttttataatgaacaaaggtaattaagttttgtataagagaattatatatatgtatatattaaatattcatattatatctataaaaaattataatattacaatccaattaagttaaaaaaatagacatgtaattacattaggaaaataattatttgttctccctaggtcgtctgctagggtttcttaaaaatatagctgctactctagttttcttcttcaccaggcttgggtgtggctctcgttaggtttgttgattggcgcctagggtgaggttgatggttaacattagtcttcatcctctcctcattcttctattttctctctgatattttgtgtaggtctgtgttttttttgatctcatttggaatctttggccgacagttggtttggatcttgcagggcttgtgggaggaggcttggtgattttgttagggtttatgtcctgaaacgcttataagacattttttattattaataaagagatgaatgatttgatatatacttgaatataaaattattaatatttattattgaataatttatattaaatatctaaaaattccttattcatatatgaggttgtggcttgtagctgtacagaaaactaagaccacttagctatgaataaaatagtgaacaacatattaaagtttagaaatctttaatcaacggttgctagtacagttcactgatgcccgttcttcaaagcaagtaatctcagttcggattacagatgtagtatgacatcaaagtgaatgtgctgtatataataaaaattatatatgacaaggactgatatgaatgaagatgtctttatttaacatgttgtttactataagaacctaattcatatcataatgatgatcaatagtagattggcctaaatccttagtcctcatgaactcctattcatgttattagtttatttgattcactcgttaaagtttctcagtgaagatgattcttacaacttctattttgggaatctgattgttatacctaaattttgaccaacaataaaagctgacacgtgtattaaggttagaatatgaaccaggtcaaacaacacatgattaatgcactaaataacatgcctcgggaaatacagttaatagaaatattcaaactcgctgtcatatagacaatatatgagtaataactattgactaatgagaccagcgagatgaataaattcatctcaaaataaactgaatgcacaatgaaagttgttcagaacgagtaaacaataagcttgtagcttatttactcacatactcgtgagtaagagcttgcaactcattgatccacatactagtaagtaagaatttacaactcattgatccacatagctgtgagtaagagcttacagctcattgatccacatacttgcaagtatgtttaaggaatggaagtaacttcaacatttatttgcctcgcttttgacgcgttgaagtaaccacctcactaatacctttctcaaatggcaaacgaagactgaaagatgcattgtatctcaacacttagtattttgtatgaagatgtttaagaaggataacatgcaaatggtgaggaccatctaacacagtgagtataactgtctatagataaggagaaagagtgattatgcagttatttaatattatcccatgtgcacaaagataaaatgtaacaaatttctacattttataaacagatacaaatgattagatcccaatggaataaccgtcaccctatgcatctataaatggggacagaactcgaggataaagggacgaccaatcttgagagtaaaaatactattgctaaatcatgtcattgtattctatatactaacacatttatctttaataagattagattcataggctatgaagatttaacttcaaaactacgtaaaaaaaccttcttgttatttgttactcttaggtaattagttgctacataattaattctctagtttatttattacacaaaggctaatattttagtaacaaaaacttacgttaacagtttggtgctttcattgagagcctttgtaataaaactcagaataataccctccttaaaaatacaactccaaaattgccctcatggcagacgatactcaacgtaatgaagagaatcaacgagaggagacaacctatcatccgagaaaggagcctcgggcttcgtaaagaactaacactattgaaactctccattctagaagaaatggagattttaataaactggtgaacagatcccaaaaaggcaaagtgagaatacttatgatccaaccagatacgttccactaatggaactggaaaatagggaactttggtaatacctggctaaattaaatcagaggaatatcgagttagagtgtgaagcggcagcagtaagggctacacaaggagaggccccttaaaatcaacatgatccatctgtaaggcaaccacaggacatacctcgaggttttagaaacaggatacaatggaacaaccaagggaatccctcaaacactcaggaagaacaacctaggaatgtgagagatatcccaatgggtggagaaaacccacaaaatcctagaaacgtaagaaataaggagactcaacgtgacaatccaggaacttcgcacggatttgtaaaccaagggaatgaacaaccttatatactggagtcttcttgcatgaatgcaaatgctaggcaaattccacctagaaactaggaaattccacaacacgatgcaagaaatgtaggaaattagcctaggacaggtcgacaaccaaggcatccgtaaaggcctaatcacaatgataggcaaatgcaagatgaaggtggatcatgacgttattactgaggtgactaggagagtattagtaattctcaaagttaccaatctgaaagttactcaaggacaagatctgtgagtaattatgaccaaatctaggcatcatgaccttgatcttcatgagtagctaaatcaaagacaacttggcctatgcgagcatttaaattgtaatgtgctagatcttcgcaatcaattaaatcaaaacacaggtgagcaacaaccaatagggaaaaaacctatggatccaatgttaggctaaaattagtctaagtttcgggtcatattttcggttagttttcactctttgtttct

SEQ ID NO: 37496 - DNA, 4902 bp, Cannabis sativa
tttcatgataaacattttaataatccttgttataaaatatgatctcattcctaagtgaaagcagaaaatgtgataatatatttcttgattgtttccagcaaaccaatcacttttagactttacaaattcatgtactgtattataatttacattttgggtggccttaatgatgttgtaattttaaattcatgatgcaaatatttttattgttatgaatagcgaaattgtgttcagagatatattaacaaattggattattttgttatttattaagacatcattctaaatttgaaggagaaattttgacgctaacaaaacaaaaatggaaataatttcaaagaaaacaaaacaaaacaaaacaaaacagatgaaaatgaaaatgatccagcatgaccatccaaaattctattctagtcatccatgttcttcatgtattcctttgaaagtttagtctccattattaacttctgttctttaatcagagaataacctgattcaagcaaggcttctattgtttgctgttcatcaaaagaaggaaaatattaaagtcatcctcacccctactaaacacaaatttcaaaacacatgttgattttagtaaaattacctttggaggagtaaaaacaggaagcttttccagcttttttcttttgagtagtgtgttgccaagattttcaacaccaccaatatcctctacccactaatataaaaaatatcatttaaagaagaatcagaatcagacatataaacatgcatgaaaaacttgtacaaatttggttattcataatggatgcattgcaatctagtaagtgtattgtatgtatccattaaaaaggttgcttctaggaatttcatattaagtctcattttctttgaccataatccaaaagctcaaatttactggttgtcttttttaccaatcaaatcctccatacatcatgtaaaatttctcacaaaatactttcatgatagtttataaaggattagttgaaatcctaatgtttctctcttgatcattttctcacattctcaaactatgtagtaacaaatttaataagactcaggttatactagcttaaagttactgcgtcctcattttgatccaagtttagtttgtataaagattctattaataacttaattaatagtggaacaaaataaaaaactctgtcacataattataaaacataaaatattcagcaggtaaacaaacttccagaaactcttaaaaagtatttgtaagatttgaaatactaataaagtagcctaatctctataacagatggattcataccttggaaatagacctgtcatatgttcgagaccttagggctccatagaaatctagtgctgtaaaatcaccaaaattaataaataaaataataatgatatatttccaaaaaaaggtttttttttttttttgcaagacaatacagacagaagagattgtgcttgcacagtcacgatctactaaaaagatctctcatgtaacttaagcaagtaatataaatttcgttcatagtagtttctttaattttcagtaaataactccaaaccccacaaaaagttttggttactttaaaatcgttccttgtgtgcaccattaaaaatagtaaataagataccttgattaggaaatgtcttcacaatgtttatcacctcatctttagatatgccatctttctcatacattctatgaacgatattcacaatgtcctcaagatttggctgcctgataacccaaaaatgataaaatatcaaaagcttttagctaatggaaaggaagcaatactgcatctgatataaatcatttatcttttatttggataatataggacttaaaacatacaacatagctaacaattataaaattatttagtgctaaaaaatgaagttaacaccacgagcgactggttccagtcatattgcttaaaaaaaggtagaaagctcatacgattgatagggaaacaatggccactaataacacagaaggctcacacaatctaatgcataatccaaacaaaaaggcaagaaactgagtaaggaaacaatcacgtaccaataaaatttctccattcttccatcacgaatcaagggggcataaatttttgagaaatcattcccagtaacaatgataggaactcggtttgaaatatctgactctcgccagtcttgtccaacactcactcttgtaggattatcagccagattcatgagtgtcccaacaacaatttgattgttgactgtcatctgagtgtttcctatgtgacagcaaagaggaaacatgttttactaaagtaaattagcacaagtacgatatagaaaaactaatatgcactttaatcataaagggaaaatgtggaggatgtcaataatgaactgctagaagtatttatgaaaacaaggagtcaaagacacacataaaaagaaatcaaattgctatcctagcgcttactataggaagtaaaattcataacttcttataaaaagaagaaaactcaccaaatctaccaagtccagcatcaatgtcattgatcattaagcagctcatcttgccctgagatggttaaaagaaacttttctgtcagagtatataacaagtagaaagcagacacctctcaaagtgctattctttccgttgcttattaaaaaaattgacaaataattatcatacatgaataagttgaaaacaatcactaaaagcaaccaccaaaaagacaacaaaagattacagaaaaataatatcaatctctaagaaaatcagacaaagagactccattaaactcaacattacataaccataatgctgtccagagacattcacacttcaatgactaaatgatacaaggtatttaggagcaaaaccagcctccataccaatggaagtgaacctagtctcaaactcagtaaagacaaaggtgaacctctacctaaccaaacttcttatcgtagccttatagtcaatctatctcaccattatgagaccagatatttcgtttgttgtcaatcaattaagtcaatatctgacttgccctcgtcttccacatcttcaaccaaaaaactgaatactacaatacctcaaaattacccctggtcagggactcttcttcccgttcaacacttccccaacagtatcaacttatgcaaagaccagcctttcaactgacaatgtccaaatctctttctttgctgatgtcgactggggtagttgccaagacatcagacaatctatctctggatattgcgtttttattggttcctctctggtctcctggaagtcaaaaaaacatcagaccgtgtcccgttcctcagcagaagcatagtacagagcaatggccaacgtaacatgtgaagtcacttgaatccttgccctcctcaaagaccttggcatcaatcacataccacccacatgcctttactgccacaacaccactgcccttcacatcagcaagaatccggtgttccacgaacgaacaatacatgtcgagattgactgccatttcatccgggagaaagtcaagcaagggtctctcaagctcatacatgttcaatcaataaacaacctagctcatatcttcactgaagccttatttccatcttcctttactgaaattgtatcaaagatgggtgcgataaatttatacactccatcttttgggctgttagtcagttagttccttttaagttagttgcaactaaattagtcaacccctaactaacttcagtccactagcttacaattcgcctatatataaaacttgtactcttcttctcagattcaagctgagacagtatcaatatacaagaaacattcctttcttgctttatttctcacattttctattgccaattaaggaaaagagaatgacaaaaacaataaagggcttccctagattcaacaaaaccagtggatctaaacaaattaaatatctatcaatctaatgctatctggcataggagtgcagtagtgttgagaaatagcatagtgatagctgtagtaagctagtggactaaatatccaaaagaaaaacttattatctgattctcctagttatctagttataatggaatgaaaatatccaaaaataaagataactagataactaggagaatcagataataagtttcataaacgttttatatatatatatatatatatatatatatatctgtgtgtgtcttaactttggaattttgtctcaaaagaaattgtacaaacaataacagaaaagttccaactccaatacatgggttttaacttttaagcaaatcccagaaatcatgaataacatttgagaactgtgtgtcattctatttcaaagaaaaggtcaggttctgtttcttccgtttttcaattaagattaaaaaaattcaagtctcctcagacctcggagttcatcaaaatgatgtaaacatcactaaaacgtacagacacaacgctacctagaatttcatacccaaagttttcttaattacggttctccatgtaggacaaaacaacaattgatatttaattgattttatattataaattattagtaaaatacatgtgtcaacaattgatttgatagaattcaaaagagaatgtaatatagaatgtaagtttttaattttcaatttgaaccgagataagaacatttgcagggttttaatttttctttcttttttgaaaatttgcaggttttcattgcaacaggcatagaccttgaacggagtatatcaactttataagctcttcttcatacattgcttttaatggaaaaccccaatacagaaacaacaataaatccaccaccacctccggaacaagaaccagactccaaaaagctcaagatgtccacgacgaccacttccgatgacgaacacactactacagccgccgccgctacaggcgaagagacc

SEQ ID NO: 37497 - DNA, 2300 bp, Cannabis sativa
ttatggtgtggaggagaagacttatgatgattctccatgcacttaagtagatacttaaaagtctcaatctcacaagggatggtgagaccaccgccatggtcgaacccaaactcctcctcagctttttccaacaacactttgaacaaagaatgactaagataactggtgggtattatgaacctccgaagctccggtcccacatacaccgccaagtaacctttcggcacatccggcggtggctccgggctctgacagctctcctcgtcggaatcgcagcaaatcacctctgtcaacctcctattgatcgccggagatattcctcctccgccattggtgttttcttccacctgctctttccggggttcctcgtttggctttggggtttggacgttaagtgtaacggattgccatttctggaggatttccttgagccgaacgatctgtcgtatgccgttcaatttggtgctcccattgtcgtccatggcttttaatagtaataataagagattatacaacaaggtggtgataatgaacgacgtcgtttcgggtcactcgacaccaaatcccagaaatccagaagttcagagctgaaactttcgtcttcttccactgccatgaaacacccaaaaacaaaattaaaaatctcttcttttttttcaaccatttataatgtcgtttttataaataatattattagaaacaggggattccaattttgataaatttcattaatattaggaatggcgagattcaaatcaaaactaagatctgagaactataatattcttatcagatctagacatgtgtgtatggttattacaaaagtcaaaaattctgaatttttaaatacagtaccattcattccaatgataaaagaaagagaatttaagcaaatacctggagaagaacgaagacatcagctgcgaacccgaagaagaaagaccatgggagccacggaagaagctctccgaaatgaacaggaaacgaaagatgtcctaccagttcctctgttttttctctgttttttctaagaaataatataatggctaattgtaagtatatctaaagatatatctcctaacaaaagcgaattttggaaaataaggtaagttttttatctcccttctttttttgggataattttgcagtaattttcggagaatttttttctctttatcgctagcggggaccgacgcttttggtggatgtggctgttttctcgggttttcttcctaaccaaacaataacccaactgttttgtctttccaacttccaagagccaactaaagaaaacgaaagagataatcgaagatgcaaattatcaattaattaaatattactaaaacaatacatttggataatgaaatgagttgttatatatagcttgaaggagaaaggtctttatagagaatagaacgagctttaattttaaatagtcggtttagtattactttagtaggtgttcataattttaaggataattaggattatattaaattatacctttaaatttttgtgtaatttcattcaattttactaatttaacgattgtttatatactaaatcatgtttctcaaattttaaaatttactaaatcatgtttctcgaattttgaaaagtatcaaatcatgttctttgaattttgatttatattagactttcttactaaaatttgacaaaaattcttaaatctaataatctcaatagttttggaagatttttgactatcttaaaacttcatgagataatttgataaatgtccttctgcgcaaaaatcttaattggcctaattttaatattagtttcttgaggagtgttaattataacattctattacaactttttagtaaacctccacacccaaaattagatatcgaaatattttttcaatttttttcatagtactattctttataattacagtatcatcctttaaaatttttgaaaaattcttaatagtttaccatatcaaaaacagaatttctgatatttcaatttattatgcatgtttaaaaaatttcaaaagtatatttagcacggtaaataattcgaaattttttaaaaaattacaaggatgatgttgtaagcatcacaaacacctccacacaaaaaaattgaaaaaaaaaaaatatttcgatatgtattttcaaatacagaagttgactaaaaaattataataaaaagttgacattagtactcctctaatttttttataattaatttttattttattttgtgttagagagagagagctttttgaagttggactttagaacctccattaaaaaaaaaaaaaaaaa

SEQ ID NO: 37498 - DNA, 2356 bp, Cannabis sativa
ttttcttggtaaaagagcacactcacttgtagtttgtccccgtagaaacacttttaaactagttcatctcaaggaaattttaagaatgagtgagtgtatatcccatttctatacagaatctcttctattaggagaacaaaattgcaatgaaacacaatggaagtcgaaaaacagttataacatctgtaaaattgttcctcattttgccagccctcaattagggaattcatatgcaatgtatggcgtctattttcctaaattttcttttaaaactacaaaattaaagaatcatttgaaagacttggggattttggtactctagttctccgaagcctccttcttttggtttgtctttgacctcttgcgctttctatttctctttttagaagaatcactattcccatttccatcctgcgaaaggtttaatttttattccaattattcatgacagaaaagaaaacagccaaagcatcactaatgaagaagaaaaatgctaaccttcttttgttgagtatctgcattatcaggcttctttttcttcaaacatgaaagtggatttggaccctgcaaaaagaataaaacattcaagcaaatagtcaatcaatcaataggacttaaatcttttccatgaaagagtttctaagttctaacctttgctctatttcttttgaactgaactttatccttcatctccaatcccttgtggacattcttccttctaacagtttgctcatcttctgtttcttctttagaaatccccttactagccaagatctttagctccaatgaactcatgtgagaacgctcctcttccagttttttaatgtaagaccgttgaaaaggcgatggcgattctagcaatacagcatttcgtgatgcatatattataggagtattgggtatctgccaaaaacaaaaccaaaacgcttactcaattacacagttcagtcactggttcaagcaaacccataccccttaaaacatttaaaagaaataaagagaaactcacgcacctccctgaatttctctcgcaacccataatccgtagtagcaagaaagaagtgctcagcattagttttgccaattatatcagcaatgcaagcatcaccacccttcaattcttcatgtggacatctgatattcatatatgtattcaaattcaaactcaacataagtacaaagttgaaaccaattacatccatacaaacacaaaagagggtcaaacccaaaacatataatacaaactataaacatacacacacaattttatcaatacacaacaaactaacatagaatagaagcactattcaaaaaaaaaaaagaaaacactaatatagaagcgcaccttgccgttatgaggctacgagctgcttcaagagcctcagtataagatggaccaagccttttcaactcttcaataatacacctgcaattatgaaaagggtattcattagaatttattttcaaaccaaaacaaaaatatttatggggctataaagaataaaaacctggtagtgaaaagcttgactggagaaccaagaagttcagagataacttggtcagcgggggtaatgtgattatcaaccaggtggtgcacaaatgtgccacagcagaatactctgaagggctttctgaaaccacagcaagcagtgtagaacttcactgccctgttctgacgctttcgtttcttaattctcatctatcaataagaaaaaacacacacacaaaattggagcaataaggttacgcgactgaaacagaagcacccaatataagagattattactcaaacattaaactagtttattcctataaatatatatgtattacacaagaatgaaagtggaagaggaaccttggagcagtagtagtaataggtgaggcagaaagaagtggttcagttcagatactccaacagagattgcgtcggaaaaattgtgagagctgatacgacagagagcgagaggcggacgctcaagaatgagatggagagggctaatagggaaacaaattgaaattacataataaaccttatacttttatctttttactagtctggactcttttattttatacaatgtgtaaataaattaattcaacattgttttctatattataaattattctaaattttctaaaattttataagatgttttaataattattatttccacaactataaaataaattaaactaaaaattctcttgaatgttattctttttttttttataaagaggtgaattgtaaaagtacctaaaattacatatacaatttgaacaaaagtattttttaaaatacatatagttattttatgggagaaattcataaaagagttaaaaaatgagaaaataaagt

SEQ ID NO: 37499 - DNA, 5437 bp, Cannabis sativa
tttctctctacataagcaaagttagactaattcttaaaatctataaatctctatttattaattaaacataatctgttaccataaactcgattacttaaattgccaaactatgaattcactataattactagacttgataattacacaattacttctaaacacaccctaaattaatcattcatgaaagctaattaaactacttggaaagcaaaagattaattgtaacatggataaaattaaaattaggaataaaaaaaaacaattagaaaaagggaagcatgccactttttttttctttctttctaaaatggagaataatggatggaatgggagtatggagacaaagcaaatagaagaggtgaaaatgaatgaatgcgactactttcttcttcttttatcttctttttccctctatcttacatttctggtaattaagagagtcctgtcctatgttacaaatcaaaattgtggtggagttgcaaattaccacattatatcttctagtttttctctttatatattctctcatcatatcaattagaaacagctcacctctaccaaaatgaaaaattaaaattccacaaagctcattcactcactcacttgcctctccttttatgaatgaatttagtggttccataccactcgccaaatccccgaatcaccagccagccgccgccatgccacagcacgctatatcgtatgatggggtggcatgagaaccgaaattccaatttcagagcaaccactcaattcacactgtgctcaatttcactgcagagtgttataacaaaagaatatgtagaaacaaatcagaaagcccatcatctcaaggggcttcgtgtatacctttaagggttggttgcccacatcagatcggttgggaagcatatgccgctttcgataaccaatcaataaggaataacgtatggcagagctaatatatcagctgattctatctgttgagcttccgaccacacctgtggtgtctcctcaacagttgatggttccaactttgccttctttgttgtttcggaagtcttaatgtcaaacagccattcatcgtcactgtggtcagaccattcttccctgttcggtacagaataaatctggctaatgtacttcgagtctggatggggtggtcttgccaacgcttcagcaattggatcaactgctggtggtggtggtagtggcggtggtgtggacttaggcttcatgggagagacagacaatggcttagcttctgtatggggtggtcttgccaatgtttcggaaattggatcagcagctactgttgcagacttgggcttcttaggagaggcagacaacgactgctgagcttctggatggagcggtttcaccaatgcttcagcaattggatcagcaactgctgttgcagacttaagcttcatattatgagagacagatgatggccgagcttctgtatccggtggtctaaccgatgatgcttcagcaattggatcagctactgctttcgcagacttgagtttcatcgtggaaacagacaagggatgagtttctataacaccatttatctttcgatctttattgtccatcttgagattattggatgctccctttctatctgatttatctttattctccatcttgagattattggaccctccctttctatctgttacatcagcagaaatttggcacggttccagtattcttccattttcccttgatgaataagaagatgatgatgcaggccttggcaacttaccaggcaaattatcatgggctgtaagaataatgaaaaacgggaaactttatgcatcaactaccaagaaataacaagactttagacctcattagcaaaaatgatttcaagaatatgccggttaatcaagtgggaaccgttaaaaatcttagttgtaacagaatttgttatatgatcatacaataatcaaaatcctattagtgttgtgaaggaaaatcattctgcaaataatgattgacttgtcaaactcaccatgtgcaactccatttgtctcaatctccttcctcttctttggagttccggtaacaggaacaccgttgttgttgctgtcattgggaagttgagcggttttgattgtatgattattgaggttctgtttgttgctttctcttaaggtatccagctctgtggtcttaagttgaattttctccttcgctttctcctcttttttcttctctttttcttctcttctcttctgtttctcctcctttttcctctgtttctcctcccttcttttctgcttatcttcctttttcttctctttatccctgtccttatcctttccatgactctttttctctctatctttgtccttcctcttaaccccacgtttatcgtcactttctttgtctttcgtcttctcattaccatccatcttcgtatcaccactcttatccaacaatctgggcaaggattcaaatttagtttgtaccattccagttgtgttctgaaccattgcatttccaccaggtctcgtaacatccctggttccttgcccatctgttgttttaaattcacctctcttaaccaccatgcctgcggccaaagtgcttgtatccttcgccacaaatctgaccatcccctcatcctttctccgatctgcaacagggaaactttcaaatttgttaccagttccagttgcctcttctttagttctcctagcaaactcctgaaccactttagactcatcatccccattactattcttagtaagcttctctgccttaatattgtctccaattttcgtagagagctttttatcagcgctaatatctttgtctctgacatctttctgaatgaatttctctccaccatgagactcactctttcccgaaactctcttgtcatccgacgtctttgttttgtctttaggtttctccccgtctttctccttgtccctttttttgtccttgtctttgtctttgtgtttttcctttttgtctttcttatcccgatgcttcccatcacttctatccttctcttttttatccttaccttctctcttctctttgtcctttttatccttcttatgctttttttctcggtgcttctcctgtacaacacagaaaacaaacaaaactctttaagattatgcaaatacttgaatatagcagagatattcaaagtaagaagtatttgtgaaaataactccaataaataccacaaagatcttcaatggaaagttatcaggataaaaacacacaggcgcaggcactcaaagtagatataactcaacaatttgagcaaaatgaatcccagcaaaatatatatggtaaaggtaaacatcccctatacaagaaagaacatagattcaaaatcaatatatcgaaactacaattaaaggagaaccccttatgctgccccaggtgatcattctttctccctctctctctttttttttttccaatgcctaaattagcatgacaatattgtaagattaaattcaaaacattagagctttaaaaagctaaagaaatgaaaaatgttaaaaaattccctctgcttcaaagtaatttctcaaacaaatccacagtcaactgaaaaaaatagagattattctttcactaaataaccaccaatatgatgaatttgacattatggtcacactctgtgtaaaagagagatcaatttttaggctttcgacagagaatatgtttgtaacatttcattagaaaagattcccggaatataataggtgaaactataacctaggagttgagaaactaattgaattgtaaaaaggcaatgagatacaagaaggattctgagatccattgtaaatttgctttgtcccagtggtcaattttttttttttcaaaaagacttcgtaattgtagagtgatagtggctaagtggttaggatgggaatggataaactgatacacctgagtattcaaagaaaagctaggatcgaatctttactgatatcaaaactgcttacagaattttcaagtcttcgagacactttgagatcttcacaaggaatattcagacatctcactaatcgactagggcagtaagttgctgaccatctttgttgactatgatgacaagaattaactaagaatataagtcagtaaataaaacccggctagtctctctcttatttttgatggttggccctattacgactggaatatgttaggcatacagcaggcctaacataaaattctaggttgcagtttataggtgaaatttttcaaaccttttgttttttggatttgttgagagaatagggagtttctcaagtaatgatatgtgcatactgtcatattcaaattataaacaaacttaacttgtgcttatgtggcaaaacaattcaaccaagatataaggtatcttggccaaaaatgtgagcccttatatcagttagtcctaaaagcttatggttaaaagacacgaagttatgtatataccacattactttgttattgtgttgaagatgttgaaaatatcatcgaaaacacgtcaagattctacaattatgaagtatcataaaatccaaaaaaaaaaacaactaacagtaacatatccctagtacaactgaatgaactttaaaatgtctagtctacaagctaagcaaatattgcgagcaacaccagtggtggtaagcagaatctacaagccaaataatctaataaccaacacaaacaaggacacagatatttgttaatgtgcaatacatcttttatctatagatgaaaaagagattcggataacagagatcatcacctaatctataatatgaatgggaaagaacaactatcatcaaaagaaattgaaaaatggttccttacagatggccatggttttagaaaaaaaaatgtagctaggtaatgcctgtgctatggtgcagtcaagcatttcacacacattttagcattattaactaatcatatttaacttgctgctcaacactagaagaagtttaatggtgttacatttatttttcttctactttggcattcattcaaacaaattgaaaattattcttccacttcccaaatctatggcgcatgcaactaatatggaaaaggaaagacggcgacaaaatgttttacaataaaatggcactggcacaatcataaaacataaagaatctttcacacttgcctcacatgcctggaacacaaattaactactaaggaagtttaaatcatacaccaacaaagaggttaacatgaaccaagatatcccacaaatacatgttgtaaagcggttaaaaatttactttcaatcaacaaataggccaattttcctatccttattctctacaatacaatttagagtaaaaccactatatctcaaacttatcatctcactgatacttaaatattcagttcatatgtcaataccagatgattaagattctatctatctctatcaagtgtttaaaaagcgacactttaa

SEQ ID NO: 37500 - DNA, 2769 bp, Cannabis sativa
aagtgttgtagggttgtaaaaacacatgttttgaggtatatacatggttgattttcccaaaaaaaaaaacaagcttactcaaaataaatctttcaaatattcaatcggctattgtttttcatgtgtttcttttccctcaaaacacatgaaaaacaatgagttatttacatctcaatcaatatttaatgatgacatgttctgttgattttgttagtagacaccagttgtcttatttgagtttctccgacttgttgtcgtttcatctttttatgtgtcgtttaactgtattttcttcaagttgattctcaaagaattctattccaacatcctggaacttggaactggaagtatataatgcaatgctaagagcttttggaataacaacaaaatgacagtgttttgtattattattttttaattttttaagtttaatagaatagaataaaatggcatctcgtatactcacttgagctttttgaccaaatattgtttattggtttaaaaacattgatattcccaccattgtgcctcctctaccgtccatttttaaagatgttttctttgcttttccacagctacaataacttcattattagacaacttgattttgcttaaatctactacttatcttttctttagttatttggctcagttgaaaggaaaagaaagaaaatatgtgaaaattgagctaaaaggtgtgtttgtgtcgatcttttcttatttcagttttgaaaggtcacaaaaatccacttttattacagttcacctatcgacaagctgtttgtttcaagcttcaaagaagagcagatttcaaagatttgacataaatttcgagatctttcaagacttcctcggaaggtttatcctcggccaacagcttcactatggcactcccaatgatcacaccatcagctccccatccagcaacctgtaacacccacaccaaagtaaaaggtttctttcttaatacatatttactttcttttagttttccaactaacatcattacctaccgagtatgtatgtaacaagttaagatagcaattttacctgttttgcatgctcaggctttgatatgccaaaaccaaccgcaacaggcttatttgttacctgccatttacaaaaaaaagaaaaaaaagtaattttggtttgtcagtctatatttcttttctgctatggacagatgagttacaatagtaatgagatgaacagtacaaaacattatttagcagttaagctgatcaagacaaacctctttgatttccctcagaagaccttcaactcgtccgctaacagattcacgggttccagtaactccaactgaactcacctattatacatttcataaacaaataacacctcaaaattaatgtctaaagagagaactgagtgaaccaagcttacttaaagtaatacattaagctgcagaaaaactacagaagaaacaagattgatccatacaaaaaccttaccagatagataaatccttcagcagcttcaacaatggctttcattcgatcattgggagtagtgggtgtggtaagcaatacctttgaagcatagaaagaaaatacaggtgaattttatttccaaatgaaaaataaattgtagccatctaaatgaatgaaacataccagttcaatatcctttttcagagcttcctttcttaagttatcagtttcttctaatggaacatcagggactacaagccctgcaaacaacacgaatgatgaaaaagtaaaacatcagattaattggttaacaaagtgcagcaatccgaaagggtgttaatctaatattgtttcaaaatttgttacattatcaaaaagaagaaaaagaaaaaccaagacaagacaaggaaataaaatttggtaccatgtacaccaacatcttttatgatagacataaaattctgagtaccacgcttcagaatagggttgtaatatgtgaataaagcaatcggacaagataactccggaaccacctatcataccaacaaactctattattagataatcctcctcatacaaaccatgaatgaaagaaacatcatagaaaattttagagtataatattgtttgtacctctttcaacattgaaataattgaatcaaaattggtccctcttgccaaggaacgagtagctgcagcctaaaaggacatacgcataaaaacataagtacaatgaactaataatgaaatcattatcattatcattatcaatgtaataaaagaaagcaacctgtataacaggaccatcagccaaaggatcagagtaagggacacccagttcaattatatctgatccacaagaatcaagaaccttcaaagcttttgcggtggtctcaagatcaggatcaccagcagtgataaaagggataaatgccacctacaacaaaatcacacacttatttgtttcaacttcaaatcgagcatttgaaatgttctcactttcaacaaacaatcacaaagtcaacttaataaaacataacccagaaagaaagtaggaaactttgaaggagagagagagagagagagagagagcatacctttccctgctgtttcaaggtggagaaagtttgggagagtccgagagtagcagtaggttgagcagtgagagcggccatagaagtgaatctgtttttagttgaagagaatgtcaactgggaaggagagagaggaagagaaatgtggtttcgggttttgttgaagaagatgaaggcattggatttcagggtgacggcgttggccattagagaagcagaagaga

SEQ ID NO: 37501 - DNA, 2783 bp, Cannabis sativa
cccttacttgacgcctatgaccagcaagtgaccactaagagatctccacgtgtcgtctctctcgatgtcttccgtggtctctgcgtcttcgtgagctccctatttaattctctcttctgaagttccgatttcgatttcgattctttctttagccttagatatgattccctctgtttttcttccgggaacgagctttgactctaagtcaaccgtattgactgtttggttttatgttagtttgtcgcagccatgttatatattaaaagtaatttatggcacatttcttttctgggttttgttgcttgagtaatgtggacgcaacaataaatacatacatgtaaaatggaaaagaaaaagaagaacactcttactgagctaggacgaatcatatatttgttattttattacaattatatcattgtattccagttgttttcatgctcaaagctgtagtttaagctcaagatcagtttgtaaaatggaatatatagtacacgtgtgacaatgaatatattctaatggtatattggtttgttttgcagctgatgattttagttgattatggtggctcagtttttcccataatctctcattccccctggaatggtgtccgtttggctgattttgtgatgccgttttttctttttattgctggaatttctccggcactagtatacaaggtacgcatgtattccttgatcgtcacttttaatcatacaatgtactttttgtatgttttgataaagagtgacaacttttcaccaatttcgtagtttcaatactcttatcaattttgattcttacttgcgacttgattcatggtttgttgttctttgtaccatacagaaattgcctgaccgatttgtagctacacagagagcggtattgaggggattgaaactatttcttcttggtgtttttcttcaaggtaacattgtgcataaattttaaaaaacctggtcaactttcatacaaatgatcttaagctgctaaaggagaacacgaaaccattaccagtgctctgaattcagcactttctttctcttaggagactttttttgttggtgtcttcttattcgaagttagtctcagtttattcgttttgtctcagggggttattttcatggagtagcttcaatgacttatggtgttgacattgaaagaatacgatggcttggtattttgcaggtaaagtattttatttcactgttttttgtatcttgaaaaggtcatcccccactacccatttgaatgacaaagctcttgagattcataaattattattgtacttaataatgttcaaactcttttcatttaaatcgttctatttcaaaaacctcagtttaattatataaaactagtgcaacatgcttattgtatttacaactacaatctcgtgaatgtcaagtgacaagtaatattgagtccaaatgttcaatcgatcactgaagatacatattgcttcccgtgctgtgtagtttgaacatgtagaacacaactttgaattggtttcggcatttctttcagcggatatctgttggatacattgttgctgctttgtgtgaaatctggctttcacaccaaacttggaagagaatgggatttctcaagaattactatccccactggtaaggttcaaatatatatgacatgtatgtattttgttaattacgtacttttgaggacatgatgtatgtatatgtatgacaaaccatacctttttagcataacaatttctgaatgtgtagttcattcgtgtataataaatctgagaaatcataccttcaaataaatgtgatatgtatgtattttgttaattatgtactttgagaacatgatgtatgtatatgtatgacaaaccatacctttttagcataacaatttctgaatatgtagttcagtcatatataataaatctgagaagttgaacttttttgacatgagagtgctcttagaaatgttattttgaatgatgttgaagccttgaactctaaactactatcaactcaaataattatcaagtcttgtcgttgcgtgttattcaacaatgcaagacatatttttgttgtaattcttgtattttctttccttaacatgtatgtagtcccatttttttcccacattctaggtgtcttgcgattttactatcagcaatatacacggggttattatatggtctatacgttcctgattggaaattcaaagtgttacctgcagcctcttcactttcatcaaatgatacctctgtttacatggtaagataatttcatcgctgaattcttaaatttacttgattttcttctgttatttcatcatttatgttggctattttcagattaagccaaataaagtttatgatataatacaacttcaatcttttaatttgatagctgttagtcaacaatacgttaagtacttgatttttctataaatttgactcgtaactcttgttttgtgctatgcttcttatatgtttggcacaggtgaaatgctctgtgagaggagatcttggacctgcttgtaattcagctgcaatgatcgatcgttactttattggtattgatcatttgtatgcaaagccagtttacagaaatttgaaggtatctgtgtaattagaattatgtacaatattaaatgttaaatatgtaattattgatagttgtcttattccaaagtttgatttgtaggtgtgcaatatgtccaatggccaagttccggagagttcaccatcatggtgtaacgctccatttgatcctgaaggtattttaaggtggtcattcttt

SEQ ID NO: 37502 - DNA, 4139 bp, Cannabis sativa
aatgataggaaattcctatcaaatttttgagacagtttgtaacacacaaattctaactgatacctctagttagataggactagtcttttatatagactcaaaacaaccagcatactgaacaacttatgcatacacctggatatgaaagcatatatttgatgcctaacagtttagttgagttcaatgatcggagatctctaagctggattagagggcttggaaaattactcttattatgatttatagattctatgttatgatacgtatgtttcattttttataggaaaacttgattcaccttttgaaagtgaccaagttcaatctaccaccccacgaaagacgaataatgggattcctagaactataccattggttaatagtgaaaaatatgaagctcttcagaggactagcgattttaaatctgaacacccgtatttcaaggttgtcatgcaaccatactatatccgcaagggacgcctggtaagatctgttttgtaatctaattataataatatttgctgaagagtcataaagtttgtcaaagaataggtgcttccttggagcaaattgtatgtgcaattttctgtgtgttatcacatcagatttgtttccttatttccttttgtgttgctttagcacatagagcaccaatttgcaaagaatcatctgaataagagatattgtgatgtaatcctcaaagttccaaaagagaatgatgcttggcgtgtgaggtacagttttggagagtgtaagaaggcgtcaccaaggctcttacgtggttggtcagcatttgttcgggacaataatttgaaagtaggtgatgtctgtgcgtttgtcttggttgatgcggtaaatatttcatttgaggttgtaagattagatcctgaaagaagctcaaatagtcatatgtccacaggtaagtgatgattgttattcttttggcaactaatctatgttatttccttgattacatacacttcatttttactttttagaaaacttaatgccttgtttgtttcttgtgctccattttagctcatcatgaatctgaaacccctagctttcacaatttttctcctgcaatacaagaaaagggatgcaattcgagtcagaattcaaagccaccattgtttggagagcaacatctctcggctttcaatgagagagttaaattttatgaaaattctgcttttgaaagtggaaatccattcttcaagatagttattgaacgatcaaatacgtggtatgcggtaagtttttctaaaaccttaatctatgtgagctgttatttactctaattgagaagtgttgtgttatttacacaaaatccatttaaaaactaatcagcaaaactcaacaacagcgaaatcgcacgacacattttatactgactccatcgtagatcgatctacttctcatttaagctctcccacaaaatattttcattataacagaggtgaaaatccgaaagggtagacacaaggtctgaggttcgagtccctcttagttacctacatagtgattgctataatttcctggtcctcaaatgttgtagggttaggcagggatcctagttttgaaaaagaaaaatcaaatttttttgaaagggtatacagaaaaacagattaaaccccacaacacaaacttacttgtaaagacaataatctaaaaatcaaaactttcagtgaaactctattatacactcaggttagatctctctctctctctatttcttgaattacattagacaaaaatctaagcaacgccgagcacagcattccaacggtcatttatgtgcttaaaagaaaagtcttctgatttgtgagaattaacctttcatcttcttttcttggcagtgtgtaccattagacatagctgacaaacacattaagaatgattgtgatgtcactctttccattccaaatggtagattttggtctgctcaattcaggaggaggaagtgctatacaactgggaaaactgaagctgtaatatgtactggttggaaagaattcatggcaaaaaacgatttgaaattggacgatgtctgtgttttccagctccgtcataatggaactgagatttcatttcatatttcgattgttcgagttggctctgctgctgttgttgttgatgatgagttaaaatgccaaaagcctcaagttaaatatgattatttttaacattgatgtaatactcggtttagtttatgtgacccttgtaacttttaggctatgtttggtaggataggaaggagagtaagatggatggagagtgggagagacggagaggatagttgctttcctttctattgtttggtattaagagtaaaattaggacgaaaaataaaataaatactaaaattacaattttattatttttagtataattatatattattgtttcaaggaacaaaaaaacattttatataatgtttttgtatttcttggattctcctatttctggagggattgaaatttgtgtatttagagggaaagcgtctcgctcaatctctcatctccttcgtctctccttcttaccaagcaatggaaatcatcattctcattatctgtggctctctatctttatttctctcccctctacttagtattaaatcatagaatttctctgttcatgcaataattccttataagttaagtgaaaattgaaaggtatgaagatgtattgaaaatgtgtacataaaattgtacttgtatgtgttatttttggaaagaaaatgtagaggataaaagtttgtcttctaaacttagagggtaaaatgtagagagtaaatttaaagattgtctaagtggcatataaggtaaacttcgctctatatgtcacattcaaatttttaaattttttttttttaaacgatttaagaattagacgactgattattcagttcatttttctaattttattctcgctcgcgttttcaacagaaggatattcaaataaaattgcaaactattactaataataaaattacataatttattaaaaaaatcacaatatttaaaaaatacggtattcgaatgtttaatgcaataaatagtgcaaattggcttaatattttattcactttttattttaataatattattcctatacataattagttatattcttctctagagagaaaagaaaaatgtattctattttaattaaaaaataaaatgaaataaatttagtaagtacgtacacaaatttaggaaatgtaattaatttcctttggaaaaaacaccaatttggtaagtagccacacttataatttttgtcctaagaccgtttgatatgtttctatgtgttcttctctttcatattcattcttgaccaaaactaaaaagacctttttgaccctgctatattgaccaactgcagtaactaaagctttctttctgtatatagatttttcatataaatcatgtaaatgttcacagtggaaaaaggggcaagaaattagggttcacagttcacagttcacaattcaagctggaaaatccgatcaccattcagattatcactctcctcttatatttacaagagtctcaagccaaagcttttgattttggagctcagagatgctttcatctacgaatcctcagtttttcaagataattttggaaagcactcttaaagagaacagacttgtaagcttgtatactgcattgcatgcatatgatattctttaacattttactgactaagtagagtgatcaatctttgattgaacattaaacagttcaagtagctaactgtacaatcaagtttaatcaaaaagattgtccttttattgcattatggtaattttcattgctttttctttcatgaaaaatttaggattgtgaataatatgcagaggaaattctgctttagtttgtgatggatttagtggaaaaaagatatctagcctttaaacactcaaaagggtagcagatacatacataaataagctttttttattattataaatgaaatcacaatagtattagtgcttgtttatcttggtagtttagatcaattcagaaaaccattattgtttatttaaggatgttctgttttctttgcagctggttccacaatcttttgtcaaaaaaagtggagaaagtttaactgaatcagtgtttgttaagctt

SEQ ID NO: 37503 - DNA, 3566 bp, Cannabis sativa
  modified_base (1051)..(1051): a, c, t, g, unknown or other
  modified_base (1556)..(1563): a, c, t, g, unknown or other
  modified_base (2307)..(2309): a, c, t, g, unknown or other
  modified_base (2698)..(2701): a, c, t, g, unknown or other
  modified_base (2769)..(2783): a, c, t, g, unknown or other
  modified_base (3390)..(3392): a, c, t, g, unknown or other
cacagaatctctcccagcttgcatcgatcaactatgacctgctttcaaagggttataaggatgatcctcccaacaattctaatgcctaaaaaagcttcactccctatcaaaacatggggaattgaatttttggacattagatatcacctttgttgtttgtatacacccctgtacatgtatgtataaccttttataatcttaattaacgatacgcgcacacacaaacttgagacacttatgtttcttatgtttttgtttgcagagataaagaaaactcaaagattctgaaaactggtttggggatgtgctcttttcacattttacatatatttaaagaagaaaaaaaatggagaaaggtaagttgtatgtacacagtttgggggtttcaatttttatgctgtgttgtaatttaaggatatgttaatgttaatgttcccctaggctaggctgtgtgtgcctttgtgttggttaacaatcttttataaaatccccaatttgaactattttttgtagttttcctacacacatggtaaagagaaagaaagaagaagaaacatccctttttttttgtttttttttgttctgttttggctctcatttcatgtatatttcttattgcacttctagctctcataaggttcgaggttcaagtttctcgtttgtactttgtagggttaggcggggattctagttttaaaaaaataaaacaagtatatgcacttgcaagttgattaatgttaaggctttctcaagtgttcaaatgagattaaaattagggattatttttcaaatacataaaaacaacaaaaaaaattataaaaatacggaattacagaattttaaatactttttacgagtctttttattttatttataaaaaatacggtatttttatgttgtactcttattgatttttttgttattttttttttgttgttttgatgttatttagatattatttttatgttacttttatgtagttttcttgttgtttttcgtgttgtttatatagaaaactgtaaaagtgtaaaaaaaaaattctttaaacgtnaaaatgtaattttttttttacaaaaaatagtgctttagtagtacgaatttattgtaaatagtaagaaaaaaaacttcaagatgggtccaggctacattttacaaaggggtactactatcgaattgtgagattttcactattttaaataaaatgattgttaatgctttaaaactattttttctttcaaagtgtcccatagaaaagtgatgcagactgatcttggcttcatcgttaagaaatttcacaatttttcaagatgtgtagggtgagattttgagagaatattaacgagtataagagtaaggaaaaaaacttattaaaatttaccctaaatagaagaacatttaaaatttttgaattagggggtcgttttaattaaatttaacgcgaaaccaatctttacattaacttcttagtagtacaaattcattgtgacaagtggggaaaaatatattgagataatttcgggccacatttcacaaaaggggtaccactatcataaatnnnnnnnnttcactatttcgattaaaataattgtcaatgcttcaaaaactactttttctctaagtgtctcgtagaaaagtgatgcacaacggtcttggcttcgttcctttaaaatttcgcgatattttgagaagcgtagggtgagattttgagattttgagaaaatactaatgtgtgtaagtgtgtaagagtgtaagagaaggaaaaaacttgttaaaatttaccctaaacagaaaaacattttaatttttttatattaggggatcaaaatttaacgcggaaccaatcttcatattcacgtcttaatagtacgaattcattgtgacaagtagaaaaaatattttgagatgggtccggaccagaatttacaaaggggtaccattatcagaaatgtgatatttttactatttcgattaaaatgattataattgctttaaaactattttttctctcaatgtgtccaattgaaaagtgatacctaacggtcttggcttcatcgctatgaaatttctcgatttttcgagaattgtagggtgagattttgagagaatactaacgagtgtaaaagtaaggaaaaaacttgttcaaatttaccctgaacagaagaacatttaaaatttttgaattagaagatcattttaatcaaatttaacgtgaaaccaatcttcacattcacgtcttagcagtatgaatacattgtgacaagtgggaataatatttcgagataggtccggaccacatttcacaaaggnnnaccactatcagaaatgcgagattttcactatttcaattaaaatgattgttagtgctttaaacctactttttgtctcaatatttccaatacaaaagtgatgcacaacggtcttggctttgtccctgtgaaattacacgatttttgagatgcgtagggtgagattttgagagaatattaacgagtgtaagagtaagaaaaaaatttattaaaatttaccctgaacagaagaacatttaaaatttatgaattaggggatcattttaaccaaatttaacgcgaaacaaatcttcacattcacgtcttaatgtagtacgaattcattgtgacaagtggggaaaaatattccgagatgggttcgggccatatttcacaaaggagtaccactatcnnnnatgtgagattttcactatttcgtttaaaatgattgttaaagctttaaaactaatttttctctcaacgnnnnnnnnnnnnnnntgatgcacaatggtcttggcttcgtcgctaagaaatttcacgatttttcgagatgcttagggtgagattttgagagaatactaacgagtataaggaaaaaaacttattaaaatttaacctgaacagaagaacattttaaaattttaatttaggggtcagtttaaccaaatttaacacaaaaccaattttcaaattcatgtctcagtagtacgaattcattgtgacaagtgggaaaaaaatattccgagatgggtccggactacatttcacaaaggggtaccactatcataaatgtgagagtttcactatttcgattaaaatgattgttagtgccttaaaactaatttttccctcagcgtgtcccatggaaaagtgatgcacaacggtcttggcttcgtcgctaacaaaattcacaattttttgagatgcatagggtgagattttgagagaatactaacgattttaaatttttgaattagggggtcattttaaccaaatttaatgctaaactaattttcaaattcacgtcttagtagtacaaattcattgtgacaagtggggaaaaataatctgaggtaagttcgtgccacatttcacaaaggggtannnctatcagaaatgtgagatttttagtatttcgattaaaataattgtaattgctttaaaactaatttttctctcaacgtatctaatagaaaagtgatcacaatggtattggcttcgtcgttaagaaatttcacaattttttgagatgtgcaaggtgagattttgagagaatactaa

SEQ ID NO: 37504 - DNA, 4053 bp, Cannabis sativa
agagacagctgcagccgctgcacaggcagttgctgaggtagaagctgccattgcagcagctgaagtggcagcaagagaggcagaggcagctgaagctgaagcagaggcagcacaagtttttgccaaagcagcaatgaaagcattgaaaagtaggacgcttcggtgttggtaaactactctggctaaattgatttttgtagggaactgttgctggcataaaatttgattctaagtcctgggggtggggggaggggatttcctgctttgggtgaaacaagtattcctcccatagttgagaaaatgtgtcggtctttacatgttttaataaagcatacattctacaactacaattattcaggttgttaatctgggttttccatttttcagatgtgacatgacattaaattcacatgtcagtgacacaaacgaaaggaagaaccgtatttggtatgtgaaaattatcccaacccggtatgtcttcttcatgcatctgctggtgtatataaattaggcttgtaaatctggagaatgtgacttttatgtgaacttatgttacttttttgggggttccattgcatatggagttttgtttttagattttgaaaacagatgaaaagttgtgtaagaaagaaagagttatggataccccatgagaaccccttccctatgttactcgttttgatttgatccagagggaagatcgactgaacagaaaattaacaatgtatggtagtaggagcattgtggccatttgtgttacattattagtcattgtggactttctctcttacacttccttgctcatatgttgttttctttttacgaagagtaatgacacgtgcaatagcaaatcacttttaataagtgtgttctattaaaatgattggttaaaaaatttgccattagtgtcattttgtgtacacattatttttttttaatgcattttggagcagagcctagtcggattaaaccctttttagactttttttttataaatcatcttatgagagggtattcctttcattatacgaagaacaaaggcaactaaccctttagattttgatttaactttgacgggacttttgtttaattttcttgtaatcttaagacaatcaaacccacaaagaagaaaatgatttagaaataactacgaatgaaccctttaaaacattcaagattttcgacaattaccaatttggatggttataaaaaggaaggccttcaaaggtccagaagtgtcacaagaacaatgaacattcaacaacaaaacatggtaaccaaatggtaacattttatccaccttaaaaatacacaatctgagttagtgttttgctaacatcatgttcatatatacacttcaaaatttataaaaagcattaaacttggacccaaaccaaactcaatccgaataacaaaagaaaagcagtctatgaattagcaaataccaaaattcttttcaaactccactcataatctgcttatgagtaacacaagaaacttcaataacagtttatccctttccatttatgatcaaaccaaagaatcattattctacatcaatggaactaaactcaaaagaagaagaagaaacaaaaattgagtattgagtttacttattccaatactacagtagcacccaactccttgagcttttccataattggaccagcctcctcttttgtcaaacccttcttcaacacaacaggaaccttctccaccaactccttggcctctttcagacccaaatcggtaaaagttctcacctcctttatgatcttgatcttcgccgccgcatcgaacttctcaagcttaatgtcgaaagccgttttctccgccgccttagcgtcagctgatgccggcccagatccagccgctcctgaaccgcctgaactgggggctgagatcgccggaccgtacctgttgaggcccattttatggcggaagagaacagagtagtcgtacctctcgagctttgtgaggtcgaggagctcgtcggcgattcgctcgagcttctgggttcgaggctctgtggctgtggcggcggataaagtgcgaaaattgggatttgaggaggcgaagagcctggtgagagacctcggggagattttcgttgctagtgaagacatgtttggttggattatcggaatatgagttttgggttgaatttattggtttctcttaatttttatttttcagaattttcttttttggtgtgggtttcagtttcatgggcgatcccagtgagtagtgagtgcagaggctccagtttttggctcctcaggggtttaggggtatagtctagatagagaagagggtaattttggaaactacagtaaagctacatgtcgttttccccaaacgacaggactcaggaatatattttcaaattcctttttaaaatatcgacatgacttttaagtttttaacaattacttttttacaattttttatttaggagaaaggggaggaggagactacccacacctctctctcgttgcgcgtaattatgagcgcttcaactccgctcaccaatgtgcatctctattttttaagggtaaatgacggaaaaatctccaaactttcgttttggtttcacttaacctttaaaatttaaatttgtacgagataatctctaaaatcactatactgatagcaaaaacatacatccgtctttctgacccgttatttgcctacgtggctcagtccaaataggcaattgcttgccatgtcattaattattatgaagtgaaaattaaaaaaaaaaggttaatgaattttttttaactaatgcctaattaggaaaaataaaagacaaaaaattaaaagaaaaaaaaacacatattaaaattaaaagacacatttaattccttaaaagacacaattaattctccaaaagacacattaaactcaaatataaacagttcaaaaattaaaactaaattataactataaatcaaaacaaaaaactcaaactcagaaatgcttgagcaatcgaaggaaccctagaaaaagtaaacccagaagttaccaccattttcgtgataaatcgaagaaaatccaaaaaaaaaatcgtggtagagaaagcacacaggagggaaacacgagacccagccaacccaagaagagattcatcatcctcgtgtgaaatcgaacgaaacccagaaaattggtagaagtagaaggtttttgaaatggtgtttcgtcgtcgaggtgaagaagtcctcctcccgactacaataagtcccagatccataaattctagggttttttgtgttttcaaaaaatgttggtgttgtttgggtgaatgtgagtagaatgagttaatggggggattttatacgaaattttcagtgggtagtagctttaatggtttgtggtagggcttgtggtctatatcatgtacagtggttggatatgacattaaagtggaaggtttgaaattattgcttaaaacagattagtcaaaggccgttgggaatctttggttgttgttttcttcaatgggaacatttccacatgtttttatctagtttacattattctttgtttgtttgttggcattgggggatgaattgctattgggggttaattgttgttgggggttaattactattgagggttaagtcaacatgttgagaaagttttattggttttgcctatgtcacctgtaagtttgactgtgtacttatacttacatattaactttgtaggtttgaatttggataatttcactgtgaaatttttccatggtggttattggttcacccaaggtggcaatagaaagtatgagaacagtcgaattgcctactttgatttctatagttttaatggattcagcaggctccaccttgaagaaatggctcaggtattgggatacatattcgcttttggttttctgtttaagctaaaagggaagaacttgaatatggggtttagggtaattgaggaaagtgaaattattatgatgttggatgatttgaggggtagaaattacagggaggccaacatatatttggtattgccagatccagtttttgcagttgaatggagact

SEQ ID NO: 37505 - DNA, 4599 bp, Cannabis sativa
agatcctggtaaaataacttccaacaacctatacccgtagaataattggcattggtaaaaaacaagctatagcaaaagtcaatattaaaggaaaatatttatattaagataacgaagcagattgtgttcgggataaaagctgcctgaccagctggttgtctcaagcaaaataaaatatttttccaagtttaaaggtcgcttggtcggccatattgtaccaaataaaaaggctcgtggcccgaacaagatagaaaaaaggtttgaagattgactccaaaggattcccagggtcttgaaactgaacggtcgagtcttgggcagtaacggctgaatcctgagtggccgggttatcttgatcttggacggtaaaaaagtcttcatcagccttctttgcttcttcctcaactttctttgagtcgtaatagttgaaaaagccagcatatagtttgtccttgaggtagtcaaaattgacttcattctagaatttgtaaaagacctctaaggcagcagtttcgtactctttgacctccttataaattatctcccactcagtagcaaaggattcttggaaggcaatcttttccttggcctctttggtcaaaccctcggtcaattctttgactttagcctcctgattttgaagcaaagtatggagactttccctctcatcggtcaaagaccgtacctccttggatgttgcctcaagatcctcctcaaacttagacgtggacaacatatcctttatcttatgccttagttcatcaatgagcttgttcgtagtaataagttgcttgatcacttcacttagctgatggcccttttgctcgacctctttctgagcctctcctagtgcctttttcaagtcactagtggtcgcagtagcctttaaaactgcagacttggcttgggagtaagtgtaggccagcgtcaaattaacctgcacaaagaaatcaagttaaaacttgtacgtggaaaaatctatatagaaataattctaagacaaaagcttacccaggtgacttccttcaggacttcgccgactaggagctatattgaaatttcctctgcaccagtaagttgcttgtttacctcaggcatcagaagatcctagtagaaagatagcatcttcttcgccttctttgtttctggttggagtgtaggcagagtaactacaggctttgacagcctgggcccctcattgttggcctccttagagtttttggccaaagtatttgaagattcaaagttggaagtcttcttagtcgaagggatagcttcgggaatatttgcagggatgacaactgagctctctcaatgttaatctgaggtgttttggagctcaacgcaatgcttataggggcatcgtccagcattggacatttagctagagacttttactcagagacgtcacctaacctcttccttaatgcacacatcattctttctgacattgttgcataaaagaaaaacacgtgttaaaaatataaataaacaagagcaaacaaagacaagtggaaaagtatctaccctggacttcggcagtgcaccctcctgaacaagtaaagattatgcatcttcattagaaaaattcccatcttcttcctctacgaccacaaccttctctttccctaccacttggttgaaaggacggtaaactttctcaagaccatatctgattctaataggtcattcaagtggtccctaagcaaccgtggaagctttctttttcttcttctttgaaaactcttgctcggcagtaacccctttggctacctggttggactcctaaacctcctcagacatataaagtccatactctaggacattagacgtggtagtcaagaaggagatgtacagagtcaactcaggcgattgaagaatcttttgggctcttgaccttaggcccaaggtgaagggaggacgacagtacaagggaatgtgctggaggttagatggtcggtacccatgtctttgacaaagtagtagtctttaacaaatccatcgatcttggacaccacattgtctgtggtgtcgctcagccattggtactcgttctgggaaaaatagaaatactctaacctgttctgttttgggcttgatttcagattgaatagctagttggtatcgtgggtaaaaggttgaccacatcattgagaagcgtacaacacaaacaacacggccaagtatttgatttccttaggggtgaattgggtcagacatagcttgtaatagtttgccatctccttttttttaagtaactgataaagaggaacaaaatagttacagagaaactggagaaactgtattctccaaatgataccatatcgagctgtaatgcaaccctgacgttttggtgcgcatcttgattttttctacaaaagacgtggtgtaagggaccattagagaattgagataaggactcgcggatcaaatggacaaggttggatagtgctgaattttccttccaagagctttaaactttggagactagttgcaggcaattagattcagataaggatgcaaaggtaaaattgcaccatatttggcgtgaggccccgaccacgtgttgaattcacccctaaaatttgtagctaactactcgatgctaggcaaaaatgtctccaccttcccaaggagagcttccttgaagagattagttaatatcttgaaagtaagtacagatagaggcgagacccataggggacctttcttcccttaggtcctcataggctgagcttccttgtactcctcatcaacatattcctagccctccaccaagacgtcgccctgcttaaagacgggctttccacctcgttatagccactaaaaaaagtgtttggttctattcctcttctttttctcctttgttagaagaatcatcggggtaggcctagccctgatctttaatttcttggacttcaatgtccctagttacagcttgaacctctttgctcaaaggcctagcctgttctactcccgccattgcgaacaaccagacaaagtgggggtctgattttgaagccttcctcatagtttatttagtctatgccatcattctatgtttagacgataagtttagttcaaatttatgcttcgcgacaggcaccgcaatgtcaactatggcagggtgcttggcatatggacttggtcgaccttctggtaatgtgtcaacaacaccaggttggaccctatacgtccatgttgtaggaagatagcgcctccaacctttcttcagttcccaaataaatcggtctacccttctcaacatatttgttggggtattaatggtgttacagttacaccacgggctctagggactctatatgatcactactgacttcccaatcttcaaaataagaattcgaaaggctttcactagatgaagataaatttgcactgagccgaggatatttctcataaaggagttggaggagaacctggtcgatatgatgatcacctcccctaatactactagggttcatctacaaaatgagggagacaaaaggtgagagccgggcaggaaataaggaaaaatatgtctgatatgggcgattcaaatgaaaaaagaaggaatttcatttggaatgaaattcccaaattcaaaagttcaaaactatgaagaatatcttgaaattctttgagaacccacgaatgggtgaatttagatgatgtcaagcatgaatggtaagaaattagaggcttaaaagacatatgcgtatgttagttagagttaaaagtcctaatatcatctactcttggatcaatcaagaacaattcaagaactgagagttttatagtaaaaaaattctaaagataatgcatgtattcaatagaaattgtataggaaaggtaacttgaaacattgaaacattatttgtacattttataggaaaggtaacttaattacaccaattgtaaggtctctattgaaacattctctgtacattccaaatattattttctcctttgcattgaaaattttttaacacataaaattaataaatccaggaaataaaattacacaactcacaatccagaacttgatttttatcattgtcttgtaattatcaaatatgcatctacagtactaagatgtaagatttcaatcaagacgtcagaaacccattacaaaactggtacttacagttattgtgaagttgtacagtagtgaagtttgagatgctagagaacagaacaagaggagtaatatgagaaaaaaaaaaaaaaagagagagtaactattgctatgcaggtgggcttcactacaatctcaccactattttaggctaatactcagattggacaaagaaaatttactactataatttggacatttagtgactcgcacaaaaagtgagcgtcactaaatattatggaggatttttagtgacacgcacaataaaattctaaaaattacatttttaatctaaaatgcgggtcactaaaaacttgatgggacactaaataggtttttaattttatatttataattttttatgaaaaaaagggtataactagtcacttaatgcgcgagtgggaaaacatactcattcccactaaaagggacgctggagcccttatttaaaaaaaaaaaaaaaa

SEQ ID NO: 37506 - DNA, 6192 bp, Cannabis sativa
  modified_base (54)..(57): a, c, t, g, unknown or other
  modified_base (175)..(181): a, c, t, g, unknown or other
  modified_base (4349)..(4354): a, c, t, g, unknown or other
  modified_base (4665)..(4669): a, c, t, g, unknown or other
  modified_base (4712)..(4713): a, c, t, g, unknown or other
  modified_base (5159)..(5163): a, c, t, g, unknown or other
tgtagactcagttaattggtttgattaactaattataattctaaattagactannnnttatttatgaattttcactaagggcttaattgagaagaaagaaggttttagggtttatttgcaaattaagagactttgtaaggtctaattaataaataagttaaatggtaattttatnnnnnnnttaattataattattaaataaatgaattagacatttaaaggtttaaaattaaaatatttcatttgtgaaagaaaacataagttgttaaattaaatggtaaaattgaaactagtagggcttgctacatggccgaccactcaagggatttttagccattattttattttttctaattttaattccatataatttaaaccctgaacctagaaggaatcctataaatagataatgataggctcatattttcataagctcctcagactattgtgtcatacaactgaaaataaagagcctctcatatttttgaactctctctctcttctctctctaaattttgagctccatacaatgaagagtaccttgcccactcatatcaagttcgtctgaatcatagtgtggatgattgtgaataattccatcaccgtaagaagatccagtcccagatcttggcaatactctgtgataaaaaggaacaagagttagagatgtgaacgaaaggagccataatattccagtgccacgaatttaaggttttctagaactttatatgtgtttatttcattattttaggaaattcatgtttaggatgttagattatagaatataatcaaacatacattttagtaaatcgcggtgaataacttccaatagatagagcttgaaaaacttcatccaaagaatgttagaggcgatagctaagagaaaggtgattgatgacttgaaacatgtgaccctgcaatctggacttacggttgcctccttgttgtggggagagatgcaaagaagaagggttgagacactgtctgagttcatggcaagggcccaaggttttatcaacttagaagtgacggagtccctccgacagcaacctttactacttctgcttccaaaattacctcacatgttcttgtgcccgggacgaagtacactctgacagtctatagaccatctgcatctatgtaagcacccacgcaaacccattttttgggtatggagcggcacaaatcggatggagtgtcgctcctagattgtcaaaagcagatgttttggaacagaacatgagtaattcctagaacaagagagggggaaaaggttaaaactgaagtgagactttgaagaaagtaagaaaagagtatgaaccaaagtacacagagtacccagtctggtggatactcgggagaacgtgtacaaggcaacctgtaatatagtccactacagcccctaaggatgcctcaagggggaaagttcaaaagagattcaagtaaaaggtgtgagtatcacagagaagtaggacactccaccaatgaatgtggctacttaaaagatgatgtaacatcctactcagaggaatgccacgtgatgtgattacaaactactaatcctactaatcgagatccataaaccaagtgatttaaaacaaatattaaattggtaaataaataacttgcaataaacatcaacattttactataaatcaaaataatttaaagttacatattcgggatcctgttaaatttatttttaaaaatattacaagttatttcgtacaggccgacctaagtggcaaaaaatggaatttctaaacaattcctattggacgcaacccttgtggtctagcttggccggaacatgtacaattcatcttcaaaaccctcaaactcatggttaaactgacaccactttactattttctgcacattagagcacccgtgagccaaggcccaacaagatagacataataatacaacatgaataattataataattacacttcatatagtaagtcactgcgtatatatcgtgccatcgcactttatattatattattccatatataataatgtcactacagctaatgtttatatagtatagagccacgtgttacgttcacacgtctatatagcatagactcatgtgttacactcacacgtccattaatgtgtatatagcatagacccacgtgttacgcccacacgtctattaatgtctatatagcatacacccacgtgttaccttcacatgtcttttaatgtctatatagcacagacccacgtgttacgctcacacatctatattttacatttaaggccttactagggtttgtctcgattataattatcgagtctaacctggttatgccttacccgcataactctactcatatatacataacccatacattatgctctgatagtggttcatcctgatgatatttatcagggctaacccagttatgtcttatacacatagctcttgatatataaatatgcatacaatatatttagtatatactcatccatatgaatttttaaagtaataaccctaacttggttagctctaatcattcactcacataatacactataacatgctcaagataatacatatttagggtggtaaccctaattcaccatatataattacttagggtattaaccctaatatatgacaatgtgattaactagatgaaagcatgaattagggtcattaccctaagttaatatgtgttggaaattagggtcattaccttaagtatttatatattattacatattcatgccaattcatacttagggtgataaccctagctttcagtttccctataacaattatacaatgtataattgtgccaccgtgctatactctatgtgcataattcactgtcttacctgatttccaaattatgaggagaaatcccaatccacaggtgatcctgaccaagttctggtattcctcaagtatttctcttagcttgctccaataattaggaccaacaaaaattccaatcactagatttctcacccaaaatcccaaaatcaccaaagaaaagccaaagaggttaaagagagagggaggggtcaatggggcttccttccaggctagaaagaaaatatttttcatttctattaccgccaaaagaattgacttaattcattttggtaaaaagtggtcaaatgacctttctgcccctagggctataatcccacatataacacaatgaagggcaactcagtaatttgtatccacctatatatttacatattccatatatatgttataacataatcagaccatgaaatagttttggacctcgaacctagttcgagccaaaatacccgattgtgattatactgtgccaacctgtcagatttcacctgcaataagacaatatagatatactatttaataatatagtccattagcacaataaatatcaaaattacaattttacccttcttgggtcaaaattacaaaaatcccctaactcataaatgggatcttaaatacaataattctcaaataatttcatatacttaattatataatgatataattactaaattataactaatcctcttaattaggattgctaatccatttactaatctcgggatattacagatgagatcaaaatactagcaagagccggacacttgggacaatgggttcggattcccattatctatcccagacagggagtcgctcatggacagttgattgttccgagacagtagggtaccataaatcttctattaggattaggtcatcctcaagctcctggatcataacttccagcactccttgctccactagcactggctgtagtagccacattggctttgggaccgggaaacccatatcctccaactctagctctgccacctatggaaagacatgtagccacaatctttgcaagaccacacatagcaataagtaccaggaactcctaaaagagatacttgaaggagttagatggggaacgggaaatgtgtgcaatgttgtaattttatgccctaaataaaacccattttaatataattagatttactaattaataaaagaccagagaatattttatattgcatggttcacatgattaattttatgattacatgtttaatatataaattctattaaatttcgaacatataattattcgttattataattttttccgcacagtagaatataatcatgattagatgcttcaaactatttagtctcacgttttatcactgcactggatttatactgacatgataatcaacgataaagtttacttacacttgtataagtagaatgtccttttccagggaattagcaaagtatactagtatcagatgtattagctacatatcagactagaccgatattgacagtggaaaannnnnnataaacttaccgttatatcttttctaagtcaatcttacttacttgatcttagatcaatagatcataatcttgagatggttaggttctggcttaaatgtattacatatgttctttgacttgttcattaaagctgaccaaatggatcgagccaatacttacatctcagaaacatggtattgtaattgagtgggagcgctaatcacagatttggaatctatagcttctataactatttagaagtgaaatgatgatttccttagagcttggcttaacagacataactagaagagctcttattttagtaattatannnnnttactgaaatatcatttataagaagctaagtgttttaaagatnnaatacattgaagggtaaaacagtatattttccctactcaatgtaaatcatctacagaggatttttaattatttagattgaaacaatggatgattttagcatatctattcttggtgaatagagcgttctatgtaattaggactttaattctgaatctatagtggagtcaagaagaattgataagatagagaatttacttgataaattctaaaactacttattgggagcctggttacataggcccatggtccccacattaactgggataatattgttttgtagtctcaattaattgatttatttaatcaattcggattctaaaaaaagagtaagtcttatttgtgaattttaccaaggaatggcataactgagaagaaaagagaattcaaggtttatttattaattaagagaccagggaaggtctaattgttgggattttatgccctnnnnnaaatccatttcaatataatcaaatttactaattaataaaatattagaaataattttatgttgcatagttcacataatttatttcatgattatatgtttaatgtataaattctattaaatccagaacatttagttattcatgattatagtgctgtcaacacagtggaatataatcatgattatatgtttcaaagtttaagtcccatgatttttcaatactctggatgtactctgacatgataatcagcaataaagtttacttacaccttgcataagtgttatgtccttttcagggttgtggcaaagtttgctaggatcagatgtatggagtatacattggactagaccgagattgacgttagataagatatcataaacttatcattatatctttctaagtcaatatcacttagttgttcttaggtcaatcgatcttaatttttgagatggttaggttctggcttaaatgtactatttatgttctttaacttgttcgttaaagatgacaaattggatctttccaatacttatatgttaggaacatgatagtacaattgactgggagtgttaatcatagatatggcatctatagcttctataacttttagaaatgaaacaaagatttctttcgagtttggcttaatgtagtaaatgattgaggcctcatttcagtaatgatattagtttaatgaaatatcatttacaactagctaagtgttataaggataaaatacattgaagggtagaacagtaaatttgtccttactcgatgtagatcatcaatagaggatcattaattatttggattataacaatggataataaatagtgtatctatatcttggaatatttacagcgttctataattaagagtgtaattctgcatctatagtggcaggcccggccctggccataggcgggctaggcctgtgcctagggcccacccagcccaggggcccaatttattttttcctcttttaaaattatacaatttttttactgattttgaaaaataccacattttttctaa

SEQ ID NO: 37507 - DNA, 2941 bp, Cannabis sativa
cattttagtattgcatttctttttataaaaatataaaattaatttaataatattaaattacgtgagaaatgagaaataatacttatgatctcaacacattttttgaacataataatatcattaaagaaagctttgactcttagtttatggactaaagaagaagaagaagaaaactctccaaaatcatggatatggatatggatatggattccactgaaaccagtaaactcgtcgggaaaactaacgacgacccattatcagaaacagaaccaccggcgaccaaaaccaacaaccgccacccatttattataaaattactcaaaattattctggaacctcttcaatggctacaaatgctttcttcccaactaaaccccaccttcgtcttcggcgtaatcctcgtttacggctttaaccaaggtttctccggctctttcttcaaggtagtttccgattactactggaaagatgttcagaagatccaaccctccgtagttcagctctacaccggtctctactcaatcccttggattatgaaacccatttggggcctcatgactgatgtttttcccgtcaagggctaccgccgccgtccctatttcattctcgccggcgtcgtgggcgcaatctccgccgccattgtggcaatcggagggaaattgacggcgggcgttgccttgagctgtcttattggattatcagcggcagtgcccatagccgacgtgacaatcgatgcttgcatagcgaggaatagcatcgagattcgttctttagcttcagatttacagagtttatgtgggttttcttcctccgccggagctttgattgggtactccacaagtgggttttttgttcaccatcttggtcctcaggtaggttaggtaactccaaatcccaaaccccatttcgccattaacgtcactgtactgttatatatatatataaatgttgttcaattcgttgcaggtgtcgttggggattttggccattccaccggctttactggtttttctgggtttcattatatatgaacaccgaacaaccactcgttcttctgaggaaaacaaggtttgtaccgtaaattattctccatttcaaaataagaaatcgtaaacttttctgttttagaaaataattctaaaaataaaaatgaaaaaaaactcaaattttggtcaactaagacgactggaggaggagtgaaatgttttcggtttcacatcttttttgacattaataaattaagattttgaattaaatatccttacaaaaaaatgataatatatgtcttatgtagctactacagtgtatgaaaaggacaagatgtcaatgaataataactaataactataattttatgattattattttttgataaagataattttatgagaattacaatgagcatgatgataattataataatatgtttggtttaactggggtaggtagctgtgttttttttttttttttttgagagaactggggtagtcagctattgcctatagataagttttccaattcgaaaatttgcttggggaagggaagtgatgcaattatattatttattttcttgagatttttataatattgttaatgacaaacatacatactgtacacttaaaaataataatacatagttactgtattactcctatttatttatttaagtttgtttcattgaagaatgtaatttttttgatcctacaatattaaaatcaattaattggacggttaataataattttaagtttaatcatctcaaacaaagttcataataattaaatttgactttgttgttgggtgcaacataaaaaatgcggctaattaagatttttttcttccgaactttaacatgtacccaaattatactctctgaactttttaaggtcgttaaaaatattcctgaactaacaatctcaatagttcaaggaaaatttttaatagcaaaaaaagttcagaaatataatttagtacatgttaaaatttagtggtaaaaattctaattagtgtactatgtataatcaagaacatttatctaatttgggactacagttttaagaagtaattccataatgtttgggtgcattcaataaataaagtattgagtatacatactctaatgttacggttagttaagtggtcagtttagttttgtgttaatgttacttgatttctcttgtaattgatctctataaaataccagcagtctcatctcatgagctcatttcattgagcctcatatgatatatttctcaaacactttatcttctctaacatactctgttcatattctcaactaagtgataactaaatatgaaaatttgatatttgtgtgcagtcaacagagaagttaggattggcattaaggggcatgtacaaaacaataagattccctcaagtgtggaagccatcactttacatgttcctatccttggctctcagttttagtactcatgaaggccatttttattggtacactgaccccaaagctggtcctgctttctctcaggtatattacacaaagcttaaacatatcacaaactacaaatgcatgtgttattctcaattgacctaattaacttgttatttatcaaaaaaaaaaaaggagtttgtggggatcatttatgccattggtgcattggcatctatggtaggagtactaatctaccacaagaatcttaaggactaccctttcagaagcatactcttcatggcacaacttctctacagtgtgtgtggaatgttggacctcatgttcatccttaggtggaacttagccctcggaattccagactacttgtttgtgattatggaagaatgtgtttctagaatcgtgagcagaattcgatggatgcctatgatcgtgttgagcagtcgactctgccctcttggaattgaaggcaccttctttgccctacttatgtgcattgatagccttggc

SEQ ID NO: 37508 - DNA, 3379 bp, Cannabis sativa
  modified_base (2652)..(2657): a, c, t, g, unknown or other
tataattaagtatcgagtatcacataaattataaaatatagctgttttaaaaccatgtaatgtaagtgtggatatacaagacaccctatacatcataaaaaaaaacacccacacgccacaatattaaatttcggtatcttttcaccaattgcgacatgacttttctctcccgcaatcaatgcaaagtttttccaataatatgcgtcatcaatattcatatataagcacacacacttaaatttggcattaaattaggcttaaattcctgcaaaaatatttctatgaactatccaaatacccagattagtatctgagtgttcatagtaactattcaatttaaaataatacaattataaccaccgacacattaaacaacacttcaaaaattcaaattcttatcaagatatttttatttcataaaaaaaaaactaataatcgagtaagaacctcatagatgacggattcgaattcaggtttagaaaggtcagagcgaagagcatcgaccacgtcttgttcgtgatcgttgacaaatttcaaaatactcttcaactgcgaaactctccattcatagctccgagttttaccagaggcgaaactctgttttaactctttcagcaaaaacgacgccgttgttgaatcgaacacctcctccttcatcatcttctcttctactccgtcaatcgccatagctatatactaaactgtatatttcttatgtatctctctctctataaatataggtatatatatagtcggctaaggtggtactttttattattgggcttgtgaaaattccaagtgaagaaagcaaaagaaaataataataataataataattagttttgaaaataattaatattagatattatagtttatatcgctgtggtggggccatggggtccgcacgtgcctaaatctgtacacatagaacgtagcgtttgaagtttgaactcttgagattaaatggcacgcgatttgagtgcgcgtgaagtcgggaagagctgtcgtttcacattcagtttgcggattttctgctaaattttgttactattttttttaattaatatattaatattaatttataaaaatgagataagatacgcgcgtcagctttggaaattaaataaatttattaattttttttattaaattaggtgatcaacctgattgtttggtcgttgataataattacttaaaaaaaatatatttgggtaaaactaatattaataagtaagttataattttagaaattttataggtaatcagctgttaagttattatttaggtcttattttttattagtatatttaaattaatttttaaataaaaatataaatttaataatttagaccaattaaaaattaccactgaccatttaattaacaattataactgctaaaaattattaagatatttatttgcaaattacttaaaaaaaaaaaaaacaaatatttctattggcattcaatacacacggttacatcatattaatatgtatcttacttcatcatccaataaaatatcaagaaaaaataatcccacttaaaataaattcctataaatatattataatataatatttaaaatttcctctacatcatttaataattcatcttttataaaaaataaagaaagaaagaaattatgcgtgcgtgcgtcagccgttggcagaccgtcgacgacacagtcagtttcacacgcttcagattccaactagcattctagcactatatattcattcattttttatttttttttgaaaaaaaaaaaacaaaacaaaaaattattcgaaaattaacctaaaaaataaagtatggttacccgagaaattagcaccacaataattatcttataattaattaacgatttttataatatttattaaaataaaataaataataatgatattaaattacaccaattgatattatacttcataagagtgttaggcactataaatatcttttaacatttctctaaaaaaaatataattatttttttctcttagcatttatcctcatcagctactctaaaatagttaatatgtgaaaaattatattaagggttcgtttgttatgtaaaatagttaaattttaatttacactaaaatattatatatttaggtgtctaaaaaatttaatatcacatataattttacataataatattgcatgaaatacaattcaatgtaatattatattatacaatatgatgtaatacaactcaccaaacgaacactaaaagattttaaaatatcactttattagctctgttataaagtttcattttaaagatgcttcagactagggatgtacacgggactacttctcccgtccctattctcgttaaagattttaattcctatccctacttaacggagaatctcctaatggaggcggggacaaggacaaggaagaaaatcccctaataaaaaaaataaagtttataataaaaatttagggatatgattttgtcccgttattgtactttcacgaattgtaatccgtgatgtacggcagccatcagatgagagagttatttgatctgacggctaagattgatctaggagtaattagagttaaaaagtagaatcgtactctgacactcatttaatgtaccctgaaacacatctaatgtaccacggaatacatnnnnnnaaagtacatcacgggacaaaatcatatccctaaaaatttatatatataaaaatattaaaaatttaaaatatcacattaattattattagaaatatactaaaaaatccttcaaaaaaaaaaagaaatatacttaaaaatacaaacataaattacaaatcataaaatattattagacatataaaataaaatactaaactctctcacgatgggaagtgtgattttcgcccccatcccgttccccatttagacagagaatcctcattccattaaaggccggtctctgcggggcctcatccccatagaaaaatgtatatccctacttcaaactttcagagcttttttaaaaatattttattactttttgtttcttttttataaaataattaaatttattttattttcaataaagaatttgttgaataatgtgatgtaaaactattaagtaaaatagaaaaaaataaaattatagtgaaatgtttttaaaaatagtataaagaagttaatgagagtgctataaaaaaagattattattttatttttcataataaaatactttaatgcacccaaaaattgtgtattaatacgtgctttaccgttttggcctctaaattttttttcattcaaattttttaatgatcatgtaaatatttaagataaacaatatagattgaaaatgtttcaaataagtacgatgtatactacttttaaaaaaaaaaaaaaaa

SEQ ID NO: 37509 - DNA, 4261 bp, Cannabis sativa
caatatgagcctttgcttctggtttcggctcctctcgttgccctcttcctagcttctatactccaatcgattgtttgcgttgtccacgagaaaggactcaaagctaccatcttagcgcttttcatgaacacaatcaagtaagtttatttattttaaaatatgttttatggaattatgagttttggtcattttggtttccttaatttttatttgaaacagattggttccaggtgtgaagagttatattgatgccgagaaacagaaggttggatttttagttccctgggaattgtgcatttgtcttaaattaatatttggtttaattgtagaatgtttgttcgaatttatgatcttaaagtatatatttctggttctgagtactgattgagactctgtatcagtatgggaagcatttaatgcatataagcaaccatcacagtattctcaaagagaagtgctagactgtgccttatagcaatgctcttttacaaactattatttgtctttcgcaaaattattcaatgctatttgttcagaggttgatgtgggttggtcttcgagtatttatttatttttctatttattaaggattttaaattaaaggctcaaatggagtgaaaagcttccagcggtctgatgggccctccctctttattacccttactttgatggcaatgattgacattcaattgtactttgaatttgaagcactataatgtgcaaaaatgaaattctgtgctgaaaatttggaatagtggcttattactccaggaaattagtttgctttcattcatattatgcttttcatcatgttttagagacatggctttgtagatagcttattctaatgaaaatttttgttgttgtcactagaatagtgagttagctctcctattttcattattattattattattattattttgtttttattgctggtaagctgctcggtgaattccaattagtttgcttaaatcaatcaaagggttaatttatttgcatttataattttgtgtacatatattctttcagactttcagttagtttgatttaatcatttttctaaacaatattgcattaattttctggaattcgcccttgatgaaagaacaggttgtagataaattaaattcgggtggcaaatctaaaagacaaggttggaggactgaattgccaagtgtggggatgggagcaggagtcatagacattatgaaagatgagaaaagaaaagatgtagcttggcaaggaaaatgctctggtacagtgtatgttccgtaattgtttgcgaactttttacttgcaaatattttgaaatatattacgtcttttgctgctgtgatcatcaacatttttttttgctgttttcagctatattggtggaagtgaatgtgaaggacacttttctctgattaatgaggcatgctcaatgttagtaaacctagcgcatccattatataaactattcctttgaatattctaatattgttacatgcttttccattcagctcatatgattttcccccggctattgatgagattcgtttaggtggaattttgttaagtctactggatatacttaggagtcaagggaaaaagatgcatctagatactgtatagaaaactgacatttaaaataggttcatttgttattggttcttattcagaaaatataaggggtttagagatgtcaatttggacttgcatttttctaattcaaaacgtttggaatcaaatagaaatcatgctgtgtattggcaaattgttgtgttgtttctggagaattaatgagccaataaagtgcaccagcggtgcttttgctatcttcgcaacaatattgccagcttttaggacagcttctctcatccatgtacatgttttccttttgtctgaacttgttcatgtttcattcaggttttcacatacaaatccattacatttggatgtattccaaagtgttgtaaggtttgaagcagaagtggttgccatgactgctgcatttcttggcagtaaagaaaaatcttctggagggcaaatatgtggaaacatgacttcagggggaactgagagtatcattttagcagtgaaatcatcacgtgactatatgaaagctaagaaaggaatatcatcacctgaaatgtatgtctacaatcattttttaaacttccatttttgcttgaattttttacatgattttttttcccaagctcaggataatacctgaatctgcacattcagcatatgacaaggctgcacaatatttcaacatcaagttgtggcgtgtccctgtaaataaagagtttcaagcagatgtcaaagcaattagaagatatatcaatagaaacaccgttttggtatgcattgagaattcaggcttctctttatcttacttcatttatttttccttacttttgtgcattctgtccctattgagaaaaaaaataacagaaaaagaacgataaggaaccaggggtgtcttgtgtagtcattagtgtagatgatttcccatctactatcgtgttcatcagttgagctagagctagagctaattcttttattctgcagattgttggatctgcacctggttttcctcatggaatcattgaccctattgaggtgagtgacaatgtggttttgcatttatgggggatagttatttttctttaaatacaatatcaattaagaaaatctggaaataattttgcaggaacttggtgaattagcttctagctatgggatatgtctacacgtggacctctgtcttggtggatttgtattgccttttgcgcgtagactagggtacaaatgctatatctttaattagctgactctagttgtaaattttcttggtagattaaattttctcgttacctaaagtcattttttttcatagctagctttgtagggaattttttcattgttgtctcttggtgatacctgcatgtctaccatatatcctagcaacaagctttcaggatcaacatgtactgttgttataattttattttgtagcatctgttggaaattctcctcattagagctgatggtgataactttctcttttccaggtatcctatccccccttttgatttttccatcaaaggagtgacctcagcatcagttgatgtgcacaagtatgggttggctcctaagggaactagtgtggttctgtatagaaatcatgatattagaaaggtatcctatccccccctttcgaattttctattaaaatttgtggatgatgaattggaggctggtgttgtgtcactcttaatgtatcagaattgaaattgaataacacttatgttgcttttagttttccttgttcgttgttttttataaatagattctaatgtcctttttctattcatggcatcttggttgctgggaatgttggctttactggggtttctacttttgagcagcatcaatttgttgcgggtaagttgctttgatctattaaaaatttattgtttgtgacgtccttttagtcctcttcactctaaatattcacatataaagtaggaaaaatttgagaacagtaaagggagaatccatatgtttggcatgttcaatcatagctcagcagattgaacttatcattttccatatgtccattgtattataatgccgccagctatatttaaatttgccgaaccaggcccatttttttcctaattgttccagtatacagtaactaaaatacactctgtaagaatggagttgaattcggtaaattattctcagcaaaaacaaaaaccgatttgaatgaataatacatttgacgggggctgcagcctgcattttgtggaactagaagcaattcctgagtttttctaatattctagatctgaaggccaatgacaagaatttctttctttgatttcttgggtcagcttatggaatttgatatatgctcagtctgtcatgtttacacttcatttttcagtaactgagtggtcaggcggcctctatgtgtctccaaccatagctggtagtaggccgggtggtttaatagctggagcttgggcagccatgatgtctctgggcgaagaaggtgagaaactcttatgtattatatttattattattattattattattgctaatgcaacatcaatgtatgattttgttatttacttgaaaagtgggttccgttgtaatcctgtgccattttaatattcacagggtacttacagaacacaagacaaatcatggatgtatcgaagagaattcagaaagggtatgtgttttcacttttctt

SEQ ID NO: 37510 - DNA, 4549 bp, Cannabis sativa
gaaaaagaaaggaagaggagttcataagggtgggttggttggctttcttattgccgttttagttaataaggccatgagacttaagtgggcatgattcctggctggaattaagaatcaaaatcccattaaaatgtaatgattatggctaaaaagaacagctaaataatagaaacaacataaataaaataaagtaaatagtactccaaaaagaaattaagcttccatgaaagtggaactgtttttgtacatggactaattcaaagtctctatgcataatattaaacaaacagctaaaaaataaaataaaaaagaagtaaacataaaattaaacataatgttaacctaaaataagttgacaattaacttttagttgtccctagaaagagaaagatcacaaaaacagttcttgtacatctccatgaaaggaccaagcgattgaattgctgctacatgaagagcctatatagcattggtttctggccctcaaagttttcattgttcaagattattgcaccattgtttgtgtcctgccacccattttgggcacttggggctaaaatattgggataggaccctggagttcaagagttcaacaatgggtgtaaacttaacgcaacggggtgtcttgtactgattaatggaagcccctaaacttatggcataatccatgagcttatcaaaagtaccaggctcaacgatttttatctcaagaggaccaattgacttgtccgagacacgaccttggcggtaaacactattgagtgactcctcagtagtcaaacaacagtcttcaaacaccgaaggtggaataggtgttgagccttttagactaagttcccagaagagcacgtagtgacctggaattgttgtcgtgtcagcatagctagtgtactcagacacagttgcgtcaaacggcaccaaatggctcaccgcattcttaaccgcgttttgaagctcaacctcatcggtcttgtccgagtcaatgctcaaaaccacattttttctacatatgaagttaaattgaggtgccttgttcttaaaaccagcaacttttagcacatcaccaactctgtatcggtaaagtcctgtaaaaataacattaacccagatgagattatgaaaatgattcaatgcaaagctaaattaagaaaatgttactggattttgttttacctgcatatgtggtgacaacgagttcatattcttggccaagtttgacgtcaataagatccacgagttcaagctgttctttctcagtgagctgggatttggccacagggagggagttagtggtgaccccattaagattgttcctgtggaccggcaggaattcaaagtaggccatggttggaattaaggtgtaggagacatcgctgggcttgcagagcgggttaagattgacaccaaagtagcactctgaagaagcgtacatagtgcagaccagagggagcccattgctgtagtaatcaagcgttgggatgtactgtgacatggtcccagtcacaataacatccacatacttggtgttgggccacagcctagttataatcccttgccatgactccttacgacactccgtttcaatgaaatccgcaagttttgggtctggctggttcagaattctacgcacggcttcacggacagtggggtctgtgatttgtgggttgagtgtccctgttcggatgtcctcacagacagccggccaatgcttctccaagaaccgtatggccctgatgaagcctgaggcgaacactgccccaactcgaaccacttccttgttttggcagagaccacagaggagttgggagtacatgctttggtaagagtcagagcagagaatggtttcgtttgggcttgtgtagttggtgtaagggtcgtatggtctatcagtgaaatggctacttttgtagtagctggttaggaccggtctagccaccaagcctccgggtgtcttcgattcagattttatgaacaagaagtacattcctttgcctttttctaagttagggatgtattggctgagtacaggcatcaacaggctataaagtagtgaccttcttcccatttcttcatcaattgttggcatcaattttctctccccacctgaggtgccagagctgtttatatcaccaaaaaaatgaggacccattagcaaaaacaacattaagaacagcttcatatgattcaaaacataattaaaaatctagtccgtatgattaagtgtagttttgtgtttcactagtatgtctgacaaagacaattcaaaaagcaatcttataatacaaagctcaaaaatctggtggctttatatattttatgttatgtgtacgtatgaataaggaccttgtcaagaactctgaaatgggcttggaacagaggataggtgaggtatcaccattggctatacgattgatatcaggttggatgtcctcataggtgatgaccggggtgacctttttgaaggtctcacggtcagtgcggccattaaggccatggcgcctcaagtactcgacttgggcattgcgagagagaatttcagctaggacacgtttttgtacttcatcagcgtgtgaagtgacatcttcgataaactcaagggccttggagttcttctcctcgaggttgtagctctcgccggtatgttttggcaagttgtttggagcttcaggcatggttcttttttttgggttggggttgttctctcttcctttgttttttcttaggagagggagagagggagaggtgtgtttatagtttgtgtgggagaaagagaaagattttacaaatataagagagaagatgattttaggtgtgggggaaaaagaaagagagaagtgggtttatatagagccgaaggttgcctatcctgagcttaacctcacagggattaggaagtaaaccaacagtgtcataaaggggcattattggaaatatacagaaattttctcaccttttttttttctgctgaaataaaaattttctcacttggtatatcattctgtttgcccttacagaacatgcttatatgacacagaagcatatggacttaaactttccatacattcatggtcaaattagcaactcttctttcaatattagaatttacatcttcttatttaggttatagaaaagagaaaagaaaaactaattaatactagatattataacataaaagaccaacttatttattcttacacgtatacttattatttgccaactaactcttacaaacctaaatcgtggacttatcacattataagttttttctatctgtgatcaattatattgaacattagtagtttcaagttagctatgatacagtcccctccccattttaagaaaaaagtgaactatgttctacaatagaaaatgttatcggtaaggaagcttcatgttagattattaatttattgacactatttgcttttgtaaactataaaataggaacgaaaataataataaataaaaaaaaattactatcaaccaaatttaaccaattagaatttagaagtttttaaaacctttttaagaaagcagtaccaaaagcttacatgcactcttccaaacgcacatgcagttttagtggttaccatcaacattattaattggctagaaactcacaaaaattacatatatccacttgtcgagatacaatttattcaacagctagtaaatacatatttttattttttgactttatgtaaacatagttattattttttattttgcacattttaaaattgtcttcctcgttggggaatgtggccggtgtacaacagtgcattagcaaaagagagttctcttgcgtacaagaaaaagaaagcagagagaatgatatattaatagttataaattatttacaattacaataagaaataaaaattttaaccggcaatacccggtaaaaacgcagtaatgtggtgaatatactgacgaccttttagcgcgggtgtctcgtcaaataccggcagccagtgccactttccttatttcatcagagggaacttgtatttgccggtatcaaatcaatgatttagaagattgttcattgttatggcattattttgagttttgtttttgagtgtagcttaataatattttacaatcaattaatagtttaataatttaaaggcgttgggttcgaacccatgacctctttctatttcccatccctccctcaccactaaactagtctggctttattttgaatcaatgaaaggcgacaagacccttgctgaaaaaaaataaataagaacactaccataaaactactatttaacctccgtgttgaaattttttttagaccgtcgctaataaaattaagttagtgtgtgaaactgtcgttaatagtttggatttgacgacaatttacaaatatcactatgtattaccaacagttgtacaccgttacatagtttggaattgccgacggttaagaaatctaagctaaaggagacatattatataactccaatcttgctcatatcttatttcaaacatttctcttatttcaatcgaccttctctctcgttccagcagcgcctcgtcc

SEQ ID NO: 37511 - DNA, 4118 bp, Cannabis sativa
atagaaaagattacattgaaatagagttttatttaggacacaaagcccaacaagaagagagcaacacaagggacaacccagagcctatacaagagtccctaccagaagaaaatgaagacaaacttacatgaaagttacatgtggatggatcagctactgaccagctttctggtgcaggaattgccctcgtcacacctgggggcagcacctgcatagagaaatcaaatttgggttctaggcctccaacaacaaagtagagtataaagcgctcatagctgggctaaaacttgctcgggaggtacacgccaaacacattaaggtctgtagtgattcacaattggtagtaaatcatgtctcaggagagtacatggcctgtggagaaaaatgatggcctatctaagcaagatacaagacctgcttgcacaatttaagggttacaacctcaagcatattcaaagggaagaaaataaaactgcagacgccttcgcactgctcacgagcagcacagtaacagataaagccaacttagtcccaatctaattctgaaaagaactcagcatcatctgtgcggaagaagtcgaaatgatagatacaacaccaaattggatgacacccatagcagcttatctcaacactagagaacatccaaacgataagaatgaaccttggaaaatgatgagaaaagttgcagtatatcatagttgaaggtgtgttgtatagaagaggtttctccatgccattacttagatgtgtaacaaaagaagaggttgcacgactcttgttcgaggtacatgaaggattctgtggtaatcacgcgacgagacaaagttcatcgaagaaaatactaaggcaaggatatttctggccaaccatgatggaagtttcaaaggcctacgtcgagaaatgtgataaatgctggagattttcaaagatcccccgcgcaccctctaatgagctaatatagatgcaaaatccttggccttttgccgtatggggaatagacctgatcggacagttactgaaacgcaagggcagagtacaatatgcactcatcgtagtggattatttcacaaagtggacagaggtcgagcccttggcaacaatcacatctaaaaaagtgatggatttaatagtaaaaaacatcatatatcggttagacttctgcacaaaattgtttcgaataatagaaaatagtttgataaccggatgttcacagatttctgtgcggcacatggaatcataagaagtttgtccacagtggcacatcctcaaacaaatggccaggccgaagcagtaaacaaggcactcaaagacaccatgaaaaaatggcttgaacaagctaaaaggaattggttggaggaactacctgagatattatggtcgtaccgagaaacgaaaagaacagtaatcggggaaacagcattcgctatggcttatggttgtgaagcaatgctgcccgtagagttagaatcttcgtcccacaggagactggcctataatcaagaagctaatcatgccctcctggcagaatcccttgatgaaattgaagaaaaaagagcctcagtagacctaaagctagtagttcatcaacaaaaggtggctcggtacttcaacaagcaagtaaggacatgaaaattctttgtgggagatatggtccttagaagagcgttcttgaacataaagacagcgggattggcgtactcggacccaactgggaatgaccatatcaagtaattgaagtcacagattctggagcatataaactgggttggtatgatgaaaacatggagcttgttctagtaccaaagtattggaaggaacatctaagaaaatactaccaataagtatacaaggtcaaatgaaccccgtcaagtacacgatgctcgaacatctactcttaagtagataaccttctgagcggaccttgctcaaaggtttagacaaaatgactagcactcagatcaatcaacactcttataattaaagaattgtaagaatcaaggaagattagaggattttgtaggattgactcagtcaaacattaaataatttattctataattaatgtaaatattctataccttgtttcctataaatagtggatcatagtcaccattgagggatcagattattccttctcaatagagctattacgatgccaaaatatttgaaaccttcaaagaaagtaagaaactcacttgaccaaattcatgtgatcttattactatctatataaatacattaaaaagggagtaagtcatcactgattcaagggactgattcaagggctgaacctctataaatcttctgtcgtttatagctcttgaattatttttattatttaatcaatcatatcatcatttaactaacttcgtgtcattgacaagaaacgagatcatcaaattaatttataattatttaaatgttataagttatgtttgacatgaaataggaatttaaataaaattaattaattaactaattatgtgaaattaataaaaataatttaattaactttagtttgagataattaaattgaaaaagttatctaaataaaactaaatgagttttagtgatgacatcattttttctattaatttcaggtaataatttatttatataaatatttatttagttgtggaaaaaataaaagtattttaattataaagaaattggattatttaattaagatatttagaaaatacagttagcccaatcattatgtgatttcagcttaggcattgtattttattaagttattttttaactaatataaatatagaaaacttaagaattctttgtacacataaaataagacactatactacttacaacttttcagcaagctagtgaaaagaatgaagaaatgtatcctggtgcgagggaaggttgtcatatttttaagtttttaaactttgcatttatttctcaatagtttgaattctcttcgatcatgatgggagcttttcgcttccgtagtcccctctttcccaaaataaaatctgcaacaaataccaaaatagataagaagtgatatttttaagggcaagaaatgtcaccctttatagccttgaaaatgaagtttattaaattaaatgaattatttttttaagggcttaccttttcttttagtagaaaagtctcccattttccactcactattggtccaacaagtgattcaaataatataaattcaaagttgtagaaatcatcctcggttgttttcttatggctgcaataagaatatgtaacaacaacattagcattctatagttattattgttggattatagcacaaaattagtttgtttttattttatatatatgtatagaaaaattagtttcttaaaccaactaaagaaaatgttatcaataaatgtgaattagcttatcaaacaatataccaacacaacaataaactagcagaaaaaatatggtaacttgttgtagaggaaacacatctttttggcctaagaattcaaattgtaaaatgcttgactctaattactcaagtgatcaaaacacattcctaatccatagttctctactttgcattaccttgattttgtgcattctcccgtagactacaaatgaacataaggtgtgttaagtactagtatcaataacttcatgttgtgaagaaagaaacaaccctcaattttttcaaaaagcaacttaatgaatacctagagggttagcacatatcatgaagttcctttagtacaaattagaaaatacaaaaacttagctgaaaaataaattggtaaacaaacaaaagactaaacgactcggaaattaatataagaacctcatgcctaattaccctaaatcataggaaagtgtatctttctatgtaatttaattatgacaaatttcaatgatagtcaatgtttattttaatacaaaacatattattcctagtccaaccaaaactaataagaaaaacaagtttgagtttcaaagcaactttgaggtagagttgcccatttataaatgtaatacattacagactgttcacttttcccaattgaaaaaattgcgatttgcagaattttatcatccaagagaggatatcagcaaccatttatttcaacagctaatcctaatatacaagacac

SEQ ID NO: 37512 - DNA, 4665 bp, Cannabis sativa
  modified_base (31)..(74): a, c, t, g, unknown or other
  modified_base (4090)..(4090): a, c, t, g, unknown or other
tgtttattttattgttttagaaagttcatannnnnnnnnnnnnnnnnnnnnnnnnnnnnnnnnnnnnnnnnnnnggtaaaataatttctaacaatctacagcaaatcgggttaaaacgatccgcatatgaagactgcttatattttaagagtctggagcaatctataactgtatttttattgctttatgtggacaatatgctcattatgagcaaagataaatccatgatcaaaagtatcaaagctaagcttaagagagagttagagatgaaggagcttggaccagttcataagatacttggcattgaagtttcaaggaacatgaaggaagggacaattaacttaaagaagttcaggtacatcaagaaagttattcatatgttaaacatggaagatgcaaagagtatataaattctgttaggcagacagctcattgttgaaggaacagtgtccaaatattattagagagaaagaggaaatgaaggatgtaccctatgcaatggttttaggatgcttcatgtatgtgataatgagcaccagacctgacatagctcatgctctaagcatcctaagtcggttcatgtcaaatccaagcattgaacactagaagtcccttaaatggttattaaggtacttaaagggcaattgggattaaggtctgacctatgaaaaagcaaaacgagaactatagttgaaagggtttgtggatgatgactatgcctcaaatagagatacgagaaaaccaaccaattcttacatttttatgaaaaactgaaactgtatatgctgaaaggcccagttacagtctatggtttccctttccaccagagaagtagaatttatggctactacaaaagcattcaagcaagcattatggctttggggaatcctatttgaattgaaacaattgagaggaggagcgattgtgtactcggatagccagtcatccatccatctttccaagaatctagtttatcatggaaagaaaaacatattgatataagaccctactgggttagagaggagataaaggatggatttattgaattagagaaggtcaaaaaagaagagaatcctattgatgttggaactaaggtcttaacagtaaacaagttcaaacattgcttggacttgatcaatctcagaattagtatactgagatatctggaacaccaaccatgatggttgcattccttcttcatcattgtaaatattttaatttgaagaaactaggaggaatgtttggtagagttcctccaaatgaaaaggtctccaatagttgttcttgttatggaaagttagatttcttccataagggtgttcctagaagtctatcttgatcatctgaaagaaatctcgtggaatgatagatgtcatccggaagggcgttccaagatgtctatcatgtccacctggaaggagtcttcaggaaagatagtcttcctctggaaaagtgttccagatggctagttgttccttcttggaagggagtcccaaatagtcgactccaattgtctctattcctatccgagaagaccctttagcgtattcttcagttcttaatcccagaagtgtatgcttcatctgggaacactttaacttgtgctgacgtggagattctattacgaggagtttgttaagtcattgctaacttcacaaattagaacttgcagtcatcgactttaggatctatatattatggacctataaataccaccaacacttatcatttcaaagaagaacgagattagacaagtttcaagaggtgatcttgagagagaatgattgagaggtacagagagagaggtagagagaaaagagagtgactaggtttgagttttgtatgaagaatatcttctgtagatgaagaagattcttaggtaagagtgtgacaaataaacacttcttgaggatccaacagagaatcgatcttaactgtattgtaccatgttcatgcccaatcaataaagaagattttggtagtattccagaattggagtagagccatagatcacatctatctataggacttgaactagtatgtatccttgtgttgattttattgctttatcatttctggttttaatactatgttcatctctgttaaatcttcgattattgtgtgtgaattgttaatcttgtcattactaattgtttgtcgattaagttttagttgatttgattatacacattagttgtaattttcctacattttaagtgagatataccaagcccaaagacacatgcatgttagcacgaattgaagcacaacggaaaaaattcaataataatatcaatgatattgattattaaaattctaatagttataatatttttatatatataattatgtttggaactatagttttaaaactttttattaaaaaactataattttaaaacttaatataaaataattgaaactattaaaaaaaccatatataatctagttgttgttttattaagtgtaataaaaaagtaaaattgtggagcatgaattcgaacttgtataaaaaaaatgggttgatatatttttaaaaaatgaatcagctcaaataaagtacggcacgaataaattagcaaaaaaaaaaaaagtacggcatgtatacaaacatggcataaaaatactaggccttatgttagatattaaaattctgttagtttgttaatttatgttgcattttttctatgctctgataacacttctattaacattttatctttgtactcttcttatatatagtaatactctaaacatagttctacccttcctataaacagtttcacacagctcccctcaccattctcttttctttaagaacaactcgagtgtattccttgctttgttaatttacgttgatgatatacttgttgcgaataataataaatttttgttctttctttcaaacaatttctagacagtaaattcaaacttaaagatctaggtcctcttcatttttttccttggtctagaaattgctcaaaataaaagcaaaatatgtgtatctcaacatccttttgctttataacttttatctgatacaggatacttaggttccaaagtgtcttcaacacctatgaaacctaactttaagctaaacaaggatgttggtgacttattacatgaagcaacctcttattgtagtctcattggtaaatttttgtaaggagattgaggtccatttaatctccttatccaaggttaaattactcatatttgcttacgatgtttttgttattaatattaatatatattataataaattgtatttaaaaataccacacttaacaaaaataacaaaaattggagttaggaatcactcaaaataaaattataaagataatcaaattatagaagacaaatgaatattgagattatatatgaaaaatgttaaaggtgagaaatgaatgttgggataaagatgagtgttagagaaactctcttttacacagtcttcttaattaagtgacacgtgtaaccttctaaattatatttaaaaatagttgcaattatgccctcatttaatttttattaatgataattaaaatgagtcatttcatttacttgcttttttttatttttaaaactaaaaattaattttttttattttactgataattaaaatgtgtgattctatttacttgcttatttgttcatacaataaaaaaacttaattaaattatatttttttatttattaaaattttgttttttaaaagatagtatgtaccacaatgaatcattcttttaattttttataataaatattagctatttactttataagaaatggaaaaatatttcttttgataaatttggcaccaatatatattttttttttttgcttcgtatctttttttaagaaaaaaaaaaaaaaaaaatttcattcccttaaatttctctcaaatttctctctaatcaaatatgtatatatattaaatcaattagttttttgtctattcatgaaaataatttttttactttaaaaaataaaataaaagtaaatcgatctaacacatattattaactaggcataatcatatttaatttattttttgtcttcttttgtttcttatatatatatatatatntatatatatattataacaaacatgaaataaaaaaataatttaaagaataatacaatatggaaaaaaaaaaaaaaaaaaaactaatgcaaaatttgttgaaaaaaagaaagagttagtattttttatttttatgacataaaatagtacatatttattataaaaaagaatttaaaagaaaaatgcatagtggtgcatattatttagtaaaaaaataagaaattaataaaatagtcccaaaaaaataaacaagtaaatgagacacatattttaataattaatgaaaagtaaaaagggtattttttttttttgttgaattaaaagggtataattgtaactatatttaaacatactttaaaaagttatacgtgtgactcatttataaagaaaatgtaaaagagagtacaatatagagtggacttaccatttctctgtgataaatatgaaaaatgttaagttacgtgttaatctgtggtgtgcgaaagtagtatattactattagtgcaatttttttttttttgaaagaattattagtgcaatttttttttttttttgctgagaaagatcacttcattaaa

SEQ ID NO: 37513 - DNA, 7969 bp, Cannabis sativa
aactcctctgcaaaacaggtcttcagaggtatctttggatggttctttgcaggttcacattgatgcttcccttgatcatcatagcaggaagcgtagctttggtattgttgttttggatgagctcgacagggtgaaagttgggatatctaagccctgtgttggaagtgttcctactatcctaattgaagcaaaggcaattctgcatgatattcaatggattcaattgcttcaccttcctgtagatgttttaaaaactgattgtaaaactattattgacaaactttatttttgcaattagaatgttagtccagtgaatgatatcttaattagtatcaaacacatgttatctttcagtcctagtcttaatgttgttcatgtgtatagagactctaattaattcgctcataaggttgtcaaactatgattaggactagataatgagttggtgtggaatggtcctttaccttccatgtaacttacttgctttgtactttcactgcctattctaatgaagcacaaattttctttcaatttttttttaaataataaaaaaacaacactgtattttcttaaaaaagaaaaatttatttgtacaaaatataaatcagtaagtccctaaaaatataaaatttttgctaattttgtatatttatgaaataattcctaatttctacgaaatcccttattatagcccaaaatggaaagcccaagaccccatcgaagttctggtctctccccaattttagcttcaacttctttcttcctcttgcttgcactgaccgttttgaaatgttctgagactggaaacttgaatcagctcaaggctcaagcttcactacacactaagtaagccttaccttcggtaactatggccgagaacgaaactcctcctcctcctaaatccaaacaacgcccaatcgtacgcctggggatcttcctcatctctcatagctttctatttaggtactctttcgtcttcatattcgcttacagatccgatccaaaactttgatttaaatctctatcttacttctaatgacttcgtttttgctgaattatgataaatttctcagcgttgtttgctgcgctgccggtgttgttgcacttcttcttttgccgattctcgccaagaatacctacatttcagaaaatgctctcatgccaggtctatttcatcaatattttaacaaaaatttttgcatttctacaataattaatcatttagctcgatcatagggacgatcattttcttgaaatgcgaatagaacttgttttgcaggttcagcacacccaatgctctccaatcaagaggcttcagaggcgaatatctttgtcaaggatttaatttctataaagtcgaagcctccaggtgcaggcatgtatgtgctttcttcaaataatatttgaattaattttttttagtttaggtttgaattaagattctgaaagattaatttaatatctatatcatgaattctgtattagagcacttgataacgaccacccgttaaaaattttctaccaataaaattaggtatgggtatgggcttgatcataaaaatccttggacctcattattgcagtagaggagctatcatgtactaaagttagtgtagctacactgagaagaggccataaattttcacttttcagagatttagttcaattaattgatgtcattgtttgtgtattgctttggatgcctgcattttaatatcgtcttatttatttaatgatgaccaacacattgctgtgattttattcaaagttttattcagtcacgtagaaaaatatttaagaagtcatgttccatttgctgcctgaataatcaacactagtatcctactgtcagagactggtagcacaatatatgtcaattgttcccttcaacattcctgcactggttattgagagtcaattgtttcaagctcagacattgatctgttattgttttcacatttgaacctgtaatattttgatgcagagagagtcagagactgatagcacaatatatgtcaaacttgggcgctgaagttacctttcaaaaatttcatccccaaatggttcagtttcatccactacactttttctccagtcctaattctagaaaaattgagcagaatatcagttgttcatcatatggtaccaacactgttgggataataagagctccacgtggtgatggaaaggaagctattgtccttgtaacaccttacaattcggataaaattacacagggggaggctttgtctctaggcatagcatactcagtattttccttgcttacccaagtcacttggttggccaaggatgttatttggctggtttcagattcccaacacggtgagcaagctgcagttactgcctggttgagagattatcacatgccagtgtttactaatctccacaaaataaattcagaaatgtgtcctgtgagcagttacttgtatgaaatgaatgattactcaaacacagaaaaaaatatatatgatggatttaagcgtgctggtacaatggctgcagccctagttattaaagtagtggataaaagtgaaaaatatgaggatagtttaggcatcaatgctgaggcctccaacggacagatgccaaaccttgacctaattaatattgtaaattatttggctgtgcataggcagggatttcgggtaaaggtggagaaattatggtctctacttgactccaaattgcttaagattttgggagaactatttgaatcagttgggaaagttgcaagaagcttaaatccccaatggaaatttggtatcccagcatctgattatgttgagggcatcgcaacacttgcaagctcattgtataaccaggtacatctacacttcatattcatatttggaatgacatgtgatatgtcttttatattttatgcaaaataaaattctattatatcctttggtatctcttttcaaagaactaatttatgtctttgcatctatacttccttatactgtatgtatattaggctttgggagttcctactggtcctcatggtgcttttcgggattaccaagttgacgcaattactttggagattgcacctagagcttcttttgaaagcatgtcgaggagaaatgacttcctgctacgaggtggtcggttagtactttaactttatttcttccagtaattaccttcaagtgtgtgtgtgcgtgtgtgcgtgtgtgcgtgtgtgcgtgtgtgtgcgtgtgtgcgtgtgtgcgtgtgtgtgtgcatgtgtgcgtgtgttcgtgtgtgtgtgttttatgtttttgcatagtgtccaagttcatttaaacatatcaattatttcgtaatttttaaactgaattttcaaaaattcattttatacagagctttagtaagaacaatatattttgcagtcttgatgacattaattccttttttggtatcatttgggtgaaaagtgtgttcttttctctgttgcaggttaattgaaggagttgtgcgctcagtaaacaaccttcttgagaagtttcaccaatcgttttttctctacctactaacttctcccagtaaatttgtctcagtgggagtctacatgattgcttttgcacttcttgttgcaccacttcctatggttgcagcatctctctatgctgatgcaactgacttaaaatctacgcagagaaaagataaatccactcatgctgctgacactgatgaatctagcatcgctctcagatcgtggaaatgggttcatgctgcaaagaaagtttttttggtacacttgtggggattagttgtttctttacttccttattttatttgtcaaatacccaattactccccaacaaacaggttcatcatctggtttttgttttcgatgcttagctttttgatcatgtatacgcttttggcttctccattttcacgtgcgaaggtatctcaagttcacgttggagaatgggctatcttgaaatcagtgaccatctcgacagtgttcattggtctgtgtctcatgtcagttgttaacttctctacagcagaaattgggggcttacttcttgttccgctgtgtttattggctcatcccatacaacttgatactagacttcggagcttgcgaactctttcaagactgggatgcaatctcgtttttggccttattggatttcccccaatcactttcgtgttgttgaaaggtgcatttgtaggtttcgacagagttaatgttggtgatttctggtgctgggtggaatctctttgggcttggagcagtgccacttacctttatataggtatggttcacttaccatgctgggcactgtgcattcacatcatgtttcatcgttgttgacacatcacactcaaatatttcatgtattattgattgattagttagatcactaaatcaaaaaattaagatcatttttatgccgaagttatgtcttatccggggtgttaagtactagccacttagggtaccaagtcccgtcgggattttttatttccttttcgaaagcattctataccactcagaaaaataggggatctacgagcaataattttgtggacatctttaccattttgtttatcgcgtggtcacagattattatcatcacattgtattaggttattccgttcagagatgagtttgtgcacatcaccaactgaattggacctaactatgaatttattgtttatggatattacatcatatgtggggttagtggatttcacacgagaagaggcttgcttttccagggttttagcctcattgtctggttcagtcagtagtagtatagaaggaacgaacctggaccattcattagtagattaagtatcaaggaccttccctataagtcatttatggtgtaatggttgctctactaattggattaatagaatgttgggagagaattctgaaaaatgaaggcaatctttattgatttaattattgggaggattaaacaaaagggttatagggacattttcttagacagggaatcaaggaagaagtccattttgcttggtggtacttgggaatagatatagttgcaggttgcttttcacacatatgtatgataagttaatttgaaagtaaaagggattgataaggacccagtgtcttgttgaagtgagatcgtgctcctatcacatcagaatatttactttttctattctaccataaaagaagatgctggaaatttaaagatcaaattcttcacccactcaaaagagcaaggaattcatgccatcatgaattctttttataaaaaacaatgctctcattgaatttttatttttaatgtctttggtggagcaaagtttcaactttctcttaattgatgaagtgaagtagccactccatctactcctcaataatatattattaatgcttgaaaatgtaattttattaggaaaatataaactatttaatagtcgtagatgtgcattttccttcataattaatcatttcgattttatgaatcaatcagcaaattgtgagagaaagaatatggaaatatatataagtgggaacggctgcgatcttttagcggttggaatgggataatagggaatagaggaatcttgtatgaaaaaataattctgaaagaaatatactaataaaaatacttctagagctgactatgtaatatatttatttatataaatctggtatatgaaatgacggcttaagttgcttacaggccatcaagtctaaattagggttgaacaaagaaaaaaaagaatacttgaagaattcaatatttttttagattactgtttatctaataattatagataagatttgaaattcgaacgaaaataaaacccaaaaacttcttttatctttatgtttttttaggggaaacccacaaacaagttggctgcgtcctacaacaaactactcatattgtgctgttgggaagaaattacaaaagttaactattcccaactgtatctgtaatatttgactttgttaaccgtaaaccaactttcttttgttataaacgtatttttgttgtcgagttaaacagataactttctatttgtaagtacgatgtaacaaaactactatatttgacaacaactacataaataaaactgcgaacaaaggtaaattttgaggtgagacagatgtgtgtagttgtacaccacacgtgcttgacacaaaacaacacaataataaagccacttggagttttccgaaggaaacactaacctaccagccatggcgtgaaagatttggctcttcttctatattaaattaagccttaaaaacattactttgtaaattcctcaaaaccccaattcaagtttcccttaatattatattttcttttccccaagtcttcatgtacccaaataaaagcttagcctctcctttgtgtggtaggtaaccataaaaaaaagtacagcatgtgaaagaagaagaagaagaattgagaaagagagagttttgtgtagagatggagagcttgttatgcgacgagcttcttgaagaaatttttcagaaactcccacctagttcatcatcttcggtctctttggtttcaaaacgttggctcaatctttaccgtacttctaagaccacgctctctgtccaactaacccttcaaaattcaacaattccagctctatctactcttctttctcactacccttttatctcttctctctctctcctccttccccttgagtccaccatcaccggcaacggcgatgaccctttgctgaaaaccactttctccgatgaactccttctcttggcctcttcctcttgtcctcgccttcaaggcctcaggttcttggctggtcctgtctctcgctcctctctaatctctctctcttcaacatgtacacaactcacttctctctgtatcaacctctccagccctctgttcctcacgtggcttctgaactttccgtctttgaaagaattgtcaatcatggtgtgccatggggaaggctttgaccacgaaattgagaacaatttgggatacgggcatgatgattttgatgcagaattgggcatagagagcttgtgcttatccgggattcgtacggacgattgggggatgggttggctatggaggagctgtaataaggtgaagaaattgcagctaaggagctgtgagagcattggagatggagggtcattttcgtcatttgtgaggtgcctgcagggaattcaagaagtggagctcagaacttgtaggagtatagttgatggggttcttctaaaacttgctgagtattctcattctcttatatctcttttggtttatgatggtggtagtagagaaggtctgcttagatttttcagccacagcagttgtaatttacaaaaaattgatcttcgtttgcctcttgaccttaacaatgaccatcttttggctgcttcagtaaatttcaggaccctttcaagtcttaggctccaaagttgttgccttgttagtggtgaaggcctaaaagctcttggggttgctatgaattctgggcttgaagagttggccttaattaactgtgatgtagttgaaagagagcctggtttattgaccacattaggacaaaacttaaagcaattaaggaaactggacttgtcttacaatgaaatgttgtttgataaagagcttatctctatgctagtttcatgtcattacttggttgatttgaatcttagaggctgcaaaaggcttgctaattcagctatggtcactatgtcaaagagctgcaagtgtttggagaatgttgacataatgagttgttgtgggattgaatctggggctgttgagttacttcttctcaattctccaaagctgagaaaggtgctagttgaggaaaccaagctctctgatgctgcaaagacttgggcatctcttaaatttatccaacttgtttaatttatttgggaagaattttttttacattttaataaatgtttcaaatgaaacatgtccatacatatatatcacaccacttgttatgt

SEQ ID NO: 37514 - DNA, 2567 bp, Cannabis sativa
gtggagattcatactgctataaattatataaaatacaacttacagaaacagaacacaacccagtacaagactatacagtaaacaaaaaatgaagatccttctgtgcagtagaaaatcttcatgcccagcaataggtcttcacaacaaaaaaaccaacccaacttttggaggttccaaactaaacaccaacagaagtgaagtgggacaccgtcacaactctctgcatagacaagtacttaaaagaccttgtccaacaccaaacataagcacatgcaaagaagcggtataaactgctggaagggtttatagatacaaaatttccatcatcataaaaggggtcgtattgttaacagagctcatcaaaaattccgaccacaaaaggtactccagaaatattatcatgagcaaacctatggccccatatcaacccatattctccctctccaaattaaaattttacagcaaaactatccatacaacatctattccacaacgccttatgactgagacaagaaatccatcatccaatccaagaagcatgcaattgcaagtaaatttcaagaaattcagatcaagtatctttcagcataaagtaggaaaaaccagacaagtttccaaaaatctcgggaatggtgctaactgccaaattgcaaactaaaagcatgcatcctgcaacattttctcttagttcatattcaacttcaaaatgtaaatagcagtggcacttcaagaacagatgctctagcagctcaaatggtagaagacatcactgaatctataacatggtgggcagcagaaaaggaataacaccgactatatcaccacagaatggctaacatccaaacaaagctaatagtgcatcaagctcatcacattaatacaagtggcataaacacactgtatttggattcataaagtctaaaggaacacaatgttccttgatccagagcatatgtgcaggtttccttgcaagaaattgtgctaaaaacttcagatagttaaactgaaatcatgttttttaaaaccaatagcagctccttcaaatcaaatcactctccaacatgtcatccattgctttgacagttaaaccaagacaacacaacttcagttctctgcttaacacatgtaattttgcattcatgaggttcatgatgcagaaattcaattctggataccaattacaaaaacagtcaacacttcccaaattgactgcttgccacataacaagcaatatgcagagttccataattatcccagttgaaaatacttcaaaatctgaagtatacggaagatgtcaacaataatgtagagagatcttatttacctgccaaataaaaataaataaggtgtaaataaaataaactaccatcaacaccatttgaagatcagagtttaacacactgtaatcaagatttcttccacttaaaaatataacagaacaagtaccttgctttccaattggccgcctggttgtatgaaaaagctctattgcggaatggagcacttgcagcctttcgtgcagcctcatttgccaactcaaattggtttccctggtaattcgaccttctctgagctagagcaccctgattccaaaaaataaattgaccaacagacccaagttcagatatagttttcacaacataaaaacacttaagttaatggggaaactttccatacctgtctaactgaagatcttgaatccatataccgcttcatctttgatgatttatcattaccagcagctttcagaaagccctgacttttattctgcaggaacatactaaataaggcacaactacagtaatcaaacatcatacaacataaaaacaccaaaaactcttaccgaaaccctacgctgctgctgctgcttcttaggtttaccattgttgattttcgacattttgataatctcatctacattagtgggaaaaaaattaagatatttaataatcaagaaagtataagactaattatagatcaacagaagcttaggttaaagccacacctaatgtcatatccatctttttctcagtgagagcaattgcctcagtcgtaaggggcttaatagtagccatctgcagaaaacaagaagaaaaaaaggtcaacaacacagaaacattcaacaagaactgtttaatctaagccaaagaacgcagcttgtcgcctaagaaaccctaaaaagtaacaaatttaaaaccttatctattccatatttctcacattgcagaaacaagtttagcgaatcaaacaacaaaactagggtttaataaaatgtaaaaacaaatccaaaaaaaaggaaagagaaacaatttattcaagagattgaagaagaaaaccttaccgattgggatgagagaagcgaaagcggttaacgaagtgaaaattgagagcgacttagggtttacgaaattgtgagggaaaggaaaaggaaataatcgcgaattttgtgagaaaatcgggaacgaggaacatgtgtgaggtgttaatataggcaagaggaaatggtgtgtaagcggcggatttcaaaagcagaattaaatagggaataatgtaaaattgttcatatt

SEQ ID NO: 37515 - DNA, 3715 bp, Cannabis sativa
aaaatacatggtccattttgtcatttaacaaaacacaaggtccaatcggtaacttttgtaaaacagagggtccaaattggtatttacccttaaatcttctcacttaattaataaaaatagaattatttatttctccaatggaaaaaaaattcaaaaagtagatatagagtttaaagacttttttatttttatttacctaattcttatgagaaaaaaaatatatagtgtcgtggtatatgatatccacgtgtccaaaaatcattggtttatagtccaaaaagtagatgaattactactaatcgtcgtaattgatttctttttttattatccaaatcaataaataaataatttataaaataaaataaaaaatatcctaatttttatgtttatttttagaaggacgggaaaaaataagaaaagaaagcctctctctctctctctctctctctctctctctcttctcaatccgaactctgaaaatggcttcgacgattcccctatcaaacccaccagtcactgagtggagaagaaatggctccatttcaatgtcactgtgtaagaactctttccctctttaatgtccgtttgcctaatttgaaaaggttgaaaaaggatgggtctttttgatttcttttcatctccatatgatatgaactttttctccatgtttatgctattgatgaagtaattgacttattgggtttttatgtttgttatttagcttttagaattcggccttttcaagtttcattttttttttttgtgtgttagtttgtttgagtaggttttagggtcatgtatgtgtggaaaacctttgctttgaaggtaaactattgttggggttgaaaatttatatcactccctgaaatgggattttgaacttaattgaagtattttttattactgtttcaatgtcaatccataaggaaaaaccattattgaagcaaattatgccatgcttacttgttagaagatatttcactttactatatctatgcatattttgttcaaatacctaaactcattttatttactatgcattcataagtctacttttcaggttttttttttagtattttctgggaatgagaaatttatttgagaatattgttgtgtcaaggaaatagtgagagaaatatcatattgcaaaggccattatttactaattttcaatgtttttttaattagaacttggaattatgctctagctgtttgactactaggtctgtggaagtggaatacataagttgtatgccaacttttttgtttgaattgttcttctcgttcttgcttttcaggtaatgtaaattcaactgcaaatgtagttggaaagcagatttcttggtctggatatcgaagttttaagcaaaaccgtaggtctctttgtgtttatggtctatttggaggaaagaaggacaataatgataagggtgaagaagcccctgcaaaggttaacatagtgaatctcaatttatctactattttaaagtagcttcttatattgtatcaagatggaggaattgtgattttggcatgctttgagctttttcatgaaaaaactaacaaccatttttgatatagtcgacttagttattttctctgtgcaaacacataacttatttatatattcacttgtagtttacctgtttgatacatgaacatttgtaaccagtcaatccagtgagtgtgatttatattggcttcttgagaagtggtctatgagcttgctacaaatttttttaatttaattttttgtacacctgaaaatttatgcaatatagcaaccacattttaagcatttatatgcggaagaataaataccttttgactgcatgtctttagggtattatgcatcatttgtagatgagattgggcgaacacccaccttcatgttcatcgctataattgtccatgtttaaaaaattgttgattcctgcacccctcgaaactgttaaatgagactaacactaagtttatgctaatctattttaggcaggaatttttggaaacatgcagaatctttatgagactgtgaagaaggcacaaatggttgtccaagttgaagcagtacgagtgcagaaggaacttgctgcgtatggcattaacaaattcattgcaatcttgctcttctagcttttttacatgcctagctatattgctaagttttcccattttttttcttgtgttgcagagcagagtttgatggttactgtgaaggcgaactaataaaggtaactctctcttacttttattctagttgtttttggtactagaaatgtcatcttcttaccaccttatactgcaatctgatattatttaataaatgggtgtgtcatttcaatttgtatggtaaaatcaaagatttagaagaactgtggtattgaaattcgggcaataaggaattcaagagcctgatatctcctcgaatgcaaaatcatgactttcactctctctactgtcgggggttatcataatgctgcagaagcatgcaattttatatgttttcactagacatttatgtgcatttttccttattttaaagttttaagaatttttttaactgattgctgatgccatttaggtaacactatctgggaaccagcaacctgtgcgcacagagatcaccgaagctgcaatggagttaggaccagaagtgagtgttctcagtatacttgaccttgttgttttgctttaatcaagatgaaattgcatgtcattgtgtttaatgtatgtattggcacttgtattagtcattgaagtcattttcataagcaatatgttcttatcatcatatgggcatgttaatagtgactcaaaatcaccacctcaccactagcttgacacactgacctgttcttatcattatacgacgttgatatttttaaggaagtattttatttaatcatctttgtaatgcagaaactttctcttctagtcaccgaggcatacaaagatgcacaccagaaaagtgtcttggtaagatttctttagtgtcactacgagagaattttcacagcatttttattttcaggtacgaaaatattcacttatttcttttattctttaggctatgaaggagagaatgagtgatcttgcgcagagtttaggaatgcctcaaggcctcaatgtaaatgatgcgctgaagtaattatttccccccttttacttgtctaatataaaatgtcaattttgtactcaaaccagacataagtgctaactctgtaagggcgataagttaagcattgtttaatttactctttgaacaggagaggtttttgaacttatatatctctggtctcaatactaataaatgaatgttgcatatttgtttcactactttgaaccacttagaaagaacacactatagtggatgtgaacagggaaaatgtgtcaatgtcttcatcctctcctggttgttcattttgactgattagatttttatttatcgttgtgatttaataagtgaatcatagatttatttggtgattggaaaatgtcttgcattgaataatttttagtttaaatttctgtcttgcattcccaatttaccagaatatacaagacagaatcgaattacatgagaatatcattactgaacttgaatgaatggtccctatatctataagttgcttcatttttatggtcatctctttcaaacctatgaacccttcttgttgaaactcttccgctatcaagatttaggcaattctttccc

SEQ ID NO: 37516 - DNA, 5731 bp, Cannabis sativa
caataattatatcaaaagaagaacctaaagctcattaaagaagaaaaatataataaaaactaatgaaataatatgaaaaattgagagagctaagattaagaaaaaagatcatatagattgacacctatactccttaatgctttcctttatatatatatattgataaataaatttaaatagtattaatattttttttttgaaaaaagcattaatattttgattattataaaaaaatattaccatatatatttagtttgtgagatcattttttatttttaactaagttatttatatattattagcaataacaatatatatgcattatacataaaatatatgtggatggtgtacataaatgacatagcgaacaaaaataaatattataatgataaaatatatataaaaaagctcattttaattaataaaaaatacaataaaatttaatatttattaattaataaatatatttctttaataaataattattttattttatgtataattaacattaaatgtcataaaaaattatttttatttttatttttaaaaataatatataaaattcttatactcaactaaaactcaattaaccggaatataactacatattatcctacacaactaaatacagtttacacatttctctaccataacattctctttcataatattccctataatcaaattattttgaacacctcattctaaaccccctacagaatttgactgcaatttactctttataaatattaaattaaagtttttgtttgtctttatcacagttttctctgtacaatattttttatttaaaatgtttacgtttaaatgaatatttacttggaatttttttatcacttaaacctgtatatagtctgatccgaggaggttacgcggtataaatttgcatagattagtagtacggtactggttcttctaaagaatcatttattaattggtctttttttgtttgactagttaaaatcggtaattttggtattatttttggatcaacttttaattagttcttttgtctcaatatttgacttggccctagaaaccgaataataagccgaagaaagaacagaagcaaaaacatacccattaattaattaatattttttttaatgaattaattaatttatgaatttagacaaagaaagtttgaaagtttcacttttagaggactgagtcaacccgttgggtcagagaactagtccactcccattttttattttattttttctaatttcatttcatgccatacgaccgtagtcttcacactagtccagctattggtccattaatgacttgttctaacttcataacatacccaatacctttatgtatatattaaatatatattcgaaatttatgtcaatatatattcttcgaaattatactttcattttcatatccatcatcatgggtcaattttaaattccacaaatattatgtacatgaagtaagatactatataattatttaattaattaataagctgtataataatgggtattcacgttgcttcccattgtaaattttctactgtgtaatttggagtgagactttttttttcacaaattgtaattgcattaaaaatcaacaaattacaattagaatttggtatagtgccacttcataccaactctttatgttaggaaaaatcagagaattattcatctatgttcttattactgcatattttgtttgttcaatagtggagcggatgacaaactctcaaactaacaaaatagattgtctaattaactaactaatccatatttaataagccccttaaatatggagtgtaaaattctttcacacctaaaacattattaaaatgaggtggaaaaaagatttggcattttttctagtaaaaatgccagctagatttatcttggaagagacatgattgatcttcaaagtgccattaataatcttctctcggactatatgacagttgttgattatggttacaagttttgtcatccgggattagaagctgtgaatccggagagcagataccggaagcttagtgtggatctagaaagccttgtgcagaaggtcttgttgaattccgaaggtacttccagataagcttgtaccgtgtatgaaatgtctctcccggatggtttgtcactaatccgaaggtgtactcccagatagctctttcaatcttgaaggttcatccaggaatgaagtcatgtacgtatctggaaggcttgtgtgttataaagcttccaggttgtccgtactgaaagcacgcgtttcaagatgatgtggattattattgctggtgatgagttggatcatttatggtaatgtaaatgcgccaagatgatttaggagatacatttgacaacaatgtaaatctatatatagctgtaaatctttgtaacctgtgtgagaatcgaaaaagattttgcttggtttgtaatcatcgctactgcaaaatacgatgtcaaaaagtttactagtacgaatgattttggattatggagaatgaagatgaaggcgttgttggttcatcaagagttgtatgaggctctgctaggagaaaagtctcttcctgtttcgataacagacaagatggagactcttacaaaggctcatagtgcgatcattttgaatcttggagataaggttctgagaaaggttgcagaagaagatatagccgcaggtgcgtggttgaaacttgaaagtctgtatatgactaaatcattgatgaatagattttatctgaaacaaaccatgtattcattcaagatgatggaagataaatatattggagttaagattgatgagtttaacaagttgattatcaatcttgaaaacattggtgtcaccattgaagatgaagatcaagccttgttgttgttcagttctttaccaaagtcctttgcgcactttaaagatagaatgttgtatggaagagaatcgatcacactcgatgatgtgcaatcagccttgaattcaaaagagctaaatcagaggagtgagtcaaagaattctgaaagtggtgatggattatatacaaggggcagaagtgagaaaagaaaaaagtcacaaacgttcaaaagcaaaatcaagaactaaatcacaatctgataaccagaagaatcttagatgctaaatctttaagaaaataaggcatctcagacgggcgtgtccgcagaggcataagacgggtgactcaagatctgaaggagatgcaacagtgggtagtgacgattatgactcagctggtgctttgcttgtaacctctaagaattcagattctgaatggatcttggattctgggtgttcattccatatgacaccgaataaatcttggtttgaagaatttacatctgatacttatgggactgtgtatcttggcgataaaaagtcttgtaggatggtgggaattggaattgtaagattgaaacttcatgatggtgtggaaagagtgctgaaggacgtctgactagtacaagatctcaaaagaaatttgatctctgttggtatgttagatgatcaaggatttctagttaaaattgagaaagaaatcatgaaaatttgtagaggttcaatggtggtgatgagaggaagaaaataaaatgggatttaccctctggaaggtaccatagtgaaaaacatgagagcgtgtgttttaagcaagcacgtaaatgaaacttaagtatgtcacaagagacttggccatgttagtgaaagagggctgcatgaactgaataagtagggattacttagaaaagtaaagcttgagctattggatttttgtgagtattgcgtacttggtaaagcttgtagagtcaagtttggaaccggtaaaaggaataccaagggaacactggattacgttcacagtgaattatggagaccctcgaggacaccatcgcactccgagagtaggtattttcttcaatagttaatgattactcaagaaagttataggtatttatcttgaagaataagaaggaagttcttgaaagatttaagcactaaaagataatgattaagaatcaaactggaagaaaagtgaaatagctaagaactgataatggtctggaaaactgttcacatgagtttgatgtgttttgtaaaaaagaaggaatatcaaggcacaagaccatgaggaagactcctaagcaaaatggactcatggaaaggtttaacatgactatcatggaaagggccaggtgcatgttattgagtgctggactacccaaagtgttctgggcagaagctgtgtccattgcagcttatttaataaacaaatatccatcaatagcataagatttcaagacgtcggatgaggtgtggtcaggaaagccaacaagttatgaacacttgaaggtatttggatgtgtctattatgcacgcatcaaacaagacaaacttgaggtaagagccttaaactgtattttcttggggtatccagatggtgtaaaaggttatagtctgtggtgtttggagcccaaaatgagaaaatgtataattagtagggatgtgacctttaatgaatatgttatgggattcattgacaaacctgctggaactcaagccaatattgactgagaaaaaattgaagctctgggaattgagcttaaggtggagcctccatgaagcttggagactgaaacacctgtagatcacggaagtgatggttcagaagcgataatctgaagagctataaactggcgaaagacaaaacacgaagagaagtaaaggctctagatagatacagacatgttgatttaattgcattcacatttcatgttgttaattagattgtgcatgaagagcctactagctatgcacaaacagtgaagagcaaagattggaagaaatggaatggagctatgtcagaagagatgcatcccctgaatgagaaccaaacttgggatgtaataccgttgccagaagatggtaaagtcatcggatgcaaatggaaagaaggcattcttgatgtacaagaggcacgatataaatcaaggttgcttgcgaagggattctctcagactgaaggagtcgattataatgaggtcttttctccagttgttaagcacagaccgattagaattttgtttacacttgttgcatttcaagaccttgaactaggacaattagatgtcaaggctgccttcctgtatggacatctcgatgaaagaattctaatgaaacaacttgaaggatttgaagaggctggaaaggaacattgggtgtgcttgttacggaagtccttgtatggcttgaaacaatctctgagatagtggaacatgagatttgatgattatgtgaccaagataggtctaaagagaaataagtttgatccttgtatatatttttgagagagaaatggatgtactttgtatctgttgctatacatagatgatattctgatcgccatcaagagtgtacaagagatcaagcgcttgaagctctagctaaaaatggagtttgaaatgaaggatttcggtccgactagtaaggtcttaggcatggatataagaagggaaagattaaaaaactaatgtacttgaatcagatgaggtacatcaaaaaggttctagataggcagtgaatactctgcttgcacaacacttcaaattaagtgctactcggatgttgaaagatgatactgagaagacggagatgtcaagtgtaataccccaaaattaagaaatggattagcaaaaccctaattagataattatgtataattgaggaa

SEQ ID NO: 37517 - DNA, 2659 bp, Cannabis sativa
  modified_base (218)..(232): a, c, t, g, unknown or other
  modified_base (1686)..(1701): a, c, t, g, unknown or other
agagagagagaggatatttgagcgtctttgttcgtgtgccagttcagttcttatacaccaactaataatctatatatatagtacttgagcttatccttatttataagcaccaaaactatatatatatacttctctcttaggtttatgtatattaaatgctatttgcgtcactctcgtgaggtacttctagctaactctgctctctctctctctctctnnnnnnnnnnnnnnntctctctctctctctctctgcctacatatactaactacacgtctcacttttattatataggctcaattacgtgcccaaaggagtgaattagctagagcaaggaatataactactagttattttgttcctttatttctctcccaaccaatgcaacattcatctgcttcttaattcatcaccatatcatgcatgccatgctcatctcttcaatatatattgctctaccatttattttcattttctcttctaataattttccaactgtagatatattcaactctaatctattgattaaattcttcaaaaaatagtgttttctgttaaataaaaaacaaaaaggaaaaaaaaatcttatttatgggcacttacgtatatatgttattataaagtgtgatataaaattaaatgaccaattatgttatgtgtattaaaaaggtattaaattgacacagaatattgtgtagatactataaattaatttataatttgttgaggggccaaattataaatacccaaaacttattctataattagcctataaatatgcagtggtcttcaagaaacgtaaggttcttgtattctctcctttctcatgaaagaaaatactttaaagaaaaaatatattcttagaagatcataacctttgtacaatctctaacaaatgactttaaattagtgttttcgctcatctgtattcatcttaatattctttaatttagcaaagactctatagaagtatattctagagttttgatattgaaatactttttgatttatatttagatttgtgattattttgtattttttgaatattttataaatcctactaacaagaggtatcagatccacctttgctagattaagtgaagatttgatgatttatttttacgaatttttagagatattctaataatagggatttgatttttgaatattaagattttgatcattgtcatcgttgatattatttttgtttggctttatctgtgatttatatatatgtcaatttaagttaattaatagtcacaactcgaaccttaggtcgtgacaaatatgtaatatccataacttgagtgatcaaataccacacatagatctttatatgaagaaaatacttataaatgaccctttaatttatattacaaaatacttatttaaaaataaaagattaacttctatatctataagaaaatattagtgacaaaattatgaccactcatcaatataaatgaataataatattctcacagctatgtagtcatcgaatatatagatttaatgaatcaataaaatacctaaataatatctagcatcaataatcattctttatttctaactagaacatagctaatttgagtcatctaaaccatccattcaaatttaaatacaaaatcagtttttaatgaaaagtttgataaataaaataagactaaactaataatgactttcttttnnnnnnnnnnnnnnnncatccactagcattaaactgagttccggacaattggtttaataaaaattcatgcatgattagcttttaaaaataaaacatctcactaccattatcaaaatatataaataaaatagagagaccacaaataatcacaaaatcaagcttcaaatacatatcacactgtctactagacccctagctctcaataccaatcataaaaaatgacatcctaaactaggtagtcgtgaaccaccaaaatgttgaggctcaaatttaactcacttcatgtacaaattctaggtcttacaggtgagtgtacaccttacacctacaggtgagtgtacaccttatctacctatgataacacagagtttaggtcgtgaaacaacaagacaaataaatatggctctcatcaatataaccaaaaagcaggtaaataaaaataacaaaagaacatatttacttttattttttttaaaatctaacaacataacagttgtattttgaataaacccaaaacttataacctatataaatatttgtacaaaaatatagttggcactcagtacctcagaacactccaaaaaaatatgcatattaagttttcaatttttcaaacaatttataaatcatagaaaatggaatatgtactctagtgttattcaacacatataaaatcaagtccaataatcaatttgagcccctacctctctcaagttgttaaattttgtccaagaaaacgattctaagctctcaagtcttgagctccaattgtttagtctaatcttaaatatcactcccacatataccattaaatggtaataattattatcattgcattctacattcaaaatcgagtccaacaacatataacatgattatatttaaagtttggaattttaaaacctcgcataagcactgcacattaactattggtggcactactacaaaaacaccctttagaggcggtttttaag

SEQ ID NO: 37518 - DNA, 6210 bp, Cannabis sativa
taatttccaaattaactaagcgggctttacagtttcactgtgttatacctaattttttaaaagtcaaaaaagtcaaccttgcgactttcaccaagacttataaacgtcaaataagttaagacatcatacttgagggccccatgacatctctaggaaactcataaaaatactaatcaattatttagtgccgggactcacaccgaagtctgcccaacctaggatttatgggtccacataaggatttttgtcctagagacctcaatccgacaatgagaccaataaggacttgacatatttagtcataaaatggctaaaacttgagcataaagttaagaatgcacaaggaaggcatcccattatgcatggtcgactatgccctaatttggcataaaaagatggcacaagtctctactctcaaagaagacttgtctaaatattgtccctcaacaccaaggaatacaacacaagaaaccattttcacccaagaatcaagctagccgacctgtgccatctctgtgcataaataagtggcataagtcggccacaccaaatggtaaagagattttttgccaaaaatactttttcatcatcaacatatcaaaaccaagtgaagaaggccaccaagtggcgaagaaaccacctagccaacctgtggcatctttgtgcacaagaaaatggcacatgtctctttcaccaattgcccaagaactaatgtggccaaagtgtttttctagcatccatatggtaaaactaagcaagaaacaccatcaaggaattctcataagccttagacgacatgtgccatcttttggcaccaaaagatggtgcaggtctcccattaggaacatcgagataaggttttggtaccccaaaaccctccaaaatatggttcaccatcaaaaaaataagttaaaacacaccccgaggtgtccaagaacatgtacgaccgacttgtgccataatgaggtggcacagaccatgataacatggcacgtgtcatatttggaactgaaatatacttacttctcttcagtgaaataggcataactctttcaatttttatctaaatgacttggttcaacttgcattgaaagttatttttaagacagatctaagtgtgtgtcatggtcataacataattttgaaactatggggctcaaaattaggttacaagacaggcttgcacactttacttgggaattaattggttttactaagtgtgggcctcaaggggatgtgaggagagctatccacaacacttgtgactctctacttgccttagctgaggtgtgccatcctatggtcacttctctccaattttgtcattcccaaagcacaatgtcacataagcaagttcaagacaagggaaataaccaattttgacgacaatgcaggatatttgggatatttttataaatctttacttaatcacctttttcattcattatgttagagaaagagacgaaatttgaagtgagataccttgacttgtggagggtaactaaaaaaccctaggcctatataaagacaatgataaactagggtttgggaggacgaggatagctgcctagaacacatcatccattgagaccttttcttttcactttttccttgagatcttcatattagtacgacaccaagcctccatcatacaatcaccattgataaacatatttaccaaaaagaagagaccattctctattcttgtttcccattattattaggtttatggtgttgggtctcccatgagcctattacctataagctttgatattgattttgcttagaaatcccttttgtactatcatccacacactcttgagaatataactttggtgtgatggaatcaaataatataaataaagtagacgtagttaccatcgggacttggggtgaactgctataaatcactagtgtccttttttatttattgcaactttatttagccaagtcagttcatcccaatcctgttattttttacaatttttttagattagttgatgaaaatcgcatcaacattttggtgctttcattgagactgttgcggtggaaagtttggttattttctcttcaaaaactcgttacttcaataacaatggtggaccctctagacaaaattgacatggacataaaccaatattcgtgtggggattttcatcttgtaagattatttgatgaacaatcccaatctccattaggggcacgacatccaacactgagagcaccaatccttgccatagtggaagaaatcaaataaccagagacactagagcttgaggaaattaatcctcgcattggtgatgatagggctgaccttggtcccattgaagagtttgaaaaagtcgtactaaatacagaagaatcaacctagatcgtaaaggttggaaaacaccttaataaggaaataaaaaagtatcttatccaattccttcgtgataaccaagatatctttgcatgggtcgtgtaatatcttgaaaatttaattatgagttactaaagtatattttataaaatatggagtaataagtatgttaagagtataaatgggtaaggttattgttgacctcagatttggctaaccgacagtgaagtcgtattaacactgatgttttccatgttttacataataagaactagaaattaaaagagcacaaagattttatagaggttcgccccccttaattagcgggtaatgacctactctctttttagttatatttgatattgagagataatactattcaaatcactataggtgagatctgacatagctctcttaaggttacaatgtaggaataaaatatggaaaatctcaagcatagagagaagcaatgggcgtgtgagagggagagagttcagacttagcatttaatgacttacggtttttagcttacgattttatagtttggttaaggctctttatataggagagcttaaacccttcttatttgataaaataagtatatattacatagtaaattagtaaaatacaaatgaataaaatgccccttaaaatatatatttttcctttatcttcgtgggcggttaaggtctaatttgcagtttagcttactgtccacatgtaatgatgtgcaccaaagttctgccaggcctacttctggctggccatgcatctgcaggatgcaggctagccaaccttgcgctgtctagaagttggccagccatagggccggccagggctggttggccagcctctttgaggtggctgatctgtcatttgtcatcccatttgaatgccaagaccccccgttagttaaggtgctgaatagatgacttggccttcttgttagtgagttgtactgccacgtggtgctgatatcagccacgtagacatgccacgtcaggtgagcaaaaattgggataatatttgcccccaagttcttgtacaaatgtctgtgcggatagggactttctagcttagttggaactgatatagccttaactgagtaaatgttgctgcatttttagtctttgaaataatttttcttgacggtctaatctcatttgctgcagtaagttaagcgcattgtacttctatatgctttttagttgaacactacgtagcaagtgaggaagtggtgccacagaaactatataagccttttagagggaaaatcctcttcacttttcacttttcattctttcactagaaaatgtagctttgaaaagctcctcctctctagaggccgaacccacattgctccatctcttgggatttttgcgctattttgacgatccaagcttcccattctctccatcaaaggtttcttgtagtgggtaagctttctattctcgctattcacttgatttagttgatttttccatgattgcatgaatctttttctttgcttttaatgttctttgattcccacgttagattataatctttttggtattttgatctgcatagtagtcttaggatgtgtaatgtgtgatttctagaagaaaaagattagattctgaccttcattgtgattcttcgctctttgagtcacgaagaacgtgttcaggttcttgaaaaaatacatgttcagatcctttgtacaccctggccggccatgaaagtcttgttcaaaacttaggtgttcaccatggggtctggccaagcatagggggagtaccctataggttggccgacctatgcctggaactggaattcctggtcgaccctaggctgggtcatgggacctaaccgaccctctaaggcttgggaaccctgccggccaaggccaaggttctaagcaggcgaccattcttttgtcctcttttgacctcggctagggtcttatgacaaccttgtaggcatatacaactataatcttatgcatggttccccttgggaactctatataagacttggtagtgagtccattattttcaagtgcacaacttagaactaactatttttctaagtagatgtacttgatatggtacttggatgatacctagccttgtacaatgtggcttacatggaaaagacccttgggtacaattaaccataactttgtctgtagctttgtcaagttgctcacctccccttgtctcttctatacaggtgatttcaaagatatagcatttagtctgtcaccttgctctctttgtgtgattttggactgatagtcacggcaagaacaaaacaatcgtgtcgtagtgcaccaacatatgaccctcatgttgctagagtggcaacgatgggtaaagttagagttgtagagcacgccacacaacctcgtgattatgttgatctagaggtcagccatgaaaagatgcatgaggttgaccaggggttaagaattctgacactgagtctgaggtggaggaggctgcgccaattaggaggaggacttacaaaacttgtgttctccttcccaactgctcactaggttgatatgatgtcgatgggcagcccttgaacagactaggccaaccttcactgataggtctgaatcatgtcttgatatagtcttcagagcctcaggttcttgatgttggatcatagggagacaggtgggtctctcctacatctgttattcctgctgagatttttgacaagatactagccagtggtctagtgaggggtgtccagtctgagatacccactaaagatcaaagagcacaccggcttgccgttggttggatggcatggtcagagcatcatattcagcagggggtagtgtttccattacacccatacttctgagacattactgcttacttcaggatgtgtccaacacaaatcacactgaaaagtataaaatacctcttagcgattgttttatattcagagttaggctagctcagcctattccatacgagattggatactattttaatctgaaatctactccgaagcagaactagacagggtatttctacttcagttaggttggtcatcagtggttgggcgacaccaacagcacacctatgtcaaaagttggtggatatgccccaaactactacattgcttgggacatccatgagattctacaccgtcgcttccagtgcccccgtggcaaagaggaacataatcaagttggccagtgtggccaactttcagaagtacggcctgtatcctcctacttctagagttgtgggggccgagggccgatcagttggtgttgatggagccctaactgttgaggaggtctgtcctcgtgatggacaagttcttgacatggatactgtgcctctgtcgtggatagcccaaaggctggagaggagaaagagggccctctgctagcgcttgactcacgggggcacagttggggacgatactcttcagattaggcttcgaggccagagatctatagggcctactcaccccttgcctgcatttagaggcaagagcaaagcaatcgttgaagattcagatgattcctcttcttaggatgatggtacttgataattgattacaccatcttttatattcttgttttgcattgaatgtttgtaacttgtattctaacattgttactttctccttgcaaatatgtcttccaggttgagaggtctagttggtggaccttcaaaggagccttcgagtcgtccaagggccaaggtggttcagaccacccgtgttagagatgccatggggtcatctctattgggttttgtggcctaaataaaattcatttcaatataattagatttattaattaataaagatcagaattcattttatgttgcatg

SEQ ID NO: 37519 - DNA, 6331 bp, Cannabis sativa
  modified_base (6293)..(6296): a, c, t, g, unknown or other
ggtttcgcctcttgggggagtggtaatagactgtcgaaagcttctatctattttaaacaatgtttctttgttttttattaaacgatctgctaatatgactgcgcacagttttactagagcgtcatattcttttcccaatcgagttttcagtgagagggatgttcctattgaattacagtcttatttttttgattgatttagcaaattaataaaattccaatttgcattcaaaaaaaaaaaaaaaaaaaatactgaaaaataagtttcaattttaaaacaaaattaacaaggccggggtataaatgtaatagtaagtttccaaaacaaaaggtaaaaatgagaaggcctcatttaaaacgggtaccatgaaagacccatttttttaatatgaatgcagaagaaaagagagagatagatttcatcaacattcaagtttcctcatttcgaatttatcagaaaaaaagaaggttttctaatatccaaggagttgtctatttcaatatttgttccctcctttactgagagtagcaaagaattttattattatttttttttttaccaaactctctcgatcactaaaactgggttggacataggattcttactattgtgaacaagactgggcacagctcaagtaatctctctctctctctctctctctctctctctctcttaatagtgtttgatgatggtgttatatgggtttctatgagttctcatttgcgataaatttcatgctctgttatatatggttttagaaccataagatgggtagggaagattttgagtgcttttaccgaatgtatggattaggcaagatttttagtgctcttaccgtatgaaaatagttccttttcacttttggtttccttgtttgtcaggttttagcctttaacgaagaagaaacagaaaaaaagtgggtttctgagcagtgaaggagatgaagaagtattttagaaaaagaaaatccaagcttaataaagaggttgaagcagaagattggtgtttttattgtaaagatggaggcgaattactcatttgcgattacgggtcactctcttatctctatactcttcacatgcattatttgattttcacagttgtgtcgtcattgaatggcaaatctccaaaatgccttctttattacttggaaaacaagaaagatcattcctttttgtttttgtgttttgtttttgggtgtttcttcaaataggggaagaagtcaccactaatattgtcattaccatttttttttttgtttggtggtgtggggttgttttccactgatctctctgaagttttttcagtcgtgtttatttatgtgcttttaaagagaaatttattccccaaggaacaataatggacattatttctatttgtagaaaaaaaaaatcttattatggaagtttgtttaattttttttttcaataaatgcattactttgttcatttttattctacattttaggaactgtctgaaagtctatcatccacactgtgtgggaaaagatgactcttgcttagaaagtggagaacactggttttgtggtaagggatgctatatcatcatatttcttgctttttgctctataaaaatcattggttttaggagtgtgatcaagttctacctttcattcatgcatgtagtgtgtatcaatatgcatgttgggccttgtgattagtcaatttacctcattgcataattttacatgatttgaatacatcaaataaattttaaactttcataatttcttcaaaattaatatattagttttctcattagttaatatctgattttacttgttacttttttgttttcaggtctgcattcctgcttgatgtgctataaaacctcaaagttccagtgtttttgctgtcctaatgctttctgtgcaaagtgcattaactcttttgagtttgtacgtgttagggatgatagcggattttgtaagaactgtgttaggtttatcctacttgcagagcaagatgaggtttatgactctaatggggtatgcgtattattattattattattatgctacagttttataataaatatatgatcactatttcccatgtaatgtttccattgttgctccttttttcaattatcaattgataaatatttgaataagaagtgttacctttataagttattgcaagactctcttggctactaaagtttcatacattcgtctcaatctgtttataatttatagtttgcttctgcaatagcctccctttatctgtgttttttttcttcataggctagatcaccatagcttcgtttttgggtgtaaaatacgcacacagttaagtgcaacttttggtttttgatttttcaggttaagatagatttcaaagatagagaaacacgtgagggtctgttcaaagagtattgggacatagttaaggagaaagaaggcttgactctagatgatattcatgccgcaaataagaggttaaagaagaatgatggtccagttttaatagaaaatagcagtgatgaagaagacagtgacttcgtagtagatgagtccaaaggtgctgtaaaacgaaagccatcagctaagagcaagatatctaagaaagaagagtttattggatgggcatccaaaccgcttattgagtttctaaaatacactggtaaagatacaaccaaacaaatgtcccagtatgaagtggatgccatcgtcaaggggtacattcaagaaaagaatcttttccacccagaaaataagcacaaggttctttgtgatgaaaggctctattctcttttccgaaagaaatcattgataaagaagaaaatattttttcttttggatgcccattttgttgagaacttggatgaatcagagtctagtgatttcatagatgaagacgtagagcattttcaagacagcaatcaaaatgttgttatgtcctgtaaaaagcagagaactgttagcccgactaggaagtatcaggaagaggaaactgatcagaaagaggaagctgatatgcgaagctgctttgcatctataatttctgataatatcaaactaatctatctaaggaggagtttagtggaggaactatcaaagcagcctgaaaattttgaagaaaaggtagttggaagttttgttagagtaaaaacagatcccagagattatagacaaaagaattctcaccagcttttgactgtaacaggtgatttctactaggaaatatgcactatagcactgttttaactgttgttgtagtaggctgatctgctggacattatggtccattatatttaattctatgcatgctttttctttcaaaaagttgtatgtgtgtcagttcatatcatgaatgaagtccggttttataaattttttttacttctcaggtgttgaaagatcttctactggtgaaatcctcctaaaatgttctcgtatgtcttttacagaagactttagtatctgtatgctttcagattccgacttcactgaggtaacaaaactagttatttcctgaatgaattctggtgatttgttttttttttatgaaggattttgatttacaaaatggtgtgattcgtttggcatttcattcaagtattttgtgtgattggtctgacagttgttattgaacttcaaagctgttacgtacagccttctatagctttatgcgcgtgtgtatgttagctttcaattctattgcattaacttgttctaaccgaaaatacttaactaaatttgcatctattctattgcaggaagaatgccaagattttggagaaaagatagccaaaggcgtacacaaaaaacttactgttgtaagtactaatatacatgctctttcaaaggcagaaagtttgaaatatttattgatgggatgatcagtaaagatgcattcatagttctgttttgcctggtagttgtcttcatttgtttagctaaaggcttgtctaatttaatttactgaacacattttataaatctacagtcaaaacctttgttataagattcttacttgccccttttgtcaatatacaaattcttgttcaaacaaccttgtgtggacatggatcaacaaagagaaacaagtaaaatcaacctaaagcactatctgaacttttgcaggttgaggttgaggagaaggctaaaattctgcatgcagacattactaagcatgtatgtttattctaaactaccattagttggagatgcaacaatttgaactacaattttctctaactgttgcataatttgattcagctcttctaatgataagaatctttatatgttttttcatgtttctaccctgatcgtcctttgggggttgcatgtggggtaaattactcggcagtggattaagagagagctgattgtcctgaagaattgcatcgatcatgcaaatgagaaggggcggagaagagaatatcctttgtttatttcttgcagctgaacttttaaccatgtttcattttgtgttttaaggtgcgaattgattatgctacaatacaggttgaccttgacttttggttctgaacattgttcgagttcttagaacgaagagatcgacttgaaaatccatccgaacaggaaaaattactacaagagttgccgaaggtcactgctgaagctttggaggcagaaatagaaactgatgatacaggggctaaaattctgtacttttgagaaaatggaagctgagttatggtccatttgattttgtgaatgtcttagtttttggaactgaattgaccacttggggtgattaatttaagataagctgttagctgtactcttatttttttgtatatgccatccattccatgttgatggcctacccaggttttatcctaatctttgcaatatgtgaagattctaatcttatcagttgtacatatgtctttgacacattttctatccaaaattctaatataatgcacctggtatagatgggccagttttatttatgtatttatttaattttttttttttaaaaaaaacattacaggcatgattatgttgtgaccactaacaatgctaccaaaacaagaaaaaacgacaatcaagataatctatccattgaacaatacaaactatatacaaaaaagaaaatgattgattggtaagaaaattacaaattaaaaattatggaacacattatttgtttttttttttgttttttttttaatctttccgcataaaatacctgaataattcgttgttgaaaacaatcttaaaattcaaattggaaacgaggataatatatacagttttggatgtttaacactataaatacgagtagagttattaacactatatatgaatgtaaatgtgaaattttgactttgcatttataaaactaaaatttatctcctaatcattagtatatcaatattattagattaggtcaatttaatttgttattaaacctaaaattactttttccgtttttcaacttacttttgtttctctctccttccattctagctcgctctattcaagagaaccgaaccgccacgaccattgccacgatccaagaccacccgtactgccgccatccaagactactgccaccattcaagaccagcaatatcgtcaccatccaagactaccatcaacatccaagactactcgacccactaaaaattaatcggacctaccctctcaactccatttcaatccgttcgagtccaccccaatctcctttcacaaccgcgaacggagagaccaccgccacgtatggagaccacaaatgcagactatgagcccacaccaatcttgttaaacgcatgcatgttaaacgccaaatacattctcagctacgtactaagggataatagccaactaagactaatgcatttcaaacgtacatgccaagtgaggtggttcctcaaactaaaagaagaaatattcattaatatagtatattttttctactaatcattaattttttgaagtatctaaatgtattattttttattttacagtggtgattgcgggatatacgccattgagtacattgaacaccttatgatgagccgatcactgaagagaattaatgatgataacatgacggtatttagagatcggtggtgtgtagacttgttttaccaaaacttgacttggtaagataggaaaagtttagggatagtttttttgtactttgtaattatatgttgcaaacatacatcgatatatatatatatcgctacatgtcgctttttatatcgcaatgtatgtcgctttatattgctataattaagaaattcggaaacaattaataaatggttaaatagcggcataagtacccaannnnttgagtttgtaagtggcataaacccaatgattttt

SEQ ID NO: 37520 - DNA, 3701 bp, Cannabis sativa
  modified_base (3614)..(3619): a, c, t, g, unknown or other
ctctctctctctctctcagatctcttagcactaattatgtccttatccaattcaaaatactatctaccttttcttattccatattgcagcaaattcaactgatttgatttcagtcaaatgggtcctactgccctagtgtgaagggatttaagcatgcatttactacttgaagctatctcagtaaaaaaaaaaagatacgtaaatagcttgattaatttacgatatacttacagaaatatatacagttatatatatatgtatttatattaattgacattttagctgcaactacttaattaacaattaatctggctagtaagtaactgccaaggcttggcatgccatggtcacaacacattaattaaccagtttgatcaagggaattaaataataatgtgtgtaagaggtttggatactcttgcacatgcaaacatttggatcagcagctagctattagctagcctaattagttacagattaaggttttgttttttgttttaaattactattatttattcaaatcaaggtgtatatacatagctttcatttaaacaattttattaagaggaaattgaacctgcatgtgaccaaattaaatcgtatgatcatgcctcatataggggtgtttggacagacagaaaatattaattgtaatagtattacatgtataaaataaaatcgagatttgcatatatttgtatacacataaataaaatagtgattcataattaaaaggtttgagggtactcattagctaataagtaaagtttgatcttttttcataagttagtcaacaatgtttatccaaagcatgacttaaaaacaggtatcaatcaatttattattattcgatccatcatcatatattatgtatatatttatataaatatttgtaattttcaatgattgaagaaagggaaaaggaaaacgaaaagtgaaattaaagaagcacgaggaatcttcaactagattattaggtgtgctaattttgtcaaaaagatatttggctgagctggtcaaaaatttccaatatattgtagtacttttagatgccatgcgccattaattagtattagtgtaatcacaaatttaagcaaacaatttaaataactaatagtaagatcaaaatgtggttcatatgtgaacaaattttcatagcctactgttttttttttcgacatataattatatataattatgagttgcggtgtgacccaacgtcattacatttgaataattattattatgaaggaatatttgacctaggagaataattggaccaacattacataaaaaactgtaataactttgctaatttaatttaccccacttttattttcttttcttttcttgggtgggggtaggggtgggggttgaaaaaaaaaagaacataaaaaataaattcatctaaaatatgactatcttgatattgagaataatgtatatataatctcaataaataacccggatcgatctaagttcaaaatttgtgtatttgatctagaaccctcaaattttaattggtcaaagggatttaggagatgggtcaaaataatatcacatggtatgtttgaagacggtacatacgatatacatgcacctttttttttcttatataattaatatttttcttttctttttttatgcccataataataatattaataatttaataataataataataatttttatgtttgagcagaaagatttataattaaattgattgcattggtttgatgtggggattgagaatatgaacattggggagccccacatgcaaacatgtgaggtgaaaattaaaggacattagggggtggcccttttataaaattgtggacccttgtactctactcaaactcgaccacaaaaacattactacacaattttcttaaattcctctttaaaaatttgtgactatattttagaattatataaatgtgtattatagtttatttatttattttcataaaatcaaaccaatttatttgattattaaaattctatcatcaaggctagtattttatatatgactcaagtccgctaaaaatattgttttcatactatgtcaagaaagatgaaatttctacttcaagactaattggtaatgaaaatagcactctatgttcttatatataatttaatacttgtatatttaatttatgtgagataatacttagtagctactaagatgacgttgggctggagataataaaataaaatagaatagaaataaaataattttcattctattttttgtgttttgttacattttaaagtatgaaagtgttttttaattatattggtgaaatgattattctattttaaaataaaatattattttacaaaatgaaacaaaaattaataattttttaattaatttttgtatgcactttaaatttaattccactgcactctacttcatttctatttgattgttatgttttcatttgatttctagtaccaaacctgtaataatataaattatttgtatagtttttggtccattaatttagactggggtacgctcggaaagagcgagagaaggacagtgagtctttcagtcttcacgtttcacattgtttggtccataatccatatataatattaattggtttaattcagacaaacctgtcagaacatgaagtttgaattaaatctcaattttgtaacttacatgtaatttttccgttgctttggttgaatattgtttctttacacattggtcatttattggattttgttgactcttttcaattctgttgtatagataaatagaatactcattatacactaacccacaaagaaagaagcaacgttagaaaatgcagcgttgtacggccacttatagaaattgagatatgaaaattataaattaatgatgccaaatgttctaaaataacttcttccttttcttttcttgaatgaagttgcaaatagaaattaatataattagacatataaatgtatgaaaattctatggttgagacactattttttagccttgtttttattaataggaacacttcatttttagcacataaaagattataattcatatccttttatatgattgtgtaattacagtgtttcacttattttatacaatttagaaaattcgaaaacaaagtttaaatgttcacttgcttatttataagtgcgcaattgattatttcaaactttgtatgtaactatcataaattattaaaaagaaaactaattgtgaaatgtctactaaactataatgtaaaccgtaatacaaaaaataaattgtcataatttctctaaatacagaaaatatagacgtactacttagtaggagcaaaaatgacactcctactatagttgttaaaggtggtggcagaatgctacttttgcaaatagtttaaaatcagaacttttgttttattaaaaaaagattttggtctatttttcaaaaggatgcatgtgaatttagacatgcaagggccccagttctgtccatatataaatgtatctgaagttgacattgggcccaaagtatagttcttgctctagcagagtggctgtacaataagttgggcctagtccatgtactattgctgtacaatagttgaaaaataccacttttattnnnnnnttaatcaaatttacctttaattttatatttaattgaaacatacctctttttatatgtattgtacctaaaataccctgacata

SEQ ID NO: 37521 - DNA, 1696 bp, Cannabis sativa
gtacttaatccaattccctgtgggatcgacctcacctgtgtgagatttactacttgattgcgtatacttgcgtagcgcttaaaaatatagcaacaatgagtgacaatgtcaactaaatttatattttgtccactttgaccgaattgaactgcgttgtttttcaagttcagaaaatccaccttcatctgtatgacaagttcttcggaaagaaagccccatggaaagttctattatatataccctttaattacaagaaagtatgctttttgtggccgggattagtttgtgttcaagtcttttagaaaagctcagatttttatctagaatgttttggtattcttgcaattgaatctttctggtttattagactttgaatagtagataaattattttaaaacctcacttcatagtcctgattgtattaattaaacaagtgagaaaatgtgttctatttgcaaaatactccattagaaggaaggaggattatggtggggctagtagaatagcttagaatgagctttgtaaacaaaagaaggaaggaggattgggttttcaggacattgtttcatggagcatagcagctttgggaaagtatttttaggtggtggtgacaaaacaagacagtactctttggataaaatgagtcaacaatgtgcatataaaaaatcagttatggtgcaactcttctccctcagtaaacagtagctggcattggcgccaagtggctaacaattggaatactcttgtttgggatgcttggaggctgtcagttggagcactcgtgttagggaacgattcattttgcccaaacgtcaattcatcatgtggcttacactatgtatggtagagagaagagaaggagagagggatagagggattggagaatccttttgtttggtaaaagagatagaaataggaaaatgagagatggaaggagtctccctccaaatatacactatttttaatctctcatgggagaattccagaaaaagacaaaaaaaattatataaaatatattttctaccttttgaaaacataacatataattgtattaaaataataaaatggtaattttaatatttattttactgtacattcttctacatatactcttaatattaaacaacatgaaggagaacaaatatcatctccatccctcctactatccatccattctacactctccatccatcctagtctccctctttcctaccaaacattgtaagagataggttgcagacggaggagagactattcgaatttaatgtttgtcaacataacatttgtctagtttgtggttatcaaaaagaaaatcttatgcatcttttcatcgcggttgcctataaaacaagtgttgtgtagatgccataaaatagtggttgggatggagaacaacaaggcagcagactaatgggtgttagagagtcccacattgctaatgtgtagaaatataatagaatatataagaggaatgggctactcctcacattgccaattgattttaagatggaacctcattcatcttattttcaaattgataactttatgaaaatagagttatttatatctttttgcattaaattaactttgctctcaagtatttttagtgatttttatttggttttatttagttttgcataaatattaattttagtatttttagattaatttttaattaattttgtaatattttatc

SEQ ID NO: 37522 - DNA, 2576 bp, Cannabis sativa
tataattggagctaatctcttcttccatagagttaacaagccaagccatcaccatagaattttcagcatcccaaatttcagtttctgctggagccttcttttcactaattaaatatcccatttttcttcgaccttttatatacatcttcattgattgatactatctcagaaagttttctcaattgaagcaaatggtagtgatctggatagagtgagactcggtagatttgttagaaagtacggtggaattggtttggatggggttgtttttggttgtacctgactcgaagtctgacatggtgcgattagggcagaggtgttattaggtttgagtacaatttctttttctttattttcggctctgatacaaaggctacagatttagggtaaagttttttctgttattttatttctaatacacagcagtgtatataacatgtacaataatccctatagagtaaaacaaatcaaataataaagacacaataaacccctaaactaattccctaaaattatggcaattattcgttcaagccaatctgaaatgtgttgagagagacatatattcattccctcaaacacctgaaaaagagcttcaactgacttataaagtgttttatagattggtaggacttcgtttgcaatatcttgaactgccacattggggaatatattcaaattgcccatttatttttattttatatttaaaagagaggaaataaaaactattttcctctttataggagagcgcacaatgagaaacaaattaaattttctttaggttttttgggtggagcataaatgagaaacaaattgcattttcttgcacttgagacttgaggctgacaaccttgtagcacaatgctattgagtacaagtcaaaatttttttggtttagatactttgaaaaataattggaatcaatggttcttatgtgtgcttcataatgatataaatacatgtacagatcacagtaaaagaagacaagtataagaaagaggctgttttgttatccgtcaatcacaatcatccagattacacatcctttaagccggataaacagaaagtagagaaaagtgagcagaccaccgaacaatctccaaatgaaagtcattccaataaaattcttgaagttgcagagatctataaatcaagtgttcatgtaaatcccatatatgctgctgttggagctgataagggacagctttacagtgcttctgaagctattgctgttgttcagaaatatgttgataatgaaaaacttgtgaagccaacaaacaagtccattgttgttttggatgcaatattatgcgatgcactattcaaaggagccatgaagaaaggttcgacatacccaacagaaatccataagaaagatctaggaccggcattcataaatcggatgcaagctcatcacgttgtgactagggggaatgagtcggttgttcgtaaaggtggtttaaaagcaatacagatattgacagaacgaaggcaaggtaacaagaaggtgacaaaactctccgggatggaaacatttttgatggatgctgagtctttggcttctgagctgcagaaaaagtttgcgtgtagtacatcagtgacagaactaccaggtatagtgcttcataggccttcatgatcatctacactttctggtgcagagctaatagtttgcatattttcttgacttttcttattctttgcagtttacttatttttcatatcttccataaagtttagctgagataacaatgttcaccttgtttcaggtaagaaaggacatgaagtcctggttcaaggtggtgtgattgatgacctggcaaaacatttgattgagcaatatgggattccaaagagatacatcgaagttctggataagacacggaaatgagaggctaaaaggtggtgttctcatctttatggaatatgttatttttgtgaatttaaggctcacttggtaatagtttgatgtatggtgaaatcggtgaaactcaacacttaatatgcttagaagtgttatctgtcaacttgcaatttttttttttctttcaatgcaatcattgttagatgttgaggatggcatattctacttctcaaatatgagagctgagggtttgttgagtacataatcttgcctttcatgtacttgaatctttttcaacatacagtaaaatgtacattcttttctgatctgtatccttttctttcctccatttgttgcatgtacatatctctatcttgttaatgttgggatcaaactaattgtattattataaagagaatacaacttaatagacttagatagtgaacccaacctgttcaaattttgtcacttgggttcccaatctctataattttgcaatcgaatctccatcctcgatacatggtagcagcagttagtccttttgattaattttgtctatttgtggtataaatacgcatatgcattgcacattttctcagaaaagaaataagaatgctccaaattggtaggtcccttctctgctcattcccaacgaagtcgaagtatgttaattcgttcgtcctgtaattagtttggtagactgttaataaca

SEQ ID NO: 37523 - DNA, 4222 bp, Cannabis sativa
attggtttaaataagttcctcatgtcatgaggaagaatgggccggtcctacatcagaacttccctatatatatatatatataaatttacaaaattaaaattttttaaaagtttcaaaattacaaatagtctgtttcagtaaaaaaaaaactaaaaaacaagtgaaagcaactaaaaaaataaatggaacagctagaccaaaataaaaaataacatgatatctacaaagcaacaaaaaaataacaaaacatcaaccacattggaatatgcaaatcaatattcactcctcacttgtacaatgaagtttttttactaagttttgacagcttaattctctttttgtattattacattatttttcctgaatgaattgcggcaaaactcccaaaagtgatacctagcatacaaatgttgggaatattgtacaatatcgaaacccgtggtggctgtttcatatatatatttcactctttctgattattaagactgaaatattgagatataattcatttatgtagaaattaattaatagtattttttaccattcaacatcttttttagggtttttgtaaatatttcatatcgtgtactagggttttttgttcctaaatccttacctgttggaggttgacattttttctctagccaagcgaccatttcccttgacttaggtgtagcttggtcgagatctatggttttgctactgtgattgggtttttctactgcaattaagtttttacgattattcttatgtctataatatttgatgggataaaaataactcaacgaattcataaatgcatatataagaaaattctacaatagaaaaacgtcatttgtccccataggatagtgacattttattagccattgattatgttgaccggagtttatggagagccgaatcgtgggcgacgtcaacaaacatggaatctattaagaattcttgcaactgaatctaacttaccttggtgcataattggtgatttggacaatgttctttctcaagaagataagagaggaggccatccttatcctaggtagttgcttgatggattttagagttgtattaacgactgtggtttgttggatttggatctctcgggttatccatttacttgggagagaggtagaggtacaaacaattgggttgaagctcatttagaccgtgcgctgtcgacagaggtttggtcttaatttttcctaaatgcctgtcttcttaatcttgaaacctctccatctaaccattgccctttatttttggaacccgtggtggctgtttcttttgctccgactaatcgtttttgctttgaaaatgtgtggttaaaagaacctcttgtgttttaaaatcgtggaagattgctggtttttagactcgtctatggcagtagttgagaaaactagcttgtatgcttctaatctatctcaatggggtaaagaaattataggtaatttttggaagtgtatcaagcattgtaaaacggagctaaaatagttgaagaataagagagatgtaattttagttcagctttacagcgatgtgaagaaaattttttttgacatttttgaccaacgtgagatattcaagaagcaaaaggcaaaacaattgtggctcaaagaaggggaccaaaatagtaagtattttcataaggctgcaagctttcgaaagagaacaaaaacatcattaagctaagaaactcccagggtgtttgggtggacttggatcatggcttggcagaggtaatggttgattatttctctattttattttctttgtcggttgcatcttgcaatgaagttatggattgtgtagatcaatctgtcccagaattgatgaattttgagcttgctaagccagtttcagaggaagaagtgcgtaaggcgatcttccaaatgcatccagacaaaagcccaggtccggatggtatgacacttgcattctttcaaaagtgttggcccgttgtgaagaatgatgttatttctatggtttagcacttttttgataatagtataatagatgatagttttggtgttgctaatgtcgttttaatcccaaaaaagaagagccctgactcaacaaaggatttgaggccgatcgcgctttgtaatgtgctttataaggtgatcactaaggttatggccaacctgatggagctgtttatggatgttattattattgaatctcaaagtgctttcatttcgggtaggttgattttagacaccgtgttggtctcctttgaagttctccactatttgaaacagaaaaggcttggcaaagctatatttatggcgttaaagttagacatgagcaaagcatatgaccgtattgaatgatctttcttagaagctattcttcgacagttgggattcatggaaatatgggttaacattatcatgagttgtgtttcctaagctagatatatgattgtccatggtagtcatgttttgggcctttcagcaattctcgtaagtatgaaaataatggttggattcatggttgcaaagtggccaacggggcacctcgtgtttctcatatgctctttgcggacgacagttatctctattgtaaggccacagttgaagagacagttagaattcaagagcttcttcgaaaatttgagatggctttggggcaacaagtaaactttactaagtcctcgatttttttcagtaccaatacggagtcactagttcatagtcgtctttgttccctcctaaggatgaatgtcgcgtctgaggatagtttttacttggggcggcctagcactatgaattgtaataaaagagcggtgttgggttacctcaagactaaagtttgtaagtgccttcaaagttgggaaagtaagtttctttcgcgtgctggaaaggagattctggtgaaatttgtggtccaagcgtggcttagctatgcaatgagtgtgtttcttctacctttggagataagtagagatattgagaagctaatgaaaaaattatggtggtaatctaagggagatcgtaaggggattcattggatgtcttggagcaaattgagtaatcacaaaaagggtggcagcatgggatttcgcaatctacacgacttcaacattgctattctggggaaacagggatggagactcttaacaaagccagattccttagtgttaaaacttttcaaagcaatatactatccaaatggtacttttttattagccaaagattggttccaatctgagtttcatttggcgtattattcttgaatctcaggacctggtgagaagtggagctcgttggtgtgttggcaatggcatttttattccagtattaagggagtcgtggcttcctaatgatggaaaccctttaatcgattcaacccatcatgctttagtcaatgcatctgtttcgaacatgttatcaatggatggttcgtgttgggacagggagctagaagctgacttgttcactgcaagagatcaacatctaatactcaacattccctttcaaatttcatctactacggaccacttgttctggtacaaagaaaattttggtttatactcagtgaagagtgcttattcgttgttccaaaaacataaaggtagatggtttgatgatgaggtttctactttttggaacaaactttggagcctgcaattacctcctaaagtttttaatctggtttggcatgctggttcaaattgcatgcccatgttaactcaattgcgatctaagcgtgttgatgtctaggttctttgccctgtttgttgtgagcatgaggagaccatcttacactgcttggttacttgtagagtatcaaacaatgctggaatcgagttgggattggcacaattgttgcagtaggtgcttctttttttgactggtgcaatgcaacgtttcaaagttcgaaaactgacctgaaatgttccttggcaacaatctgttaggcaatttaggacgcaaggaacgatcttgtttggaatgggaatgaggtagaagctgagggcattgttgtatttgtaagaacttatcttgatcattgaaagaagactcgaaaatctgatatggatgcatcacaagctaaatttcagttgggtgataggaaagagcattgcactttaccagaagcaaacaatatcaagattaatgtggatgcgactgtgacagtcagtagtcccgtgatccgtaaggggaaatacaaggtaagctgtgtaatcccacaccgcctggggaaggtcaagtgggat

SEQ ID NO: 37524 - DNA, 3942 bp, Cannabis sativa
cagattgtattattattttaacaacaattttttctcttcagatttatctaattaaatttggtctttatgttttaatgaattcgtcttatgcacaatgtctaacaacaatttattagaataactagtaatttttttacaaacctataaaataaaaatatataaatttaatacttacttataacatttttattttctacataataataataatatttttttcacctcggtctcactttccatctgtttgagaaagtgacttaataataataataataataataataaagaaaattactaaaaaatattataattattttattagtgtaattaagtatcgaatattactattaaatactaattatgttcaatactttttataaatgacatattaataaattataaactttttaataatttttttaaaatatttaattacacataatttaaaaatataatttataaaatatatcgctaattaattattagacagaaaataattaacactagtacacagctctaataacaatgataaacaaaaataaataaataaataagaaaaataaaagaaagtggtttccaaccaacaccaatatttttctctctcttaaatttctcttcacttaaattttttctttatattaatctctttacactcttcacaaacttcagggctccatctcaaaactcccctctctctcttctttctctctctaaaaaaacactaaacccatatctttccgagccaaaaattaaaaaaaaaaaaatatataaatatatatattaagtcatcaaaaaaaaaagcttaaatcgccgccattaatggcgtctccgccggacacaagcaaaaccatgaagctcgaacgctacaacagctacttacgaagagtaaacagtacaaagcttctcaccgcatcatcgaaacttctcttcagagcaactttactaatcgctctcgttttaatcctcttcttcactctaaattacccaccgttaacttccgattcaaccaccgatcaccatagccgtctacacactcgcaataatttcttatcctccgctttttacggcaccggagtcggcggcgcagcttgggagaaacaagtccgtcattcatcgactccacgccgagctaacggaatgtctgttctcgtaaccggcgcagccggtttcgtcggctcacactgttctttagctttgaaaaaacgcggcgatggcgttctcggcttggataatttcaacgattattacgatccgtctttgaagaaagatcggcaagctttattagctcgtcatcagattttcgtagtcgacggagatctaaacgacggtccgttgttatcgaagctcttcgatgtggttccatttacgcacgtgcttcatttagctgctcaagcaggtgtacggtacgctatggtgaatcctcaatcttatattcgatcaaacatagctggtttcgttaatcttctcgagatcgctaaagccgcaaatcctcaaccagctatagtttgggcttcatcaagctcagtttacggattaaacactgaaaatccattttccgagcaccaccgtaccgatcaaccggcgagtctttacgccgccacgaaaaaagccggagaagaaatagctcatacgtataaccacatatatgggctttccttaacgggcctaagattctttactgtttatgggccttggggaaggcccgatatggcttatttctttttcactaaagctatacttcagggaaaaccaatagacatataccaaacgcaggacgataaagaagtggcgcgtgacttcacgtacatcgatgatatcgtcaaaggctgtttgggatcgcttgatacgtcggaaaagagtaccggtagcggcggaaagaagaaaggtccggcacaattaagggtttataatttgggtaatacttcaccggtgccggtagggaaattggtatcgatattagaaacgttattgaatacaaaggctaaaaagcacgtgattaaaatgcctcgaaacggtgacgttccgtacactcatgctaacgtgagccaggcgtataaagattttgggtacaaaccaacaacggatttgtctacaggtttgagaaagttcgtaaaatggtacgttagttattacgggattcagccgagggtaaaaagggaatttaacttgaatcccgaggaatccgcttgatttaatataatcaatcatcattcacatggttttttttttttttttttaatttttattttttatataaatgttattattattataatttttattattgagaaaaaaaaaaaaagttattattgtggtccctcatgtagtggatcatatttgctgcacctagctgttgttgttgtagaatattatatatatatatagatataaaaactccatatatagaagaagaaattggaaagagaggagaagtgtagaggttgtggattgggtgtgggaaggtgtaataatttttgggtggggtctactagaaagggtgtagatctcaaccattggattgatgttattattattatatatgatgaaattgaacagtcaagatcagtttttaattttatggtgaattttctttgttttttttattattggtataattttttttagcattgttagcattacgatgaagtgtcattatataattggttagtaattttttataatatttattaaagttaaataaatggaactcgatattgtgctgcacaaaaattactaaacaccgtgagcgtcttttaatattttttcaattttttttcgagcgagacaatgtgcgactctgtaacaaaactaacatgaacattaatatgagaagacattaatactttataatttgaaatattattagcataatttaatattgaagaattttctttgatttttattttctaattcttgttaatttacatatttttgtataattattttcctttttgaggttgcaagttgagaatatgtttgtgtacatttggattttgattttgattttttttttctcaagatgcttattttttcattaattgaaaaagattgttataaaatattctgacccttttagtcaaaaaagagtaaagagtgaaacttatatatattattacaactaattaagtgatgacattactaataatcatgagtgtaaaaccgacacataaaagtgttagatcaaataaatactttgtgttttttttacttttttttcttcttttaattagtcaaaaataagatgaaagctttaattctataattgacaatcattgttggaatcaatttgggcaataattactatgtccaaaaagtaagaaaaaataaaaagaaaaatatttgaaaatataaaaaaagtgattttgggtatctaaaatttaatgacaacaaccttaaagaaattgtgaaaataattaaaaaggagctggaagtttctgtaaattgtacagataagaaataacataatttatatatatatatatatatattttttctattgtctaaaaatgttgtaattgcacatgatttgggatgatgattgcttctaattaactctatttattttattttttaattaatgaattggatcaaaactttttttgggtttttttcttaactgaattttgtagtgattgattaaaataatattatagtttttggccattaaagctttcacatttgtgtcggtaaggttgtttattaagtcatcaaaataagtaagaagcaagccctaccatattggtgtcactccataactggcaaactagtcaagttgcataaaaggaaccttctttttagagctcacaattcaaggcttcttttttgaatcaaagattaggctaaagtcaaaaaaaaatgtccaaagaattacatagaatcaaataatctccattatcaaactctagcttcccctaaagagaattattttagttaaattgtgag

SEQ ID NO: 37525 - DNA, 3076 bp, Cannabis sativa
  modified_base (2070)..(2072): a, c, t, g, unknown or other
aaaaagaagataatctaaaatacacatatgtccttgcttatttgtcaataagccaattcttttttctcttgctgaatcctacattcttccgtagcttcagtgttaaaagtatatggtttctcagaagcttactttaagatcggatatgtatttttttttatatacagttaaatggccaatcatgtcttctccctcccaccctttttaaaacatatagctgttggtttcttcttcttatcctgctatttcttgaagacataatatgacttgattgtgctaatgctacatcaatttctaatgaatcctatacaatcatatttagggtattgcgtaaagctttaataaatgcattttctatctgagacttaattataggaaacatgaatgtatttttgtaatacaaactcaattgttttgtatggtttcagctttttaattatttgtgtgaatatgggtttgtcctttcaggagatagcgggattgttggccggtagagcacaagaggtagcgcagtcatcaacaccaaggactccatttgctgatgcagccaaggctgcagggtatgtgggatttactggtggaaagcttgatgatgtgattgtcattgtatcattagtacacaacaaatcctcctcttagagtaagtataatctcttgatttgtatcacttgttttatacccaaggagaaagaaagaaaaaaaaaataataattatgtctatatatcttattgttttctagttgccgtattcatatttatgaagcacacttcttgtatattctttcataacaaattaaaataaaataaattatactgaagtagttttttttaagcattgttttcatttgagattttagagggatgggggatcctctcttcatagcgcctgtcccactatatgctaatgacatgtgccaccttgtttgtttggtattaatttgctttttcgggaaaaagctctatgaggaatgctaattttgctgctcatgttttggctaagcatgctttagggttggaagaagctagttgttggttggagaattttcctctccaattatagtttgttattgtaaatgtactcttttaatttatgataatggatattttttcttaaaaaaaaaaagaaaggaatgatgaaaattgaaacaataaacaaatctttgtcatttttaccggacgtgtgaatcttgtaaagtaaattcattggttttattagttagttttttaaataaattcagagtgcatagtttttttattctaacccaaataaatatatacaattttagtttgaaaattttacataaaaataaaaataaaaaatacatttatcactaaaatacctctacatgatatattttaaatatctttttatttttttaaaaaaattaattattccatgcaaaaaaatattaattactaagttacctcttactcatacctcctacacacacttacacacagtgatgtcattctgtaaccatcgcacttaaatttcacagttcactcactcgttttttttttcaatttcactttttcattttgaaaccacaatcaaaaatctatttctcactaaaaaactttccccataatttttagttttaatccttgctctatttctccatcatccaacgatttatttacaattgttctttctataaattcctatttaaatggctatcatgccatcgtcttctttatcttctgttgcgaagaaactctttcttaaaaaatctattactaatggcatgtttactaataaataataaaaaatcttaataaagaggtttattaaatatgagataaaagaaagggagtactctccctgccattttttaaggaatgcgatgtgttcaaaataacttgattatagggaatattatgaaagagaatataattgtagggaaatatgtaaattgtgtttgactgtgtagggtaatatgtaatcatattcctgttaactaaattacactgtttggttgagtacaagaatcctatatattattttaaaaaattaaaataaaaatattttttttattatagctatttaaatatatttattaattagtaaannntaaattttattgtattttttattagttaaaatgaatatttctatatattttatcactgtgttatttatatttattcgctatgtcatttatgtacacaattcgtataaaatttatgtataatgaatatatatatatatatatgttattcctaataatataaaaataactcagttaaaaaaaaaacgatctcacaaactaaatatgtatcgtaatattttatttataataaatgataatattattggtatttaaatttatttattaattcaaaaatactattcaaattaatataatagaatgtaataattcaatcctattcttttttaaggtatcaacattaccctcctcaaaggtagttattatattaataaggaataacattccaaggctaaaccctcaaaacaaacaaggtaacgttcacattaccattcccttgctaacattaacacattccaaatagcccctaagggtaatgacttttatttatttttgatattaaatatacaatgataattttgtcctttaaaatatattttaaaaaataactaccatatattatagtttaactaaaaaagaaaatttagttaatttaagcattccgattatgtttcttgataaagtaaataaaataaatcattactattctatttctaaataattatagtaaacaacatattataaatattgattctgattattctttatttattccagatctgttatatttctccattagtttcgattctgaatactgtatagtaaacgtgcaacctccagtaatgagtgtgaaatcggcggccaaaaatgcaaagagaaacgggctattgtggaagatgatgattctgatgaagattttgttgaactaataataaaacatgaaggtcgtcctttgaagaagaaatcaaagagtaatgaaattgataagagtaagatatcaaaagttaagaaggggaagaagcatgtcgatgaactgccgaaggtttcattatagttttttttttttt

SEQ ID NO: 37526 - DNA, 2434 bp, Cannabis sativa
gagatacacttaaatagagagatggtaatgatccatatccactttcatgtatcattgttagttttttcaaaattaaaaattaaaaattaaaaacaaaacgtatcaccctaattttcgtttttatttaccaaaatgaaatttgaatttgataccaattttaatcatatctttataactattttatatccaaaaaaaaacaattacaaaattaaacctttccttcttccctccataattcacaacccaaagaaagaaaaaaaaaatctaacaacgcattatatgagttgtattgctaaaataactcccaatcccaaatccaaaaccatcaatagaagaagaaggagaaggagatgatgataatgaagatgaagatccaattctcaaaaccctaagcaaatccaaacacatactcctcactctgtgaccctcacagtacccgctctgcatcaccatcagaatcttcgcaattccattgctgttcaccaccgcctccttcgtcttcttctcccccaataagcagcacacgctccaaaccaccgccaccgcgtcctctgtcgccgacctcgacaccttcatcattctctccacgattgccaccgcacacctacagtctactccgattgctgatcttccctccgctgtcgttgaaacgattgagagaagcttcagagccttttcgtttgccggtttgggcgaatttcggttcgagagcgtcttcgttaggagatccaccagtcctgatccgacgagctctgctttggttgaacgagttactgaaacttcgatcaggcatgagtaaacggcgtcgtgtagggcgaaatctgaatcggtacggacgatttggagtagttcgttgaggaggttactgttttcggcgattgcgcgtttggattcggcgtcgagagcgatcgttttcaaaagtttgaccgattcgattttcgatctcgtacttccgtttttcaagaacgaccgaatagtggttagaaaactctggaatcgcttcgaaacagatgcgtgaacttgtttcctcactgaattatccatagaaatcgaatccaacaccctaacagccaactccataacttccatttccgcagttcccctacacaaaactccgacaatagccgaaacaaaattctcaaaattcgccaggattcttctattctcgtccccaaagctcgcgaaatcaacaatggcagacaagcaatcaacgacaaacactttcgcactttcgttttgattctccaaatgatgaaccagagtccgtacctgttgttcggagacggaacgagagtaggtaggagaagaggagggcgaaggaggaccgttggtttgagcccaaaggttaatcaaacggcggagagtgaggttggggatgaaatccttggaagggagggtttgcatggtagctggacaggtgtcgtgacctgcgtcgagccagtgctgaatacttgttcgatcgtatgtgacgccggtgcagagacttacgggagacctcatcacgtccatcgatatgggacacctgaaaaggttgggtacggttatgtgcagttcttctcctttaaccatttttatgatcttctctacggttagagagagagagagagagattatgaagatgtggaaggaggaaacgataaagtatggtatggttttgaggggtttttatggagagggaaggctgatgtgacgtcgttttgactgaagaatgattggtttagtctaagatggggcccactagacttcttttttaatgacttatgactgtaaaaaaataataaagtaatgaaaacacgtgtgtaggtacatacgcgtgtgggataggtgattggggtggaaagttgaaacgtgaaaaatggtgtaagaaagagaaggaaaggggtaatgcaaaggcctaactaactaataatatctttgaatattctcacgcctaatatgaccgacttcacttctctgtatattaccagcataataataacagtgtatttgctccctctgccactggtattaaattaagttttgagatagtgttaaaaggtaataacagtgcttattactcttacgaattaatataatgtaaatataattttggactatgtgttttgtaaaaagttattaattgaactttttgttttgttaaataataaaatgaattttttatttttcaaaatagtataagtaggacactgagttaatttttatcaaaataaaatttaataataatccaatctaaatgtgtttatgacaaaactgtttatattttctgtatctgttcgtgttaggaattgtatctgttgtgtgttgtgcaactgtttcatgttttggttcaatgctcctttcctcattcgtgttggctcaaatttgcgttaggtgttggtcattctgcagcaaccaattttttgattggttcatggaagtattggcagtaggcaat

SEQ ID NO: 37527 - DNA, 1522 bp, Cannabis sativa
ttaataaagatgatgaatttttcaaaaaaaaaaaaacaatgaagcttgacgtttggaagagtgtcactgcaaatgggctccgcttctcttataaaaaaaatatttatctgtaagaaataacaaattagatattaccaagaaaaacaaacaaattagataatttttcattcccctctgaccaacaagtgactgctaatcaatattgaaaaccaatacaaaataacctaaatctcaattttagggttaccgcgtgctttctcgtttgactctggccattttagaccaagatagagagttgaaatgcaaatcgttctttgttttttaatttcttttatcctgagcgacttcaattcacgttcattcttgaaagagaaatagttttttattctttctaaaataagcaagagaagcgaatagaaacaaatttgttaacaaaatactttattttaatttatatgtaaaaaaatattatcataagttaacgacaagttaacaacgttattttaaaaagttaaaatgaatcgttaaatcaagaattgtcgttagatagctacttttaatatataaagataaaatttgtatacattgttatttttaatatgtaatctatgtaacaaaataaaatgggtagattctagggtttttttttttttttttaacatattatatatgtaataaaaataaaaataaataaaaagtgattaagttggcgggcaagttcgggttcaacctgaaataagataaccataaaaaaccaattcacgaatccgcttgatggtgtaccgggatgaacctaacccagccaaacagaatgggttttttaaaattttcgagtttagcgggtcgggtccgagcgagttggtcgtgtccggatcaaacccagtcaaaatgttcagtcttaacatatagtaagaatatagaagaaaaagtagatttcctaggtaaatataaggtacaataataaagtttgtagagttattcttgtcaaaattattaagcaaaacaatatattgtagaacttgtacatcaaactaaatattgtatagacagttgacgcacaggtcccaccatacttatgtgcaggctccacttgttgaagcgttgtaaatgtaaatattctaaggtctattgagcctttattttatttataaaaataccaatttttttgggctttaatgacatacaaatattattttattttttaaacaaggctaaatataaataaaataattcattataaaaatatatcacattcatttttaaaaaaatattattaaaaatttaattagctttaattttcaaaataagaaatatgtacatttcttaacattactaatatcaaatagtacttacatctactaataaacaaatgatgtacttaatcaattagaactcttgtaataacaaataaatcaactatttcaaagtttaatttcaaatattcaagcttaatatttaaaattaggctaattaggatttttgccccttgaaccttgacatgtactaaatcatgccccctaaa

SEQ ID NO: 37528 - DNA, 2600 bp, Cannabis sativa
ttttttttttttttttgttggtaaggaaaacaaaagcaagttgcatgctcgtctttgttgaattccattaccaaacttctccattattttcaggattagaatatggacttagcggttaagcagctgaagaaatattataaaatcacttcaaaataagaattattattaattaattaccacacactctctctcttacctaatactattacttagctaccacaacaattattttaaaaattagacaacaaataatacatattttccactcttagctacaaagtctaataaggtcttcctttggttacatgatgtgaaattacagaaattcataattattatatttttgctgacttgaaataaaaattcataataatgacactattcattttttttttttttaattttaaagaatatatatattttcggcaaaattgttgaaatgatgcaaatactgacaaaatttgactagataaatttattttagtaaggtgaactaattacgtaaggaatgggtatgtcattgtaggtagatatttatttataatggaacccaaccttgatattttaatatacttcgaatatgttaatgtttgatttttctcttctttcatttttttttattttgggttttaatgaagagtctattgggaggaattattcaaaaacgaatgggacttgacaaaaaatgatgtaaagttataaacgcgtaaggagagaggggttgttgtcaccattctgaaccgtcgatatgttgacttttcttaatattgactcttaatctatggctccagtaggttgggttagtgtccaaattttaagcacgtgtgccgtcttaacatctggaaggattttaaggctttggaaatttctgacagaaaatatatcactgtaatgtcatgtatcttaacttgtatcaactataggcttttaatgctttagcactgaaaaagaggcccatgcagtcatagattcatattaaattgataataaaaggaggagaaaattcaaacagaaaattaggaggattgagagttgtaagaaaaatttggggaaatagtgattctgaagacttgcttttttgattgcaaaatagtctaaaattaactgttggggaaatagtaattgaaatggacagaactaaacgtttatctcatgctttggctgattctcttccataactatagtgtcaataaatattaaaaaaaccaaacctttctctcataaataatgaacagcattctctcacaagacccacaaaaaagcattaaagggctattgttaattgatttgacacatacatataaagcaataattttgattcattatgattttagcataggccaagcgttaacaaccaaaatgtccacaaagttatctacaatcgtccaattattttattttgctttcatcaataagttttggctcgtggggcattaattttggatgacagataaggatgttgtttctgattggggtggttgaagaacaaatttatgatttcatgatatttgaattttgaaattagttttatgttaacacaagtgcctgtggaagaagctactcctacttgccttgcctcttccaaacccaataatccatatgacccctgcaatgtccgaatgtccctaacatagaaatgaaaatgatacaattgtccattatgcaaaacaatttagaatatttagcaataaaatcatctagagcatgacaagaatgaagtcacacaaagtgatttaaaatgtattcccaagcccattaggcaagtgaagttattaaaaagaatctctctcaatccaaccaataatgaagcccaaaatgaagaaaataaggcccaatacaaaatgagccactaatttaaaaatgggaactagagtctaagaaactgtcaaattgtcaaagaaatgaaacaaatattacaaaaatgatgagatgaaacatatgtataaacgatcattttttcttttcctttttaaccctttgtcaactcagttgagaagggttctggataaatgctcccttgctgtagcccatgcctgagttattgtctgcagcagaaattagaaaaggaaatgttgggattaaaccaaagatcaaagatagaaagtttgagcttctcatagcatatgtatgctaacataatttctttccattttatgagatattataagtgtcatagtattacctgctcagctaagggtgcatcagcatccatgctatggcttgcaacttttccagcaatgacattgggatcggtttcaaggattatcctggaaatcgaaccaaatagattaatatcaagtggaattaaaggaaacatgtgatggtttatgtaatgaagtcattatgatataaagaaaatcggttgaaaactcaaaaacgagacttttaaaaatgtgaaaaagatcataccctccatcaacaatctcatcaagacataacagtataagatccaaattctcaagtgcttcccttttatcaacagtattcctatacaaagacaaagtagaacaaaaagcacaggatgagaaaataagcaacaagaaaaagcattcaaatgacaggccaaacaataaataaccaaagtagcacctcaagatgag

SEQ ID NO: 37529 - DNA, 5496 bp, Cannabis sativa
gtattacccattgagaaatgttctatataaatgggtatatgtatagtcataaaaaaatttttattgtacaagaatctatcattcaaaatatacaaatctaacttttgtaagtttgatttacaaaatgattaggaatgattctcctagttttaaccttcataacatcatataaattaatattacttttatatattcttcaccatcttctttgtaaaattattgcctcaaactttacaatcaactttctgcaatcaagaatattaattagtataagtcaacacacaactcaaaagtttaaatataaaatcacctcatatatttgaaaatatttccatcaacaacttccttaaaaattccaaaaaaaaaaaaagagaaaaattaaattttcttttactaactctttagcttaatgcccaattatgaaaatgaaattttgtctaaaaatacaacaaataaaatttaactttttttttttgacagaaagcaaagttcattaacaacaagagcaaaagatgggaatcacaggggaaattccctccccaaggaacaatcctgcctttggactagaaattctagtgctcctagcaaggccatccgccacagagtttaaccgacgaggaataaaagaaaacttacacacatcaaacaacttaaccaagtctaaaacagaaaaagagacatccataattagccaatccggaaggattctatccttagaaaaattgttaataactatcgaagagtccgagaacaggtgaatagaagtccaatcggaactagctgcccacgccaaagccaaatgaaccgctctcgcttcagcttccaaaggagtagacgcttttacctgggcagtcttataagcccagttcccattaacgaagtttgtcataacagccgccaatcccgcaacaccatcacgccaagaagcatcaactaccagcactatctccactccctttctacaaatttcagcaggcagagggctagtaacagcctctgaattaccaacaggaagagaatggcaagcaaattcatttaaagaggaagagatcgtaaaaagaatttcatcaaaattcacagctcctccttttaatctcactaagttcctttgctgccaaatagccaacgcaacacagccaaaataaagaaggatctgaggctttttgacattcgagaacgtagtgcagatggcttcttatgcctgaatcaacgagtcaccagggatggaatcaagacggcaggggaataaaccagaaaaccaaattgctttaaccacagaacactctttgaacaaatgcagacagctctcttcagcacacccacacaagaaacaagtcttctccgataggaatggaagcctagatttcgttgggagagcctcattgagaattctccaaagcatgattgacactctagggtgaatagatgaatgccaaatgtgcttccaaatctcaagagtaggtctaaaactagaaacctgatccacataataagcatccttaacggagaaaaggccattcttcctgtttttccacaccagctgatcaccatgatgaatgggaagtctaggaatatcaaggatcttctttgcaaactcctcatcaaaaatttgggatatcacttcctgatcccaccttccttccaaggatagatcagccaatgatcttatagtaaaacctttcccccttaactttttcatcaattcattaaaatcactcaaccttaaccaaggaatccaaggttgtttccaaaaattaatagaggccccacttgcagccatagaaactgatcctttaagaataagctctcttgcatttaaaattcctttccaaacataggattcgtttgccttgtgatcaacattccaaaatgaacaatattggcagtatttgcttaaaaggcattgaacccaaggtttagggacattggaagcaacacaccaagcaagtttcgataagagagccttgttcatgtcttcaaattttcgaattcccaggccaccatgagattttggttgacaaatgatatcccaggatttgaaggccataaatctgtccttgttcacattcccagtccaccagaactttctcaccaacgcgtccaaacttctacagatcgaaagggaatctcattggttgacatcctgtaaaccggaatggaagcagccactgacttgatgagagtgagtctgcccgcataggataacagttggaatatattatcttataaagaaaagaatttatattaatacatcacaatttctattggtactactcactttctaaaagaaccatgttaagtactataggcattctaaaattttacttacatagaataaacaaagttataatagtaaacaattcaccatatataatcctttaatatttagaagatctcatcaataagaaattagaaaatggaactagactagccaaagagtactcaaataccaagagaaatcacactaattaaattcaacttagggtatggttagtatttgactcattattatcacatcaattcattacaagaaatgtcacttttaccagcacagttcgctactacactggtaaaagtaacttttaattaccatcacatttcgcaaactacgctggcaaaaaggtcaaagctgcgtacatttgcaatggctaaaatctaacttttaccagcgtatttacgcgttgggaaaagtcatttttgccatcgcttttcatttgatgctgcaaaaattctaataccaatattgatttgccaacccccttttgccaaaacatcacaagtaaattctattttctcagcgcaataccaacttgtgacatttcttgtagtgattaaaaaaaaaagagatgaatatatatattttcatgtctatatgaacaaaatattttataatgaaaaaataataatagagaaactagaattcatttggcttgttattacaagaatataaaataatccaagcaaactaaaaaactctcaaaaaaataagaaaattacacacaaaattactagtaacactcataaaagcagcaaagacaaatgcatgtcaatagagtaattgatcaatagcaaaaaagcacctcaaaaagagagaccaataggtaaaaccattaaatcaaacactaaaatgatcataagaatccccaaacataattttagaaccaaaaattgtacatatatcaatgttattattttttttttatgaaaaaatcattgtattgttcaaacaaatctttacaccttacatcacatttccatcatacatcttttagctatcaatgttattgttagtactagtaaaaacaaaataacattaatttgccaaatttaatggcaatgagcaggatcaaagattatatgccaacaaacattttaatttcactattacaaaccaatattataacagaactagattcaaaaaatataaatagaaaacttactttttctcctagcattacaagcttcaactcaattgcttgagcaacaatattggcactagcaacaacatctgtccttcggatctttttgaagaacaaggtacatgctaccacaacaataaatcaatttttatggcggcccatattattgcaacagtagaaatcccatttatctcttcattcaatatctgtaagaaaaaaaaattacaaagaaaatttaaccatgagcaatataaactctctctaatatacgaatctcttttcttagaataatccacaatcttaactttcagtttgcatttgaataacactaattggagcctcaataaatgcaaaattaaaaacttactaactatacattatttcaaataaatgtacaactaaaattattatggaaaaaaaaaactaacatgtggatttgaaggagtgggtcttgataggttgtgtgccttggtggagctagaggagtagtgactatgggctgaacaagaacaaaaacagagaaaataattaggatcccaaataatgtaataaacaatcacataattgattattcaaacactaaaatgtataaattattttttgacgtatcttaaagatattacatagataacataaaataaacaacacattctaataaaaacaaattataatctcattttctactaaatatatcatgcatttttttaagaaattgcacaaattttatattcttaaagtattatgatgaaaaaaataacacatttactatctatttgagggtctcgaccaacaaataaataagatacaacataagataataattccaatatatacataagcaagaatagaaccattcttagaaagcttcatacaccactcaagtatatgaacacaaaaaacttcataaaatgatgatgacaatgataatagtatgacacattcacaaaatttcactttagaccaaaataagaaacatataaagaagtggattaaaaattaaattaatatggatgtgaacttcacatatatgatactaacatagttgattattatgccaggttgttctacgaggggataccttgatcatcaactcgaggttcacggggcttcctattctcgcaatttttaggtggaggggatcgcaaaatatcctttgtgaacacgatacatccccactagacgtgtgaatattaagcatcaaagaatgtaaatactgggggtgcagctatcatataaaatgattcatcttcatcatcctcatagtattattcctctctcatgcttcttccaacatcttgcagtgcataaaatctcaagtctcaccattggttattgttatcagggacagcaggtccctttcctggtgcagagtccctgggtggttgattcaaattaagagcttctgggttttgctcatttgaccgctctcttgtatgatacatgcaaccacgttcaccacgacgtctagtattaggaataagtacctcattattagcattttgtacattggtaggttcacgcggcaggggaacattctgtgtacattacattcgtgcgacctcggcttgcaatgctcacatctgttcttgcatagttgtatattgtgcagttgttaattgcatcataccctcagtagtatgaataggtgtaattagtggaaaataacctgtagtcgtcataggagtcgtcgtgtctcttacaactctgacaaattttaggaacaaattgtaaactaaattgtgtattagtatgagtagtatgagtagatctcttggtatattatttcttgattttgtagcgtgtttgttggtactgtaaactgaattgtaagtcattgattgtttccattttgcacaacaaacttgtaccagagcttggtttgtaatcatggctacagggaaatacgatgtcaaaaagtttattggtacaaatgactttggattttggtggatgaagatgaaggttctgttggttcatcaagggttgtatgaggctctgctgggagagaagtctcttcctaatatgatgtctgaaaaagacaagaaagagacttttgcaaaggctcatagtgcgatca

SEQ ID NO: 37530 - DNA, 3518 bp, Cannabis sativa
gaaggtgccttcaggcgccgccgccgccgccgaagattcccggcaagtatcggtaaacgcgccgattccggccgatgataggtcgtacgatgccgtttcgaatcctgcgactgttaacgatgataaccccgcggtagctgctgcgaagaagctgaaggtgttcgttgtgttctactcgatgtacggacacgtggaggggttggctaggaggatgaagaagggagttgattcggttgatggagtggagggggttttgtttagggtggctgagacattgccgattgaggttttggatcagatgaaagcgccgccgaaggatcctgagattcctgaaatcacggcggaagagctggcggaggctgatggtgtcttgtttgggtttccgacgaggtatgggtctatggcggcgcagatgaaagccttttttgattcgacggggcagttgtggaaggagcagaagcttgctgggaagccaggtgggttcttcgtcagtaccggtactcaaggtggtggccaagaaacgacggcgtaagcttacttttcctcttgcaatgttcttctttttactgttgaattttcgtttttattgaattgggtttgtttgaatgggaattgggtttttaattattcaagttgaaatggatgattttgctagttactgattgtttccataataccttgaccgtgaattaagaagattgtgtttaccagagtagatgtcgggtatctcattggtagtgattaagcgcaatagaattagtagcaggaatcttaggattagctttgtgatcgaaaacgataggtagttttaatagaggagtgttctgtgtttgtggaatggttctttgcttgatttccctgctcgaaattattttggataatgaaaatgattgctgaaaaaatgggaatgttcggataatgaatgtactaggaattgaagctatgatgatgtggtaaatcaatgggatttgaggagaagaagacttttcaaacttacaaaactatggtatctttttgttttggctttcaatatttgcatgagtgaatgcttttgatttcttgatcgagtgttgtaaatgtacttacatactgccaaatctatgatgatgcatttttcatttttacatgtgaagtatttggtttctgattcattttgattctctcatattcatgcttgcctattgcctatggaactgtttaaactttcattacgtatgtcaagttaccactttgttttgaaacatgaaactcgaagtaatttgctaacttgtttgtggatataaggttttccttgtcctagaatagtcattctgcgatggtaaaacatgccgtgatctataagattgatggtctagtctagtgtaggtaggagattcgtgccggaaatgtaaacattccaatcatattttcatttcttgtttcttgcatctagaaatgatgaaactgaattgagatttacaaggattaatattatgggggaaattcttgctgaggggtcacacttgtttcatgggatggtccagtgcttttcagcttcaatgctgggtagatgaattaatgccattaccatttgtatctgagtcagacatataataggtatttatgcattagagtgtatatgtgttgagaggaaaagaaatccatgagttaattatcttcacactaaacagtgttattagttttaattatagtcccaaacatgcaaagaaagtagttggtgaatatgattttcatcatcaaggacttaaagggagcattctttcttctcaacttgaaagattacaattagttatagttattgtattgtctgaaaactcagaggctaatatttgttcattcttttccatcattgcttttcactagactatatcttgagacttgtacattttgtcaattattgcagttggacggctattacacaactggtacaccatggaatgctgtttgttcccattggatatacttttggagctggtatgttcaagatggactccataagagggggatctccctatggtgctggtgtatttgccggtgacgggacaagagaacccaccgaaactgaattggctcttgcagagcatcaaggaaagtacatggcagccgtggtgaaaaagctgtcctttgcttaaaaatcttgttcgtgttacgttacgtttgggccgatccacatttttcgccttgtgattgattgttttttccattgttttttttcttttttgatcagaaagatccctttatttcctcctattccagttctgctctgtttagataaagctgtacatggtttttgatttgttctcacatcacacatgatttttgtcaataatttgtttgcatgtccaaaatttgtttttttcttgtataagtttttttcttttttatgtaattcagtgtgtacttgacgtaataataatagagtatttttttgtgcattttttcaatctcatatgggtagacactacttaattgaatatagacaaaatcaggtttggcaaacgactgtttctaagggaaaactagtcgtttttcatatttttgtttcaattttggtctttggttcatggagaattgttcaacctcctaactgttatgttcaaactattagtgttagggatacctttactggcatggttcttgcttgagttaagggttcgaattctaccatagcctctcatgggagagattatgattggtcttttagagggtcagcttgttgtggcggtatcaatcttaatgggataggaacctttaagatgtacaccgatgactcaattaagaaaggatatataaggcctctatagctggcaggtggtcccttaagattgtatgagctaccgaaagagtagagaagagatatgcaccacgtgatcctcttttattcttacaaaaagtttttaactttaaaaatttatacaacactaataataacaatatgaacaatttttttaaaaaatctttgttttatttttctttcagttactataaatatttaaaaaaaagaaaaacaattccttatatataattttatttacttacaattttattaacagacttgataaatactgtaatttgaaatatatatttttttttaaaacattcatcatctttattaaaggcaatccatagcgattacatgacttaattcaggagctacatcattacccctgaaatcacgatcgacaactaaataggaagctctagctaagcaatgagcaacactgtttgcagaccgtctaataaaattaacaacattaggcaaatcatttaacatcatcttacaatcatcagacatgtagatagagttatgtacgtgaaaatactattttgatttttaatgtttgatattagttgcattacagttgcataaatattttgctaacagttatttcatctgattgaaactttcgtctgatgcaaccttcggccaaccctccaacaaccaccctgcaactatcatctaattgaaatatgcaaccatcgcgtaaccgcagcaactaccctgcaaccagggccgg

SEQ ID NO: 37531 - DNA, 4788 bp, Cannabis sativa
  modified_base (4746)..(4749): a, c, t, g, unknown or other
ttattaagctgaaaaagagagtcacataacctatattatattatttgagaaaaaggagagaaaagtaaagatatatatagagaaattatattaaatatgtgatgacagaaaagcataatgtatataatgatcaaatactctatccaatacaatacaaaaatttatagtgcatacgcgcaatttacattatcgtattatttatttattttttgaaatcgagatattatttaatattgataatagatatatatgtttaaaaaaatggacaaatatatattgtattcccatttgtactataatagcaaaataagtttaatgattacatgtggatgaattatgagcaacggatatattcgatgagtccacaaattaataatcaattggtgaaaagaatgtgaaagaatataattggtttaaagtagtcataaactaaaatggacatgttaaaatgcaaaggcaaaaaggtcaaatgtacagatgatgatagagatacatatattatatataatatagcaatcaaatctggtccccccgcaacaccaaaaagatcaactcattggtctaatctttcaaccattattattattattggtttattgaccagattgaatcagatagaacagtcaccccaccttgtctgagactatctaacatctttttaatatatactcttttgaacaatatacttatacaataattattcagtgaaaataaagaagataaagtagaaaagtaagaggaaaaagatttgttggcaacataaacaaagaaaataaatgtagacagatggattcccgcatccaccaccgcacaacccccatatttcatcatcatataattctttatccctttacataattccaatcaattgcactagcttaataatgtgaatctttctagagctgtaaataggacatgtcgtgtcgtgtgtcatgcataaatgcttattttcttgttgttgtatagtgtcgtattaatttatagtattatattatgtcgtgtataaatttatattttttcatattttgagctggtaaaatttccaaccgtgtcaaaaaaacattgatctttgctctagctagttgattagtttattcttttctaattaaatagtttcttttttaaaggacaaaagagaaaaaacaaaccaaaacaaaaataagtaacaagaaactaatatgatgaacttcttgcatgccatgaaaacaaaacacaacaataaatgtgtgcgtgtatatatatatagatcatgatttcataataaccggccatatcagttatataaatatatgtatatgaattattatatagtgctgtgtgttcttgcagtacttctgtcttcctggccttgcacaacaagtgattacccaatgagtctcaattttatttatttatttattttttttggtatagaaatctttttacaataatattcatattatacaagggccaaggcctttactttccggccgaaattaatgttaaagatatacatattgattttccttaactgcttttgctttacatacaaatctcaaaacggtcgcatttataattagatttttttagtggaacttcctatcgatattaagatgatgtactgatacataaatgtatctgaagaaaaaaaaaaaagaagagtcaaataattgttacataaagttgaaaattaggctgttttgtttagacacttgaataatggggggtaattattgaaaatgagctaaataaaaggacattccaaaaaaaagttatcatttagcaacagatttctagtgtaaataatatagatttattgttattttagaaaaaataaccaatttacttattggttactgaattttttagaaactaactaaataaaagctttaagaattaaataattatttaataaatgagatgaaagattttacgtggtttggacattaataatttttagtccacgagtgagtatattggccttataggcgtttaaatatattataagtggtgtttacaatgaaaccctaactctgattccctaaatttttcttgaagaagatgaaagcttagagagtttttagtagagcttcggctatgtaattttttgacccccctttataaagaaataaatgggcttatataggctaaagtgcaggtacgagcatacccatgacccgccttgtgttttttgtaagaaccccacctactgttggggtaaaaaaacctaaaaatgctgactattgggtccctacaaaggctccttctcgtgggacgaagggtttgtacagctggtaccgtgctggtgtagggcatgtgtcgggcgaacagaagggtgtattccgaggaggtacgcacactaccatgttctgacacggggaacaaggcttgatcttgtgtcaaaaaactataaccatcacaaaagtcatctgacttttacttcatgacaagcttttagttttccttgtgcaattgacattgaccttagacccttcatatgtctcccaggtgtctcccctctaagtttagttgatttggtcttctctaggtcctggagggatgacagggctttcgggtcccagacgataatctgccttgtggtaaatttttgggccttacccggatctagacctctcccgagtttgtttactctttccgtcactttctgcaattaatgggacttaattggtaattacatagattgtcaccttctaccttttgtcacgtgtccttcatctgaaaatacagataatatttatccccaaaattctgagactcttgagtggtggaagcttgcagcctccttctagattattagggtacacttgggacacgtggacgaatctcaagaatgcagaggcatctcattcatccgacacttataagttgagatatcaaaaaaaattatggtaaacaactggtagtccacgcgtgtcacacatcctttggatctgtgaatagtatgcgcctgtaggaagcacgtttattgcaagaaacctcaaatggtggtagagttatgatgtggtgactctttaatgtgtagggagcccgactcaaatgatgatgattaaatgccttgattctgccaaggagcattaaatacagtcttctcaactcaccaatcgttggatcactttgtgctttttagcttatttcatctaggcctttgattttaaatcacatggacttatttatccattataaataggcacgaaacccccactgtttccctttttttttttttatcatttccaagctttttgaatccattcgctttcaaattcaaaccatagctttccttctctgaacttaaggccaaagaaacttcgagcccaagcctcttttttgccagtggatgtagagagttgataccatcataaatcaccttcttcaaaatcgtgcaagaaattttccagacatattacctttagaactcagtgcgaaccacctttaatcagatgaagattttgacatattcgaccgagttattaatcgggcacttgactttcagaccttccacaacaaccatatcctttcttcgaaccataatacaagtaagttttctgaacttgttgaaatttttgatttcaagctagggtagaaatttttgttcaagctataatctgaattgattttgcatgtgactattaagaagaatttctaggagattattaagtatggaaatgtttaggtatgagtttgtcttgccatgagtatgcttgtgtgtttttgttctgggtaaattggtttgagagcttgaatcttgcaggggtaattttcatgaatttaggttgttctctatttaccaattcggagttattagggctttgaatggtgttattttctggcttcttgttgctctatgattttccatgggttcccaacctaatatttagaggcaacatttcacgaggaagatgcttccgagtgatgggtccagaggggacctctctgagcaatttcgggggaggctttccccaatatccttactgtccttaagatatagggtatttattttcttggatttctttttcttttcatttccagtggctggtctcaagaatgagttcaatcttgaggccatggaccttgaggcagtagaggttgaggctcctatggagggaccacaagaagaccctacccttgaagctgctcctaatgggaggcaaaagaaagcgaaggtgaaagcccaagcagagactccacccctaactcccattgtgtacaatacttccatctaggagatggatcagaataccaataaattcagagtgtatggcatgatggagaaactgtctgccaaggggggagtccataatattcccgaactggtgtggaacaagctatcaatcacgggagaatcttcttcctggagcactgacgtgtttggtacttggagcttggcccacagatcaagcggggcacacttacccctaatgacttatttcgtggaactctgtgcgaagattggaatcactcatttctagttgattccattgtcttagaagtttctatccgggtggtacgcactatgtaagatgataaacgttgaagttccaagtcagaagaaattttgttctattatgtcgtgaagcatcaacccatgcgcaccaacaagcgcaagattgggttttacaaacttgagaaataaccagacatttgttgccctgtgagcacataatcacactctcctaacctccatgaggttgtctggcttagaaagttcttcaccagtcttggtgtagtacctggaatggaaaagcctcnnnncctgctttgtgataacaatggagccatagccaacagtaa

SEQ ID NO: 37532 - DNA, 4906 bp, Cannabis sativa
  modified_base (358)..(360): a, c, t, g, unknown or other
ttttttttttttttgaaaaaggataaagagcagaacccacagtgcattcgcatgctgtatatcagcctccaaaaccttcaaggaatcttcagaagaagacctagctaactggtaatacatcatatccatgtcgttatctcactctgggtaacaaaaaccaccaggaaaaagaagtagaaggcgaagaagaagagcccaactctttcccacaggctcctcagtagagaaaaagaaaaacacacacaaagttttgccttttcttttctatcttcttttttccaagtgaacctaatcaccaccaaaggcaagtaatgtagaaaagcgtagagaaacacaagaaagagagagagagagagannnagagagagagagagagaaggaaagtgaaggaaagggtatcctcttttgtgagttgagacggctctgaaagactgtttttttggttttgcttgctttatacggtcagagaaccgatacgtatattaaaaatgctttcttttcttacaaaataacaataataataaaaataaaaataatagagcgtgtttgtatttgttgggataccctcaaatttatatatctactcataaaaaatatatatatattttaaaatactcaattttctcactttcaaaaaaaaaaaaaaaatactccattttctataccttgttcttatcataattcataaatttgcttttgcagtgttttttttttttggatattaccaaactatcctttttttttgttttttgtggctctttatttagttttgtctttttttttttgaaaagaaaaataattaagaatttattttagttgtaatattaggttatacagagaattttcaaaactctatataatgtataaatgtaactccctacatgtacaaacaactccatcataaatggattaaaaggttaatttagggttttggtcaactgattgacatttccggtgaaggttctgaagaaaattattataaaattgaataataatgtaagagtattatttgggtgacagttgggttttgatactaagaaatccattaaaagattaggtcaaattaagtttaattatgctcttaaatgttggtttggtcataattaactttggacaatatggctttgccttttcaatagggtattcattcattcatttcatgaatcatgcatacataatttgttttctaacaacaacaatattatatatctcatttcaataaataagacaagtgttagatagaatattcagtatataataataataataaaacagctctattttatttttctaaattttctaagtattaaaaaattaacaaaagttgtttatttatttcaaactaataaggctgcctaaaatctctttgttcaaccaaaccatgcagtgtctaaaatatgctaatacagctagaatagttgctttgtattattattattattattaattggttaagtttcaccaaaaattacttaaagtctccaaaatttagagagccccaataccaattaaatatgttttttcaaaaaaataaaaataaaaataaaaaaaaatactaattatatatgtaatgtaggtaaggtttgtataggtgggtggggacctagtgcaactgtgctatgccccatggaaatggaacattgtgtagaaaaactttgtttacttaacaactacttaaacagtacacaatgataataatgatgatgtgaaaaaattattatggctttctccatagtcatgcatgattatgcgattggtaaaagaaaaaatttataggtaaggttcttataggtgcgatggggaaatgacaaatactacacaaatgaaattttattttcatctcaaaaaattattataagcacattccaatattaaaaataatacaaaaattaattttactaaattactaggctaaaattaaaaaggaaactcaagtcccttaaaggagaattgaacaagaggtcattgggtcatactggaccttgcccctcgatcgctccaccctgcacaagaaggcccttgacctcgtaccaagcccccgtgtgagaccaccaccaagctcacacttgatccctcctgcgagaccatctccaagcttgctcaccctcccatactctctctctctctctcgctcgctcgctcatacttaacactacctgagaaaaccacataaccccagttcaccacaagacattctctaatcgatcttattatcccaatttttgttcacttgacgtggtaattgcacgtggcttaattcagctgacacttagcataacgtgagacttccgaacaaaagcatgtcgggtagttcctagataaggctgatatcaataaaatgtatattaccttccaagcatcacctagccgaattaccaatatgacggctaggagagagaagatcaacataccttgcgagattgcatcgtaggtaatcttataaaaaaggtaagtcttaaagagagtctggcccagctatcaacacaccagcgaaggtaaaagatcccaaaaaggtcggacaggactaaacggactttgatttcttcctcaacaaactctgcgaatatgtctaatagcatcctacaaatacgaattcgactctttagtccgaaagtataggagtttcaaacagattgttaactctccaaaaaagagaaatttgtatatttcaaacatttaaaatgcatttccctacttcctatatatagtgaacatattcacaagaaaaaaggacatgaaatcattatctcgactctaagagcacttctgtgaacaatattctatgtaagcatcttgagagttgcagttagaattcactttgtctttcttagtgatctccataacattatctcaatatcaatacaactaaaattggagtaggttcattaccattatcaaaggggtcgaacctctataactcctggtgttctttttatttacttactatttttaactctttattgatgattgattagtgttatttagacttcgagtcagttggaaaatttcttagtcaatatgttggtgctttcattgagagcttcgaaacctcacaaaaatctcatctttttcacccagtgatcaatcactatggtcctgacaagaagggttgtgtccattgaaccctaggatccaatggttgtggaccccagcgtccaagttccacccactattgagaactcgaccaattctattcagccacctcgggcaaacccgactgcaatgtcccgaccagaaggtctgatcaataccagacaagtttcagtcaatggtggacaatcggctgttcaaaataccacaggagctccccaagcaagaaccatcccctaagtgtacgctggagaattcgggcctggagttgaccaaactggcctcaacaagccccatgtggacttgggagatgattattaactagccaggctaagagaagacgtgggccaagttcaggatcatacggacctcctccatcatgagcaacaagaaatacgggctattgtgggcggtgcttttgctcagtagagacacaaatttcaagagtggatggatcaaaaagcaacgatcctacaagcccaccacatggagttaaaccgccgaattagggagataaatgaactgattagacggatcaatcaaagggttggatccagggtggaagaaccattagttgtaaaggactcctttcagggaaaaccatctatatctcggaagaaatttaatgccctagggaccgtgggcaaacctcacgcccagttggcccaactacttcccaaacaagggtccctcctaaatgtccgaatgagaaaatcatgcccaataggacatatggcaggactgactagttcttggaccttcctagagatgaaagaaggaagaaagatatcctacccaagcaagatcgaagtaggtctcgcagtggggaatcttatcccaatctcaatgaggatggtgccactagctaccctattgatgcacgcaccaaccggagaaattgtaataacaacatcgggcgtaataacgacattcctccccgaaatgctcaaacaaaatctaacctgaggcctagagattctgtgtttgatagaatgggtcccagggtagaaggagaccttcaagatggcttaaatcgaaaaataactaatcaaaacggaaacatcccgccctaaaatgaccaacctcctatcaacccacaacaaggtctggccagacaagggacgaccagagttgttcctgcagtgcaagcacaaatgggtcaattcaagaacctaatacaaggcttctccgacccaaagctttttgatctggaacttgacaggactcgaggatcccctttctctacatgcatcaatacgttgcccttgccaaccaagttcaaaatgccaacttgaaaaatgtacactgagaaagaagatcccttggcccatatcaaatactttgagatccaaacggatctacaaggggtgatagacgatgtctgttgcaagatttttccaaaaactttatcttaaattgcatggtagtggtacttcaagttgtctacataaagatttgattcttaggaagccttcactgctcgaatttacacacaatttttgtcctccaaacaaataccatcccacctagaagacttggttgaaatataacaaaggccaggggagcagagcctttgaaagactacatccaagggtttatgacaaccacaaaggtcaaaggcctaactaaagaagggcggtatacagttatcttaggaggtattatgcctctgagtgaccaatttggagagacattatgaaaacatcaaccaacaacatgaaagaatttttagactgggcagactgttttataaaacttgaagaagttgttcggcaggtacaaattggcgggcagaagacaactgcccccagcaatg

SEQ ID NO: 37533 - DNA, 4438 bp, Cannabis sativa
attttgaggcttcatcgtcaaccaatgaggcatcaaggccaattagaagaaaattcaagaattttttggacattccatcccctcaaaaacatgaacacatccagagattcacgaggaaggtagctcactaagcttcttcatatctagattgacggacaagtacatcttgttcttcaatatcttgctaaggagtcaaaatatttaatggacgatgagtgaaagaagtccttctaaaacctaaaagaagagatggctgatcacctatcatgttcatgcaagttgaggaagatcccttgtatttgtacttagttgtcttggagcatgcaataacgatgcactggtctaagaggaagggaaagcatagaatttggtctattatgctagtaagagaatggtaggggtggaaaccaggtaccccccattgaaacgtttgccttatgcttgttagtatcctcccaaaagctttgcccatattttaaagcttacacaatcaaagtgctaacaaattatcctccatgtcaagtgctccaaaagtcagagtcatccaatcgtctattgaaacaggccatggagctaagccaattcaacatccactattcaccttgtatctccaacaaaggagaagctctagctaatttcattatatagaacaatgaggaagagccaaagatgactcgtctgaagcctactattatgacctagaaagtatacatagacagggcatccaaaaatggttttggagcaggaatcaggttaatattctctgagggtattagacttcagagtgctcttcatttctagttgatgtgtctaacaatgagaccgagtatgaagccctcctatctagcatccatctcgctaaagtggttggggccgcatgcatagtattacacagtgattctcagctagtagtcaatcaggttttgaaaaagtactaaaccaggggtgagagaatgacagacatcctttgtctccttggtctcggaggtactccaggagttcaaagactataggatttcacaaattcctcatgagcaaaatgcccaagctaactgactggccaaactggaatacaacatagaaatataagaactagaggtacttttgattaattacctctagagcccagcacaaccacccaaatagtagtcaaatcaatcagccagggaaccacatgggtggatctaatcattaattatttaataatcaagacactacctcaagaacgagttgctctaaggaaatttttatatcaagcctcatagtacgtcaacatggatgggaaactctaccgaagaggattatcaatatcctatttaaggtgtgtgtccaaaaccaaaattaaggtcgtcacccaagagttcaatgaaggattttgcagagaacacacttggggtgcaagcctatccaaaaagatcttaagcctataatgaagaaggattgaattaagttcggacaaaaatgtgaccagtgcaaaggttcaccaacactctcatccatcacactgatgactagtcgtggtcattcatagtttaggggatcaaccttataggatccctcctaactggaaagggaggcatcaagtatgttgtggtcgcagttgattacttcatgaagtggatcaaggtagagccaatgaactcaatcactccaaaaatgttctagagtttgtagtcaagaacatcatctatcggtatggtcttccacacaagattacatcagataacgggaaatattttgacaattcccacttcatcaagtttttaaaagtcatgagatcataaaaatcttctcaattgtagttaggcctttagaaaacggtgaagaggaggctgtaaatcagatcttaaagactatgcttaagaagaaacttcaagattgcaagaaaaactggccaaaagaataacctcatgtgctttggacctacccaaccacaaccaagtccactataagacattcccctttctccatatggatgtgaagcaatggttctagttgagaataccatactatcccacctaagaacaacctatgatctagaaatcaatcattcactccttcaggattcccttgacctagtcgaggtgctctaagaggcaacaagagtgcagctagagtcttaacagaggaagttagagaagtacttcaattcaaaagtttgggagaggaatttcatggtaggagacttagtcctgagatgagttttccccgcatcataagtccccagagtgggggtactaggtccaaactagaaaggcccgtatgagattgaagatgaaattttctttagaatataccacctaaaatttaaaacgtaatcgaattctagagtgcttggaatattgaacatcaccgtaagtactaccagtaactagaagacaagtattcattatcatctttaaatatcatgcaaactttgggtcgcagggatcaaaaccttttatctctaatgaaataatgacatcatacaaaatttcttaagtgcgcaaagaaaacttgagagaaaaataagtgattcaaaccctaaactcttaagtcacttgggggtagagagaaaactagtaaacactaaagcatcgtagcaccaagtttcccacattataaaattgagtagaaaatactagggttagtgtatataaaaaatttacacaaatatcaaaactcaaaaatatgaaaagaaaaacctataaaagatacgaaataaggtatgtgtaggatgcaaataaataaaggcctcttagccgtattgtcataggtaaaggcctctcggccacattatcttaaataaagaccttctagttgcattatcttaaataaagacctctcggtcacattgtctttaatgaactaaaatgctcggggcaaggctattagtattatccccctaaaaataaaaaaaaaataaaaaataaccccttggttgcaaaaaactatatttgtaacaataaaaagttagagatattattcaagttcaacaacttggagaagttaggggaggaagcctgggaccacccatcttatgtgccaaaattgcttctaacttctagtccttcaaacagaagcactccaaaacctatttagaattcttcataaagtgaaaaaagtttcgtaatggttcgacttccaggtcatgaacaccccatcctcaaagtactttatagtgttggcatgtgatggaaatcatagtaggagatggtctctatgccgtgacatcctaggccaactggttggcatcccaaagagtcaaagttccttgagcttaacagacatattggccacagtattaagaatgaagcacttcaactttgagcagtttatgtgtcacgttggccaattcagtcttaatgccttccacctctagttggaccttggctaagtccacttccttctgaacaaaagcctccttagaatctaagagttggccttgagcttggttaagttggtcctgggtctgggtaagataatctcgatcttgttgaagttgatcctgagtaagatgccactcctcctccaacccagatgatttctttaattctcgctcccagagattcttctcctccaataggtaatcctagagctcctcaacctcctttccagcctgctttaattcagccatggccttgctaagacctccaaaagttgtgacctcataaccattgtcaataaggttcttggccaagcatcctaccacagttgaaacatgttcgaaacaaagtcaggaaatgtgggacaagagaaataaaaaagaaaggaagacaaagatttggacaagggtcttactgaagccagtcaatttcttaagtcttgagcctggtaaattgggttggacaaagcacaaaaacgaacctctgaatgtggactttaactatctctaccaccaaggaacttttcatttcagtgtccgaaggagctaaatccaaacaaacgtaatccttaaaccaattggtcatggtatctatgttgagatcatacaccttcccaaagtattgcctgcaaagtttactatcttgacgcctatctaaacatttggttagtaaggaagtctcaacttctctttttgacatttcctccaaggcaaagttatgccttaaatttctcaacttcctatgagcatcgttagggtggacatgcattagtggaatggcggggacctctggcatctgagtctcctaacaaggaatccctaagctggaaacccctccagactaagccttatacgcggagcccttagagcaagacctctttaatgagctaggtttatttggagaggagtgcttctttcgcttggaagtttttctttcaaagggaacaattgcctcctccactaggatcacctcgtttttctcttacattgactgaatgggccccttgaggttacaataacgttcaggatttgcacaattagcccaagctctaaatctacttcatccattgcatt

SEQ ID NO: 37534 - DNA, 3384 bp, Cannabis sativa
aagttaaacatgtcaagtagagtaacctaagaatatccatgctgccagccaggaaaaagaaaacacaaaagatatataataataaggaagatcttttaacctttgctctatagtaggtgcatcccccgcatcagttgagcgcctttcagccagtcttagcaatatatgggctgcaagcaggtgctgccgttttaagacataatatcgtgccaagagatcaaagtattttgcttgattgggcaggataggtgatccaaattgacccattggtgaattcactgcagaagcagctcgaatctacaagtatgacagaaacacgaggatgggaaacataagaatgagagcatacagtgcacaaacttaaaaagaacaaagaacttcaaattataatattttttaagaaaaaataggtagcaagaagtgctagccaacaaatgtttagttcatttctgaaaatacgatcttaatgctggaaaagatcaaaattaaaatcaatattcaagaagaaacctcttgtattggttcatggccaccactttgtaggaaaggcaccaaatctggaccaccatactccagtagttcattttcaaggcctacatcaatcattgctcggtacaagtactcatgaaacaatctatcaggagatttaacaccaagctgcacaatctggcatatgtatttgttccgagatgcctgatcaagggcagattttggagctgcaggtctaaccggagatccgaattccccacgtgaagccccacctttcaaagaccgtaatgcgctgacaactatctcataacacatttcacgctgggcaagtgcatgttctcgagcaggtgcatcaatttggtcattaaaagcatcaccggctggatcaagagcctgtgccttttgcagaggtaagtgaaccacagcttcatagaacctgtaaccaacgcatttattaaattttgaaagatataatgaaaccaagttacacaaggaatagctctccacttccctaaatcaattcaactgaccttaaatcctcaaaccgtttgcagacagtttgtaaatcagcagactctggaactttacttaagagattgaaggcctccctagcaagattcttcttctcttcaggatcaggagtaactgcagctctttcaagacactctacagctagaaagaacttgtgatcagactccttgaaatagctaggacagccctctcgtaatcttccactaatatcatcaacagtccccctgccctcaggaccagtataacactgaaaaagaaaaaagaaaaaagttcagaatgaaaaatgaagagtatcaatatatatacagatagggtggggactaagcaattgcttgcaaatgtaggagctcaattgttttcatctttccaatcttgaattacctccattaaagcagatataagtcttgtagcaatctggtcaccctcttcagtacaaactagctgatgaaatgtcaactgagccaacgattgtcgcagattagtgttgaacccctgaactaagcgagttacatgatgctgagaaagaagttgaagcaaaaacagggcttcactggatctgagaagcaactgccttatacattccattgctctcacctgcataaccaaaacaaaaattgaaaaaggatgtctagaaaccttagtccactacagaatataaacaattccagcctacctccatggcagcaagttcggcaggactatatggtaacctctgtctcttattggacgcaccaccaccattagcttcagtactgcgtgaatacgcaccaaataagttcctcaccataccccggtcaccagcccccaattctgaaccagctccataaagaattgaaccagtcaagtcccctaaaccagcaacacaaccataaagtcccctcctctggtttcgcctagaccttaaaaacttctctagggaacgaagcttgttttccagtacttgcatagccccaatagatagtctacacatgactagaccattctcgggagaagcatctacagaacccccttttataaccatcacaggaagttcccatacaggaaaaagtagcctggaagagcacaggcaaagcccttcatacgcacctgaaaacacaggctcggcctcctgaaccacctgacccatgctgaatcccccagcagctgtcctagtgcttgacagggcactactaccttcaagttgtggcattccaaccactcttggatcctcaaaggcttcagcagccttttcagcaacagtattgcttataagattttcagaataaactatccttgctgctaaaatcaaacacattgcagctgcctccccagctccaaaacgattaaagaaatcttctaagatagatcttggggagttcgactcaaacaatctcctgagaatatccacaggcctgttgaacacaatttccatcatgcccatggtactgaaaatgacaagtcttctccttggaagtatatgttgagttgaaagatcccctcttgcccaaagttttgcacatgccttttcagaggactcacacaaagtttcaaatccactatattcaatttcagaatatagagagtgaactgtttttgcagcatcaggcattggtaaaacatctgccacaaatagcattcgcccttcaactgataaagaagaaacatattcccttaatgcccgattacttcttgagctggttcctaatgtagtcgacacagatgtttgtgcacttgaatccctacttacaacaagaagagaagacatagttggtggggaggaatcagaaagtacaagagttcctgcagaataatatgatgtctcaaccttcaatgaaagatcttcattctgaggtctgctagaaagagacaaagctccaaaggcaagaccactgctgacacctaagggtggcgagggtctagtcgtgacaactttcagacaggtaggtttatgatgattcatgttgaagccacctaaatttccactagatagagaggttgtaagataaatccttctgccatctgataaaacagcaacaaggtgtagccctttggattccacagtagttaaaggtgatattgaaactatggatggttttgctgatcgatttggagctctttgtcctgatgattgtctacccccataatgagtgtctctttgactgatcacattcctttcttctgctactttcttcaatgcaccatcgccattagagcccagaataaaaacctgaagtttcatttcttctgttcgtgcatataacatgcttcgttcattatcaacaaccatttcaacaatagggtcaacagctccaaacttaaatacatttggcactacccacctgaaaaagtgtggctgtatcagtacagggtaacatataataataa

SEQ ID NO: 37535 - DNA, 3274 bp, Cannabis sativa
ttgattcatcaaaaaatatatataatttttttaattattaattatttatttaatcaactaagattataataatgattataatataagagtaaaattttgttataaaactttgtaaaatccgttattcaatttatattatatataattaattaataataataaacttttatttgattatatatgaaataataagaaagtaattagatccaatgtgatctgaattaggttttgagtggaatttaatctcaactactcaaaataatttattctattaatttaattaaataaatattttaacttaaacctaattgaatgtctatataatgaaaaagataaaaataattcattcaacttacaattgactcattcttctcttctctttcttgagtgaattttgaaattgtgtatagacaatagatttcaaaatttcatcttctcttcctcatagaattcaaccatcatcttatccttagtgattgagaaatttcttacactagtcatgtgtgatacctaaggtaatatgaaagactgtgatgaaaattacacatatttagagaaaaaaaaatatccatattaatcacttaataatttcttgctacaaaaagaaatcaaagattaaagtaattgaatagaaagagtcattattttacagtgtcactgctataagtatactcatatttaaggtgtttgtattcggttttacaaaaatatattttgaattgttataattattaattaataatcaatatacatgatagtaaataaaattctgataaaataagatccaataaatctatcaaagcattagaaattggaagttcattgctcagaccttctcacgaggaagaagtaagagtatttggtacaacacgacagtgtttcagtgttttcctcatagactatgactcatggtttctctaaaaagtaatacttagtggctgattatctttctcaatatcaaacaagcctttttgaatatgagaagtaattaaagtcactgtggaagaagatgatagaaaacctcgagatgttggcaaagtcatagtttcatgttaggtttttattagtactatttttaggttgattttagtgtattttaaaatagtttcactcttgttttgtgcaattttacgcttgtggtagttgatattttgtaggtttagttttgaagaaaaatagaaaaatattggaaaaaaatatgagaaaaaagtcaaatgaatcaactctcgggacaagagcaccatgaaattcattcaagaaaaaaatccaaaagttctagtgcgtttggagctcttaagacaaacaaatttaaaataatggagtaccgcctcaacactatatttccatgtcatagcattaaaaggttaaaatttagtagagaggatcatttttgactaagatatgggcgcgcctcaacacaagagcttagtgttgaggcagagattcgttaaaagcttgctacctcattttttctatttaatgccacaacataggccgcgacactaagggcttaatgtgtaggcccgtcccttgaattcgaaaaagtagatatttttctatctttttatcttttttttggctataaaaatgagtagattttcatacttttgatcaagcaattagagagaaacaaagtgactgagaaggcttttcaacagaatttttcaataatttcttcttctctattttcttctcatgtacttaattgatatgtatcgaattattatgatgaataacagtagctaaacagttattagggtattgatggatattgtttgatatttatttatggttttaatatgatttgattcttcttcaattttctatgtgttctattttattcgtacttatttcttttaattatttggcaatcaattaattatttatgattttgatacgagatctcaaaagtgagtatatcaattatgctatagtgaaataagaataaatttcgatacatgacgagagtaccaatgtggtttggatagcttatatggtttttgtatttaatgcctattacatattttaattaatcacaaaagtagaaaatttgcatgtaattgagatttatatatctgagaagactataaattacttgagtaaacctgctattgcatagaaattggtaacatgaattgaattaaattagggcataataaatagataaaattgaaatcaataatcctagttctaaccattgttaattcacacattaatttacttgctttctatttttattcttttaagttttaatttctttacacttttgatatagcaaaatcaaagtgaaagtttaattttaacgtacttaactacaattcttgtaggatcgacctcactcttgtgagcctattacttgttaacgatacgtatacttgcatgttaaaatatccacaataaatttttggcgccgttgcaagggattgttagttaatattaatatttgttctaatttggtttttttttcttttcaatttttgtactaagtctattggtgtcaatttttctcttttctcaagaacaactagtttatgtgaggtcaaggaccaaccacaaaattacctattgatcctaaaatagagaagacttgtagactaaacagaagaaagaaaagattggaaagagtcgtggaagtggttgaacaagaagtagagatgaccaataacgaaaataatagaggtgtcgtagacgaccaggctaatagttttaattcacctgaccgtagcttgagggattatgtctcaccaaacctgacagaggctagaccatgtataaggccacctgtcattaaagctaacaacattgaaatcaagccagccatactacagatgtttcaatccacagtctagattgggggactgccatcaaaagatcccaatattcatcttgcaaattttgaggagttgtgccagacatttaagatgaatggggttagtggtgatgcaattcgattaaggttgtttctattctccttaagggaatgagccaagagttggttggtgtatttgccacctaactttatcaacacttaagaggaattggccctgaaatttctctccaagttctttcctcctgctaaggttgccagattaagatcaaagatcaacaatgtgttgctacaccgcctataagccttgagcatcatataaaaattccttatcctcaaaggatgtgcttgttgatcttaataatatttttaagttaattttagtgtgtttttaaatagttttactcttgttttgtgtagttttacgcttgtagtagttgatatttt

SEQ ID NO: 37536 - DNA, 3494 bp, Cannabis sativa
agcaaatctttccaagttatctgatccacgtgtcccctctcgactggtccacgtattttgggcgaattctggagcaacactgataaatacattattaatattaatattaaattgcatgattttttaatgtcgtattgtgttttattatgcttgtcgcgtgtcgtgtctttcagactaatttgatcttgcttacatattatgacttttatactattcatatcatgtcgtgccaatttatagcatcatgatgtgtcatacttaaattcatattttaatgtcgtgttgtgttttattatgcttgtcgcgtgtcgtgtctttcagactaatttgctcttgcttacatattatgacttttatactattcgtatcatgttgtgccaatttatagcatcatgatgtgtcatacttaaattcatatttttcgtgcctgatcatgttcgtaccaaatcaaattcgtatttacaacatttaacacattaagatttcacttagcatttttcaaacttcacatacaaacaataatacaatatctattaaacccttaaatcaaaaaaaaaaaaaataataataataatacaatatctattttaacaagtattagctccctatatatatacataaatcccacttattttaaggtgatttgctaaagatctatattgatacaatttaggtgtataatcttgtaggtttttgatatcacacatatcgttaatattatgtaaaagtaattattcttttgttaagaaaaaagaagaaggaaagattgtattaaacttcaatcaactattagtctattacaatataatctattaattgaccaataattaaatagaaaacccaaacccaattttcaaaatgtgtcccactaattattttattgtgtatagtatttatatattctaatgtgagagtttcttttaccatatgataagtgaattttagattcacttataaatgccattttgtattaaaattgtaggtgtctaagttattttttttttacttgttcgagtttcgtacaaatcaggagtgaaagacacaaaaaaaaaaaaaagaaaaataagagagaaaaatgtgaaatagggatgcatcgccttgttctagcgttgtagccattgtccttaaaaatcaacatccccagaatttgccgaggagctacaacaccactgtcaggggctacatcgcctgactttcctgttaagtggtgctgcaatgcccattcgaaaggttgcatcgttcgtatccatacgaaaaagttaaataacgaattttaaaggacaaaagagatctttttagggggaaataaaaggaaaaacataattaggtgtaacaccttgtttaggcatgttacactaattttttaattactctgcacacatttgctaaacaaagaatttcttgaaaaatgtgccaaattaaaacttttgtaattgaactttaatttaatacatacataaacacgatctcattgaaaagattacaaccgtatacaacatatatttttaccaaaagtgtcacctaacgactacaaaataaaagcccatgtcgtcccgagaccgaacactccaggcctaaccatctcaatatgtacaatcatcttcaagttctggactcactgttactcagtcctcgcctttcctttatctacacatgcaaacatatctatgagtcgacatgctcattaagaaaaatataaaacatataaacatacaatcgacttgcatctaggcacccatacacctatctacaagacttcagatgaatcaagaacgttcttaacagaagtacgacctttgtaccatatgcactaaatactcgtcctatgttaattttggtagggctgaaccgcaccttgagtactactgagtgtcgtacaacgtgcacttcatactcattcgtactaaggttggtaacactgtgtcataccctttaaacatcatatattgtaccaatgtacattgtaccgcaaccgtactagtgttggtagtatacaaatcacataatacataaagcatataacacacatacacatacacgtatatacattttatactaatcttacctcgtttctaggttcaagtgtgatggtcaacctaaataaaaatttcactcgatgaacagaggccctgtgtcacatacacgcaaaataggtaaacaacttgctaaaagctttttggggacttaaactcaaaactaaaaaaatttctatcgataaatagaatgacaataccctaaatatcgatgaaatatgaaaaaataaaactatggaaaaactgcatgaaaaatggcatgtcgtttttataaaaatggcaggtcgtttttataaaaatggcaaggcgtttctgtaaaaacgacagactattttctaggtctgaaaaaatggtctgtcgttttttgctgcagaaatacaccaaatctcatttcttttacaaatcaactccaaactttctgcaattctctaaaatacctattataggtccaataaatataaaccaagcaacaaaattaagtataacttaaaattacacgatccaccattgttgagctaagtttgagttcttactcaacacttcaaaacaaccatcaaagctatcttagaaagcatcaaacaactaaatgtatccccaaaaaacaaacccacactccccgaagttaagacataacctactcttagaatttgcatacttgaaccaattaaaaacctccaaaaactaaagataaaagaattctagggcttaccacatattgtactaccacttcctcttgaatcctagctgaaatccataagaattgctgaagagaattccagttcttgttggttctctttagggtcgaagtagagagagagagatgaaggggtatgttttatttttcttttttcttcttcattatttctaacttagataaatcataagaattatggcttattttaatcatataacaatctaaataaacctaggaaatgttccactaggtccactaagtgataggtcaaaaatctttaagacaaaagaccaatttgccctttacttcaagcttaagcaaccttaagacttacaggtaaaatagtcaaatactataattctgcctcatctcgatattccaaatatcaaacttatgtccctcgctaaaataaaggctctaaaccgacctatgtgactctaatagaaaaaccgtcacattttcatcgttactgagcaaaaatcataaaaatataattttcacatatatcatatacaatacacttaggtggcgattggttgggaggaatgaaaatatagaaatagaaatgagaatgagaaatgaaatagaataaaatttaaaatgcagaaaaaagaattgataaaaaaattattaaatattttcaaatattacattggaatggtctttttttctatttcaaaatggaatagtcattctaccaaaatgatggaaagaccattcaatcagaatggtattccaatgattttaaatgcaaccaaaaatgaaat

SEQ ID NO: 37537 - DNA, 3605 bp, Cannabis sativa
  modified_base (3085)..(3086): a, c, t, g, unknown or other
aactaagcgggctttacagtgcaaaacttaactggccgcatagtagcactaagcaattttgtgtcaaaatccacagacaagtgtgtccctttcttcaacatactttgaggaaataagaaattttaatggacagaggagtataaggcttccttcaaagagttaaagaaacaagtagcttaacctcctatcctatcaaagcctttagacaatgaagaattgggcatatacttgacagtcacgatgttttttgtaagttcagctctcattagagaagaaatggcattcagcacccaatatactatgtcagcaaaagacttattcatgctaaaagttgatacccactttttcaaaagctgacatactgcttccaagctcattccataaaagtgtacaccgaccaacccttgcaaaaagtactacagaaacctgaagcatctggccagttacttaagtgggaaataaaacatgtccaatatgaaatcatcttccaaccaagagtggccataaaaggccaagctcttgctgacttcgtggctgaatgtacatgcatgtctcttaaaatctctcaagattcaggataaaagcaagagccagagaagaagcaagagcaagacaattaaacctagaagtttcacattgatggaagttgtacagacagcctgtctggtgctggcattgccctcattacacctggggaagcagctggatggggcaagtaagttcaatttcaaactgtccaataaagaggctaaatatgaagctctaactgttggactaaatcttgcacataaagtcagggcagactacctagacatatatagtgaatatcagttggtcattaatcatgtcctaggtgaatactatgcatgaggagcaagaatgatgacctaattgaggaagatccaagaattattaagtcagctcaagggttccacccctaggcaatgacatactttcctgactagctagcaatacattgatagacaataccaacttggtgcccattaagtaccggagttgtctaaattccaattccattaatggtacatacctagttggatcatatgcatcctcacttctaggtatataccttatagaattattggtatatatcttcattttttctttctgggtttcgattatcaccaccataatttctctttgaatgtgtcgttccagtagtatggggtctttgtgaacccattggctctttcccagggcgatatgtagtttcttcagaatgatttccatcatttggatttttatcagccatggatatatttctgtttgtaaggagggatttttttgagttttatcactaaggctctcaccaaaatgttaacgtagattttcgttaaccaaaattaattagcctttacataataatactttaaagaaataataataaaaattaataactccagatatttttacgtggttttgtagttaaaatctacatagtccacgagtctatcttattaatggtatttttcgagtacataatacaatatcagaataatagtattttactctcaattttctattcatttttctatggaatctgccgctatttataggaatataggttggcagttattttcttgggatcagtttaaaatgtaactgttcatgaaatgtggacaattcccatgtttcatttaattgcatgtgggataatatttgataactgctcaactgccttttgttttttatccttttcgatggttaatgctgatttggatgattatatctcgcttaacatgagttatcctccttgtccatcgtgatgtggaaaaaatgctaagtgttagtagattgttcacctcattatgtctttgtattagagttaaaactgtgtaatgaccgttatttttagacatgggattagtgggacacttagcaataattaatatgactatgtgattatttgcatgttttattctttatagaccttattttcatgaaaatatgtgttatgattattatttcacaattccggagattttattgaactatgtgtgacatgcatgctatctttgaattttcatatttttacatttttatgcacggtaatagtggaaatgggtcgaatggtaattttagtcacatggacacaaatttgtataaagtattttatggggtaatattattggatatcttagaatatcaaggtttgacgaaataacagaattagaccattttacccctagggctaccagataactttgtggggaaataagggcattttagtcttttcacccttagagcttagtcactcttttggaagggataggtggctgtggctcatgcttttgaggatgaccagctgcttaggaagcaaacaaaaaggaaaagcaaaattaaaaggaaccaaaaagaaaaagcaaagtcaaaagcaaaacaaaagtcaaaaaaacaccaaatcaccttctccttctccctctacttcgtggcttctgaaccagggccaaaactcagatttttccatcattttcaagcctcttcgtagttggaattcatcaaggagttcaacccctagctcctccaaacttctaaggtaaaacctaacctgaaatttatttgttttctagggtttttgttagtttttagtggctgtttatagtagaacatgttgaataagtttaagaaggttatgaaatgattattaaggttatgtagaaccttttagaagtggtttgaattgttttgggtagttgaagaaaaagttatgcaagtttgagttcaaagaactcaaacttaacttggttgtaataacttgaattctgttgcgaattgagttaagctttcttcatgtaatatgttcactatgatgtgtttcggtgctctagaaaattttgtatttttttttatccgtattagatgagttatgggatttcccaattcgaacaaggagtttctggccatcagatttaggtagttttaggatggccatttagttttatttatgttaagaatttgattaaggtttctgcatgaaatatgttttttattatgtttttaggttcctgacaaaattttgtaatttttggatcagtattggatgagttataggatttccaaactnngacagggaggtttcgggccatccgatttaggcagttttaggacggccattgagtttgatttctcttgagaatttgattgatgtttcttcttgaaaaatgttcattgtgatgcttttagataccatgcaaaattttgtatgggttttcgtaggatttcagtagttatggaagttttaaaatgggatagttgagtttcgggcgatccaatttaggcagaatttgggagtccatcttaagacttttcccgggaccccaattgagtattttctatgtacttagggtatttccatgatgtatatcaatagggatacttttagttgtcaatgtaagtccccgaaagtgttagggcaacacttatttgttttttaggaaatgttacttagggccttttattacctgcatgtatttccactaaggttgaccgacgcacctaaaataaaaattgaggtaagactagtatagcacacatacatatgaacatgttatttttatgtttggcagatgtatgacatatccgtt

SEQ ID NO: 37538 - DNA, 4119 bp, Cannabis sativa
agagagagagagagagagatgttacttcaatgtgacaaagaggactgacaaaataaattagggggagagaaaagagaagggtacttttgaatgttgcaaagattctgttacgtgagaaattagaagtaacatgagctatagaaaaagatgagtgaaaactaagtgttgcagaaagtgagaatgataacatacaaataagggaggaagagtaaagcaaagatgagatcgatgatcaatacaatgtagcaaagagaatcacgggagagaaggaaatatggcatttgatacaagcagcagatcaggatagaaatattaaaacatgaattctttctaaatagattaatactttttatgtcacctatacaaatacaaactataaaccaggatacaaagagtaaaatgtggattctatttattcaatcaaatgattgcaataattattatatttgtggaatccgaaaataggaataaataaaataataaaacacagtactacccattcaactgaaacaaatgctcctagtgcaattacagactttacagtaatactgtagcatattttgttccctcctctctctaacataagtctcatttcttatgaaaataaaaaggtacagtaaaactcgtactactgctctaaaattagataatgtaacaacactaatttagagaattcaatctatatttctaatttatggaaagtaagcaatggttttgaacgatacaacacagaaaatcacacaattttcatggaatgaaaacataacaagtcacaattattatctcaatcaccaaaataataaataaataaagggaagagagagaaagtagtgtaacataaagctatcaatgtaaaacaacatcaacagcatacaagaattgaaaccagactgcaacacatagggcaatcatttaactaaaaacatacctggataagaaaacggtgcattcatagactgtgtgtaatgagggtcttctgctaacttagaaagaatcagatcaattgctcgcatctgttcatcaagagttcctgtaactgtcaccagcctgtcatttaatccaagataattattatcctgaggagatatcttgatgcctgcttgcgactcctcaataaaagacctgattgaaggaacaacataagattagcaactacttttccagtcttttggcaagggaaataagtaaattttgaaccttaaaataggcataagtaaatgtaacattgattccgaatacacgtggaaagcacaaaaacgtcaaatttatattaataaggattatctgaataatataaaatttcttaattaaaatgctttaaatggtaaccaagaacatccctctcttgtcatttttggtcttgttaataattgtcaaagctcaagcaaaataggtgtaaatttacacctgtttttctaagttgagcttatgtaccaatatatggagctcagtgcaccaaatactttggtcctaagaaactcccgctttgacaactcgaagaaaaatcaaagcacccaagaactacccaaatatatatgtttaatgttggataaaacacatgaaccagagtcatgaccataggctattcaggccaagtaaccatcaaccatgatgaaaaaatgtagcttgaccaaaggtaagaagaaacaactgatatgaaagaaaagtcaaaacctaatctaaaaggctgaaatgtgataatccagtcttaattcagttttcctatcctgtaattctaagcatgggcaacaatggaacataaacactctcaatacttcatactatgagacacaataaggctacaaacataagtccaacactatacaatgattccaatttcatttaccataaaaggttttaatagaaagatatttagacaccattgggaccaacaaatccatctaaacaaaaattatgcaacaaagccattaaacacaatggctagtttttttaaaaaaaaataaaagtgaacaggtcttaacatgttcaacaactttttacagtgaatagaagaaatcttctaaatagaatctagaaatttgatgtacattgtcttaacaaatagcacaaaagagattatatgatgaattcttacttaatagtggaccctcccttcccaattatgccaccacaggagctatttggaacaactagtctcactttagttcttggatcaacttcattgctttcttcatcagcaatctatacaatgtgcaaacaagtatgagagcacaattatagatcatcaatttttttgtaaaagcgaaattcacatcataaagaatacctcactcagcaacttagcaagaacaagttccattgccttaagaacttcatttattgttgccgatatcataatgatcctatcagttgtgccagggaaaaattcatgattgcgtgacagctgaatacgtgctccagatgttgattgaaattcagtgattgttgccccaccctttcctataacagaaccagctgcagcatttgatacaagaaacctaatgtatgtaggcctctccaaagattctggcaaataaaaaaaaagtacatcataaataagttaggtatgaaaatcagcagcaaaatctgagccaataagtgataaatctatgtccgcatcttataaattgtggagagaattcacagaatagaaacctggaatttgcaattcaagcatttatcaactttcaaaaataaataaacaaacaaagatatatataataaataaataaataaattcaacaacagggatactgaagatgattttatattaaaactatctataatttcattactaacatcacagagattttaattggcgaataagtaaaaaatgtgtcaatgctggatatgatttcagatcgacatcttaacatcttaacctaagactaacccacccaaaatcaaatgggtacctagcacaataatctgttgaaaaatcataactgttaataaactaataatgatatcaaactgaattcaggcagctgggacattagttgtagggagcattgtcagcaaacagacaaaagatttcaggagtgaaactgaaattaagttccaatttattatgagaaaaatactttaacttcgtcaaaataaagttatacatcaaatgacacatgcctgaaagaatatataactttttaatgaaccgttagaaaattgatgcaggacaataatctatcgacttcttgaacctttgatgcagaaaagactgtcatgggttctgatacaaaacatacacaaagattctcttcaacaactatttcgttactaactccaataaaaacttaatttcatcaatacattatttcactaaatccaatagatcgaaaagcaaaaaaaaagtacaaatccagagcaacagcatatacttccttacttttaaaaacaaatttgacaaaataccaattgcgcagcacatttgtcaatcacagaaaaaataattcaggtacatacgatacaatccacccggaaattcagaatgaatctgtaaaatgtaccatatggtagctggaaaaaaaaaaaaaatccgaatcttattacttaaataatcttatccaattgactttgcaccaaatgatgattaaggaataattcatcattttctcagcaaataaacgtacatttacacaatcaaggttagggcagttcaagtaggcattttcagttaagaaactagccttatcgccattgttattgaaaaggaagaaacaacaacagaacgaaacttctccaaaacgaaagcatcacctctaattatacgaacgagagagaaagataaaaggagatcagatcagaaacctgaaccagtaggcgatttaggcggtggcggagaccgcttccgcggtgcctctggtgacgacacgtaagatgactctgtagactccattctcttcttactgcctctttcttcctcttcctcaacctttaactcctcctagagaaagagatatagcactaatttagaaggaaaaaaatgcaaaaacaaacacagagagagagagaaagagagaggatgaataaactaacaccattttttccaacagctctcaaattcccgagaaacaaacaaacagaaaaactcaagtttcagattagcttacttacagttac

SEQ ID NO: 37539 - DNA, 3748 bp, Cannabis sativa
aattctttctaaattattaaaattattggatttaaggatttaatatgacgattgtccatataccaaattgtgctcttaaattttgatatctctactaaatcatgtttcttgaaatttaacatatagtaaattttttatccatatcagattttctttagtaaaattaaacaaaaattttaaaattcaacaatttcaatagtttaagagaaatttcaacaaagtgaaaaattcaaagaacatgatttaatatgtcaaagttaaaggaaaaaattccatgtttggtaggaatgaaaagtgaagaaaaaagaaaattgaggtgaaaaacaaaattgccttcttcaaaaacttgtgtaaaattcatactactgaaaaataaaggcaactgatataattcaacactaaatatgataaattaaagccaattccagtaatgtggtcacatacatctttagtacaacatggtatgatcaaatcatctttgtaaacatggttctttactcaaatcttaaatggcaaaatgaattctattttctagtacctgtaatgtgaacaacacctctaactcgaatgagcctataaacaaatctattgttcctaaaagaattgacaccaagtagttaacatggttccaaaaatttacagcaggtgttaagggcagctcttgatacccttcatttcttggtagtcattcaaatatgcatctattagttgttgaggtaccgttagagagcagcttaacaataagtttctcgagtcttttcgcacctagaccaggcctcagaacatcagcatctccccataccgagcacgtgctgtttctaggctcacctaagcaccagccaccaggcacgacatcacctctgcctcggcttaaaatttcttggtcgatacggtcaagtaatggatcattcaggttgaatttagaagcgaaggctgccccactttgaatcattggatcaaagtcatcgggaatgaccttacggggctcctcctttgggggtttgtcgaagttggcatattgtaggttgtggtttacaatggttttgttgaactgtcgagaattgcataaaatggtggggaagtagctggaaagtgctgaaggtgtgttggaaaaatacatcaacagagttctagggaggttatccgtacctagaatgcagaattcaataagattacggctgtaaatggcaaacgatgaacctgcacaaaaaattggcatcagagttagacatttttaggagtatagattgcccatgactaagtagtgtatacagaaataaacaagaaggttggtaaggaaaagatgaaacatacaaattagctacaaaaaaggatctgttaatgcagtcaaagaaaccacatttggtcatatgtgagttgcaagttttctttctctctttttttttttattctatttttctttctctttttaactaattgccagtgcccataggctgtaaacaacgaccaactttgtttgcaccgaacttctaaatatatgtcatcacaaacaaaaagtttatacatgaagatcaaagtgccacagtactgatctcgatggaactttatacacagataagattccgcccaaaaacttggcagctttgaacaccagattgaacaaaaccactgttcactcactctaggttccataaaactccactcaatacagatatttccattagaaatccagcattgagaaccaacaagcagtaactagcagataccactttctgattttaagattcgaaaatggataactcgttctcataataaattcacctctaaaccaaaacagtgaaaccagaaaaccaaatttcaaaatcatttgcaacaacaacaacgaatttagaccagcatttagtgagcctacatttgcaaccgttctaggttcttgcacaacttcatatcaaccagcagaaccattgcttcaactccccaaattttaaattaaaaccttacatatccattcagaaacctcaaaataaaagctctaacctttttcctcattacaatactttctagaaaactacacattacagattaacaaatagaaatgaacgattttagttccacatataacatggtcatatctcacaaagtaaaacctcaatttgtactaaaagctggctctgttactctactgagaaatgacataattatttaccattatgcaatatgttaactatgtaacctatactaagaattttcaccatcattaacttcttagctaatctctgcaaattccaaatgcaactcaaactagctcacagaaaactcaaagagttaccccaaaagcacacactgatgaaaaaaaaaaagaggaagaagcagtacctgtaaatagtttataagcattaggcagttccctcttttgtgaagcataaaacattgatgatttctctgataaataaagccctggatctacaattatgggttttaacttcttagacctgtaacagcataatacaaacacagtccaaaaacttcatcactcatcaacttcaatcacatcaaaatcaaaatcaaaatcaaaatcaaaagaaaatattgatcatactctctccagccaatgtagcttgaatgactcacaaagttgagactttttggcaagtaagacaaaatgtgaagaagatctgaacaaacccagagaaacccaaatcaaaaatccaaaaaaaaaaaataaaaaataaacaaaaatcaatctacaattgaacaatatccgtaccatcctgagtaacgagtgggtaatcaccggcattgagactgataaaccaatcccaattcgaagccaacctaagaagcatagaagcaccatgaagagtaaacgaaagagacgaagatcctttagggtaaacaaaatcagcttttccaatcacatcaacattctgagcagcattaaaaataggaacggactgaacattaacggcaagacgatccctctccgcacgagaagcaaatcgatccaaatgaagaagataacggtttctaggatgataagtagcagaaagcaaacgaataatccgagccgaatctccagtggaaccagaaatgaggtaagcaatcgaaggcggaggaggaggatcggaagggttttgggcgtcgtggaaatgggtctgggttttggggaagagaaacgggtcgggttcgggtctgtgaatagtagaagaagaagaagaagagaagagagagagaaagaaaacgagagagaagagagaagttgctaagactacagagagtgttgtttttgggtctttgagaatcgccgtggaagagagcttgaacgacgaagacgacgacgacggaggaagaggaggatgatgcgacgtcgtttggtgttgggattgcattgtttggtgtttggaaacggatttagatttggaccggacaaggattcgattttctcgtgtttgcttttttctttgtctttctttgcttttatagtaactattatttcttttttttttcttaacattcgtttcttccttgtgttgtgtttgttttttttttttattattattgtaataataataatgaaaattaaagtgactacaattatttggagagtataaagtacacacaaaatcaaaacaaaatactaatagatatgctcgtagctaatcctgttcttaaatgtattatttattattattataattaagtattattattggtgtaattttatataattaagatatgttattttagagacacgattttgtcttgtgatgtattttcacggaatgta

SEQ ID NO: 37540 - DNA, 4979 bp, Cannabis sativa
  modified_base (3393)..(3403): a, c, t, g, unknown or other
aaaatggtatttaccctaaaatttaatatttaattataccaataataatataattcaaaaaatattagacataaaatgacaaaagccaaacacatatgtttcgtgagtcaaatatgttgtcacgtgattgaactatgtagagttgcaacgtatataacttttctttttactttttaagacaaaaaaatgaaaaacttttgtatttactctctttgtttgatcattacaaatttagggaatcactcccattacttctttaataatttatttagataacagtcaataatgtcaatcattaaaaactataatataataatatttttaacttttttctataataaaaaataaataataatattaactagttaacataggtttaaaaaagcaatgataatgacattaaagactagtttagagacctttcaaaaagttggagggaacatgaacataaatttttctttttcaacaatttaattaaacaaaaaaatagcaataataataataaaaaagaatagattgacacttaagttatattattatttaataatattgagtagtatatcttcaatgagtgttgttattgggactaatatagtgtatggtgtattagaaatgtctcaatagttaatgtataataattataaaggtaaaatatagataaaaagtaaaaaaaaaaagtgtttaaaatacatgtatattaagtgagctataatagtttaaatttttagtgctaagaaaatttttaggttttagtgtctaattttttattatttttataatatagttgatttagttataaatgtaaaagtaaataaatataatataatataatacaataacattttattatttctgtattataaatatattatttatatatgtgaggtaaaataaaaaaaaataaagttttaataagatattttgaaaaataaaatagaaaaaattgtgttgggagtgtttttacaatatagttaatcgtttttttattattattaaattaaaatatatagaacttatacaatatgtaaattagtgtttttttagaaattatcatatttaaattgagcattattattaggtatcaatattaaagcgtaatgtattttaggaataatttataattttttataatatgtgagacttaatattaaaatgtgaaagtaacactctactacctttactattaggataagcaacaaataacatgaaaacgttaacaacttataaatcactacttatcatgtggtgatgaatagcttaaggtgtccaattcctaacaacactttattatagaatatcatttataattatgtaaagagaaagtttttagcgtcttctaatgtgttaatattattattagtacaattaaatatcgaatcttatataatttagagcattactattaagcatcagtgatgtccaatactttttataggtaaccccttatgattagttaggaatattctctaaaagatttttttgatacttaattcaactaatagcagtataacactgagaaaaatgttagacataagtaatattttttaacaattctctataacttaatataataacttttaaaaaatattactaaaaattgcaatgtaacatacatagaaaatagtagacactattagtatttaatggggcaacttacccaacaatcctatgatatataatattagtattagtagaatttaatattgaatatgagttattttatttaaataaaaatgatgaaataattagtaggaattaataatacttacaataatgccattaatgaaacggaggaaaagggtttgaacaagagcaaaagcggcgagatccaactcagtgacgtggccgagaaatgactgagtcacaacgagtacaccaaacgacgtcgttctagccaacattgaaggaaatgctattttccaaattaacttcatttctctccaaactctccatttcaaatcaccttcattaatttcaatctcattctccaaaagcctctcttctaattctccaccatttttactattatcattattatttgaccccattttccctaaaaaaaatataaaaaaaattaattatatagagaagaaaaaaaagagtgtttggttggagtgaaaattgtaatggaaaatatataaaaaaaaaaagtgtgatttttttgtatgcatgtaaaatttattgtaagagtatttgggaggagagaaagtaatggaaaataatatatcaaaaataacaaaatgtgtgattgtgtaagaatgtatcatatatggtaaagaaataaactttattgtaaaaaatataaaaataaataaatggaagaaaaaaaaaaataataataagaagaagaagaagacttacctgtaagataagaagagtgtttgggaggagagaaagtagtggaaaatatatataccaaaataaaaaatgtgtgattgtgtatatgtatcatgtatggtaaagaaataaactttattgtaaaatatttataaataaaatgaattagaaaagaaaaatgagagggagaatatgcttaccagtatgaatgaagagtgtttgggaggtgagaaagtaacggaaaatatatgagggaaaataaaatatataatatatatatatttatatatatatgtgtgtgtgagagagagaggtttatttatgtatgtgtagtcttcgtctataggtcaagtgacaaactttataataaatatattatatataaatataaagaagaagaatagtagttataccaaagtgtttgggagctgagaaaatgaatatgctgaatttggttgtggaggaaaataaaccacgattggtgaaaggtgagacgcaatttaaggactcttttcccctcattaattaattttcttttttattatcatatataaaataaataaaaaaaattgtgaaattcattaaatgatatactatatactgacaaatataattaaaacttgttttaaatttattcaaaggcttacctatccaaaattatagagcattgtcttttttttttttttgaaaaaaatagagagagcattgttttggttactaagctacttagcattattttgaaattttttaataattggttagcaatttttatatatttttttttaagtaatttgtcacataaatatttaattttaattcttagatgtaataaatacttaagattaattttggcagtaataatacttaagttataattttggaacttttgtgggtacctgactgttaagtgttaagtaaattgtcacgtgacaattcatgattggtccaaatcattaaaaaaaaattaaaattaatttaaatataccaataagaaaaatgatacgtgaataataacttaatatttaatgatcaagtacctacagagttccaaaaatnnnnnnnnnnnattattactgtcaaaaattaaatttaggtatttatttgcaattgggaattaaacttgagtatttataccgtaaattactctattgtttttattaaactaaaataaatgtaattcgatattaaattatactaataaaaatattacactttataagagtgttagatactatgtgtgtcctttagcgagaaatattaaaaggtactggtggtgtttaacatcttcctacgtgttaatatcactattggtgtaattaaatattgatttaatataataacttttttaaggagtatttttaattaattataaagtgacatatttaaaaagtgctagatattatttatatattattctaaattattactaagaggacaaagattaaggtgtttattaccataattgacttttattattattaacttttatgttttaacaaggaaaggaatatttgctgtgtttttcaaaattagagtggacacaactcactttcctttcaaatatagaatatggtaaaattggacatttgtaatcactttcaaattggtagaactttttttgtaaaataaaaaaaattatatatttaatgtgttggtaagtctattgaagatttgtaagtggatctaaattattataacaatagactaaaaaaatttcttaaatgctgaaacataaactaaaacattgagcaccttgaaataaagaacaatttctatttgggcaggaaatttttttactttatatttataatattatttatttggatttttttattgaaagattaaaaataagagaaattattctatatattattttttaactttttttttttaaatttactgtttgggttgctccagtagtttttttatgggttgctatgtagattttgattgagatttacgttgttctgttagattttggtagagctttagtttgtatcactgaaaactatacaccaactcattaacatatcaagaatgatcctcaaaaaatttatcgacaaaatctatgtaacagttggccacctcaaaactaatatacagattaccaataaacaaaattttattattacacaatttaataaaaaatagttaatgtgaacaaaaatgataaaacaatctatatttatcaaatattataaaattagttattaaattattaattgattgattaaaaaattattaaattaaaattaaataaatatgatatgaaattatttaaatacatattttgaattgaaacaaacaattttctatctttacacttccaccgcaggtttgtttttggttaagttatttgtcggaagagagaagagataagtgtattttttttctttttaaaaattaaatatatttcttttctaatttcaattttaaatatgtaaaacttaatatttaagaaaaacatatagtattttggatattaagaaaaaaaaaattgggtccaatatacttggttgatttattacaaaatacatattccaccaaaatatatgatccaaattacctttttttctcaaatatgatactataaggtttaaataactttttttttgaaaaaggtttaataagttttataatta

SEQ ID NO: 37541 - DNA, 4522 bp, Cannabis sativa
aaaaaaataatgcataaaaaataaattcatttattattattattattattagatcctaaaagaagcgaaagacagagagagcaagtttcaaggttttcgcaccaaaaagaaggcctttctctctctctaatatctctctctctgttctgatgttctcccccttttccaattttagggttttgaaatgtggaggaacaatggaacactctgaagaaatccccctttcccaaaatactaccgaccatccctcaacccacgacacccagttagggtttcagcatccacccccgtcttcttcctcttctaacaataatagcaatggtgatcccgatcctgaaacttctgatctcgctcatggggcagtcgagaaggagaaggagaaggatgcagatgaaactggaggtactatttgtcaggagctagcgaatttggaattgaagaagaacgaggaagagccggttctgaaacctgatttggaggaggaggaggaggagaagaaagatgaaaaagaagaagagaaggaagaggaaaaggttgctgacagggatttgagtggtgaagaaatggggagccggaatggaagtgatgatggaaatgagaatgtgagtgagaacgagaatgcaaatgatgatgatgatgatgatgatgatgatgatgatgggaagagagaagtagaagagaacgatgatgaagatggtggagttggagagaataagagtggaaatgagactgagaatggaagtgaagtaaataatggtgtcggtgagatggagaagaagaacggttatggtggtggtattcgaaagtatcagtacccagtgaggcctgaagctgaagattgctccttttacctcaagactggaacgtgtaagtttggatccaattgcaagtttaatcacccaattagaaagagaaccaatcaggtattcttcttcttcttcttcaattgttatttatttattcattttttttttatcactactccacttcaaagtgaagctgtttgagtatgcattgtctttatctttgtgggtcttaatctatctaatgtctttttcctttcccaatatttgtttctatatatgtatatatatgtatgatgtatgtacttgtttgttgggttgtgctatggttggtgggttttgttgtgggaaactttgctggttgtggataacattagagatacttctttttgctgtattgtttgctctttccatggaggaaggaagctagttatcttaataaagtatttatgctagcttttggaggattagtctctttcttgctggatttgatatttttgttgcagcttaattatgtttattatttataagaagatatagtttttattattatatattttcaattatatttgcttatgttgtgtcttccatttttgaattatcgttttgaagggtgctagggagaaagtaaaagaaagggaagattccacggaaaagcctgggcagtcagaatgcaaggttttttatagtttcaacgattcaaaatgttataatttgatcgtttctcttgttttgtgaatttttccatagttacgattatttgcatttgtcataactgatctgaatgttaaaagttatatataataagatttcaggaggttttttcactcaccttctataccacatatttgactgcaatgtatctctttcagactaataatagatttgtggtgctataaaccttgagcttcttgcagtattatttgaggtcagggggatgtaaatttggaaaagcgtgtaaatataaccacactagaggaaagacttctgcagcaccattagcaccagttctagagttcaactttgttggtctgccaatccgagtggtataacattattgttctgtctatattgtaacctatccacatataatagtagcaatatttgcttttagtcatcttatgtggtttatattgcagggtgagaaagaatgcccatattacatgagaactggctcctgtaagtatggaggaaactgcaggtttaatcaccctgatccaactgatgcagcggcaggaagtgatacttctgcaggatatggtaatggaagacctgtctcattacaaggtgcacgacaatcaactctaccatcttggtcttctccgagatctttgaatgagactgctccctttatgccaatgatgctttccccaaatcaaggggttccttcacaaaattcagagtggaatgggtatcaggtactttcaaactaagaaactgtctgctactttctgaaataccgagatttaattaacttatttttttgtttgatgcgaggaatttaaagcaagtacactcttatttttctatttcactttctttttattgaattctattgcttaattttcattccttttgtacatacaagctatcattaagctcacagcacctcatttttattaattatttaacttatattagtcaccccttttgattgcttttagaagcagcaacacattttgtttcttgcttagagtccttatcatcctgattttggttttagtgggtttatataaataattatatgaatatgaatatggaacaaaactttattagtgatcaaagttgaacaaatttaagaacaggaggttcatgttttcagttatagatctcttgtttactgtgaacagtaataatattaaataattcaatattattcagatagagttttattactacaagtgtaacatggtttttcttgttttaacatatgctttaatatatttatgtcattaatttatatgttttggcattggactatgctttgagagatgctagtggaatgatttttttccgaaaaatatttaaggacacctcaggattttaacaattataatcaattagaaattttcatttgttttttggtctgaacaaaatgtataatgtaagctatttcaaattcaggctaatcttgctgtgttggttatggaatctcatttaaacgtgttgttactgtgtcaaaagaattaaattaccactttgtggaatgtgtgctcaatatataatataaactattcaaaatcagcaggctcaagtggtaggttgtgtatttgttctattaaaataaagagtggttggttaaataatcttgctgtgtaggttatggaatctcgtataaaacggttgttacaatgtcaaaagacttaaaatacacattgtggaatgtgtgttcagtatataatataaaatatacgctcaagtgtcaaatgataggttaagtgtgagtaggggtcaactgtttattataaaatatatgtatttgtatgtatctaaaggcacatagtaattttgtcttttatgtgtattgtataggctccagtttatctaccagataggaacttgcctccaccacctgcatatgtgatgaacaaccctgtgactgaaaccaatatttatcaacaccatccgccccagaaattaatggaagaatatccagaacggcctggccaacccgagtgcactttcttcttgaaaaccggggattgtaagttcaaatccaattgcaaatatcaccatccaaagaagattgctatgggagcatccccatgtacccttagcgacaagggcctgcctttgagaccggtaataattttgtccaccgagcagagtatatcatcactttaattggaaataacttacacttgatcattttctctaatatttggtttgatttccaggatcagaatatctgcacatattacagtcgctacggaatatgcaaatttggacctgcttgtaagtatgatcatccagtacagcagacgccaaccatgtcaagtgtagaaaatcaacctcctctttacagtaacttggccggtgaaggagctaggagaagccgaaatgagactacaattcagcagttggtttagtttagtttagcattggcggaggggaaaggggttgtagtttcttttctcgacttgaattttcttaataaaccttttttctttttccttggcctaactggcaactgccacttgagggaatggcacttttcacttaacgatattatctagtagtatttaatttaccaaaatcctgctaaaacagatatgtaaattatgttattattatgtcagcttaccaacgaatataaatgcaatgcaattgagacattttcaacattttatgtgtgtgtttaagctttagattaactttcttgctagctatctttaggtgttgtattcttgcttgtgttatacttttgttacagtgctacttacgaattggctcatcttttttcttaattttgacctttttttttttgaaacagtcttaattttgacctttatactcgataagtatgattatcaatgagatttggtcattttctttaacgtttctactcagcatcggtcattgtcttttatttttcttttttaatatactagtggtgtctcacgtgcttcgcacgtgtggggctcttaaaattatttaagtacaactattttgaaaaataattagtattgtatctccaaaacttataacactaccaaatt

SEQ ID NO: 37542 - DNA, 2625 bp, Cannabis sativa
cattgcaagaaagaaaaactattatttttgcagtagtaagaaaatacacacccaaactctctatcaagattgtaggcgatgctaaatcggtcttcgaacaagtcatcatcatcgtcatcatcagcaagaggatgtggcccttcatcattaatgctcataccatatcgctgtctaaaatcttccttaactcgttctagaaacacaaaaggggtgctcctcccagttgattcatctgcaacaacgagaaaaactgcagaaccagagaattattttcaaccattcatgctgctataaatgtgaacaatttcaaggtaacctgaagaaaaaaaaaaaatcattaccaaatgcattgtcaattaggaagttgaaggtatatccatcacacgaatatgtgtacttgctgctattggaaggaagcttctgcaagcactgaacggcaatggtactaaagttgccggagaaagatgtgtgttctgccaaaacaacatgtccttttgcaacaaagctatatattaaccctctttcactcatctttggaattcaccaaattcgttcacggctcctaaaaaaatgcaacattaatgcatcaaaaattaaaactgaagaaatttatgaaattagaccgaaagaacaacccaaaaacaaaaataaattcggtaatcaaattacagatttagagtaaatcgccactagatttaagcaaaagaagcataaattgcatgtttcaaagagctaatcatcgaacctaacatttaagtctttacagtaattaattagtccaacaattcactaaagctaataaactcagtaccgatttgagttgatatctacaatttttcaactcttaagataaacctcaacaggtcaaaacaaagaaaaagaaaatttagaaattgaattccccatcattattcttagcaaccaaacagaatctaaatgagaaagaagaaatataaaggccaatacaagcaaccccaccaaatagaaaacaatagctctttccgattcgtttgctaaacgacaaaggaggaaatttctcaaacatcgatcgaaataagagaagatcctagacttttttcactaaataatgaaggaaatgactaaccgagaaaagacaaagagatcgatgaagaaaattgcagagatagaaaggggaaagattgcttcgtcggcaagaaaagagattgtctgaaagtttactccgatggagacgtggtctagggactcaccacatccacttccaatgaagaaattgtcgtataatttctgtttaataaacgattcctcctttttataaatttatattttatttttttataaaataaatttttaattttatataaataaaatcaatttttcttgacaaaatataagtaaactgcccaccaaagcaaaactccacaaggtaaaactctcctaactataactaccagtcaatgcacttcaattatataaatcaatgaatataaataaagaggtttcttcacgaaacaaaattaatatatttgttaaattatgttttcagctcttttaaagttataaaataaatcgaaaaaacatacctgttagtagttgagtttgagtgatttctttaagactgggatcgatcagacttcttcgaatagatttaagaaatctttaggctttcgggttgtattattttttttaacacttgttggactatttataatctcaaagtactaacatctttaattttcttcgaatagaattaggatgtctcaaagtactaatatctttaattttcttcgaatagaattaggatgtaaaaaaaaggtgtatcttaatgaattagaattaagttattttttaatattaaattattttatcttttaaataaaaagaattcttttacaatttttttttttttttgacaatgaattcttttacaatttatactttattttttttagatagatttttcattttgtactttatattatataaattaatacgaacaaatatgaatatcattaatattgttaaactttttagtcatataatcctcaaatattcaaatatattttttctatcttttaaatgggataattatatatacaaaaaaaaattatatatttttacgatttttatgtaaacaacacgaaaataactacaacatgaaaagacggtattttctgtaaataaaattataaaaatcataaaactatttaaaattttattaaactgtattttttgtacgtttttcgttatttttgtctgtttataaaataatctttttttaaaatcaattttaattaataatcaaaacaatacaaatatttattatttttttattttttattttaagaaaataagtcaaatatagaatgttttaatgaaataaaatcatatcgttttatccaatcgtattgtttttattcgcgtactaattgttgaagatatgatcagctattaattggaaaaaattgatttgaaagttttctctttttttttttttgaaaaatgtgatctgaatcacattaggacattcccgagaagacttcaacaatcggtgctggaacctcttcaaaccagcataactcattgtctagcctaagggcatgtttagtcaatctatgggtcgcagtgttatctttgcaggacaca

SEQ ID NO: 37543 - DNA, 3523 bp, Cannabis sativa
aagggcaaaaattgaaattttcctattgttattgtggcaataacacatcagccaagtctgcattttgttagtcccataatataaaacttaaaaaaaaaattatatttaaatattgtgaatattataattcaaaaaaaaaaaaaataaaggatgcaatttgataattgtaattgttcaaaattaaaattactaaatcgtggcaataaaaatatatatatatatataaaaaatagtaatggaaaaagtatatatatgactaattcatagatatggaatggagtctttgattatgtcaatgatctaataacactacttgccggcttaatatgcctcaaaattttataattatgtattattgttttaaaaaaccattttaagaaaggatcaagtaataactagccttattattgaataagtttattgatttattaattatgattttataagtagaaaggtttataattaatcatatatatatatcaaacatgcatttatgtattttttaattattaatgaacaagtactttatgatcactaaaaatgactaaacggcacacaaggaatttttcaataataatcactttgaactatcaatatctcactatacaaatcaactaagtaatatgtaattaaatgttatgtaataatagagatatttataaaatatgtaatctaattcacaaagtgcaatatatatatttgtgtggatttaattatattaaatattgattcacatatatatatttaatctaattttatttgcatctatttaattatattttaaaaaaattatatataaataatttaaagtaagaaaaaaatagtaaatgtaaaaaattaatacatatagtataaatatattataaaatttaatatattaaacatatattatatatagagaacataaaataacaaaactaaataatttctaagtacattataaattatcaaaaaagccaactactaaaaatatttaaagaaaatttgttacaaaataataataattaattaattaagtagctaaaatcataacaatctttacaaatacttttcttagaatcatagagactaagtttgtgtgtaaaaaagtatttgcttttttttttattttgttttttttttaacatttgttcaaaatgttatttttgaaaaatatttgtaataatataataaataaattaaaaagccaatatatatatatatgttaatgactgattattataccatacatggtcatatatcaccttcatttaacttggtcttgaccaataaactcaattaataagtaataaataaccctaaaaagtttataaacgtatagtagaagtaaattattcaaacaaagacagattagcttggtgatattgactctttaattactatatttagttacaaataatattatttaattgatccaactatatatatatttcgtacataatttaattatattatatgtaaatatatagaaatgtacgtacgtacgtgcatgtaatattttaatcaaatcaaatggtgatgttgttgtttgttgcatatatgatatgatgggttgtgaagaaattaaatgtggattacaaaattaattacaataataaaaattaaaattgactttttttacattaatataaaaataaaattatttaattaataaataaaaagttgattatatatataattgatcattgttgtaccatgaagactcttgagccggctaatatagaagtatctaataatatggacaaatgaaaactaccaaactaaaacaaacaaactatttatatatataccttattatataataatgtatataaaatatatatataacaccctaaaaagctaaacttaatcaatcattagtgtaagcatataatatcatcaaatagtatacatattatgttacacataaatagtttggtttaattcttttttttgccctttattacacgaaaaccaaatttagataataagaatattcgtaaattccataaatggaggataattattatattaataacaatatttaattctctcaagtggttgacatagtcaaattgattataaagtccaattattatttgtaaattgtaaacataggtatttatgttggttttagtcaatattcatgtacccttttgtattttcgttacatgtataattttaatttttgctatagaaaaaataatctactttttttttcataattaagataatttatattagagttatagctattattccactaatttttgtagagtacaattttggtactaaaaattaaggtttaaactatatgaaacatatttaagaaaaaaaaaaaggttcgcgattattgttggtgtgcgattttttcttggtttgcgaatataagtgttgtccttcgtgacatggtgtgagagtctaggttttattgtttgttttttgtttgtgattttttctagtttgcgattgttgctggtgtgcggttgtttctagtttggctttttttggtgtgcgatcatgtttctagtttgcgattggtcctggtttgattttttctgatttgcgattgtttttatggttgcattgttcctggtttggtgttgttgatagtcggtttcagtcatggcttcatcgtcttctccggtgaaccttagcttggagcgtgtgtcgatcattcatctggaggaggagcaggaagagcctgcagtcagttatgagggtccccttattgacgagactgaggttgttactcgatggagtattgtgggacgtttcttaacagatacgccaattgatttaatggcgatgcagaacctaatggttgtgttttggaagcctggtatgggcatgtatgtgaaggagttaggatgtgacaaatatatttttcaattctatcatgaaattgatattcaaagggtgatggataggagtccttggacgttcctctcatctttgaacgactgaaaccaagagatattcctcgggaggttcctttgcatcatctcgatatatgggtgcaactacatgatattaggtcaggcttcaaaatggagcgggttgttcgggaggctgggaattatattggtagctttattaagtttgatgagaataattttaatggtatttggagagatttttgtgggtttgggttcgtttaaacattgaaaaaccattgaagcgcataatgaaactgcaacaggttggtggcgactggttttgaattaatgtttagtatgaatttgtgtcgactttttgttttatctatagggtgattggacatacagatcatttttgttctcgattgtttattcaaccaaccacatcaatcgttaaaccttatggcacgttcatgaaggcaatgccacgacgaactcagtatgcgatgggggctaaatggcttcggtctagggcacctacctaatgttggtggctgagcccatgcagtcggcgatgagtgcacggccagattttcagggttcgggtggtgctgtcaacctgattgtcacgaatcatgaagagaatcgtgggcttattttttctc

SEQ ID NO: 37544 - DNA, 5344 bp, Cannabis sativa
  modified_base (3903)..(3912): a, c, t, g, unknown or other
ttaacttattaaatctatcaattcggtgactacataactgtggggatattattgttcatttatattgatgagtggtcttaattttgttactaatattttcttatcgatgtagggtttaatcttttatttttatatacgtattttctaatataaattaaaggatcatctataagcgttatcttcctacaagggtcaaagtgtgacatttgaccacccaagttatggatattacatatctgtcacggtctagggctcgtgtaataccctaagattaaggaatcagattagcaaaccctaactagttaaatgtgtattaatgtgaaattatattattatataatttaatatatgtgaattatactaataaatgacatgttaagaccccgttggtgagccaggggtatttttgtaattttgacccgagaagggtaaaactgtaattttgatgtcatatcgtgcgtatggactattattatatagtatatgtattctgtcaaactacaggtattttctaacaagttggcacggtatagtcacaatcgagtattttggaccgaactaggttcggggcttgaaatatatttttaggattttattttggcattatgtggataattgagaaatctaaaatttatttatgttatgtgtgtgtgatgaaatgactaagttacccttgatgtgtgtttatgcttatgttgaccttggagggtattttggtcatttgaccaactaagcacattttcattaaaatgtaatttttttttttttttttgaaattgaaactcattttctggatttatcttgcatcctaaccgacctctctctctctctcctttctcacttttcttcaatttcactaaactttgaacttggtaaatcaagcttggatttttggagttgttgattcttgtggtgttaaagaagttgaggtagttttctcacctccttaattctgagatttaatgttgaatattgtataaatttatggtactcacgatatccttaggttattgttgcttgatggtgtgaatctatgttgtttagtgttttctttgttgttcttagcttgtagatttttgtgttatgcatctagatttgttgtgggaatttcggagtcgaaattgtggtttaattcatgtataaatactctgattttttgggttttttattgtctaaaatgcttggtgttcaagctagtgaaatggaaaatttatgttgattttagctcaagtttaatgcttgttttgatttttgtggagttggtgttagttgcatatttgggtgttgattaaagcttgtttaggtactttaaactctatgttattgatgattgatgctaattaaatatgtatgtgagttgtgcatgcattgttagagttttggtgcattttcgagttactaaaattgtatttctgggttttcaacccaagctctgcagtgcgctcagggagggcgtcgtggcctgctcacgtgggcatattgcatgttgaacttgtattgttcataacttttcgatccggactccgtttggagtgttctgaatatcgttggaaagctcgttccaagctctgtatgtttatttatatttgaatgccaattatatgattttgtgaaagtggatttagggattaaccctatttgtgaatcccaggaattgtgactaggattactgacacttgtttaggaacacccaaggatttgaaatcttcacgtacttgggacattaggtaagacagtagttagtacgtagagttaagagcggtggcgttcatgtttaatattataattgtgattaaatgagaaccaggattagggttattatcctgaagtgagcagttataaggcctagctttattaccctactgattaaataattttgaatactatgccttgctatatatgttgaagtaatgaattatgcattcaaggcataatttggttggactcggtaattaaaattgagatgaaccgttctaaggccttattataaatatacgtgtgagtgtaacacgtgggtctatgccacatagacataagtaggcatgtgagcgtaacacacaagttttcgtcaaatagacaataagtataaggacattaataattatgtgatatatacattattgtagttattgatatttatactttcttgttgggcttggctcacgggtgctctactgtgcaagaaagggtaaatatgttagtaattagccatgagtgtgagagcttggcgatggattgtacatgttcggttcgggccatactagacccagcgaattaggtctactagtggatatattttgtattctcggatttttccgcttaggccgacgtgtaaaataacttgtaatattttgtgaaaagttttatgggatcccgaaacatgttgtctttttggattgattgtaaggtttaaattattacaagttatatttttattctactgtaatcaaagtttaaattttttccgctcttatttttctagtaatcccagtttagcaggattgggttatattactggttgtcgtagcatacctgattattagggtgttacagtttggtatcagagcgccaaggtttttaaacttcttgtagatcggctgaacatgtacaatcatcgtcagagacaagctcgactcgtggtgcagtaagtgttgagagtaaatacttaattgcttatgtgattatttatttaccgctttccatcttaggcagtatttgagcatctagtatatatgtgatatgaaagccatgatttatgtattaattgataaatgtttatttaataaccaataaaatggttgagttagggtttaaggtaataagtccgtaagtatggtattggtgcctgactcgtcgaggttgttgattatagggttatttgtgaaaatagaccctctgcaatcatctagaccacagggcgagcatgtagagcctggggttgaccaaaccaatccaccggcactgtctgtgcctccgcggaatctgggggataatgcggcagttggtaaatctaatccgcctgccgattggcaacagatgtttctagaaatgcaaagtatcatacttcgtcaagaagatgaattgtgtcggttgagacaactggcaccggcaactccttcagaataaatattaccaccagctcctgtgtcagtggtgggtaacccgagatttatactgccgtcaattgttagaaatattttacccggatcttagatttactaacaagtatgctatttaacatcctaaatatgaacttctaaaaagacatgaaataagactaaactgagattatgagcctcacttcaccatctactccattctcttggctccaagagaggagatctatacaaccactcagtcaacaatgttgtatcgcaaacctcttcctttcaaagagttagggaagagggacatgaataagttatgtcgttaccataacgattacagtcatgatactaattagtataatcagttgcgggacgagatagaatttctcattagaaaaaaactgttgttcttcagcggtatgtacgacctgaagctccagctgggggcaatgctccactacagcctatgccagttgcaggtaggttggacattgtcattggaggccctcacttagctgggaattcaaggaaggccttagaaaggtatccaagagcacttcgacatgagctaagagtcgaagtcctggaggtagaagaacgtcctccaaagtctcagcgctacggatgtgaacctatcaccttcgaagaatcaaactcctatcatgttaactatcctaaaattataggttcatggtcctcggatcgccaccttgaaatactatcaagaggtgggataaaagttatttatgaaagtccaaaaaaatctattttgaattgtcaaaatagtaattatttnnnnnnnnnnaaataatttatttttcaaattaacgaaatatggaaaagacaaaatttcaggataaaagacacatcctttgtcttaaccaatagagagggaggcaccacatgcactgtgtccagacacagttattagttttatctttttgggttaattatttaattcaatagataaatatttaaatttaaaaagtagttgagatattctctcaagtggttgagagattcacacaatcagttataagatataaatatctataactgaattcggttatattgtttattaaaataattatatataatttaattaatagatttgaatttaaataattaattgaatgaaatctttattatgtttatttaatataccgtataaatcaaatttgtaagagaattttcatgtaacttttctaaaagtctaaaaagtatttattagtaaacttttttctctatcactaaagaaatagttcttgctcatgtgttgagatttaatcaagaactttatatacattattatcctactagcctacagtagtccttatgtgtggtggaaggtctagaagatcaagatgtgagttttgtcattactgttacaaggatacaacttatgaaaaaaattaaggataccttgataggcatcaagaggtaaatatttttttcatctatttacttttagtttaatatatatacatatggtgatcttgggcatatgatacaatgataatcagaaacaaccttttcgttgcgtacctaatttagtaccataaagtcaatacatatgacaatgtctgctctagtaacttttttcggtgatatttattattagaaatttttttaactttatctatagtattttatttggtttcccatacgttaaactttgtttattttctaattttatatctttttgcaatattcttttgttatataaaagtaaaagttagctttttttcctatatttatgaaaaattctctttacaattcaccaagttttatttgtggtttttttattgtatgtttattttgagagaattgttattggacaccagtagtgtctagcaccttttagaagtggtaccctaaaattggctagcaatatttcttaaaagctattacattaaattagatgggatctgatacttaattgcaccaacaacgatatgacacctagagagtgctatacaccaatggtgtcttttaacacttctctatttttgtacgtatcatctcaaatcaattatttctatatgtagcattgaggatgttagcagcaacactattcaaattacacatttagttacaaaataaaaaccacttcttttctattctatacataattacttgagaagaaaatatcagaattaatatctctctctctctctcgctctctgtaaacacgcacacgaaggagcacacaatcgacccataacccaccacccaca

SEQ ID NO: 37545 - DNA, 3079 bp, Cannabis sativa
acaattacaccaaaaggatccaatctctaataatctgttcaagccccaagtaattccacatttctattcaactcatttgtaaaacacatatcgtgaatgtttttttttcctggccttctgtttatatatagtcatgtctggttaattttccttttcaataaagtattaatatataagcaccctaaccccaaaaggccttttgttgctctacattttctatatatataaaaaaaaaatgtatcatatagctcttgaattttaaattgccatagcctttcattacaattctctgaaagctgacattatcatgttaaaactcgatctccccctccttttctattagcatgcttttaaagatacaaccttatattatggttgacctgttcttaggagtaaacatagtcacctgaaactcacagacaaacacctatactgaaatattgcattttgattatatttgttcatatttatgtaatgtgttataatgtctctctctcttttcctcttatcaatttaattttgttgttcaggccatcctcgcattattcacagagatattaagtcatcaaacatccttctggataacaattatgaagctcaggtatattatttgtaagctttaatgttatgattcaaactgcaactataaatgtgccatggcagataaaacggaagttatatatttgttagtgaagattcttcttttggcatattacttttcttggaattggttagatgttttaggattaattacccttgttactgcatatgttttcttggctctttgataaatacttataagatgacaatgtccttttctaaatcacacgaacaggttgcagattttgggcttgcaaagttagcactggattcaaatacacatgtaacaacacgtgtaatgggaacctttgggtaggtgtccaagatattttcaccaaatgattatattgatattgaacatgcttctatgattattatgttcttattcatttcaagaaattgaccaagcaaattatctattgctggttgcaatttccttttctatgttttaatgaatgttattgtgtgactttccagatatatggctccagagtatgccacaagtggcaagttgactgaaaagtcagatgtttattcttttggtgttgttctattagagctaatcaccggccgcaaacctgtggatgggtctcagccattaggtgatgagagcttagtagaatgggtaagtaacaagttcgtgaacatataataatatcatctcgtgtcatatggacatagttggtattatcacttttgcaaattgtcaatttatagtttctagttttaatttgttacggtgatttctgattaagtgaatctagttttagaagttcacacttctggtactcttgtctcttctagaaaaaccaattgagaaagaattgatagttgttttttgcattcagcacttgatgtgcctttaatgttgttttgatattacacttctgattttactgatttttgcattcaaactctctcaggcccggccactgcttacccaggcacttgataacaataactttgacgagttagtagatccaaggctggggcgaaattacaaggacaccgagatgtttcgcatggttgaggcagctgctgcttgtgtgcgtcattcagctacaaaaagaccacggatgggacaggtacttccattgaatgatccccgtgtataaattgcctactacattgtgtttcttttacatagagagttgatgactcttttcttgtcccgggttcaggtggtgagagccttagattcaatggatgagttctcggacctcagcaatggagttaaaccaggccaaagtgaagtttatgattcagcgcaacaatctgctcaaattcgaatgtttcagaggatggcatttggcagtcaagattacagtactgatttctttgatcgaagtcatagtagctgggggagtagagagcacagagaccgctcacggactcagtctcagagtagctttggtagtagagaaaacagagaccaaactcagagaagctgggccagtagagagcacgatcatgggagccaaagtacgacaatagacataaacagatctggggtatggaaccactgacactagttcaaggcttcactgcacaaactggacagaaatcacttggctgaattgggtttcccagcacaggttttggtctttatttagattttggaactgggatacaacacagttccttatctatactgtaaatcttatgcaagtcggctctatttttattttttatttttattcttttgctaacacgattttttagtttgcaaggatgcctattttgtattctttatataatttttggttcatagttacaccatttctttgtatttataattattcatttaatatattttaccttttttttcccttttaagtgttgtattgttttgtattcttcaccctaaatgaaatgtaaaaaagtgttattgaaaaaaaaaaaaaaaaaaagcatttttcattgtacttttctttttgctgaatggaaagggaaaggactttaaaagagcaaacaaatcattacataaagagttgaaatctggaaaaatagcagaagcaaaagagtgaacttgcttatgtatgaattgggttcagttgagattgttttctggatttattttaaagttattcatgttgttgtttgttagtttggttggttgttgagattagacaatgttggagctttcaagcttaaacttattcctttaatggtggatttgagttcagagatttatagttgctgtttttagatggaatatgttgtttatgtcttaattatgtgttttgaaaagtttggttgaatttaggggtgttcattcaatcaaatccgtactattttgtacatagtgcatctgatcttcactaaatgcggattttattttttggatccaatccaatctaattcaattcgcaaaaatgcagattggattggattggattagatcggttattttgaatcggttactttttaaaatgaaaaaaaatatatattttttaaaataactagcaacaaaataaaa

SEQ ID NO: 37546 - DNA, 4218 bp, Cannabis sativa
ctgtaactgtctttatttcattagataggaggattgggatagttattactcgattcaaatttgtgtgtttcctgttttgatatttgatttgtttcattcattaggatttagacatcaacaatatttttgcaataaaagatattctatgtgtgtacatctctagtatcagagcgttacctaaaccttatacaatgacaagtggcggagcgttacatttaaattttaagtaaaaattcaagtagaaacctaaactttgttcgcttttaaccatgacaaaatatggtaggtccaccgacacgtagacttcagaaacaaagaatatttctataactatatgatgctcaacaccacatgatgtggcattgtaggttttgttgaattaaaatcacgtagaaaagagaccgaggacacatgtccgtgagtgatcatggcccaaatttattagacaacctcacttatggcggaggtaaaccatattaaattcaatcactcctaagatatcaatactctatccaaaaccaccattaactacataatttgttacaacaagcatgctttgactcaagcaatcatggtgcttcaaatggttgagccctacctattaggtcaaaatttgaataggcgaaaaattgcattcagtggtcagactgtgcgatagtgttcattagtggtcgtagcaagaacgattatctcacgggagcattcactcaactcaccaaacgtgaggaggagaatcaaaaggcaagggaaagtgtggacatcaagcctctattaaagaaaaactatcaaaaaggcaagtagaactttgaaattgagcctatggaagaagtgattaaaatccacgatcttggtttgattgctttaataagcacgaccaaatttggttattctcaatgtcaaatgaatcgtaccttataaaacaatctcttacaaggaaacaaatcattatggtatataaggttgatatcattgtgacatgagattatgaagaaataagacaattaagtcatttgctcaatggtttaaagttaaaaaactaagagacctcaaatatttcctaggaatggaagttgcttggtcaaagaaaggaatcgggtctcccaaaaagctagtaaaggataaaggcatgctcgtgtgaaaaatgagtgatagtcatatgtaatacactacaaagttgggaaccgttaaagaggtgctcttgttgaaaaagaacaatatagaagacataattttcacaacgttaaagaggtgacatccaattgaagaatacttggaggttatgtatcgaattctaggtaaccaagaaatgattccaaagtgaggattgtactttaaagagactttaaaatagaactgtaaagatgttttatgatggtagctcaacaagatctttatttgcgaagatcaacttcgggatattgcatacatgcataggagaatcctacacggcgaaacaagaagcaatttgttgtagctggaagctatgactcaaggaatatgtgaaggaatgtgatccaagaccgtctttaagaactattaattgctttagaataacctatgaacatgttgtatgacagtttaaaagctataaatctcaaagaatcaccaatttatcaaaaagaagaaagaagaatctcattggtacatgttccaactacctcccgatcaacaaatatcctcaccaatgctcttccaatgatgaattttaaaaatttaagatctaaactaaatatgattgatatttacaactcgacataaagagaagtgtggaaagatcgaatttacagttacagtaacaattgtaaccgtaaccgtgtcttattctatttcctaagaaggatttggtagttattacctaattctaagctatgtccttgttttgtaatttgagtcatttcatttactatgatttagacatttccttttacattttcgcagtagtccgattgtgtatagctatagactttcagcatagttaatcaataataaaaagaaggtattctctttgattgttcatctctctcactgttggattcaatgtactttaataacttaaatctggtctgtttgtagaagctgccatgtttcactgttaataaaaaagtacataatacacatcaatattttcccgtgaaatcataacataccagcaatcaaagcatcatttaccaagctaaaataggaacagatacaacacagatgtttaactttttatacagtcaacaaaaattccaaactttatcgactattttaaaacttgagcgaaccaaaaggaaagttgtaagataaacaaagaatgtggcagtaacctgaattttggctttgaagtcatgccaacctgattcggcaaagtacacctttctttagaatctcccaaagattcaacggacacatttgtagtacttgcttgcccatttggtgttgactgtttctttagagccatggtttcctctgaggaaacatccaaaattcatatcaatacaacacaagaagcagaaggaaaactcaaacaggtaaaaaatagtattttccaaagtcaaagaaactaaaagtaaaacctattaattgttaacacataacccagaatgtgtgctaatttaaaatgtttaatctgatgaaaaaaagtgaaacatgttatacacacacatggaaggtacatcagtaaagattgtactttacttcaaaattttataatgcaagtttattatataccaaaaaccaagaagggaagtgatgttccaagctaaaagaataaatgacatctacaaattaagcagagaatcaaaaaccagcattcaaatgactgcaagtgaactgaaatgtttgttgcagaggaaatcctaacagttacaatacctgcaatttgctgatcacattcactgatcaatttggcgaatcttgaatcgctttgggccaaggaggcaccaatttcaagtgcagcctttgcagtatgatattcttcaagtttcacgcatgcaatgctgcattaagaagcaatgcctcaagtcaacgattcaaataaacacatttctcagacaataagatttcaacatcaccaatacacatcctttacaagagcgcactgtaacttaacactagctcaagtgattgtgtgggtgagtgtatacatgtggtgcagagttaaaagtcttaagaacaagaataaaaaagcatatgatacacacataatttacaaagtaaaagatcatgatgaagtaattaacttcataaatcaaacttcacaaataagacgaaaattagtccaaacaatgaataatatgtaaatccctttttccccaaattcaaatcttcaccaaacaatgacaaaatttttttaaaaaaacatacagaccctttacgaagataagctttaaccagtgaccggtccagttcaattgccttattagcgtccccaacagcctctgtttgaaaaattcattactcaaaaaaagttaaaaacaaaaaacagtagcaaaaatcctcagcgaaactaataaatactcaaaatacataaatacaaatacacacaaacataaagatatgttttcatatatacatataaaaaaaacgaatctattcgctcatcgcactttctaccaactgataacaacacaaactcagtttaattttcactttgcatgaaaaagataaagagtaccagtgaagttgccgagcttgatattagcttgagcacgctcagcaaaaagatctgcatttcgagggtttaatttgatggattgagtataaagatcaacagcgagttcaaaattgtcgtcaacgaatgcttctctagccatttcggctaggttagtggccattgtaagtgctcagatagtgttctgagaaacctagttaaggggaaagaggaagaagaagaagaaaacggctaattgggtttttgggggttacgaatggagacaatgttgccttgacactgaagataagactataaaatagtttcgatttggagggaatctgactctgtttacctcttcttttagtctccatttgtggcccaactccataatgatttgtgggctttgtatggcctgcttcaggatttctggcccaattacctttttgggctgcaatatgcccatttaccaaaaaaaaataagtcgaggaatacctcttttttgtatctgaaaaatacttttatattatatttcattaaaatatacttacttttttgagtgaattgtctaatataacctcact

SEQ ID NO: 37547 - DNA, 6563 bp, Cannabis sativa
ttaatataatgaataagataactaataattaagacttacaaatttttcatcgactataaatctgttaggatttgcatgtgcgacgatgtcactgatatatttcaatacataaaagtcaaattcttgtcttttaagttgttttgagaaatctgctactaatattttgtacatatgcatgacacttctacaaatataacatataacgtcagtttttatatggagaaaaatgaaaactgaagatataggcccatttctatgagttagtgatcgaagacttataaatttgattattatagaataactgaagttataggtgtccacatggacatcaataacttcggttattacataataattgaagttataggatgtatatatcctatattgcaaactgaaacccttcctcttcttcttcactttcttttcttcttcgtcgacattcttcgctaaaactccaccaacctcttcgctggaccatttctttcccattttttttatcttttttctttttttttttttttcgtttttgttaaactcttattttcctaatgctagcataaaaacctataacaattattttagtttaggtttggaagagttttagagaaataggttttgagggttttgaaacccacaggcgatgacgtcgacggtgatagttttcattgaccattttttgtttgatttcttgttctctacctcacattaaggtatttttcgttcatatatcttgtttttgttggatgatttttttttttttgctttaatcgcatggccgatggttttctttgatttcagttcatcaacgtcaaagtccaactgttgcaaagggacatggctggtcactggttcatcaaggatattctccccaaacaaagaaaatgtttgttaaaatttttcataaatttttgttctttttcataaattatttttttgaaattttcgtgattgtgtaactagtaattttatttgaatttttgtatatgttttagttattttttttttgtgtgtgaaaacaacccacaacaaattacaagtagtggtagggatcattgtcattccaaaaccaagtgctatctaccccaatagccttttgtgctaaattatgtgctactgtatcccttgcctaggggtatgttgaagggagacagtggggagtgaagataacaccttgcgaagagaactcacaattgctccacacacagataaagtagttcaatttgtttggatgtgtataatgagatttaagcagtctgattccacttgatgaatttcaatagtgctctctcgacagcaacatatagcttgtaataatgccaaccttcatctgtttttgggagcattagtccacaacgactcttagccatagcagccacgactttccctaaggagtttagaatcaaagaaccaacacctatttttcattctttgcttgaaatagcgtcatcgacagctcttagcagaatttcttcacctcccttggagagaagtttcccttggcttttggaaagataagaccaaattatatcattaagagggttaaaagagtgaattttggatctgccaaaacactgaggtagtccaaggtactgatcaagatgattagtagatgggatttgcatataatcctagatgagggtttggtaagtaagactggtattgggggaaaaagattgaagatttcttgaaatttactaattcttaagatactctcatacttggccagagcctttttaatggtattgcaggcctcgatgtttgagcaacagaataagatgttatcattagcaaaaaggagatatgaaatttttgaggtaatgcgagcaatcctaagaccaaaagttgtttcagtgattttggattgcttaagaatggaggaaagatccttagagcaaaggagaaagaggtaaggtgaaaggggacccccttggaaaatccctctagatggaatgacattgccaatggcttaagcattgatattaaacttaaaagttgcagaggacaggcaagtcatgattaaggagataaattttgaaggaaaaccaaatttttgcataatcttattcggaaatctccattcaactctctctaaagtcttggccaagtccaatttgacagccatccatccaatcttacccttctttgtacttttgatagagtggtaaacttcttgggccataaggatatcatcataaatgagatgacccatgtggaaggcactttggttagggcctgtttctccagcgtagaattggatttgaggtccagttgttgttctaggaggctgtcgcccctgggtccttccttcactgggaggtgccaatggtggatctgtagttggaggcatgggcatgccacttagatccaccgagatgctcacgtcaagttggccagctgtgatggccagacttgttgtgcctattgtggtgacacgactcaccatatctgcagcattcatggggatcccagttttgactggaacccaagtgtctagatctgcaatctgtggatccagagggagactcaaagatggagatggtgcgataggatttattattgtgttcaccatggcgtttgatcagatcacgatatccacgttcttaatgaaagcaccaaatgtttatcctcaaaagtgatcaaccgacagcggggtcatggagatcttatgctaattaagtttgtgcagaaataagagtaaaaagcaatagacaatgggatttgttatagaggtttgatccccttgtgatagcgggtaaagacctactccccttttagttatattatactaagggaattactatccagatcgctataggtgggatcttctatagtaccctttaagattacaatgtatgaatcagtgtctggcagaactcaagtgttggaaaacctagtgtgttgtgaaacctaggcttgggggtgtgagaggctgaggaagagagagagagagtctgacacttagagagtttgagatttctagcttaggggaggcttaggcaacttaattttttagctagaggttaaggcctttatataggaggcctaaaccctaggtttacaattcaaatcccttgaaaataggatatttagctagatatttacaaaagacaaaagtgcccttagattctagattgttctcatctattctattgggcttttagggtccaattcgcagcgcacttatgatgtccatgttcaggtgtgtcttgtgggacctactgtataatccttggcccaccatggccttgtacttgccaagctggccagccataatggtatccctagcctaaccggccatggggccagccaagggtagctggccagctccctagaacgagctagactatcacttgatccccatttaagtgtcggggtcttcgttggctcagatgctgacttggccttccttttagtgagctttactgccatgtggtacaacatttgtccacgtaagcatgccacatcatgagaaaaaaaattaagatattagagacatttcaagaggcctataaatttgttggaacaaatacagatgaacttggacagttttaaacaaagtttccttaaataaataaagaaatacaattctcatttaacatgcatgatatacacggtcaactttgaataggataaatattaaatcaagaaaaataaaaattaaataaatattgggaagttttgagcctacctgatttcactgaaaatcaacatcacccagaattggtgagcaacttcactagaacaaagaatttgactaagtgatgtaaacatgtcacttaggcatcaaaaaaatttgggactttttttcacttacccaacatccaagtaaacgtcaagatgtcaacttgggcattgagttgtcaatctgggcgttgtgtgctgaatatttatgtgattaatgcgattaaacttgtgtttcaaagctatttcaaaattctatcatgtcacgtctcacatccatatcatatttctaaagatatcaagtctaaaatttgtacccaaaacagttgtgattttcctacagattgctcgactttccatatgtaaataccattatataatataattgatatagaaacacaatttatttattttattaacacaataaatattctgatataattattttcacattaaaatcaatatatcaaatttaatttcaaaaatattaaatataattaattttgtatctttatcaaatatgtcaattaaaaactttacacagattaatgagaattcattccttttcaatatcattatggtagtagttactaggtttctaaatacaagaatttattcatttttaatatcatttctttttaatatcattaatgaaaattcttaaaggatatcaatagtgtcttataatatttaaaatataataatattgttggtgtaagatgctacctcctaatctctattacaatgaggacatttgaggattcaaggtcaggtatgagttttcactaatcatgtacttgaaaattttaacaatatgcatttcgctccactttcagtggtcactttcatgtccaccaaccctaccagtggtttgtgtgtctccaactaagccagccctgctactactgcccctctccaacttgctacatcgaaaactatggcagcgtcttctcagcaaggtggtttgtttatgtccaacaatgtcagtatggagcaataactttctcattggagcagtggtagccctaccctagattcctcaacaatgcctctctaatccactaaatttgtcccagctttcacaatgcttctcaatgccactatgcgcactctgtctagacaacatgtcactacttcctcaagctctatccatttgtctcacttcagtacccctggcaactcaaggaacaacatcactagccattctaagggccctttcttgctgccattcctcttctcgatactagtcaagatcttgtgggtgtgccaactactttctcactgggaatcaacaattctcaaccaacaaagtccacaaaaaagaagacttctgaaggagcaaagggctctttcaaaaggtagtccattttaatcaaaggagtgtctcgtaaagtgattaaacgtgctcgaaccattccacctctagtttctgatgctgaacttccagaggttggtcctgctcaggagcaggccgatctaaggccatgaatattgttatttggaatgcacgaggtcttgggagtgaccgtgcattccataatttctcttagatgaaccttttttgtaactgatattttgtttacttttgaattcaaactcgctactggttctttggatagcgtcacttaagtttcctaacagtttggaagttggtagaataggtcggggagggggtcttttgttattatggacatctaatgtaactttaactctcatgcatcaatctactaatcatttttattgttatgttttttcttcctcttttaatgtaccctcttttcatttgacttatttttatggtgctccaaatacttctgaccgaccccatcgcacacctagaaacttcttaattatattggttagaacattcccttggtctcctagatgatcattggatattttaatgctttcattaataatgatgataagattggtggaaacatggatgaaagtccctctaatgactttcaaaatactatcaccaatttcaatttaactccgcttgatttcactggtgacaagtttacttggaataacaaccaaacaaatgagggaaacattcaagaaagaattgattggtgcatcaccaatgatccatggaaagacctctttcctcaagcctcacttgatcatggtggtttctttggttctggccacagagctctcatccttagtctatttcctcaaacccccaccgctttccttaacaagcccaaacgcttcctttttgaaaatgattggcttcaaaacccgaggtgggacacaaacatcttggatttcttgaaaccctctgtagatcaccaaaacctaattaaccatttattggacatccaagaaaattatactcatagccttcagaattgaagtcacaaacctttattccaattcaaaaaatgtattgatagactctctagagagcttgagttgactcgctctggtcaaccatggaatgaagataggatcaatcagattaaatttgttcagaccaaactggacaatcttttgcaccaagaagaaatttactggaagcaatgctctctggtcaattggcttaaccatggggactggaacacaaagttcttccataaattttcctttaataggaaagttggaaaccaaatcaaagagcttcttaacactcaaggtcaaaccctcttgaatgaatctaatattacgggggaaattgagagatatttctgtgaactttttacaaacttctactccctcacccgagaataacaataagtctttggctaacattagccttatagttagctctcaagacaccctcatgcttcaagactaattcactaaggctgaaattcaaagagcttttttcaactcccccttgataaaagccctgaggaaagatgattttaaca

SEQ ID NO: 37548 - DNA, 2643 bp, Cannabis sativa
  modified_base (2373)..(2376): a, c, t, g, unknown or other
aaaaagtgatttcttaagaaacaagacttcccattcacaatattcactatcattacagaaattagagatttgtcaaaatcattaattttttttaaataaaaataattaaatagacattaccgttggcatactgaagatttcggccgttactacaatacaggcattatcgtaaatacagtccaaaacaaggggcatttcggtaaaatcattattaaattcgaccgttacagagatttaaaacccctctggtccgttacaacctcaaaaccccccaaaagaaaaactctctaaacaaaaataaaaaacctatctttatatatattctctctttgtctagctttacaactccatccatggccgattacaataaaaatcaactcacaacaataatggagtcaaaaaccccacacccacttcagcaaatagccgacacaccaacccacaagcttctcctgaaacaatggctcaaagaagaagagttaatcctcaaccgaatttccctcaaagagactcaaatcgactctgttcgtaaagagatcacaatgctctacgtcttcttcttcctcttccactccatttctctaatcctcctcttcgacgcctcgtctcgcggtggcccggccggtgtactggcttgtaggagatcatggatcccttcactctgctctcttctcttctctctcggtctgatctgggcagttcggtacaagagcgaaacagagtctcatttggagaaattgttggagagagagaaagaggattgtaagcttttgggtaagtgtgttgaggagttgaagaagaagggtattgagtttgatctgttgaaagaggttgatgctcttagaagggctaagagtttgagagttgaagctaaagctgttaagaaatggtctgctaaggattttgttactctgtttttcttttctgtttcttgttttgttttagctatcacaagggttatcttgtgtaattaattagattaatataatatattttattggggttattggattgggtttgataatttatatagatttggattcattggttttgttttgcagaatactctgttctgcttttgtagacatgaatgaagggataagattattattattttttttttgtttggattaatttcttgtattggtaggtactgaaatcttattgaagttcagtgtttttatttgagagtttcaaatttgagtgacattggtatatatataatgtgaaattgaggctaatttgagttgtatgaattccaaaaaggaaaagaaaatcatgattattctgattttgggtgaagctcaagattcacttctttacataatctacagtctcaagtctactaacttgttaagttgatcgattttattggcttaaaaacaacaattattaattgaaatgacgactccaattttgttcatttaaaagaacgacaataatgttgaaaaacgacaacatctttgcatgcggcaattttctcgtgaaacggcaactttcttgaaacacgacatcattcatgaagaactacaattttttttttatttttttttttttataaaaaacgacaacttatccaaaaacatagaaattgataattaattaacctaatcagaaagcaacagatttgattaaataattgtgggaattgagtgtgtgtctattcctaatcctatgtatgttaagacttaagaaatgatctgccactctaaggactctgtttctcttgttttgttctgcccatatgacaagagattagatatattaacttgtgttttgttttgttttgttgtgttctgtaattggtttttattacacaacacaacaaaatacaagttcccaatttgaccataaaatcttattgaagtgaagttccattgaatattttcatgtattgttctttgagggttccttgctaaatgatcttttattgatttatagatagatatgaattattttgcaaagaattatccaaattaagccaaaagtgcaaaataatttcaaaatagccaattttgaattttgttttacattaaagccttattttgataaatctttgtaaaaatgacatcttttatttgtaaaagaaggacctattgtttagactttttgaatgaagtctagaaagagttgtaattggggtttgagagagagatgcatttgtgattaggggtgttaattggattatatttaatggatttgaactccaatctaattatttattggatattaaattttatcatccgatctaatccaattgaattgagtcatctgatctaataaatgtattagattagatcgatattaactattgaatgcattaattgattttctattagattggattatatccatccaatctattttagctannnnttaagttgatttcattaaaatatatacataaatatatatatatataaagtataatttaaaacctaacaacccaacatacatattaaacattaacctaattctcatgatcttataataaaactactaaaaaataaaatttattcaatacgcatttacaattttatttgcgttgaagaagatgagaattaatattttagaactaaatttttttcctttaatgttatgtgttaacaggcccggctgtaacgtccccgcttcaagcctcca

SEQ ID NO: 37549 - DNA, 2570 bp, Cannabis sativa
tttttttttttttttaattaatgctgcagataacaaacggatatattaatgatgtttatgcccagtagcaagagtacattttatttatgctgtatgctgcatgctgcataaaattgtttctagtagagaagtataagatgaataatattaaacaaattctgaatgttgcagcctgacaaatgatacgtcatatgtttgggtagtgttagttaagcaaaaaagtttattatctggatgtcctggctgggagatcttatatgttgcagcattcatgaaatgctaaatagaagttaatgcttcataacttattatccataggttacatatggatatgaatgtgaactatttctgttcactactgaattaatgatataaataaaatataggcgcttagccaatcatagattttgtagatttaggcaatccaaaaccaatatcaaccttcagaaggtgcttaatgtagtcattttacagctgatcttggtggatggacacgagttgttgttgagaagccatttggcagggatttggcatctgccgaggaactcagttctcaaattggagagttgtttgaggaatctcaattgtatcgtattgatcattatttgggaaaggagttagtgcaaaatttggtaatacatctacacaatcatttcatgctcataatagctgtttttcactttgaattctgctcattttcttttcttatgtggttatgcagttggtccttcgttttgcaaaccgtttctttttgcccctttggaaccgtgataacattgacaacgtacaggtgtgactcacttttgttttatcatgtttgaatcttatatttgtgttggttgcaaatgcaaaagtgcctcattgttgtctgttgattctggggtcaatactccctttagtgcatttcaaatcatttatgtgctctctgtggttagctaatgtacatatggaaatttcagccattgaaaattaatgaatattttatttttcaaaatttatttcagatcgtgttcagggaggattttggaactgatggtcgtggtggttattttgatcaatacgggtatgaatattactagatgatggtgatcaaccatgtctattaagaaaaaacttaaatgaacttatggttgtcttgtctaaaagtttgttatcttatgttgaatttatgaaattaattcttgaaaatgttttgtataggttaaagatcaagctattatatgtactttaggttctgctattcaattttgttagcttaccttgttctgtatctgcaatgaaatttgagcaagaggcttacttatatcaactaataacttatttttgtggcagaattatccgcgatattattcaaaatcacttgttgcaggtatatgtttattttaggcttattctaatataccatctatactgtacatcattcattttatcccttctttttatgatttatgaccatgattttgtcctctttctttttcccctcaatacttgtaggttctctgtctggttgccatggagaagcccatttctctcaatcctgagaacattcgagatgagaaagtgaaggtttgtatctatctttcactatgtagtaataaacttgttgctgacatatttattctacctataaaatgtttacaaagttacaattgcaaatcattttcttttcttctttaaatttgtgatatcataaactttttgaatgagaatgaaagaacaactattaataaagtaaaattaaaaaattgagtttgaagcaacaaaaacagtgctgttattggaaatatatacaagttcatccagctctatttgctctgcattcagtagatttcatcttattagacttgctaattaatgtggaacaaactcaggttcttcaatcaatcgatccaattaaggatgaggaagtcattcttggacaatacgatgggtacaaagatgatccaacagttcccgatgactcaaatactccaacttttgcgactgtagttctgcgcattcataatgaaagatgggaaggtattatgccaacttttcaatcacttgaacataactaatctaggacctctcatttggatagatttaactttcatatgctgagaataaattttgatgggctatgcggtggtgttttcgtgttttttttgtaacaatgccacactggcgccatcttacttccaagcttttattaacttgtctatcgatggccttgtttttttttcctcccacaggtgtcccatttatagtaaaggcagggaaagcattaaattcaagaaaagcagaaattcgagttcagttcaaggatgtccctggcgatatattcaaatgtatggcaagatacttgggaaaaaattctcactagtttctatgtttgaggctttgtttgttttagtcacatagaaattagtgaactcttaaataagacatcaagtcaaagaatttccttaatcttttattgcttcttggctcttgcaagtgtcaagttgcgagcatggataaaattccatcaaattctattatgctgaaatatcttatatttcaggtctctatatctccttagctatcgaaaa

SEQ ID NO: 37550 - DNA, 4213 bp, Cannabis sativa
tgcaaatgaggcttatgatttgctagaggagatggccctgaataatcagtagtggccaactgaaaggagtcaatctaaaaaggtggctggtatgcatgaagtagatgccatcactaaattgacagcccaggtagaggccctaacaaaactgatagctctgcaagcaaaacaagcttagattgtctgtcagctatgtagaggtaaacaacatgttaaaataatgattctgttctataacattttattccctttcatttcttccattagtttattctgataacgattatgctttagtaaacatgccataagtatattacatgtgttctttcacctgtttgttaaagctaactaagtagattggcacaacacttacatcttgagaattatagtagtgcaattgtgggagcataatcatagatataaaatctataacttttttaatcacataaaagtgaaacgatactttccttagaggttagctaaatgagtttaaatggtggagtactcattttagtaattatattaatttagtggaatatcatttacaagtactaagtgttttaaggataaaatacattaaagagtaaaacaataaatttctccctactcaatgtaaatcatccataaaggatcattgattatttagattaaaataatgaataatttatagcgtatctatacttggtatagaactatctattgaatcaactgtgcaattttgaatttatagtggaagcaggagaaattaataaaaatagagaatttacttagtaaattctaatactacttgttggagcttgattatatatgcccattgtccttacactacttgagataatattatcttgtagactcaattaattgattttattgatcaattagaattctgagtaagattatgtcttatttatgagtttcactaagcaagtgcaattttgataagaaaagagattttagggtttatttcttaattaatagactacgaaaggtctaattaatgaatatgctaaatagtaattttatttgataattaattataattatcaaaaagacaaaattgacatttataaagttagaatgaaaaattgtaattttgaaaagaaagataaaattttattaaatggcaaaattaaaacctatgagcccacatagtatttcggccataaggtttattctatttaaattctaaacctaaccttaaagttactatataaataaaatatgataattcttattttcataacatgattgactctattagaaaaagaaaaaaaaaatcaatcagagctctttataattcgaattctcctcttcttttagtaatttttgaactttgagtgattgagtgattgctcacatatttcaaagcaatactcaagatagtggaaagattgtgtagtctttttattacttgaaggataattcaggttagatgttaatcatactctgcaacagaaaggatcaagggttagagatctggacagaaagaatcatattatttcgctgccatcaatttaaagttttctatacctttatgtgtttcattcattatttttaagaaattcatatttagggtgttagattatagaattataatccaatatacatggtagtaaatctagatcccagtaaaatatttccaacaattgatgcatagcttcgccagcagaggtcactgcaacatcaattttctcatccttcttcaaattagtcactttagccccttcatttgttcttacagttttttgcaaatcaattaggattggccttgctagtctgagctttttccactcatcccttaattccatttttcctacattgcgccatattgtgaccataaccacaacagttaccacatttgatcgggagccactcatattcaacaaattgatcttgaatttgcccctctcgttctcaaaatagattatgaaaggaggatcattcgaaattttcatttctactaaaactcgggcatatctaatcatagacctctctttggtgaatttatcaaccattataagctttccaattgtactcacaatagcactcaaaaaattgtccctaatattgtaagcctaaattaggtaatcaaatccacaaagagacagatttgactaacattatagcatcaatatcttgcgtcaaaccaggtcccttgtagcttcatcgttaaattttactattttcaaccccatatgcatacgaaccacacgatcgatccctaaatgaccccaaattctcttgacaaacccttcaaaaactacaaatgaggggttttgcccctaggaacatacaaatcactattgtattctgattctaagcttgttctttcacctcttccaggtccaattgagcaactctcttaccctctttcaccataggttctgcatagtgcagcttcagatcaacactaatttgctattttcctcaaaactttgcccatttttcttgagctgagttatgaaatcttccttctcaaaatcttcagcccaattagtcttgatctgcaaaccttcctcttgaattggtcctactcgaatcgatctagaaagaatcgtaaaaagtgaacttttccctattatcaattatctccgtaagtaaatctttcacatgactgcaactaatcttctcctgagtatcattaatctctgaaccatcatcttgaatctggtttgaagtggggctcctcaactcgagtgcgtgttcatattaataaaacacagataataacattttttttgaaaaaatttaatcaagagctttcaagttaagaacagaaaggataacatgtaatttcaagtgagtttttctcattattatcaattatctcagttaaatcataaccataatggctgaagatattttctttccattaggatgtatgttttagctgccaaatttcgcaagaaaattgcacatatataaaaataggacattttctaataggaacttctcagattttggctacgaagaaatatcaatgctgaaaacatttctcagccccctaagcaccttccattgaatagattgtgatataattatagatatttgagttcacaataaatacaactagaagaatgggttaaaaaaaaatgaattactcataagtcatgataaaacttctaatcatgatgcagcaattggtgttctgtaaggatcgtgctgaactagtttgttgtccttctctccaactctctctagaaagctattagaagtctcacctgttttcaggctcccttccattgttccatagttgcagcttccggaacctgcttcctcatctgcaacaccagcatgaggattctcttctttgtcaccgctgcagaaaaaatccaaatcacagatgatgatcataagcattagtcaagatgtttgaaaggaaaggccaaaacattgagcagatgaaaagtgttgaatcagaaagcaaaagtggcgaagcaagcacatggcaatgcattatcaatgatcatcgtttgttcaagttgacggttaagccaaaatagcagatcaaggaacccagtttagggtagagttaggagtctctcgaacacccacagatttacttgtatgagttttgattagagtattatagtggctgattcttttcttgttttatggggttgttcctgttgtgtgtgtaggaactctatcacaagtaataagaacttaccctgagtagataataagcccaacagaaacagcagcaaacgccaagaagtacatccaatcaacctatgtaattacacagaataataccgaagttttataattcataatgttaaagaaggttattaccaaatgaagaaaataaataaggaaccaattttaacagatcacaaaccttctcatggtacgcgaagatgcgaattatgacagcccacatgtccgatgtcagcaaagacaggttaagcatcgtagacccatttgtctgcaacacatacagttttcactaataaataaacagaagaatttttccaaagttgcttagactatatcaattagattgttacagctacttggatagaactaactcccaaaagattagccttagagaggagggtgcccaaatagttataaaccaccaaccaatcccacagttagtcaatgtgggatcctaacatagatcaaccaatgctcaaacaatagtttgaatttattatcaataacgataagcaacatattctttcagaattattgtgttgaaatcaggttt

SEQ ID NO: 37551 - DNA, 4950 bp, Cannabis sativa
tctaattgggatgctgctagaatggcgatatgctctcgtggctttggctactcttccatttcttaccatttctgcaattgcacaggtttatcacgtgtactttatatatatcgaagaaaataaaaataaaattgctatttttgttgttagatgaactatgacagctttatttttcttatcattagtctaattgtaaagtgcttttatcaacttctggaaagaaaaaagagattaaaatagaaaaaagacatgttctgcggtagctctttgttgttgctgttgtttatatgaacaaccatcatttgctttgttgtctctttttcagtcttttttaacattttccaatataaattattgcagaaattatggcttgctggattttctaggggcatccaggaaatgcatcggaaggcatctttggttcttgaggatgctgttagaaacatatacactgttgtagcattctgtgctggtaacaaggtaatggagctctacagactgcagttaaaaaaaatatttacacagagtttcctcaaaggaatggctattggctttgcattcggcttttcacagtttcttctttttgctagtaatgcacttctcctctggtatactgccttttctgtgaaaagacaatatatggatctatctactgctctcaaggagtacatggttttctccttcgcaacatttgcgctggtggagccgtttggactggctccatacatacttaagagacgtaaatctctgatttcagtgtttgaaatcattgatcgagtgcctaaaattgacccagatgataatttagcattgaagccacctaatgtttatggaagcattgaactgaaaaatattgatttttgttatccaactcgcccagaggtgttggtgcttagcaatttcagtctcaaagtcaatggtgggcaaactatagctgtagtaggtgtttcaggatccggaaaaagcactataataaatttgattgagagattttatgatccagttgctggccaggtgttactagatgggagagatttgaaacaatataatttgagatggttacggaatcaccttggtcttgtccagcaggaacccattattttctcaacaaccataagggaaaatatcatttatgcaagacataatgctagtgaagctgagatgaaggaggctgcaagaatagctaatgcccaccatttcatcagtagcttgcctcatggttatgacacacatgtggggatgagaggagtagacttgactcctggacagaaacagagaattgctattgctcgggttgtgcttaagaatgcacccatcttattgttggatgaagcaagctcgtccattgaatctgaatctagccgtgtcgtgcaagaggctcttgatacgctgatcatggggaacaaaacaaccattttgatagctcatagagctgcaatgatgaggcatgtcgacaatattgtagttcttaatggaggtcgaattgtagaagaagggacccgtgatacattgatcgcgaagaatggcctatatgtacaattgacgcaacctcactttgggaagctgcgtcctcatcgacttatttaggattttgtgatccatggaactaatgttcagttttatctgtgctctcctcgttcttattttgaaatggtggaaatgccttaacctgctggctctggtggtgatttcctgaaacggggtagaggaaggagaacaatgacacgtgtagcaatgtttatatggcaggatgagtgggcagaatgcacagaagcggcagcatagttatagtgttgatgaaatgtaggctttagagatagggttttggagtttggttcagtccggggttctctactcagggccggatgcttattcttttggaggcaggcgtcatcggatcggttgtgctgcctcctgtggtatatttgatttgtttttcaatcagaaaatgaggtggatggagctagttatagtttttggtgaggtgtgggtttctttcccttaaaattctagtgaacgtttttgacatggctcctctacagtttggatgaatttattattttgtgtaaaattttcttccatttgtgaaaactgttaaaagttaggaggaaaatagaactcttgtaactttgtaaatatacagataatttaatgcctattcgctattctttttttagaatgtgttgctacaaggcacttccatttattaaattataatatgttggatctgattttatttctaattgtgtactataaaatttcacatcactgttatgttagacacatgtttagtaacattaatcttttcattaattgaaagtaaaatgccctttagtaggggaaaaagatttgttcaaccttcttggccgttttcatacagaagtgacaataattttcatgggtgattttaattattattactcctttgtctgaatttttgcatttgattaatgcaatcataaaaagacgatcagtacaattacatatgttatatacatgaatggtgattaattagcatgaagaataaatgataacacagatggagaattatggtcttaaatatccaacaccctgaatgagtctgcaaccactttgagcttgtttcggactcttttccagcgtctttcattggctccaacaattagtgtgtagtatcttcctgtcaaaataattacaacccaagttatgataatccttcactcctattctaattcacattcaactatgaaactacacaactaaagtttcaacctatcttactctctgaggaaaagaaaaggcctattatgaagtaattcttttgtaatataacagttaaaaaagtctgtggactacactttatagggtatgtttgttaatcaccatttcctatggctatggtagcaaatgaagttgttgcaaagattcgagatgtaagttgaaactcaacggtgtagtagttcttcccgtctatgcttttctgcatgtataaaaatttaggctcagtttgtaaagagttttcatttgaaaatgatgaaaattgataaattacctcctgcatgtcaaatattgtggctacttgactaggtgcagcatatctatgtttcaccaaatcaggaatgatctacttgattcaatggagagaaagaaagctagtcagtgacataactatacttgtttgagaaaaacattgaacaagccatattattaatctttgtttggattttagattttataaaacaaaaattttgtgtaaaaaagatgaaggaaagcattttcttaaaattctagatcatgttttttttttaatgtctcattatatactaaaattctttgaaattccatttttcccccaactagagaattagtaactacttacctcttccattggacccatgtcatggatatctttcttatctgttggtaggaatcttactctaacattctggagctgtagatatctatccttaaaagcagaatcatgtgccatgaagtcaaaatcctgaacaatcaagaaactatagatggttatcatcttatgattgaaaatgtattataaaatccatttaatccaaaattttacccttttgaatttattgtcttaccctccaatccgaagggtaataataagaatacccatctgaagagtcaacaaaagctcgataatttgctggtatctctgcaaaagaataaaccaatgtttagacttttgacaattttttttttataaaaattacatctaagatgtttttaacataagcaagtagactgttttcccttaatgatagctatatcaacaatgatcaataccttgggcaaagagtggacttgcttgaaaaagacttgaggttagtgctcctactcccaacagtagtgtcctcctcttggtatggtctaaatttgattcaagtcataagcatgagaaacattacaaaacccatgaatttaaagcaagcatgcttatgcacctataaatttgccattaataattgcattttgagacaaaacccatttctaacataatgggtgattctagagccgaattctcaagaacctggtctgggtgtatgccatattgggtcttattttaataaacctagaaaatctgcaaggaaattaagttactttcttgttaccttcttcattggaagttgggtcttttgagcatgaaatgttgttacacgaaaataatgaagaattaggccgtggtaactcgttgtaatgggtggaattcagctacaagcagcgtaaaattgatattgataagttttgagaatacatacttgagttgatggtgtggtaatgataaagaaatagggtgaataatctatgtaccttgttatggagaggagtggagacccatgtcaatgagagtgatgaaactgccatggttgagttgatttgatgattacagtaggaatatgaatatatggtggatttcagaattgggaagattggagtttggctttagtgtcagtcatagttggacttggatatgttatgtatgtttttcgttcgaagaaatttggattagataattcaccaagtttgttttcgtgacatgtcttcgagacctctctcacgagataggcacgtgactttcttacaaactaatgtaccaatttgggaacagagagcttgtcaactaaaaaatattcaagatgaaatcaaacataatgaacataaaggcaaactatctatacatgaatctcaaagcttcaaaaatgtgtttttatattacttgaataagtgtagagttacataattttccaattcccctcaaatatgagaatgggctatttataagttgggttttattggcttgtttacaagatgattcgctagtggtccccaagtgacagaggaaggacgtcttgcccttacaggtacaagttgcaggaggtggttttgcgctatgtattgatgtcgggtgtcaggtggtcccaaggggtaggagtagtggctgcaacg

SEQ ID NO: 37552 - DNA, 2268 bp, Cannabis sativa
ctgtaccatcattgcaacaatcatattgtttacaaagcatgcgtatagcacaattaagatggaagtgctttattactaggtctggagaaattttaaatgattaaaatatctggttatgtctcattgtgcattgatattcacagttatgtagcagtgactttcctgcacctattctgttatctcttattggttcctcgttctcatggatatcatattttcaaaaaaattgtcattgctgtgctactgctttactcccaatttccatctccttcattcaagctatcaaattacttgttttgtgttagagcgtgggagcatcacatgctacttattttcttaccggaaaccatgattgctgaatttaatttttttttttttgtgatgtaatgcatttctagttgcatgctgtctatatcggtactttgctttccaaagaataaaagctactctttgactatctgtttcatggtggtaggcctctggcaatgttactattgaaacggtacacaaaattggaagcacaggggtgacctacatttccaggtaatgctgatactcttttaaactttactttgttgacatgccaaaatgaaaagagggttggggggtggggggaagggaaggagggattgtggaccagggtggagaattgtttggctaggttaaacagaaacccttattaattataataaatgtcaaaatagtgatggtgctttgtgaaattgaatgctcaacataagtgagagttagtgtgattgaagaacagatagattttttaatgcattaatatttgttattcttgcaagtatactttattcaaaataagtaattagtaagcaattaaaagctttacagtattaaagctagtttcttatggtctgcactgcagtggtgcattgacacattctgtgaaagctcttgacatttccctcaagattgacacagaattggcacttaaagttgggagacgcaccaaaagggcatgatctttcttgatgtaatcgtgtcctcatattagcggtttataggtcaaataataatgttgttcatgttctgagaacactaggatcacaatgacgtggacagacagtttattctcgaaaggaattcgtcaataatgtaaaacaaaagctttatattgcaaaggaaaggaaatgtctattaagaaatgaggacatgacagacccttttggtagttgataagtgggatacaggtacgccataatatcctcactagtcactacacgtggcttcgttacctcttagaactagaagaggcagctttgtcttttgaaatgtcggtttgattttatttgttgtgttcagttttcgtattatatagagctttaatttttcaaaagagcttttatagactatgttattcctagataaagtagaattccccacagaaagtttgtaccgatagaatttttttttttgaaaaaaaagaatagatagtaaaaaaaaaaagaaaaaaagaaaaatagagtgatggttttgttttcattgtaaaattgcacattacgtttttatttggtgttgcatgattgtctcaaatctggggaaggtagctctactaaaatcaagaaataacttgatctgattgggattttaattttttttaaaaaaatagtcactagacttgaaaactataattaaagatatatattttcatatgtgggggtatcgaattaacacaattttcattttggttctaaatagagggtggtttgtgttgctgtgttatatttttgttcgtgttatttgtgttgacatgtttaattggtcaactttaacctgtctatattgtgtcaaaaatttcaatcctaacctgacccattgtattctggtgttgacatgttgtgttcgtgtgtcgatagttcttaaattacaatacatgttgatcaacatgattagtatttcatatttaatttttatatatatttttaattatattattttttttaactcatttaaataatatactatctaaaaatatatcaagtagtaaacaaataatattgattaattaaaataatttattataaattatcaatacaataaataaaagtataaattatctattatatttttataagcaatttttattttgggatattggctgctaaaccatctgaactttacgattggtaacacttaaccacaaaaatcaattttttgatggctaaactacccaaatcctacttccgttttgctctgcacacttctgtccaaaaattatagttaaatgtcacggtatactgtcca

SEQ ID NO: 37553 - DNA, 1868 bp, Cannabis sativa
ttttggttacgatttaagttactctatttactgtatgtgggttgttgtgtgaatttttttgaagtgtaaaaatgaaaaagatcatttttttcatataagaagtgccaacaattggttggggcctaatacaagcatgatttagtaactatcttgtaaaacttatatatatttttagccatataaatgagttgtggtaactataatatttaactccatatgtaattaacagactaagtaacactgtggagctagaactagcagtagaaacaacagcagagttcttgaacaaagcagtcaagccaatccttttggctggaccgaaactccgatcagcaaaagctaccgaggcattccacgagctttctaatgcgagtggttattcggtggctatcatgcctacagcaaaagggcttgtactagagaatcaccctcgcttcatcggtacatactggggcacaataagcactccctattgcaatgagactgttgaactggccgacgcttaccttatcgccggcccagtattcaacgattatatcaatgtagggcactcgctcttacttaaagaagagcgagccataattgttcaaccccatagtgttagaatcggaagaggtcctacctttcgattcgttgagatgaaagacttcttagtggcattagcaaagagaataaaacacaatacaacatctcatgagaattatgagagaatgtatatggcagatgatggaggtcatcctctaataatgagatcttcttggtcaagtggtgatgagatcatgatgaagaaggaggcgttgagagttaatgtgttgtatgggcatttggagaaaatgttgtctagtaacacaactatgattgctgacactggtgtctcatggtttagttgccaaaagctcaaattgccacaaggatgtgggtaagtagatcgtttctaatattattattagtgtctttgtgtgttaaaatttattagtaatattctttatcaaacttttatacatatttattcttacactttatatatgcaaacaataaatattctaacaaattggaaaattttgggggtgcacaaatgttttcgatatgcagatagttgttgtcttaattttttttatatgaaagtgtagcaaattctagcaaaattcaaaataattgaacgcgctagaaataaggtttaaatatatttttgcaatcgtactttattttttttattttaaaatatttgtgaattagattgtttgaacactactttaatttctcaaatatttatatgtcttaaataattacaatatatactatttttcaaaaatttaaaattataggcatatgcgcatataaaacatacaaagaagcatgaatcgctacacctattttttatggatgcgcactgtagaaacatcctatatcatttacactacatttggatgattatatttaatggtgtaggtttgaagttcaaatgcattatggatcaatcggttggtcagttggagctagtcttgggtatgcacaggcagcatcaccaaacaaccgagtcattgcttgcattggagatggcagttttcaggtcttatatataattaataattattaattaatttacattttaattaatttacatcttaattaatttattatataattatatagatgggtgcacaagaggtgtcaacaatgcttcgttgtggacaaaatagtataatatttctaattaacaatggaggctacaccatagaagaagtcatacatgaaggatcctacaatgttattaagaattggaactacactgctttagttgatgcaattaataatggtgaacacaaatgttggaccactaaggtacatattaattaagaaaataaaaa

SEQ ID NO: 37554 - DNA, 2518 bp, Cannabis sativa
agtcttgaggggaatatcatcattcgatttatcttagttttagctacgacattaaatgcttaacaaatggatttccaagatgtggatctattttgtgttttggaagatgaaattgggtcgttaatcctggcttcatgctgatcattcctcgaaggtataaatacctcttaatgccaacttttaccacttttactcaaacttccaaattttctcgtttcaaacccaaaatctttgagagcaaaaatcataattaaaactctggagaaagacattgattatttcatccactttcttctttgaattagggcacaggaattttcagacgctccaccactagtgattacgattccatcaccagaagaaactacgaatctggatatcaattttgagatcgattcccttatcaaccacgccaattccattacaaaaaggcttgatcgtcttgaagatcctcctattaagggaatttttctacgactgtccttcgacgttagtgtgtgctctcccaggccatatctctactcaagtccagaattatcacctaattcaccaccaggtaaattttcttctttttgatttcgttgactgtgttgcatgttcaatatataggaattatgtgtaatttacttgatgtttgagaattatgactttaggcttgcgactggaatattattattgacagaagtagaacattttggatactattttgaatagctttaggaaccagtaagagtcaagtctgttgttttattgatatgggaaaagtttatttcgctgcaaaaatgttagcaaattttttactcatttgtccagagcccttatgattctggatagtggatgagctttcttctctttcacttcttgttgttcgcgattcactatctggaacaattgttcttttgagaatattgttatgaatctggtgggaacctctccaagtagttatgggggaggatttccatgtgcctttactatcatcgttggtttgggtagctaactgcttgatattttttcagaatctgtcatgcctaagcgagttcagaggaagtagaagtgggagaagtagatgatgtgatggaacaagtcactgctccaaagttggtattgaattcatttccatgggagatggatcaatatactactaagttctgaacttatggaaacttctgaaagtatgagacataaagagggcttgaaagtgttccaagtctattttgaaatagactgtctttcttaagagagaagcctagccaaagtgtgttgagggaggcttctgtatatggagttgggaacatgtggaaatgggtgcctatcttcttttgaggtgctacttcgtggaattctacacagtagccagagtggctccataccagttcattccacaagtgtatcatctgctttccggatggtacgtcttgtgcttccacaagaagaaatcagttcctactctagaggagattttgtacttctacaaaatcaaagcctagaatatgaggaaccacaaggagaaggtcagcttttataggttggaaaggcatttgaaagacttggtatgccccattagtgtcatgaagtacacatacgacatccaagactactgattttacacctttgactttccactacagagagttccaactcttagtctcgattttaatagcacaagtaagtgtagctatttacttgaatttttctgatttctcttcattctcttctcactttgagtattgaacttattttgcctttttattctctccatactctatctctcaattgcctttaactccaaagttggaggcaaggcaaactttctacaagtctttaacagtaaaagagttacaggttgggaagcttgtaaccaccaagaatctctaagaggctggtttgttagctcctcattagagcatcgatactctgactgtgaaggatccagtaagggatcttcaccatggagatgttgatgaagtgaaggaagtcattgcagttatcaccattgaagaggccttgaaggtcgttaaagctgattagaggtggttggggactggtatcgtcaatttccaaaaaagttaagcgaggatgaagagatcgccattcgttttaaagacagtgttcgaaacgaaggtattcctagagcaagtacttcctgaagtggtaagacattgttccgtctagttagggctctgtctttggcgaacttagatcgtttcgaccaagtcaggtttaacccttgcttcttgcacttaaattgtcatagatatcatatcaatgattatatgaatagagtagacgacattgttaggagtccaaaccattttattccactaacacatgatgtctgggtagataactttagcaagatgttgtattagggttcttccaatatggaagtttcttagacagagaagatattgcccagttttttagagagaactccaaatatgctaaaataaatggtttgaatctcactcgtgtactgctttcagtcatattgttttgatgcttccatgcttattgttcg

SEQ ID NO: 37555 - DNA, 3648 bp, Cannabis sativa
ggtgtaaggacccaatggaggcttgaagcggggatgttacacttaacttcttagcaacaaaatttgaaagcttctattgagaattataacattattattgctaactaacgacgacagtttttgttttcattttctgtatcataaagtttacagtacaacatgttattttggtaacaaaaggatagacaccatcaaatggtgcatctacaaaattatgtacatacttgtggattcttttccaagtactagaggtaatttgaagcttgccaaactgattggaacttcacatggtagagaaaaacattgatttcactacataacctcacttggatagtgacagaagtttttaagtttaccctactgatccttcaagcttcaggctcatcagttggtttacctcagcaccgaactcgtcaggaagttcgttgaagacatcacggcaaaaaccagaaatcatggcagccatggctttttcatagtcaattcccctctgttgaaagtaaaatagctggtcttcaccaattttagaggtactggcttcgtgttcaatgcgagctgtgggattctttacctgttgaacaaatattattaattcatcaactcatatccaataaggatttaacaagagattaggaaggtaaaatgagaatatacaaagccctgcagatcattaagtcactgactaatccaaacataatcatgagtttttttaagccttccttttttgcagttattgataagataccccaacttgagctggattcaagtggctatttcaaacctacatggtcgaaaagagctcctcaagttcatacttacaataggaggcaacatacgtcattttaatgtggactgccagtaattacttttctatttcacaattcaaactcaactcaatatgcatttacaacatcaaccagagtcatgctatctaaaggatgataagcaataatttgttacactccaagataatagaatatggtattagagaataaataataaaaggtatatgagtctttgaatgagagggtagtcattgagtgagaaatcggtactgtataatataggcgggtaaggaaaaaggaagatatgcaagaattaagtcttgctctgcatcacagatatattcaatatcactcttctatacttctctaccatttggcttactgttctattgttattgagattaattgagcgcaagaggttaatcggtaattatcataatcatctaatagttaagaatgtacctcaatgtaggggtaagtgttggcagccgcattatcaccaataagcattgaatcacactgtgaagagtttcgagcattctctgcccctgaaagcaccttaacaaggcccctgtaacaatttcttgacttgccagctgatatacccttagaaataatcctacttctcgtgttcttccctttgtgaatcatcttcgtccctgtgtctgcctgctgataattgttagtcaaagccactgaatagaattcaccaacagtatcatctccctctaatataacactcgggtacttccaagtaatagcagaccctgtctccacttgtgtccaagatatctttgaacgcgccccagcacaaaggcctcgcttcgtaacaaagttataaattcctccccttccttcctcatccccagcataccaattctgcacagtggagtacttaatctctgctccttcagcacaatataactccaccacagcagcatgaagctggttcttgtcataagagggagccgtacagccctctaaatactccacaaaactcctatcctcagcaactatcaatgttctctcaaactgcccagtttccatagcatttatccgaaaataagtggaaatttgcattggacactttgtatccttcggtatataacaaaacgacccatcactgaaaactgctgaattcagagctgcatagtagttatcctccacaggcactacttttcctagatacttcctaatcaaatcagggtactctttaatggcctcagaaatggaacaaaagataacacccgcagcctccaaagtcttcctatgggtagtggcaatcgacacactgtcaagaacagcatcaaccgcaacattggccaatcgattttgctcattcagaggcactcctagtctatcaaagtacctaataagttcagggtcagcctcatctaagctattcaaagtgggtttcttcgtaggagccgaataataacaaaggtcttggaaattaataggtgggtattggttatccgaccatttaggttctttcatcttcaaaaacctatcataagcattcaatctaaactcaagcatccaatcaggttcatctttcagtgtagatattaatctaattgtttccttcgataaccctttgggaattgaaaacgaatctatatctacactaaaaccaaatttcttatcgtaatcacggttacgaagaatttcttggattttttcatcggaggtagtagaagaagttgagagcttaccagaagttgtatcaggattgatggttttctgttcgtaatcaacatcggctcgaacccttaggaccctttttgaggaagaggaagctttcagattgagaagcttcaaattatcgagttttggatgaaacccctttgggaatttaggggattcggaagtgggttggggagagaagcttgaaataccgttagccaagagagaagccatggatgagggttggttcaaagagaaggaaactcttttgtttgtttgttttgtactatttttttccttataattttggtgggttgaaagaaagtgaagttatttttgtggccacatattttgataggtatcttgtgcacaacacgttccatacaaatctttctgggttgatgctgaccgttggattgagtcgattagatttgaagcatttagtttatatgttttaaaactctctccctcaaatcttgtaattttcatttctcatatttattgactttggtttttctgaattaaatatctctttttcctcttttcttttataatttgttttgattcatataatattctttattggagtgattttattttgaaaaaaaatacaaaattcattgagaaaaatttgctgttacagaagaactcaaaaattgaggataagaatttgtccaaacacaatctcctaaacaagtaacagagcttatcagtgtatggataacaccattctttgatcgtgaaatggcactacaagaactaccaccaacatcaactaataaagaatatatatttaataaaatagacagaaaactaaaattaataaaaagcttattaatccaaccaattgtcacgatagaatcactattaataatagtgatattgaaaccaaattgatgtgcaagagtcaagtccaaacgaatgacaagcagctctgccacattagcagagaaatcacctaacacacatgataaccacaccaaccaaaccacaccctttgcatctcgtataactccccccaatccaacaaagcccctccccaaaattaccgaagccgtcgctagagcaaaggatttagtaggaggtggtatccatagagtagttcggtttacaactgggttcacaaggcccaaacccaaatgaaggcctcgccgatcaggcccggccctgggcatag

SEQ ID NO: 37556 - DNA, 2608 bp, Cannabis sativa
  modified_base (1943)..(1948): a, c, t, g, unknown or other
tggtagcttgtggagcatctagacctgttgtgtgtttgatggttgtagtgttttggaattctgtcaggaagtttttcgcaagaacaggtatggcatgcagcgggtccgtacgttgatgcttgatcgccttattcatgttgtgccaaataaaccaagaaatgcaaagaaaaaggtctacatctcttttgttcctgctagtataaatattataagcaatttcatgaaaagaaacataattaggaaaagaaaaataaggataaaaaatactacttttccagattcttcgaattctcttgcaaatgattaaagaatgagagatagattcttcttctctattgcaacaatcacaaataagggtgtaggtaatctttcttaaaaagaggttttgtttagttggaaaggtagcagtggaggctctgtacgtgaagttttttagtttagaggggaaattaaaatgccaaaaggctttccaccaatgggaaggggaagacggggtgggatatcagttggggaggtattggagtaacttaagtaataccccgatttggccgaataagctccagataagcttccagataagcttgtcttccatgggctggagagagggatggggattgaaaggatgttattgacaatgtgaagggggtaagattgacttaggtgagaaaagtcccatgtcatgttcttagtaacgaaggaccaatattaatttctcaaaatttctctagatgccataatacctcgggccccaagagacattgaactatgttccttcagagatcaaaaggtgaaagagtttttgctatacatagacaaaaacgtacgacacaaaagagccccgtctttcgaggccaacttccacccaaaattacataacaaagccatattaaagtcttcaaagtctaccattcaaataccttggagttccaatttgtgccaagagaatatcagcaaatgaatgctcaattctagttgagaagatgacttcaagaataaaagtgtggagctccaggaatctgtcttttgcttgaagaactgtgttgattaatttagttctattgacaattcatgcttattggagtcaaatccttatccttccaaagaaagtaataaaggagattgagagtatatgtagaagttttctttggacaggaaaaagcaacatgaatgggcctggaaacatcacttggaaaagtctatgcaaatcaaaaaaagttggagaaattggttttcaggatatagcaaagtggaatcaagctgctgtagcaaaacatgtctaggaaattgccaccaagaaggataatctttgggtgaagtgggttcataatgtgtacattgatcaagaggattggtgggggtacaaagcccctgcccacagtagttggtattggagcagaattgttaatacaaaagaagtagtgaagcttatcatggccccagatcagttcactgcctcagaattcaaaattgcttctctgtaaaagctgttaaaccagaagaagaggaatttccatgttagcaaacaagtatggaataggttaaatgtcccaaaacacagctttgtgctttagattgcagggcagaataagatgagaacaggagacaggctacaaatgtaatcaccgctttactaattggggttagtaaaggcaattagcactaatttctgacaattttacaattatttatgaaattaattatttgtggaccttgatattagaaatgagcattagagttataatttctcaatttcggagattttattaaactctaggggtattatttgtcttatatgtgaaatatgcaatttttgtaatttttgctcaccgacaacagaaaaagcgatggatagctagtttgatcacaggggtaagtttagaaccttatttcttagtgggacatatttttgagaaaataaaatatcgaggttgagcggggttatnnnnnntgaccattttacccctaattttgagaaatacttaggttataacttggagggcatttaagtcattttcttaactgaatattgaggtggctgcctaggttagtgacacctagcaagttaatttcagcaaaggaaatttattttccctaacctatattcaattagagaaattagaagaaataaggaaaagtcaaaaattgtaggaaaccctctccttcccttctctctcttcgaaccaggcaagaataagggagtttgctgctgaactttggtgatttcagcaagggattcaaggaggtttaatttaaggtaaccctagttattttctagttgttttttctcaagatttttattagtttcaagtagcgattttacaaattggtggctgttagggttacgttaagttgtagttcgaattctagggttcatttgagttgattatagctttttgcagctggttttggtgtatgggaatgaatttatgcaagtttgagctttgatttcaaagctttgatctctaatggcatgttgagcttcagtgagtttttctgtgaaatattgtctatgcattgtttaggtactctggaaggtttggttgcatttggtggagaattgagcaagaaatggaaagtttggggtgaacttgtgcaaaccggctagccg

SEQ ID NO: 37557 - DNA, 1958 bp, Cannabis sativa
aacacgcggtgcatccagactcattttattttattatttttagggatttttatttatttatttattattttctcatctggggaagatttggtttttatgttccaaaattgttggtatgggtggatttgagtttttggccaattgtgtactcatcttttttcgtcttcttgtagaacaagcaagcttcggttcaacaattcacctcttccttctcataaataattaacattaataaatacttagtttcctaagaattacattaaaatacacaaacgttcaaactggcttcttctataaagatgatcaccaccgccattgactctaaattcatataatctatttccattttaattcttttctctctctaaaatctttatggtatggatttattacctggagattggttcaatttcagctatctggtttttgcattttgttctgccctctttcttggtgccctcaaaggtttcttttttcttcacaattgatttatttttgttttttttgggttatctgggtcagctggattttcacagttctcaaaagggttattgctgaaacttcatgaaaggtgaaaaaaaaataaaggttggttcttgagaatttcatggagctttgttgacttcttttgcaggtttacttgtgggacctattgttggtttgatattgataacagggaatgttggggtcattcttggtttgttcccagcccatgttgtgtggacagtttacaccttagtaaagtaactacctttaaataccttaattctcttttgaagatattttcagccatattagatatttttctatctgggtttttgatctaacttagttatggcaatttcagtattaacagacttgatacaccacttaaagttgcaatcttgttgggtttgccagccttatttggtctttggctgggtttgagcatagctgggagtgttcttgtgggacttggctatggatttttcacaccgtgggtttcaacttttgaagccttcagacatgaaaatgaaacaaagaaatttgtacactttgtagtggtaagtgcaccctttgaatttttggtcattttagttgaattccctgctctatttagatctctctgattatgattttctactttcttcctgttacaacttaggatggaacatgggaaaccatcaaaggaagctgcacagtagttcgagattttgctgacttgtgctaccattcttacccaatttacctaaaagaattacgtgaatcccctgattcaaatgaggttcaaactcttaggtaagcatgaaactaataaagatgaatcctaactaacataacaattctctttttgttttgttatgatttaagataaacaaaaggtacctttatattgagtaataatgatataaaagtcatgttgggccctcagttcttttatttttctttgttgtatggaaaggtagccattttgggctgggaccagcatatatggaatggggggcagatatgtttttaggaactggtttcatacacacacgtgtgtctttgattattaatactacattttatttatccttgatttccagtttaagctatatgtcatgagaatgtgtgagctagtgagctactgaatgttcatgctttgctcaatttggctctatgtaggttcattcatgtgcctgcttgcatcatagctgggttgatggggttagtagttgaggttccgttgtatactgcaattgctattgtaaagagtccatacatgttgttcaaaggatggtttaggcttatacatgatctcattagccgagaaggaccgtttcttgaaacagcatgcataccaattgccggtttgacaatcttggtgtggccgattgttgttgttggaagcgtcatattggctgttttctctagcatttttgttggactgcatgcatcggtcatagtctatcaggtttggatcatactttcatctt

SEQ ID NO: 37558 - DNA, 3275 bp, Cannabis sativa
  modified_base (26)..(60): a, c, t, g, unknown or other
ataaaatgatttctgatctttattannnnnnnnnnnnnnnnnnnnnnnnnnnnnnnnnnnttagggcacaaaactcaacattacattcatttggtttcccaaaagaaataaagaataaaaagagcaactagttactctcctaaattacatcatttacgtgtggaaatcccataaaaatggggatttaattaaaaaataaaggaataaagtatcttcaaggctctgtcgcatttaccctgggtggcatatgcgaagtggctgtgaaatcgatgcgggtctgatggtatcatttaccctacgcgacagttgtactttattctttaaataagcagtatctgatgagtaattcaatctaggtagcgtactaagggaggtatatgtcatttaggcccaaaaatgatccacgtgtcacctagagaagtgtcatgtcaccctgtgcagattttaggataatatttacccctactctacgtgaaaacttttcggttggaatgtggacttgctcaaaccacgaactaggtaaataaggttacacatgtgcgaattgggagatgggtgaatagaaacttctttttagatctctgtgatgtcctttcatatcttcgaggtattaaatgcttctcttcgaaactcatatttggggatttgtattgacggttgtacaccgtaaagcatgttgattgtacatcttttttgggggaaaacctgaatctccaaatactgaataacaaaaatgcccctctagaaacctataaaaggtgccatagaattcatttatactcttttaggcattttgaaactcaaaaacattagagtcaaaatctcaattttcaaactttcttcaaagctttaaggattcacaagttacttctagattcgactcacagttttgcttgaatttttttccaggcaatcttcaacattgagtaagtctttgagcttttttatgaaattcctttaaattattacattttatcttgatattgtctctgtgaaaaatttggtctcatagcttgaatgttcttcatttctagattttagaatttagattttgatgctgaatgtatgcgcatggattataatcgttagattcttgttctcatgttttctctttggaaaaccttcaaataaaaatttgcgcagtacttctggggtgttctgggttcatactgttcttaaatatcttcaaattgggaattcatcattaggatgaaatctccttcttttgatcttaaaatttatctagtcgtagtgttgaagctatttttcttttaaaaaatttcacaccactgctcggtctttacctccctttccatttttcgtaaatgaattggggtgatttttggggaggtaagaatcaagtgggcaacgatctacttcaattactttacaaagagcaacctagactccatgcaacctcttcgtcattgactgagagttctatgtctaacttcggtgaatgggaagtgacgagtcaaagccttctaaaccttccatgcaacactactactaccaaaatcatattggcgatttctctgggaattaaatcgaggacttaggcaatatttgcctggttcttggacgtatagggttcaagcaagcttcctacacactttacctaagggtgattcagagccaccaaagagacttgccatggaagcgaaaagcagtcagcgtcgatcattacccttcatctaggaaccttcttaggaagaagaaagtggcatggactaaatagacgtactaaaaaatttgccctgacaattatggatttggtcgataatggcgttagtttatgctttgtatgttgaagggtcagacgaggaggacgttgtgtacgtcggtgatgctgaggtgcaagaaatgggtcccgcagacgccactgaagctccaaaaattgacgattgacctccagagtcaatttcacttttacaacatcattaacgattaaaaatagcctaaatatattttttttcatctttttggattattttatttttattttaataatacctcattccctataataggagagttgcacaagatcatttttgaagttcaagaagttcaaaaaagtaggcataagattcataagattagagcatctctctctagaaattagagcctccagacttagccatttttctgtaatccatctcgtgaaaaataaagtttaaagtagatatagctccattactatcgcgatatagggactgaagtactataaatccttgcgtctctcatatatatgcttaacttataatttattctcgtcaatctagcgtgcgagtgtggcccagagatttgtatccagatttctgcgtcaatagataccataggaccgaggaggtgcgatgagcagcaaatgagaattagtgcacgtggacaaatcgaaataagaaagaagaaggaattaggcattccttcctgcctataaataggagacccctcatttaaaaaaggggacagattcttgaccatgccagactaaccgaaactctgtacacaagtaagagaaccatacccggttaagagaattgagaggaaaatcgtgtaaatcgattgagaatgtaattcgactagatcgaacctagtataaagaatttaaagtcttaataataaattattgttgaaccaatttttggcatcaacacttataaatttatcattattccttttctttcacacacatatatatatatatatatttatatatatatatgtatgtatatatattgaaagaatattcctatttgctatcttaaagtgtccacaaccaaatgagatagcaccttaagggtaggtagatattttttatattaattattaaattatattaataaattacattaatttaaccaaaaaagatatattaaattatagagaaaatactattttagttcatgtattttgcaaaagttatcgattggatcctctattttgttaagcgacaaattgaactatgtattttctaaaatgatacaaaatagtaccatgagcatatttttgtcaaaataaaatttaataataatctaatttagaggtgttacgacaagactgattatattttctgtattttttcatgctagactttatcttcaagttggttattttaaaaaaaaaaatattgtcaaaaattgggctcattttgtaccattttaaaaaaaaatagttatcaatttattatttaacacaacaaagagttcaattaatactttttacaaaacataaagttcaaaatagtagtaatattagtgattgtgtggcacatatat

SEQ ID NO: 37559 - DNA, 3309 bp, Cannabis sativa
  modified_base (3264)..(3280): a, c, t, g, unknown or other
aaaaaaaaaaaaaaaacaatgtaaaaaattataatctaaaaacgataccaactttaaaaactaatttcattaatattaaaataaactaattatttcattaaaagaatctgaaataaaaactaattttatcaacaacataatgaaaaaaatacaatgcaaaaaattataatttaaaaacgataccaactttaaaaactagcatcaaacatataaatttatatcagtacctaagaaccaaacttctaacgtcattctttattttggcattcaatcttttatttgctttctcaaaaattaaaattgatttaagcatacaaaatggggtaaagataacaaagagaatcagaaactaaaaacagtttcatcatcaacataatgaagagaaaaacataatctaaaaactataccaactataaaaaccagttaattccaacatataaatttatatgaatacctaatactcttatttctaacggcatactctgtttaggcatttatgcttgctcaaaaatgagagttcctttaagcattttaataagtttcattaaaaaaatcacaatgcaaaatctataatctaaaaataataccaactataaaaatcattttcgaacatataaattttatatgattgcataataacctaataacttcacaacaaacagtacatatacttcatggctatttcatttatgccagaaataatcacattaaacgaaaccactagaaaaaaaaaatcaaaccacaaattgaaatagaaaataagaatcaaagaaaattaaggagacaaaaacacaatcaaaactataaaagaataacaaaaataatcaaaagagggagagaaatcatagataaaaataaacaaaaatggaggtaggtaaaacattacactctaatattcaaagaataccccaagcaaatacaaaatccacaaagccacaaacccttaaagacaatgcacacacacacagtttttgcttcggcagtggcagtattagtataccatctatggttcagccaaaatgataaaatttataactcaaatgaagttaaatttcaacatttacagtatcaaacaatatggcttgtgaaaaatcgaatatcttgtgtaatgccaatgaatattaaaagtagtgatagagaatggtttgaaaatttagcatagttgtgtattttatttttgctgtgtatagataattcggccttcctatttgaaggagcatacaagttgtacaaaatcaagtttagtaatgaacttctcaactgattcatcaaaaaaaaaatgtaccaccatcaacacaatatcaaccaaacaaaatcaacaataagtaaataatagataaataaatgggaatataaaaagataataagacactcacctcaaaatgctattgataatcacacacttaagcaacacacaacccaaaagaaaggagctgccgacgatgaccactgaacaaagcaagaagctcctattactgctgaaaagagaagaagaagaaaaaaaaaaaagaacaaaaggcaacccacaaacacaatatagaagaagaaaaataataataagaagaaagaggatccaaaaataatatagtagaagaaaaagatacagagatagaaatcctaaaatacaaatgcagagtagacaaaatcatttaccacactgggaaggaaaatgtagtggcagatgcactgagtcgaagaggtccaagtcaagtgtataaattgaaacaaatctctccaaagttagctaaagacatgaccaaatcaggaattgagtttgtggttagaaatttagccaatattacgttacaattagatttgttggagaggattaagattacccagtagaataatccagagatgattaaatatagggggaagtctgaggctggtacaacaaaaggatttttcagtgtcaccaagtggaatgctaagttataaagatagggtttgtgttccaatagatgaccaaattaaacaagaaatacttgatgagtttcataccaccccgtacgcactacaactggaaacatcgaagatgtatcacggtgtttaagtgatgtactagtggacaagaatgaaaagtgatgcagttgagtatgcatcaaagtgtctaacttaccagcaagtaaaagcagaacatcataggctagcaggattacttcaacctttgaaggttcctagatggaaacaggaagatataaccatagattttgtggtgggtttactgaagactacaggaatgtatgactctatctgggtaataacggatagtttttctctgtcagcgcactttctaccagtgcgaacatcatatactatagatcaatatggtaatttgtacataaaggaagtagttcaacttcatggtgctccaaaatcgatcgttttagattgtgatcacaagttcacttctaagttctgggagagtctatagaggaacatgggaaccaaattgaaatttagtacagtgtttcatcctcagacagatggtcagtctgagaggactattcaaatactggaagacatgctgcgagcatgtgtgatagattttgaaggttcctagaataagtttctacctttgatagagtttttgtataataatagttatcagaatgctatcgacatggcaccctacgagatgttgtatggaagaaagtttcggtcacctattcattaggatgaagtcgatgaaagaagatattttggacctgaggcggtccagagaactagtgaggctattgagaagactcaagctcgtatgctcatcgcttagagtagacaaaaaagctatgctaatctgaagcgtatggatattgagttccaagttggggactttgtgtttctccaagtatcacctttgaaagaattttagagatttagaaagaaatggacgctaagacctaggttcatcggtccctttgagatcttagaaagagtgggtcaagtagcctatcgactagctttacctcttgccttgtctagagtgcataatgtgtttcatatctccctattgagtaagtacgtatcagtcagacccaatacatattctaagttatgatgatattgggctctagacagatttatcccatgaataacaacttgtctaagtattggataggaagtagaaagtgttgcagaacaagacaattttgctagtttaagtgttgtgaaggaacaacaaggttgaagaggcaacttgggagtaagcgtgtaaagaccgcttaatttaaatttggaaattagtagataattagggtttaattnnnnnnnnnnnnnnnnnatatttaaataattatttatgatgattta

SEQ ID NO: 37560 - DNA, 3526 bp, Cannabis sativa
tatcagtaaagccaataattatatgtcataatgttggtttgtcgattgctaatacatctttgataccatatgggtgacaactcaagtaccaacccattatgcatgtaataaatatcatgataggaatgcgtatacttgagtaaatcctaggctgtcttcagtacgcatatatgtgggacaatctcaaacttgatctctcgtcattactaatatacatgaactttaggccattcataatatatcgcactaagactaattaaagattctcaatgaattctaaaaattaataacaacaacagatagtcaatgaaaactatggaacaattcagtctaccgttgatctcattacgaagaatctaaatatttagaccatataagatttatcaagaattcttcgtcttacagagattaccaaagtttaatcgtctccagaatagaccaagatcataaactatgtgcaatgtactatatcatgtacagtctaaacatatcattactcccattattctctcacgtagtattgactaacgataatattttgaattgaccatttttgagaattgcagtagtcactatcttgatgtcgtacctcaaaatggatttaatccattgaactcgagtgtccatgtcagttaccttctcaaggcttaatcaagcaattcaacaagaccagatctttaaataagaatttagttctcacattcttatatattcatttctaaatagtcaccactatataattcaatgacaatgcaaaacaaacaaatctattgttagagtagagactagctataggctttagttttaccttactttgaccatcaaacaacctattcttaaaattaactaccattaagaaaaaatcactaaattatcatgtgatttagcctaaactacttcatgatcatatcttgagaatcgtgatataattatatcatctattcaataaaaattaagaactgttaattgctctcgattgacaacttagaaatatatgtcattaaacttatatcctgaatataattacaagtttttaatgattatttatctttgtttgctcacatatagagtttcttatcaaattctagttaattatggggtcatcaataatcacaacggaagcaaaacaagcgataattctaattattccctaaataatcttttggctcttgattaatgccaatttaaaattccaatatagatagctttacatatttatcaacaataataattagaagagacaaacatattaaacttgatattctcgataaaacctttgagatgttcgtgatcttctcttatatgattaaagttcaagattgtcaaatgcaatgtcctatattgcctcagaatattagaattcctaaaatagccttagatataattttttatttaatcacaacattcacgaggttattcagaataagacgatatgatccattgaatctcattatcttgagagttgttgcggtagacttcatatattgtctcttcagaaaacacctaatacgattgtgaatgtgaaattatgtttgtgactatattactccatacaaaactctaatatctctcccatttggaccaatataatcaacaaacaataggcagccaaataaatcatacataatatcatatcgataagattcatatattacacataatttaacctgaaagacattcaaatataataataactattaaacaaagatgtatgcaacacaactattaagactatatatcagttttgttttgtattggtcacttcgagaaacaatgcacacaagaagtgactgcatatcattatgcatgtctatattaatcattttaggtgttctccattttgaaattttctaaaatataaagacttttatactttgatgagtcaaaatttttaaaacactatgctcaagataaccatgcaagaaagatcttaacaaaagaataataaatacttgatatctctcaaagcttatacacgcattatagattaatccttgaggacaaaaaagttttacaaccattatcaataattatgataatcattagtgatcataattaatataatgaacatgtgtactaacatgtaataactcaaaatttcatgtcctctaatctgttcacttctcattcaagattgttactaaatcatcaaagtcactatacggaaagttttgttcaaacttgaataaattcaaaattattgcttaaatatagcttagtatcctcaagtttactagcaataataatatgatatcgagtacacatgtattaacccataatcttgaatttattgtgtttacgaatattcaaaaataacacaattatcaaatcggaatagacaatgacaatcatacatccattgtcatattcgtctaaaatttacttacttatgatctatgacttattttgaacctcatccatacaaatattataataaaagactcactagttgaattgaaactattgaaatgcacaaaatacactagtctcttgaactcattaatattgaacaaataaaagaatttcacttccaatatccagggaagttcctaagtgaatttatccttataaaagttatcatataaagatcgatggacagatatataccacattataattaaatgacacccatcgcaatacttccactgagcatgtaataacttgacatcttttaaattaaatgtgatttcacgatttatagattttgaggcctctaaatttttaatgagagattgatatgtcaaaaaatagtatagtcccatccgataactaaacaatagagattttaggattgcttgaagctaaaggaaaatttctaagagcagtgccactatgcatgtgaaaataagaattacacaatttgctcgttttcttagcttttgatgatccatcaacagataaatcatgtcatgctagagtcgttcaaataaaacatatgactattatgcaggtgaggacaactacttcaaatgtcataaccaaattcaataatctactgccgatagagtagaaaatattgtgtggttcatgacatctaatatttcttcaccatataagcatctcacctgacaataaaatcatcgataggatgactaaattgtatctatggatcttagtattaattgtgattgatactgaaaatattatagatatttttaatcatattttaaaatttattggtttaactttgaattaaaataaaaaaaatatatatatagataatattttatattaaaaatttttaatttaaatttaaaatacttaaaatgtcgtaaatatgtttacatatttttaattttattggtttaactttgaattaaaataagagacaattctgctcaactggacacacaatgatttaccatcaacgtagtcgcaatagctaaaaaaaattctcgaaaatcaaaatctcaaatcctatctcaaaaactaaaaaaaaatacattacctaattaaaaaaaaattgaatatacattacacttaacatcacctaattgaattttattaagggcttttttcataaatg

SEQ ID NO: 37561 - DNA, 3434 bp, Cannabis sativa
gccaaggatcacattcttttttctcctaagggtacttggcagatcaaggtacttgttgttctcattagctagttcaatacctaggtcagagcagatttgagatcttgtggctgagagaacattgctgctgaaaaaagccgagaatttgctgaagttgatttgttaacctgaggctaattcaaacttagacaacaactcttttactttgatgatttttggctggtttgcacgaaaataaaggtagctgtcactagcaaatcacatatgggagacaattggagcgcccctagccacgcgacatccatgaatccagccatgttgctcatatttcttgatcaaacccgagagtcctttagcacagacaaggaagaggtaaggagacagtgggtctccttgtcgaatgtcacgataagaattaaaaaaagtcagttccatgcacaccgcaaatgactttgtagctggctgttgagagacattgtttgataagagccacgaatcgatcattgaagcccatcttaatcatcatggcacaaaaatatgaccattcgacacagtcaaaagctttacttaggtccattttaagagccataacaccacctgtaccctcttgtttcctttttaaatagtggagaacttcaagggaaacaattatactgttgtgatcaagcgactaggaatgaatgcactttggaattctgaaatgacattactcataataggcttcatcctattagccaacattttagagatgatcttatataggacattacataaagaaatatgccttaattcatgcataacatcatgttgctttttcttggggataaacacaatgtgagtatcatttagtctaggagcaattaaactagtattgaaaaatttacgaactgtattgaaaacatcacctccaataatatgccaatatttctagtaaaatgcagggctcattccatctgggcctagggatttatctgggtgcatttggagagcaacaactttagcttcttcatctgtgacaggtgaaagcaaatagttattctggtcagctgtaatagttgagtggatgcagctcaatacctcatcataggatcaactagaagatgagaagagctgcttgaaataatcttgtatcatattagccagaacagaatcccaatcaacatcttggccattgtcattttttaggctgagaatttggttgacttgtctacgtgtagaagctgctttatggaagaattttctattcttgtcacctgagacaagccacatctgtttactctatcaaaggttataaggttagcattttcccctattttgccattaacgttttgaagagcttcgaaggaattcaaattctaactttttttctctctaaaattacatgccttctttatctctcacatatttcttttgagttttgccatttttttctctcaatcccagaattgtcaaggatcaaaccttcagtttcagaagttgtcaggaggggattcttaaagacccttctctcagcaaaccagtaagtgtattcccaccattgttcttttgactattctgttcttattgttttacatatatttttgtatcgtccattacttgagtgggattatctttatatggggtttttttttagcaatttagggttagaaatttagggctacatggttcacaatttctgagtttatatgttttgcatttctagagttttgagacatttttcttgtaatcaagaaaatgtcccattctgatcaagtttatgaacacccagacctcgtgaaatctgattatccccaattttgagccaatgtttttaaatctcagacctataaacctcaatccacacttgagattaatgacgacaaaattaaaaaacacttccttagggctagtgaagaagaaacatcatcttgctattggtgatatatagataaaatcattgagggtaaacgtcgttatctgcgagaagtagcctggcttgaattacccaatttaatggcaatccccttagcaagaccattatttttacctcaagtcactgctgcttttgcagttggtgatcttgaatttgaaattatggctcctaaagctccaaagtctaagacaccccaaaatccaaatgttacattcgaggcagagctaagtgaatctaaggtcagatcgattgctccctacgtgggttaatttctaaggtcttatggcattaaaaatgaaaaaggatgtcgcatatgctctatcatgcttggtgagtttagttgctccctccaaccttcctattgaatgatgaaggctatagtaccagcgactcttcaaggataggagcttggagtgtcgagcatgttaaggcaggagctgcccttccccataggcaatacttcaaggacttttgtaattaccttgggattgcaccctttcaactagttcctgactcttataggatcttctcattttgaagttgctttaccacattttgggatgggaattcccaacccctttagagattacttacttctactctatcaaagcatgtcatgcgagaaagaattgctcatacgacttctattacttgggcacccattccaatgattaaaaatcattgttagacttcccaataaggagttgaaggatgatttcatttggacgataggactccacccagtaaacactacccaattcagaattttacgtaagtatccattagtcccaaaattttagttttgagttttagaatttttatgattggatatttttactaattctctgcttttccatctcttattttagctgctacaaagagactaatttcaacaccagtagttcaatggcggcataaaatcctggtaaatctgccttatagcttgcgagcttgctccatgataacaatttgaaatcttgtggccttctttgcaaaagaccagtagaccatggattttaaggaccctaagtattctacttggcagcaaatacaagtgcctaaagaagaagagacagcgactacgtcatctgcacccacttaaaaatgtatccactcaggaagccgttgaggttgaaaaagaggctccccgaggtaacacttcttgattttatagatggtctcctactgtccttaggaccgatccaacaacataaaatttgaagatattcaatacaaatttcggacccctgtattttagaaaagttactaatttgatcatctactttgttaaatgacaaaattggctctgtatttgccaaaattatacaaataggaccatggactgattttttgttaaaatagagcttaataataatttgatctagaaatgttatgacaaaactgattacatatactgtatctatttgtgttagaaattatcttaaagttggttatattaacactaaaatggttgaaaattgagctcatggtcctatttttactattttggaaaatatatggt

SEQ ID NO: 37562 - DNA, 2194 bp, Cannabis sativa
aaaaaaaataagtataaggggtaaataatttcaaaatatcactattgtagctattttagtttttttttttttagttgagatattgtagctattttagttaaatagtgtgttactttaagaacaatatgacatgttcttagcctttcctttagccctcagtttcaggaaccactcgcaatcgtagcgcgtgctgttaaactgctcttcttcgccagatgaaaaaacccaaaaccagctttccagttaagctcacatcgtattcctgaattagatctcatccagggtttctcttcttatcaaggtatcatttctttgctctttattatcaaattttggagattcatgtttattcattcatttctgcgtttggtgcaatgctcaattttgtgcaattttactatttgatgacaataatcaatgaacgagaaaagaaaagaaaaaaaaaattatttaagtctacaaattctaatatttgttattagaaattggttcttttttttttttgtctctgtgataagctttaatctaaaccctcaatgctgatacctaaaatcaatgctgtatgactgagaattaagccagtaagttcttgtaatcagtctctggattttcacacacatgtctagatttaggtagttttatcagaaattaatctagggttaattgatttatgtgttacttagaaagaatagtttacatttcattgttcatttatttttctgaattagttgaatatgaaaattccctttgtcccttttgcagcaatgtggaagcactataaaaaatccaaggcatggattaggccacaatttcgaattcttctggctgtggtctcttgtcttacttcactgattctgttgttagtatttttatgttccaacaatgctcaggaatcgaccaagtcaccattgggacttcaaaatcaaaaatggaatagctttgagtcagtggtgcagtttcatcctaccatggcttttcgaaatggtacagatgtaatatggcaagtacccaattcaccaaaagctgttctctttcttgctcatggatgtgatggtcaagctcttaacttttgggacaaatctcctgactgttctaattgcattggtttgccagaagaaaggttgattgtgcttcatgctctttctcgaaaattcgctgtacttaccatatctagtgctggcagatgctggtcaatggggaaggagataatgattgctaaagacattataagatggtgggttgagaaacaaggattagagaagcttcctcttgtggccatgggagcctcatcagggggatactttgtttctgtgcttgcaacagagttggatttctctagtattgcacttatgattgctgaaggtgtgtttgaaagaattgaaaccaaggagaactatccacccaccatgtttgtccacatgccaaaagatagtatcaggcaacgaaagattgataaaaccatggaacttataagacataaaggtgctgaagttgcagagatcaagtgcatggagttcgcattgtcgccacagtttttggctgacagaatcccaggtattgatcattctgtttctgctaaattgtttgaactcttcaagctcaaagggtttgttgatgaaaatggatacatgagaaatgatggacgtaaaacgcgttggaagaaagcagtgaaagaagatgaaagtatttcgatagatgagcatttgttgcatcccattcaggaggaactgaatcttgcttttgcattccatgaaatgactagtttggcttttgaacaaatccttgattggtttgagtcacattttagctgattgattctatgtgtcattctcaaatggggataatatactttgtttcaggaaccagagtgtaaaatttaaccaagatttagtatataaggttttgttttagtgtaaaagccgatggtcatcatttcattaaaatttgtattcaactgaagaaattaaactgtaaatatagtcacttgtaatgaaaggaacatagaagtttttcacttttacattctacataaaaagatagcgtcagtattttgttggccaaataagataaaagagttttttgcggctaaatcttttcaattatcactctatttgaacttaattctctaagtttaaattttgacggtaaaacctttcaaaccaattaattatttgtaaatttaaggtgttatcta

SEQ ID NO: 37563 - DNA, 2285 bp, Cannabis sativa
  modified_base (2211)..(2217): a, c, t, g, unknown or other
aaaataaaaaagagaaagaaaaggatctcatgaagtatctgcattctttaaatgcgtgtgcttgatgataatagcatgttcttatttgtaatgttgtgttgataggctttggaaaagtccaagtatgagcaatccctggagtccgtgcggcgattcattgccattgcagagaaggaactagagctttattacaggcacatagcactttatggtgatccaaatgatagaaatcctatttcagttttggatggtccaagaaaagacaccaagaaacctaacgaacttgaaaacgaaaagaatgattactcttcttcaggtttaaatctaatagggatggaagctaattccatggaatctaaactctccagactggatggtgatggttttgaaagtgaagggttgtccacacttgaatcagaatcagaatccgattcctattctgattccatttcttattctgatgatggagaacattgttctggtacgcatgagagctccactaggatagttcaatcatcaacttccgacttttataatcaaaggctttaataaaaactaaaatagattctacagacatgaatgaaatgcattattatgtcctttatcaatcttagctattgtgtagttttactttatcaaaagtttcacaggttttgaatggttttatttggagaatttagagggggcaaaatagtttaaactccagacaaaaaattgatatttcataacaggatctaacaagtatgtaaaattgttgtaataaaatatagtgtaagactaatagtgcacccttttttatatactaccatagtaaatcatgcaattttacatacaggagtgacttatatccttttttttattgtataacaagttttcattgtagtttattcaaataaaaaaagtgttcattggcattgtagtcatattgtaccgcataaatgttttcagacaaatcttgaatagtttatggtgtcaaaacataaaacataatgtaaaataataactacgagtgcagactgtattgaaagtttgaattttctttatttgttttttgcaaagaacttttataactcaagaagctaaacatggaaaggcaaatttgcaggaataactccatatgcacataaaggaaactccccaaaccaagtttggttacacttagaagtcaaggtcagtttggctaaaaaatgagctacaccattacaatactttttaacatgaaaaatagaggtacaatgattgtagctggccgtctgcattaactgttcaagaaagaagctccaatccgtcgcaagagtataagagccctgaagaaaatacaccacctactggcaatccgattgaatgataaaaggagagagttagagcctatgagcagggtgaatccccattttgattgccaaactttcaacaagctcgactgaaacagagcccctgtaatgttgaatcttaacagccataacctctcccttgtggttgtgaatgatattgcccagatcgcaataggtcccttgtaaaggaaccccaatatcacagttaatgtagaataggtctttagggggctatttcaatgctaacagtttgacacaatgtgagtggcttgagggaaaggaatgtatctcgaagattgcagctcatcaagcatcacatgggcccaatcaattcaagcaaaggacgaaggcagatgtaacttcaatctctttttattttggcgattccagatgagccaagagcaaatgataaaggtggtgaagtcatacctggatatctactcgtgaatatagagaatgaaggcctaggggtcataataaagttaggaaaaagcaccaaagatcgaatgtcctccaaacaggccttgccgtcgggcagtaccaaagggcatgaacaatagattccacagttgccccgcattagcaacaatgggatctagtttcatccctcttgagcaaagaaccaaaccaaccgcgagccatccttgataagcacaccagcaaaaattacgcaccttgggagaaatttcagtactccacaaatgcttccaccaacgatgaattgtctcagaagaagagttgctagcagcaaaaggagaagcagccgccactttatagccactacgaatcgtatacaattagaagtgtaatgccagaccatatcatcttccactcttgaaagaacagtagcaagaccataactgtaaagcccgcttagttnnnnnnnaaattagcagttatttatgataatcaggaaattatttatagctttttaaataatttattatggatatt

SEQ ID NO: 37564 - DNA, 3850 bp, Cannabis sativa
gcctctcactccactccatcactctcgctctccttcttcgctctactgtcctgctcaacctacttgggtcgtcaggccaccagccccatcgtactagcccgagacaacctcaccccagcctacatctttcctctcttcctggttgcctacaaatcattattgaaatgctttgccttccatccttcgcatgagctctctgccctgctccgacccaccgttttcggccgcagacagtggatatcaacaccacatttggtccaataaccaccacgaagagaacgagcgaagatagacttatgtcttgatttagaagaagaggaaggccaaggaagcagccgaaaggaattgtaaaaagaggtccaatttttattgtaactatttaaaaaattttatgctctgtttgtttctcgagaatcataagaaggaaaatatatgattttcttttcctcttctattgaactactttttttggcatttattcaatgagccaaaagactaaattattcaatactaattcactgtgtgatgcataattaaatgtggcataatttgtttataattgtacactgttaaattgttaattgaagaatgggtttttagtagattgatgatttaggttagttaaagaaaatgcatttgctctttttcttttttgcttagaagaaaattcatttacttgtaaactataatcaaatgcatttgctttttttctttttttcttagaagaaaatgcatttacttgtaaactataatcattgaaaaatacatgacaaaacataacaagtagaaatttattttggatagtttaagtagtcaaaattttgttttgttcctccaaaagtcagagaatcgagttgtttcttgattctcttgtgggattaggattaggattaggttgaaatttaccaaaaattgcttgaaaaacattgaatggcctttttgagatttgaaagtggtcagagacaattctcaagagttagatttggttatgtttaataatacccacttgtagagaaaaaaaaaataactattctagaaagggagaacatgtttcaaagtgttagcaaatgtcaatggctttaaacaagtcaaatttttgacttgttataaaataacattttggaaaaatcatttttaaatattcattccatttggtaggccacttgtgtgtttttaaacaaattgttgcttgttgcacacccttgtttttatgattattaatcttcatgactgtacctatgtgagctccttcatgttttgtactcatggatttgaactctactgtttattattttaatccaatgttaggttctcaccaacaaaagctcattttatgaaggccaaacaagaatgaagctgaggatgattaaaatgataactgggacaataatcaggtagagcttccatattgatctgcgtggaaataaaataagcacctgaaaatcaagccaaaagaatagttgaactgttgaccaaatacacattcagattagcccagaacctttaggcttttgtacttagctgttagttatttttaaaactgtctctttggcaaaagataataagagcttcatccttcgatatgaaaagtgagaactttgaagagtacaaatcatacactaatttctttacataaataagattcctttacatgcaccagacaaattaagacttttgattacaaacttactataattttgggtttacttcttgactaccaatgttttcatcctaatttctattaacaatttagtcatacgtttgggatgagttgtgtcaatatcttaacaaaaatacggcctttctaaacatgtcaatatcacgttgcaactaactcagaatgcagtcccttgcaaaaggagtctaagtcctctggagaaaaccagttcctttccatctacatagttttgattggaaggaagcaaagctcatcagtatgtgtttgtatatgataatgatatcgcagaaaataataaataaagacagacttacaaaatatggataaccctccatgctaaaattttctggagccccatccaggaacaatttaataaagtagagaacaaagttaccacattcccaatcactcctttgttggggtacctgattttgttatagtcaataaatatcaagtgagatatctcaacgaaaagaaaccaatatttgatctaggaaatcatcacaaattaatgtcaccttagggatcaagagaggaatcttgcgaagagacttttcagtttcagttctgccctcagctttaaaaatggctgatacaaatctagagacaaaaacaaggttaaattcacaatggggcaactgttttaagacaaaacaaatcagtttttatgaagaaaaggaaaacatacttcctaatatctcgttcaagccgctttggatcagtgttttcgagagaatccagcagtaccatgcaaggtttccgggtttctgattccaaactctcatcaaagttgcataagataagaacgctccagtggtgcctaaaaagcatggcatgtgaaagcattcaaatcccaggtactgaaaaacaatacaaatatatatagatataactaacagcaataaaaatggactaaccagataacaataggaacaacaacatatttctttgtgaaaatttgcttgttttgaatccatgtcatgaccttggatttgtaggacgcttctctataccatgagaaccataaacagtcaaggtaaccaaaggaatttttcttctcctcagacaaacctctccacaataacctacacataatatttaatttaaattctcagaacaacaaacaatagaagttggtaactttcttaactcattacaacaacttactcaaagtaactttcaaagattccagaatcaagcttcttattcagtttagtgactccatggccaacatccttacgggaaattttcctggttgatcgctcacggcaagggaaatctaaaaaacattgggcagtaagtttaaagccatcaatggcttcatggtctttctttgttaaccttcttttacgagcatgcaatgttgctgataggtgttgccagcacgtacggtgccttgaaagctgatgtttaccctctacaagagcacaacaaagtcacattttaaaggcatagcctagtggcactagggcaagataccctaaacctctttgtatgttccaagttccaagttccaatcccctaatggctaattcccgatgtgtactgaaaaacatagggatcaatattgaaaaagaaagttcacactttgtaatgagcattctaacccaaatagccctaacacaacaaattttcaacaaaaacttgataaagatccgaccttttaggcaccctaaaactgaactcaaagccaaattctcaaattaaaaaccccaaaagcggagaagctaaaaaagaggaaacacttctatgtcaagattcagtttttttgtttttaaggcagaggaaatcaatgaatgaatgaaggggcaagaagagaaaaaagattaaagaaatgagtgagtgtagaagggtttacctggaacggaagagtcgaggtcgtcaaggtcgataacgacgacttgcttggttatattcttcttcctcgtcatggaactggaacacaaccccaatcaaaaaccctctgtgtctctctcttgagtctgagtttcggagattggaaaagagtgcggagagggcacactgagtagtgagtaggggtgttcacgaagtatccgaatccaatccgcacgatccaatccaatctaattcacaaaatgcggatatctgcacatggattggattgaaaaatctaaaatccgcacaagcacccaattcgcacttaattatata

SEQ ID NO: 37565 - DNA, 2020 bp, Cannabis sativa
gttagaggttagcggtgcccagtattaatcctaacgataaatttagtaaattatggttggaatatgaataattaataaaataaaggctaattagatttttttcgtaatatattttatgaaagagcattgttattaggtaccagtggtgtctagcaccttcttgaaatgtcgcgttgcgattgaccaacgatactccgctattatattaaattatatgaaacccgatatttacttagaacaataacaatattccctaataaaattgattgaaatttcaaccattgcctttaaattcagtcgactttgttgctgcggatattttcgaaacatttaatgcgaaacaccaatccgaaattattgctaactagttcatgtggcctgttgagttgagtgatcagcttgtaaggataatttggtaattttaaatgtgtatgaataataaaaatgtgtgtgaattgatttgaatcaagtccactcgttataattattgaattggcttcaactttaatggtctccaaaagttgctacagttgctactttataaatgctttgccacgtaagctatgaaatgggacccacaccttgccacctgggatgactgaagaaaatatagattatagaagacaaaactacagctaggtaaactaataatgctacaattaatttggaaaatgcatactattgtatttttcttcaccgaatttcattttcatgttttaaaaataaataatattaatcaaaatagtaggattatctatcattcatcaaattattagctagtttaaatttagatatactatattcatttaaactaaattcttatgcatattaatattaatatatgttaatttttttcatatatatattatttaattaagcgggttgtttattaattaattgttataaatatatatacatgtacacattacacacccataagtatactgttcgtgaaattaaataattacatgcttgtactgtcttttaataaataggtcgaagtatctcaaatttatgggtgagtagtataaatgtaaatacatgcacgtatgcacgtacgtacacatatacatacacacatacatactttgtatttataaatatatatcatgtatacacataaccttttgctcatgataacgatgtataaatattatctttcaatatggatatatttatagtaacagaattcatcatatcccataatagataaactggccaaaatgcttctatagctagtagatttatacgtatcattaaattcatggcatgtgaagtttcacatgctcttccttccataactatataaatctttaaataaatttctttcttcaaaaaaaaaatataattgaatgccaaatatatattattctctcatttatttttgaagctttttgttattgtgtgaactgaattgagctatagccatgtgccacatgacacactggcaaagcggtacagcatgccaattatgacgaggttgattcacctattcggttccaagttccttccacatgttctttttattcttttttctttaaaaaaaaaaaaatcaatatctaaatttccataaatggcctgtgtgtatttatatacattatatacaatcacattaattactcatttttgatcagtttctctttttgtcttctcacactagctatactatttatttatatcaaaatttaacttcaggggtcgatgtaattgtattgtgatatatatatatgtacagactatatagttcaactcatcaatatttgataatttttttgtttctttttttttttcttaaaagataaatgtagatatatatgatggagtgttaccgacaaaaaatattgtgggggcaaagagtgacccaaaagtcagccatagagtgaaataaggcgatggtgagttttctttgtctgaaactttgtcgttttgtgaactcatttaaataatattcacgttgtaattataataattatacacattttacgcgcgtacgttattataagtagtaataaaaatcttt

SEQ ID NO: 37566 - DNA, 3967 bp, Cannabis sativa
agagagagaagttaggttgtaccaaaacgaatatgaaaccgaacttaaaaggtgtgttgtctatgtgtttgtgtgtagtaagtaccttatccattagagggactcttccataaggagttgatctctcgaagtattgaaaataaagatgacccaatctatcatttagatgaatagaattgttatcttgctcaaaccctccttcctctgaagaacacccatcccatctccatagcttatcgctctcactatcatcgctaagtgaatcactataagaatctcttgtttcacactcacccgcttctgcctcttctcaaaaaaaagaaaaagaaagaaaacaagaaaagaatttcattcaatggatccaaaatgtgattattggggaattttgaaacaaacccatgtatgattttttcattgtatcacaaaatgaaaccaaagattttgtgaaagtttgattacctgaaactgttaatggaagaattgcttgtgaaaatttgaatagctgaaagataagggacatagtattgaacgagcgtttcttcttgatccaaggcaatcggaacaccggctccatatgcactccattcatcgtaacagccccacagatcagccaatgtgaaatactcgaccttttctctttcccatgggtgccatagactgttcaggttgcgaatctcagtctggaaaaaagaaaaccaatcatcacaaattttgtgagaagagaacttcgagaacggaaaaggacaaaacaaatgacttgaattgaaatatgaaaagagtcaaagagagaacaaaacaaaccttaggtagaaattgagattgaaccaccggtgttgtgcaatggaggaaacattcaagatttgattgcattgaccctttatccaaaatcatgtttagagatagagagagagagagagagacagagagagagaggatgatgatagagatgaagggagggaaagaaattaatgtttctctcaccaaccctgaaaacagaggaagcccagaaaagaagaccaaaaaacagaggacaaaagaaagaggtttgtagagagagaaaaaaaaggggatggaagagagagatattgtcgggatttgattttcccttttagttagagagagagaaagagagaatgcaaaataggcttgcaaagacttctatttttcgacgtttaggacagcaaaattcacggaagactcaaaaatcttttctccgcttagtcttcttcgttggcaaatgttggccaagtccaacacctatccgtacaccggaatatccaagttttggccaattctccgatcaaacaaaacaaacccaacaaagaaaaaactaatgtttcacttaccccttttttctttctccttgaaaattcactacccttaaagaaaactcaagcgttttctctgctttgttctttttttacggaactgaattgtaccggaaggaaaaatgaacgaaagctcaaatttcacttgttcctcaaatcaagctaatcaacccaccaatcaagccttgcaaaaaatgaagaaaagaaagctcaaatttcacttgcttctcaaaccaaaaaaaggcaaaagaaagaccgagaaaacgagagaaaagtaccaaagagagaaagggccttttccctgtttcgacagacacttaggttctgtggagtgattgattgacgggatcacgagtgattcttaaatgttagcgttcgaactcaataccattttttcaaagtacaaaatatataacaattggtcagaaccaatcaaactttcccgagaaaactacagcagaaccataacaaacacacagaaaatgagaacactcaaatcaaaacatggacagggaaaaaaaaaaaaaagtgatttgggttcttttagagagagagagaaacaaggcataggagagaggttttggatacccaaataataatcaaaggcatcagaataccacatttatcatttattagactcatctgtctttctcatggtctctctctgcctctgaaagatactttaaatttcattacttatttattttaattaaatttagttatatttctatgtattcctattttttttatctttttaatttaaatatttattttagttgagattaggagtgttcattagaccaataatctatccagatccgattcaatgttcttctattgatttaatttagatttatctaatattttagatttaatattttttttttaaatcagataagatccatccaaagtctagtatatattgaactggatatgatttgatatctaattcaaaaaaaaaaaatgtagaattttaatttttatttttatatatacaaatatattttacttatagcaatataaaatctaattacttattcaaactaaatgaaaatattaattatttcaattatatgttggatgtattggattttcggacacaatatctaacatctattcaatctagttagatatctaaaaataacattcaattcgatccgatcataattaaatatttaatatttggcagtcgattataattaaattgatcagttgtcattgaattgaatccatttataccaaacataattgagatatcaaaaattgagagatggtaataaaataaaatcaaagatggtagaaaaataagtaatatttagtagaaaaaaataagtgaaaattatgtaaaaatttcattttattatggttttgaggtagaatatgaaataaataaagttaaaattctggtccctcttcttgatgtactaaaatagaaattaagaacctaacggcacataaatcactagctgagctgagtatgataggacgaaagctatttaaaatattctataactttcttcaaaaaaaaaaaaaattaataaataaaatctataacgtgacaaaaaaattaacacatttaaataaaagaagaaaaatcatttcgtacgtagtaattcattagttgcttcacttatgaattttattttatttttaaaatttaaaaaactatttgccgtatgtatgttttcaatagtagttttcatctagtgcttattttataaatttataggtataaattatatggacttgccccattccaattgtaaatcatgtaatcattttatttgatttgtatttactaaaaggcaatgtaacttagttataagaaaaaaaggcaatatatctttatttttttaagagaaaaaaaatgagcattattataaatagtaatttgggttttttttctgaaaaaaaaaaaagatacgtttatagcccttggagagtaacaaaaccgcacaaatctgatacatttgatcctgtgtatgtagtccaataaaattgagtatgtagaagaaaaaaataatacacacaaagtattttctctttaaaaaaatggaataaaaagatatttttttgctaaaggaataaaaaatatcttaagtatgaaaaaaaaatgtggaatagccaatctgagttatttaaaataaataattttgaaaaattttactttcaaacaaaaaaaaaaagttgagtagtatttattcttttttttctaacaaagtatttattccttggtttcgtaggtttgaggccaaatagaaagggaaaggtttgggacttggcaaaccgcgtgagcgtcacagcagggagtgggagtagtagggacattattacaatataatattatttatgcagaaaaacgacgacgtaccacctctgttcattcttctcttctctaaagcaacaaagtaacaaactggctttgacagagtctagtagctctcgaattttctttcaaatataacttggactaaaattacagtaacaccctcactacttctatacaccgtaggttaaaatttgtagtattattacattaacgaaccattcattaaaaaaaacaaaggctaattagtaatttttttccctgaactttgacatgtactaaatcgtgtctcctgaacttttttggtcgttaa

SEQ ID NO: 37567 - DNA, 2118 bp, Cannabis sativa
ttgtatatttttaaaataatcccttaaataaaactaaattaaaatacataacacccgatactaaaatacactaataacatactctaccaagggtaaccagtaacatttttcttataactgatcttatttgattgctctatactggtctatgttacaggtgacttggttcaaatgcggaggagtatccgtgggccttagctgggcccatatacttggtgatatagcatcggcttcaacgtttatgaacacatgggcccacataatgtctggtcacgtgcctaaagagtccatccacatcacaagcccaatacgaccatataatttctcaaatgttattgcaacgaaaccattttcagtgaaggagttgaatccaccagtggaaaataattggtcattacctaccaataataatggtcaaaatatgagaactcgttgctttaaggtcagtgccaaacaactcaaccttctaatgtcaaacacttgtggtaagaaagcaaccaatttttctaggtttgagataatctctagtgtgatatggaaatctttatcccaattaaggaaaaactcattatcttcaaaagtggtcacaatttgttggtaccaaaatccaagtggggatagtaatgaccaacttattccaaataataagagtatggttttaagcacagttgaaagagactctgaagttaataatgtgtcagaattagcatttttgatctcagagagaaagattgtggaaaatgaagcaattaataatgaagaaatgattgggaaaatggattttttggtgtatggggcaaatctcacgtttgtgaatttggaagatgtggaaatttatgagtttgaaatgaaagggaaaaggcctgtttttgcaaattttagtattgaaggggttggtaaagaagggcttgttttggtccaaactaaaggcccaaaaaatgggaataaagaagatgatataaatggaagaattgtgactgtggtattgcctgaagatgagcttgcacattttgaaaatgagctcaaaacaaattggaatattgcttagcctttattgatttatttacaagaaaaacacaaaattgatttgtatgtgagcctagctagctagctaagtcattatgtatggatatggagtgttttgtttgtgagactactcaatctatgctcaaacaagtagtggagtgttttgtttgtgagactactcaatctatgctcaaacaagtagtattaataaatttcaatttgatggtattcttattttatgtaaatataagtttatttgtttgtactgcaggtctttaaattatataagttttagtaaattggtctctaaattttatttttttgataaattagtccccaattattttttagtaaattagtctacaaacttttattttttagcaatattaagtccccactcttagatattaatatttttattgattttttttttattttacttactttaatttattttttgtgttaaattcaaataatttttttaaaaaaattttaatactttgataaaaataattatattaagattttttttttattatttttaagtattcatataatatatataattataatatttaatatttttaagaaaatatttaaaatatagtttattcatatatgttattaataagaataaaagagtataaacactaactgactcatataatggctaaagagaattctagcccctcacatttttatattttagcatttatagtatattttattattgatttatgaatatgtagtattataattttaataattttttaattgtatgtatattctttattatctaaattttgcatcaacgttggtaaaatttaatgggttcgacgcagagtataaatttaaaatataatttacttcggtagtttataaaaaaaataataattttattatttaagctttttcagttgttctttttttttaatattattttggcatatttaaaaaaaatacatataaataaaaaatatatatttaaattgatagtatattaatataaaaatatttaaaataaataaataaaatatcatcatttaagagtgaagactttatattttcaagaaaagaaaagtttggggacta

SEQ ID NO: 37568 - DNA, 3978 bp, Cannabis sativa
aacatactagggagtagatctaagcatactagggagtagatctaagatcctggtaaaataattccaacaatcccagatatttctcaaaagaggatttaaccgggatccgcatgaaatctgagatcagggtttgatccctaagggcaacgttaggagagaagtacagggaaaatttgtcaaaattcacttgttgacccgtggccctttcatacagactgagccactttgaagccaatgagagcccccttctttcctgttgccgaaggatagatgaaaaacccttggcacagagcaggaaaagatagggagagagagggtcgccttggcgaataccacgagtgggagaaatatgaccagagactttgcaattaacattcacctgaaaggtgttcgtcaaaatgcaatcgaaaatgagccgggtgaaacgaggagggaaatatgatttccttaagatggttgtgacaaaagcccattcaactctatcaaacgctttggccatgtctagtttaagcgccatccaacctttcttccctttggatttgagctttattgagtgggtaacttcctgtgcaatgataatattatcagaaatgagcctaccaggaaggaaagcactctgttttggggagatcaagttgtttaggaccaatttaagcctatttgcaatatttttggaaataattttgtaaatgatgttacaaaggattatgggtctaaactccttgatcgaggtaggatgtttaacatgaggaatgagggtgatgagagtggtgttaagcaagccaatatttccattactgttaaggaatctgagggccgcagataacacatcttttttgacgacggggggtcagcagttgctttgttgtagaaattagagttaaaaccatcaaggccaagggctttatccgtagggagctgaaaacgctttttctactttgtcttccaaaaaaatttcatccaaaagagatttgtcactatctgacaaaaagagtcgataccatctaaagcagattgcatatcagaggcagacagatcagtagaggtgaagagcgattggaaataagattcgatttcatgagtgatgtcttcatccttggtgaagatgcctccactagaattatgaagcttgagaattttattgatattctttctatgggacgcatggcggtggaaattttttgtattcttgtccccctgagcaagccattgggctctggctctttgtttccaatagatttcttccttgtagagaagagcctccaaacgagattggaggtctttgatttttctcaccgtaatattatcccaattggtgctattcctggcttgctcaagatctttctcaaggcgaattatgcgctttttaaactagaaattcttcttgtggttccaatcatttaagtgagtagcgcagttagcttgagtagcaacaaggcgaggaatgacttccaggttactagaagagcaattccaggctgattccagggtcttagtctaatttggttctgaaagccaaacattttcaaaaaaggaccgctttttactcggatcagggattggagtggtagtgctattggtaacaagctcaagaacacggtggtcagaaccaaagaaacctaggtgagagaggagagcatcagggaaaagattagaccaagaggggttaataatgccccaatcaatgtgctcttggatgtttttcagggaggccacattattattccaagtcagaagggggccttctggatcaagcgggctaaaattaaaagagtctagaaaacgtctgaaatcagaagaaggacctctgtcagggtttcccccatgcttatcatccaagttaaggaaagcattaaaatccccgatgacaagccaaggatccatgggattattgttcccaattcgatttaagattttccacgtatgaggcctttgagccgcaaagggcgaaccgtaaaaacaagtaagatgaaaagagacattatcggtaggtatcgaaacataacaatcaaaatgactaatagattgcgaaagtaaagttaaaattacatcattgttccgtaacaaaaggaggccaccgcctctacctattctagggacttctagaccagagtcaaaattaagcttaatcctaagtttgtcaacagcatttttaacaagtctagactccatgataaacaaaatgtcaggtccacaagaggaaaccaagcgggagaaattacggaatgcacgatcactcctgataccacgtgcattccaactgaggagcttcatggcagcaggcaggcctgctcagcggccaggcctgcatttttcaggagagatctcgggatcagtgtgattgttaaagcgggagcgcttgaccgtttgacgaatttccccattgaccatttgggcttgtcgtttgaaactttcgttcgccttggatttgcttttcttttgtttgcccttggagctggaaggagtggccacccctcgttggtaggacaagttcatggcctccaaccgtttgctagtaacaaggagtgggatgttgaccggaagtaggacatggcaatgcttggtactagtagatttggtgctactagagttttgtgaggtagtaaagaaactaggtgttgtggcttgtggggcattttgggcgcaagtgttactcatggtggcattaagaagagccgtgaatgttggtggatttgcctcgggttggggaagaaaagtggtaaggggttgggtgtcagtttgattccaaggcacggtttcatttgaatgagtggaggggtcggacttaaaaagtcccacaagttgagtttggccgagagtggggttttgatcatggggagcatgggtagggaaagggggcatggagtcgggtagggaaacacacactgcttttgttgggtttgtagtcataaaagtggccaccgggggagtagtgaaagtgagctgttcaggacaatatagcataggattagtataaatcttaaccttgcccgaaattgttttgatatcatacctgagatcaggtggaagaggggcctcatcacaggccttcatataatcaacacaatcttttgttgtaactatgacccatacgaccacaaaagaagcatgtgtctgagaggttttcatactttagctcaagccaaacaactttgtttatccccgagaaattgaccgggattccccttggaagtggttgtgccacatcaaacatgactcgaatacgaaaaatagggtccccaagtttcccgaaaggaaggccgataaatctcaaggagatggccgagagaggaggagacaagctccgcaagctttacgaagcgtttgagaaatggagtgttgaagacttgaacccaaagagggagtttcaggaggttgtcgccatttaggacgtccaccgaattgggaatatccatgaggatgggctggttgaggtatgaccaaggctgctgcaatagaacacgatgcctatcaccttcacatccaaactcaataaggaaaaggcctttggatcggtccgtaatggtgcagggaatcaggaaatattattccaattccctatcattttttccatgaagacttttcagttgaaagttttgacagtgtatagtttagcaaccagaaaaaattgagcaacaaggggggatcaacgactgtatcaactgtaggagtgggttcataaagtgtctgaatggtactttctgtatctgtgagattaagagcaattgataatgaggtggttaagtcatccatgactgtgggatcgtgtgtgcacaaagaaaggcaaaaaaaaaaaacacagggaatgcttgctgctaaatggtgcttcgtgtgtgctgaaaaggtgaagcaggttgccttttatagcaaaaatgctaaaaatggcaataaataaggagttcagtggttgagtatcacatctcatccactcatccaaatagagatacagaatccaaaaatgaagcataacatttaata

SEQ ID NO: 37569 - DNA, 2483 bp, Cannabis sativa
  modified_base (1866)..(1893): a, c, t, g, unknown or other
  modified_base (2416)..(2424): a, c, t, g, unknown or other
tggaggcttgaagcggggacgttacagatccctattgttgattgatagttattgttgtaaaagaattttaataatggtaaatagttgttccatgaacctttaaatcaattacacaagcccgtaatgtgtccttcaaaatcatagttgtcctttcaaactaaccatttggttggatggcaagttatactgaattttaacttagtacccatagttttttaaatactttcctaatttgaggcaaacttaggatctttgtttgagataatggacattggagccccatgtagaagaataatctctttaatatacaactcttcatactgattaactgtatatattatcttcactgacataaaaagtgttgacttagtaaagcaatcaacaatcacctaaagagaatcgtataaacttgtagttttaggtaatccaaccacaaaacccattgtgatgtcatctcgcttccactcaggaagagtaagagtttgtaacaaaagcacaggtctctgatgaattagatcaattaagaattgacacgtagaattttttttgaacaagggtagtgacaaatatagcgaaaattggttacttaactatttttgttgctatttttaaaatttgagtgtttattaacaacaaagcatataaaataagtatttatggtgcaaaattttccaaaaaaatgtaacattcaacatttattcaataaccccctctctcaaaaaaatggcataaaaatacaataagtgtataagtatgtgttcatatataaaataccaaaccaatctaatttgtagaatttgtaaagtgcaaatatcagcacttatgtagatttttttttgaaattaaactcttaacaaaaatcaagagtttaatacatatcaataagaaaagatgtgtaatcttcaatctaagctaattcaccatccatcctaagtgcatgcacaattaattcatagagaaacgaacatgaactagggatgccttaggaaaactgaaaaatcaaactagcaaaaaaaattaaaaaagcctagctcatttcaaaagaaagagcgctattgaaaaacagaaactaaagttaaataatcagattccaaataacaaagagaaagaacaacatgcaagactaatccaacactatcattaagactaatgctttttcttgaatgactaagaagtaaccaataagtttagatcttctacaatatgtgaacttttcgtgttttgaagtatagataaacaacctacaaaataccaaaaaagataaatgaggtaaggaattaatttatacaaaataaactaaatttaaaaactaaagttttaatatatatatatatagcaattaaaatatgaaaaaaaaaacctctatgatattcattgattctccaataatctttaatgtctccaaaaatttatacacttaaaaaataaataacataaaaaaacaaaaatacactaacaaactgagaaaatgtgagaatataatatcactctcatttatgtacaaaataaaataaaataaaatatggtgaaaaatatagttttgaaaaaaaaaattgttaagaagtaatattataacaaaaataaaacagtttaaaatataattcaatagatatgacaactaaattaacatcataagtaaactaaaatgagtagaatataaattaatacaatattttttatactattgaaataatagaattttaaaaagaaatcattacaaaagtaatgtataataatattttattttgaaaaaaatgatttgatttaaaaaatttcacgaaaatagaaaaaaaattatatattacgattaattaaaataaaaaattcatgaagatatttagttaagtaataataataataataatnnnnnnnnnnnnnnnnnnnnnnnnnnnnataataataataataataaagcatttacaaaataagtgagacttcctccaagtcaccatcacacatgaaaagcggactaccacttcagtcactattcatttgcgcaaccaccgatggcgactgatgacgaatccaaaccaccatgaatctgccgataattgcacagagcttggacttcaatccttcatcatcgatgatggaaacttccgcattcatcgacaccataggagtcactcacaagttttctaaacttaaccatatatcttgtacccgatctagcttctagctattggatgaattggtaaaaagatatatgagaagaagaactgttttgagacaaaagtcctgattatacgaagagagagctctctacaaatccttaatgtcgattaagcctgtaatgccctaaataattaggcacactacccaagatatttacgaaaccctaatcccctaaacgagattactaatcaaaatagcacaaaatttaaagttttccaataaacggaatgaaaataaaacnnnnnnnnntttaaactttacaacagttgggatcccaaaaaaatatttacaaattttattacaagtct

SEQ ID NO: 37570 - DNA, 3856 bp, Cannabis sativa
ttcggtttctcaatattactatgtttttctgtctaattaactttttttctctgaactttttataggtcaatactagcgggcaatttgttggtttagctgagatgacaggaccagttgatttcaacaagaacctcgagtattggcaacaagacaaatggaacggctgcttcccagtcaagtggcacatcgttaaagacgtacccaacagtttgttgaagcacattacccttgacaacaacgagaacaaacccgtgacaaacagcagggacactcaagaggtatttgcacccgatagccatgtcttctgttattacttttttgtctttcgggaaatttttacctaactgttgtggatttgcttaggtcaagctggagccagggcttaaactgatcaagatattcaaggagcactcgagcaagacttgtatcctcgacgattttggcttttacgagactcgccagaagactattcaggagaagaaagctaagcaacagcaatttcagaaacaggtgactaaattgttttgttgcctatgaacatcatgtttgtactttttttctattgcttgtgttattcaaatttgcttaatgaaaacaggtgtgggaaggaaagccggtcgatgagaagaaggaagtagtggcaaatggagagttgaacccaaaaccgtctgaggttgtttcatcagaggtcacaaaggatgctttgccaaccaccgcagcagctcaagctggcaacagtgttaaggtttccgagaatggttctgctaccacaaccatggatgccccaaagggtgccaagccagtagttgtggctgacaagagaaatgttgcaaacggggttgctaatggttgctaatctctgcgaaatgcaagatggcggtcctcgctctccattgaatagttttgttaccaaaaaaaagataaaaaaaatcagaaaggtgtttgcttgctgctgaatatacttaaaagggcaaactttctggcaaaagtaaattctgggtatttctgggactgccattagtatcaaaatccgaaagctttcggtcctgcttatggagagagagtcaataattcattgagagaggaagaagatgaagaagaagattcaatctagggcaatgttggtgagaggtgtctcatgtagaatttggagttttttttttcttttttaatattttgctactacagtggggtttagaatcacctaacaaggttttgagattgctagggtttttggggggtgttagggttttctggtttttctttttttttagttgggttttattattatgagataatttcttgtcttttttttatgggtttattttttttttttggttggcttatattttcccagtcttgtaaatctttgcagaggtcagcttttgattttcttgtcttgtaagaaagagaaagagagagaactagaaaaaatcaaggtgggaaatatataattacaatattaattaatattataatagtcaaaagcagcttatatatctataaatatttttatgaatttctgtttttttgttgtgctttttatttttgcttaatttgaattttcataggtataatgaatggaaagaaggaaatgtatgaatatgttaatgtgtttgatagacttgtctttccttaaacaagcgttttccctttattaatatttattttacacctctaattgtatataaataatgagtatttaataaattaaattggtatgaattaacaatgtccatttaagcattattgctaatgtttacaaagttgaggaaagtgctttcaaaaaaataaaaaaatgaaaaaattgaggagataaaataaaaatggtagaaacttacacaagtgttatgttgatatttcttgaatcaagagtaatatctaatatactatatgcgttgtgtggtgtagtggtaggaaaatttttatcggcttcctcttgttaagggttcgactttcacctaactctttaattgtgagagattgtatttgatctttgaaggttaacttaggttgtggtggactatctttggaataggaactctcatgaagcgtaagtatccatgatctaattaaagcacgatgaagtatgatgctcttatagctagcatgtaatcttcgaaattattttaagattgaagcggtggggagcacgtggtccccgaattgccttaagatccaagcaatggggagcacgtggtccgtgtgattgtcttaaaatcgaagcagtgaggataagatatgcaccacttaattcctttttttttttctaaaaaaaaatagtaatatctaatatatattaaaaataaaatgacgagtctacagggttagaaaatgtcattgtgaaagattaataaagttagtagggttttctagatttggattgttcattatttctctagatgcattatgtacgtgtaatagtcttagaggatgaggatgtgtaataaatgaaagagtaatttgtattcatatgcttaaatctcttctttttttctttgattaaatcactttttaaaaatttaagatactaattaaatatctcatcattacatactaattaaattattattgtatataattttatacgtgtgacatatttatattagtttataaattttggggtcatgtgtacacaactttacatattaagatttaattggacttaaatttataaacaaaaaaataaaattaaggggcattaatattaacacaaaacaaaattaaatattaaaattctaaaaaactttgcccacaattaaaaaaaaaatacaaaaataataataaaattataaaaatagtatagactttttattatttttaaaattttatttacataaaatagtcttttagtgtatttttataatttatattattttttttattatttatatattatttattattaaataccatacaaaaaataaaaaaataaaaacttaagtgaaaatgtacaaattttacaaaaattaatatttggtgtaattatccatttattttattcaagataagtgtatagaaattgttacattttaaagagtgtagaaattgttacacccacccatgcaaactcacgtgcaaccgcacgtgccatcccctccccaaatccagaaagccacgtgtaacctcctccttcttctcctacctctatcttcttctccaaaaccctaatcttcccccaattccagtaactctttccccaattcaacaatccaatcgataaattcattgcttaaatctccagcaacattcacaatcattacaaaaacaaagaaaatgttttctataatcggaataatcagtattcaaggcgccatggatataatcgtagctggattctccctcctaatcgctttaggtattttcctcttcatcacttttctcctctcttctctcgcctttctccaaaacgcaaatcgaatcgaatcgaattgattttgtttaattctttacttctttttgttttttctcgaataaaccattcctcgaatcccatccggatctgcaacaaaacccatgggtttataaaaccctagaacacgaggttcagaatacaaagcaatattcgtaattcctttctccaaaagctgatctattaatctctccattaccgctttacccaaaccgaaaccctgaaacgaaggatcgacgacaacgtcccaaataatcgcgttgaaaactccgtctccggttgctctggcgaacgcgactggccgttgagtcttctcgtactcgatccagagaagtgcgtcggtgttttcgagtgcgattctgatcttgtctgtatcgcgtttggggaatccgacggcgacgaagactttgttgaggttgtcgaggttgagatctgacggtgtac

SEQ ID NO: 37571 - DNA, 6907 bp, Cannabis sativa
  modified_base (3013)..(3019): a, c, t, g, unknown or other
  modified_base (3132)..(3138): a, c, t, g, unknown or other
  modified_base (3250)..(3253): a, c, t, g, unknown or other
tttcaaagtctcaatcttatctcttttacaaattgtctcacataagaaaacaagatcgggtcgcttttggaaaataatttccttaaggaattgcaccacccgtgggttcccaagcccccggcaattccaacttaataaactcataatgattggcgggacccaacatgagtacccgccacataatcgtttttttgaaaaataccaccttgaacgcctcctcttgtcacttcaccaacatccttaccaatttcttgtgacacaaaattaccactttcaacatcaactacctctatatccttctgtggcccatctacctcaggcccatttaaatccatatccacatgtcccctattcataacaaaaacatcctggcccattttcccttctacaacaaacggcccaccctcacccaacgtatctccctcacttcccatataagtcctccttcttttattatcaattataaccaaatcatcactgattccctctccctcattatcctccaactcagaattgacaacacatcctatattccctcctaaaatctttcctatcccaacatttgagttaataatagaattattacctattataactcctccacgattttctccattaggcacctccttgaattttgctccttgatttgctccttgagattctttgtgactcgccggagatctgactgttgtttcctccaccggctggcccatactatcccgaagccaccgcgcaccgatttgacgattagaacgacgatctggagccttcataaacatgccatacggttttgctattgtttctaaaggttcgtcgaatagacgatggcagaatttttctgaatgtccaattacgccacagataaaacaaaaggttggaaccctctcatatttgaaattagcccagaaccattcctccttgctcttgtaaactcgcatacgtcgtcggagaggtttttcaatattgatcagaacccgtactcggtaataatccctccatatcccgttgaaattctttgggcatgatgatacatactttccaatgtatccccccactgctttgagaacaatatccgaacggaaccccacttgtaaatcatacacttgaacccatatctccatcatgtttaaaggtatggttcgagggttatctccttcatgcagacgttggataataaaaggagctcgattaaacgtccacggcgttccctccaaaactctactaatatcgacctcatgaaaaaactgaaacaagaaccggtttgtttctagctctttaacatacatccctttcaccggtctccacaatgaagccataacattttttagagcatcaggatcagccggccgatccgacaacaatctccccgccaaacaccacctcgaatcgaattcatcccctaaatcctcagattgatcgaaccagacgccagtttcgtcttcatcttccaattgtagatctgtccatcttctttccacctcctcactatctcgactactagaagccataaggaccaagagttgcagtagtaaccaatcgtaatactcgtaactaatttgtcactaaaaaacaccatacaacgaacatgtcagaggacaagactattatgtaaggtttttcatatttatatatatccatagtcatatttatatataactaactatatatataataatagttatatataaatatgactatggatatatataaatatgacatttatttatttatattaaaaatacaaaattattgatccagtccacattttgatttgggaccaagtcttgaattggaactactttgtttggttgtaatttatagataaagacatacacttgtatattgaatatctactttgtaataaacaatatggaccataacaaaatcaatacgtgtcatcatatagtattgatagatatttaattaaaattcatgtattattatttcttttttgaatttaacatagtagtactaaggacaatagggttgtgtacatcaaattttgtaaatcgttcaaactgaataattcactcaaattgagataattcgataaataatgcaaaccgaataactagacaaaaatataatccatccaatttttatattggacaagttaaaaataatatcaacttatccaatcaactcgaactaactcgcccaactccactcgattaagaagattttatatatatatatatttacatattatataatttacatatatatatatataaaatataaaattcaattactttttttatagtagttaattttaactttgaattcaatttatatttatttgttttattatcataattacctaaaatataataattagatgtaaaaaaaaattagttatcgatttggataggttaactcaactaaattgagcaatttcattgcgtggattataaattaattttttttaattaaatgggttgcacttatatttttgtaatttaatttttacattaagctgaataaaatatagcataaattaaccaaactgagtgacgtagggtactgatattacaatttacaaataattgaggagcgttgggtaataactcatacactttctccttttttcattccttcctagcttaattaatatattagttttattaagtatattaatgtacttactaattattggaattatattttttttaattaagtgctttcgctgtccatctttattattagaataataataataagtaaagattgttggttcaacaaaagactaataaggtgaattttgagtttgacttaaaaggtggtccatcaaaacaggctcttaaaatacactgtttctcatctcaccaaacatgcttcatcatatcatattacataataataaaatacttgtgtaccttctcactccaatatggctaattctatggtacaatcttttatttggtgtggatgtgattgttctttttataagcgttggagtaatttatgacataaatacttaagcttaattctcaattgcaaataaatacttaannnnnnnttttagcagtaataatacctaagttataattttaaaacttttgtaggtacttaactgttaattgttaaataaattgtcacgtgacaattcttgattggtccaagtcattaaannnnnnnttttttaaaaaaattaatttatatataccaataagaaaataacacgtggataatgacataatatttaacgattaggtacctacagagttccaaaaatataacttaggtattnnnnccgccaaaaattaaacttaagtatttatttacagttggaaattaaacttaggtatttatgacacgaattactctaagcatactaattaattgtttgaatttatttttagcaatataaacaatttaaattttttttaaaatatacatatagttctaaaaagttaaattgaagaacaaattcacaaacagataaaaatatacggaaacagttttttaaaccaagtatcttaaatatttatttaggctaattaggatttttgccctataaatttttacatataccaaatcatactccttgaattttttaagcgttaaaaattttccttaaactattaagattgttggatttaaggactgttgtttaatttcattcaattttactaatttggtgattgtcaatgtactaaatcatgttctgattttaatatctaccaaatcatatacctcaaactattacatgtgtcaaattatattctcttaacttttatctatttcttactaaaattctaaaattagacaaaactctttaaatttaataatcttaataatctaataaatatttttaacgatctttaaaatttaagaagcataatttaaatgtttagtacatttcaaaattggaaggacatttatttatttaaacaccacacattgtataaatatattctttttcaaacttgaggcttgaaaagaccagcatgtcatgctaaataattttatattattctttttcgtatatatatatatatgtctacatgattttcagaaggcgaacgaagcaggaaaggtacggcgtcgttttgtactgatcgagtaaaacggcgacgtttttggactaacgtcggcagacatcactttactcatattatcgtctctgtcttgtcttctcaaataaggccaccctactaaaaaggcgtatatttcctttccctatttctctccctctctctctctctctctctcgctatatttctggttcgttgacctatgattctgtaatcggcgaagccagaatctcgattccacactctagatctattcgtctccggtcccaatttcacgaatctaaggtcgaatcgctttactttctttctttctttctgtcttgatattataatcactttggtctttctagtgttccgactacgaactcagtagtctattattcttagtcgtgtctgcctaatgattcgtttcgttgattttgtttcagatctagtggaatctagctcgacaaagacttttgtttcgagttaatctgcgagtatacagttcaggttgtgaagttcttgttgactgttttttctttacgtatctgtattttttgttgttcgtttgagctctgtaatagatcttgggagagaggcggtgtcgttttcttttttttttttggtgtttcgttcttttctttggttgagattctgggcgcttagggtttctgttttcagatcttgggtttgggagtgctgatcgttttcttgcttaaaattgatttgattggaaatgtcgattctatcgaaaggtgattctattcacatcagagaagtatggaatgataatcttgacgaagagtttgcattaattcgtgatattgttgatcggttcaattatattgctatggatactgagtttcccggtgttgtacttcgccctgtgggaaatttcaagaacattaatgactataattaccagactctgaaagacaatgttgatatgttgaaattgattcaattgggtctcacattctctgacgaggatgggaaccttccaacttgcggaactgataagttttgcatttggcaattcaattttcgtgagttcaacataagcgaagatgtctttgctagtgattcgattgagttgttgcgtcagtgtgggattgatttcaagaagaacaacgagaagggtattgatgtgaatcgctttggtgagcttttgatgtcatctgggattgtgttaaacgatggtgttaattgggtgacatttcacagcgggtacgattttgggtacttgctcaagctattgacctgtagaagtttacccgattcacaagcagatttctttgatttgatcaatatctacttcccaatggtgtatgacatcaagcatttgatgaagttttgcaacagcctccatggtgggttgaataagcttgctgagttgttggatgtggaaagagttggtgtgtgccatcaagccggttctgatagtttgctcacagcttgcacattcaggaaattgagggaaacatttttcagtggctccactgagaaatatgcaggtgtgctatatggtcttggtgttgagaatggacagagtactaattgaaagataatacaaaaatcttatggctaaaagattgatatgaatatttgtagactattctgagtgtgagagattcagtcttcttctttgtacactttggtaaaacaaacccttgtgttagttcttaacatttcttctttcctcgtttgtaactgaaaccttaactggttcttgtagctttgagtttttgtacatctatattagtgtttcaataaaagaaaaagtttaattgagtttcctattactgactctgaccctaatacagaaaatattatccgtgcaagttttttcttttctttctttctatactctaattacagtgaaagatatgcttgtttgtgatttctgaataacccattttgctctatgagctaagcttgtgtctctttgtaccaacatacacgtaaattatattctaaagcttgttgaagtaattaaagcttagtactttgaatctttgatcaatctttttggatccaggatagatgagtaatattataacttgcagagatctgtaaaaacttgtctgtactcagtactgacctgaccacacaccacacacattgaatattacatctgaacttgttgatgtatgtactataataatatattgccatattatttgattcagctctctaatacatatttttagtttactgagtttacactcattaacataaaccttttttttgtttagtactaagctactagccatgaagtagaggtactcatttatgtgaagaaagaattgcttcttgagctaaaatttcaataaagaaagtagaaacccaagccaagctgctcccttttgttcttttgtataataaatttctctaaataagataataacagatgagtgacaagatcttaatttaaaaaaaaaaaaaaaataggaattaatagtcatttataaatgtatcaaagatactgtagcaatatgtataaagtagaatcagataatgtttttattagccatttgtttttgttatacatattttaccattagagaatattctttatgacaaacctatttgtagtatgaatacatcaaaacacaaacataagttcatccaggattttcttcaaaactatgagaattatatattttaataaagacaaataagtttcttctactacaaattatgacacttgtagagtcgtaccttttggacagaaaatcctttaatgaaatttgatatgtttactaaatttgggtatcaaggtatcaaatatgtatatataatttaaaagggaaatttgattttctatgcttagaaaatcaaaaaatttgatttttaaaccaataattaaaaccctaaaaaaactatac

SEQ ID NO: 37572 - DNA, 4354 bp, Cannabis sativa
  modified_base (2908)..(2913): a, c, t, g, unknown or other
catacatgggagctggtactggagaagaatagtggcactgaagaatcaaattagctctctggtggacactcatcaattcgagacaggtacttacaacatagcaactggttatgatttattttgtcctgctcaggagaagctgaggtggagtgaactggtttgaggtagatttaatctacttaagcatagtgtcatcctatggattgctatgcatggaaaattgagatctaagaacaggttgcatagatttggcattattgataatgtcgattgtgttttctactgcaatcatgaggaatcaaaggagcatctattttttacttgtagctgggcattccagtgttttacaggtgtggcacactagctacagtggaggagttcaactcaagaattatcaagtataaccaggtggattcagagggttcgaatgagtagattcagaaggagagtgatggcagttgcccttgccagtcttgtttaccatatttggagaagtaggaatgaattgatatggcaaaataaaaccccgaatgttgatcacgtggtgaatcaaatcaaaagaaatgtcaaacaaaaaatccttcttatttgaccaagaaaagtaagcaaggaagatgtaatgtggtttaatacattgtaattttgtatagatacataccgaggcctcccttattggatgtggtgctcttagtttgtaaaggaaattgagtttgtgcaatgaatttctcaaaaaaaaaaaaaataataacacaattcataaataatatataaaaccataaatttatttagtgtctcggcagtagaagtactcctgcaatgttcctctacccaatctttttaaagtcgatatataatcatttgaaagagtgatataaatgtatacaacatagcttaagatacggatcttcgttaaacgagtttgttccatacaggttggctacaggtgtggataagaaggaatggcgaaacaaaaacataaccttaaatatgtttcactaataccaaattcattacatattaaaatttatgcatttgagaaatttcgacagtttgtcagtaagaatgggaagaagaagaagaaccatctactagatttgatttttaaacaacgatttgattgagagcaaactgcttgcaattgcagcatggacgatttctgaatcatacaatattttgcataaatatttggttcgagaactctcacctggtgccaacttaagtatcccaacatttgatttccttcatttgcttccaaattcatctatctgtgttccctctcaatgatgcattcccctaaattcatgccccaccattcccagcgagcaggtaaagatgcaaaaattccacaagataatttaaacaagagaaaaggaagtatcgcatcttatgacatagaagcatcctccctcaaccagcaacttgatatcagtatccagaaccaccttcttcgggtgtagaatccatagatgcaagtggctcatcatcctcttcatcttcttcatattcagcagcaccaggttggccattaagatccacatttacaccattaaccttcctcacaaactggccccgaacacgaggccttctttcagcaagacgttttcgattaacataccttatctttttatcaaaacagcgctccttccttttttgcctaaattttattaatgcagcctctcttctatcaaccttatttaatttcacttcaggggaagatgaatttccaaaagagggccatgaatgatttgtaggcatctgacccggttgtaagcagacactgactgggtaataggggaatgatgtcatcccagcagctagatgaggaggacattgttgaagatgattgtactgcggcatcattactgtagtagcatgattctgcaactcatggggatttttttgacatatttgagctgatgatgaaatcataacttgattaacaacccctgacatacaatatggatacgcagcttgagcaggtacgttagagtcctcgtgtcgaggaccatttctttgatgcatttgtactccattttcatgatgcacttgcactccattttcatgatgcacttgcactttggaaaatctctctttcaaaatgttattttcatttggaagttccatctgcgtagggggggtacaagatctctccaatgaatgagaatcggggaaactagtgctgcttggcatgtcatctccctgtgaataactctcccatgcttctccattttcatgtgcttgggtatcaactacctctgtgttatcacacgcttgacgtttctccccaaatctcaattgttgggcagcatgggcttcagcatgggcaactgcttgagagttgttcttgattatgctagatttcacataggtaaaaaaagcagatgactctccaatctttaattcgctcttctttgggccaccagttgaaaatttccctgcaagatatattatcaaaacaacattataaatataatgcacgtattgtatgacatataggtaaaccggcaaataaatgaatactaacaattaaaaaacgtacacataaatcatttgaagaacagaaaagaaagtaattatttctaagacattttttgagctacaatcagcgatgtcaaatgagtgaaattttatatctgtgctcatggtagctgatattaaccgcagaaaatcttcaatcatgatgaatgtttcaattagactgttaggtaacgtttggttggaaggaatgaaaatacataaataggaatggaataaaatttaaatacataacaaaattgatacaaaaaattattaaactttttcaaatcttatattgaaatagtctttccttccatttcaaaatggaataatcattccaccaaaatggtagaaaggccattccattaaaatgatattccaatactttaannnnnnaccaaacaaaagaatggaataaaaattgtttcctttcctttcctttccattcccttctatttcattacctccaaccaaacactacttaagaatagcataaacaaatatcagcaattctctacatgtattctagtcaccaacagggtgtgttaatttggcaagaaataaacagaatggaaaggaagtacattttcattccgttccattcctttgttttgttaggatctaaagttggaactattccatattccaaataaaatggctttatactttagttcaatgggaattcctttcagaaatggaaggaaaaacaattttaattcataataaaatattattattattatgaaagagaataggtaacatctatatctatctatctatatctatatataaaggaaaactttcaagagttgatgtagcattctctccttctaatgttccacattctctaatttttagtttttctaaattttcttattaacattaattaaaaagaacaattaattaaaaaagaaaagaatcctaatcaccatattagaatttttaagaaaaaataagtggcttttcattttataactccaatttaaaaatatatattattatgtgagcattaatgttttattaatattactataatctctttatattccataacgttttctacaaaataaataaataattaaatatttgaattcttatattacccatgtctatatatactagctattgccaaattattttgagtaaaaaaaaacttattatggctagctatgtttagagtcatagattttactattgaaaagttatactctagcgactattgtaatatgtttctcatatttctccatttctaacctctgttgcgatctccatcatcaccatccgttcgatcagtctttataatgtaatcaagttggtttttctatttatgtttgagtttttgtggttcattaatacagtcaaatgacacctgttacaagaccagtaacacccaatggaataaacagaaagtataataaatgaaaattattaatcatcttttttcctatatttttaattttattccatttttaattttatttctattttctattatacactccatttcctttgtttccattagtctcaaccaaacaacacctaactaaataaataggaagtataatagaaatataagaaaaagaaaaggtctaagatataatactacaacataaagaaaaccacaatttattagatattgaaagttgaagcaagcttggcggttttataaatttcttgaatctcagactggccgggctattaagagtttctcccctaaaaggacctgatggtcaatggaatgtttcaattgatttgtaaccacttcatccttgaaaaagctgaagccatcttgtttgtcccttcattcggggggaaactcattaggcacagttgattc

SEQ ID NO: 37573 - DNA, 5776 bp, Cannabis sativa
taattttgacttcatcttatgtcttctttcaacagatagtttctgtcataattgaggcacttgcttggtgttctatgttggtcatgattggtctcgagaccaaagtctacatctatgaattccggtggtttgtgagatttggagtcatgtactctttagtaggggatattgtgatgctgaatctcattcttccattcaaagacttttacagcaggtaagctgtgttaaaaggttgtatagacttttggtatgataaatttgtcaatgttgataacacctgaatgaaaagaactggtcacgaaaacaatatccattgttgaaacaatggaatatccattgttgaaacaatcttaagtctttgacaaagaattgtgattcctaagtggaagtgtccatgatgcatccactgctttgggaaatctttggatctagtatttaaaattgttttatggttatcaaattatttggttttatacttatgctggccatttttgaaggtgagttactaatgcttgtgattcttctttgcagctctgtgttgtatttgtacatcagtgaagttgcctgccaggtttgttaattctttttctttcttatttgatattcagggtttattctcccaccaaattcattactgcattctcgtagttaatccacttttgctatgttttctcttttgataagacctacaaagattttagactgtttgagtgtttttaccctttgttctggttataatcaagtaaaagctaattaggcattaattactagaatagatacacttcttttatttagaacttcactgtatatactctatctggtaatgttcatgtttatctacagaaaacaggtgctcaaatacaaggagttcttatgttgtcactcttgtgttcatgtaggtcttgtttggactccttttgcttgtgtatgttccacaattggatccctaccctggttacactccattgcagactgaatcaattgatgatgctgcatatgaagagcttcctgcaggggagcaaatatgtcctgagaggcatgccaatataatttcaagtatgtcttcttgaataagctgattgttctttgttgtgtttggcttagtctcttaattggagactagggtttgataagtaaaagaaagtttcggatattgagagtagagcttattctggcttcatctttcctactgttgtctgcatctgctgatcaatcctatgttgtattgtatctattaattcatatctcggatgtgttctttcatcaggaatattctttggttggatgaatcccctcatgcagcgtgcatatcagagaccaataactgagaaggatgtgtggaagttagatacatgggatagaacagaaacactgaattctaagtatgccatcattcatgcctaataatttcttgtatataaatttaacaattcccgacaacaaccaagtattttaccatgtcattttatatttttttttgtaccttatgcaggtttcaagaatgttgggttgatgagtgtcggaagccaaagccatggctgttattagcattaaaccgtagccttggaggaaggtaagcttacatataaatatgtatatatgtgtgtacgagattttcatgaggaatggagtcaacagacaatataattaagtacatggcttatatggaattgcaacagttgctatcttaacttgtgtttcttatgttactttttgtacatgcatctaattcccttttccttttctttcttttataaccttttatataggttttggtggggaggcttttggaaggtagtgaatttatttatgtagttcttttcttccttatcttgtctcattagttctcagtcaaatctccattaagctttttaacattgttccatggattagcaaataattcatttgtaaggtgcatactgcatacctagactttaaacgtgcatactatagacatggttctgcattatatactcagctctccaatcctctcccctcttcattattcgctaccattctaactttggcccctttagctttcaaatttctcattttaccatgcaagctatgttttgttgacgctttggctccttatggaggccaaaatgagactctaattctacaattaagagggccaaataaaaatgctctcttttaatatgtgaaattaaggagttagatttgtgcaaattaaaaatgaggacaaaagtttgttagtctctcagacataggaaagtgatgtaaattttggatagtgttttaagctcaagcattcattcttgagaggatgtttttctttttatttaatttgttcattttataacttgtagattggcaatgatctctctcaatttgtggggccccttatcttgaatcgtcttctacaggttagctcttttttttaatcaatactttacaagagatgtgtcttaaatgcttcgggtttctcatttgatttaaatttctgagatgcttcttgttattgtgacatctacttgttcatggtgggggaacaggctaatcataagtttttaattctgatttataagccccaaaattttgtaaaacaatcattgctgcattattgttgttagtattatttattttctgagaaaaagaggttttgtatctaccactgtacgactatgagcggtctagttagaaaggagcaagaagattgatattagattctgtaaataacttcatagagattatatactccttatacttgtcttgaattattaattatcatttcttttttaattttttgcagtctatgcaacaaggggatcctgcatggattggatatgtgtatgccttctcaatatttgttggagtggtatgacacaaatattctattgtgcttttggatcgtttacattgtctggtccttaatgtctttcctgtagatggtgttcattgtgtttgagcattttattgtttaccgatgatctctgttcctagctatgttcatataaaatggaggttccttcttcatagaattttttgctcatttagaaaaaaagtataaaaagaaacttatgcagtcttccttttattatttgttgttctactggcatatacttttcctgatttatactatttttgtttcaggctataggggtgttgtgcgaagctcagtatttccagaatgtcatgcgagttggttttcggttaagatcaaccctggtaaatttttctttcatcacagcatatttttagtaccttcgggtgtgtgtatgcgtgtctatatttttagttcttacaaatttatattttggaacttgcagtatcagtaaatattagaaaaggactgtatcattacaagcatccttttaggcactcatgggtgcatgttatactttgtatttgcaggttgctgctgtatttcgtaaatccttgaggctgactcatgaagctcgtaaaaagtttgcaacggggaaaataaccaatttgatgacaactgatgctgaagcacttcaggtgggcactttctactgttcttttttcctttccttttttgatgagaaacagaaagaagaattattacataatcaagtacaatacaaaaatagaagtctccagatttacacaactaagcgacatttgatggaaagtgaatttggaatatcagtcgtgttagactgttagttatttatcttctggaatagatgaaaggatattggcctattaggtctcgtctctttaaagttttgtgaagctatcctgggtccttagctaatgattctgttggaaatttacagcaaatatgtcaatcacttcacactttgtggtcggctccttttcgcatcgttatttctatggttcttctatatcagcagttgggtgttgcttcactgattggtgcactgatgctggttcttatgtttccgttacaggttagaagttgcacattccaaatttaccatttttttgtgtgttttgttttagttttgtgtatctcaaaaattttgtcaccatttcttactgtgattataaattcctctaggcataaatatttgtttcgaatatttgaaaaagttccttctattacgttagtagtttcatgattctttcaattagtatttgaatgatgcattatttaatacgtacagctcatgcaagctcttctggttagatttttatttaggaatcctatttatacaaatttgttatctctacagagctggtgttagtcataatatgagtcaggtttatcttatgtttttcctttaaagtagaatccgtcgtgtatatgcatgcagttaggatattcaatttttacttgttttggtctggaaagcagtgtaaataatcactgcagtttgtgtttctccattcaagtattatccatttcgtttagagttctcatgggctttgtatttgctatcaaattatttaaaattaacatgtccagtgattttgtgggaacagacatatgtcataagcaggatgcagaaattgtccaaggaggggttgcaacgtacagacaagagaattggcctcatgaatgaaattttggcagcaatggacactgtgaagtatgtttttctattgttttttaatattattgcttgttttctcccagaaagatctggtgtttattgggaatatcttgaatctggatcaggtgttatgcatgggagagtagtttccagtcgaaggtacaaggtgtccgtactgatgaattatcttggttccgaaaagcatcactacttggagcggtatgacattagatatcttccaaattctttttgaaagaatgttaaaagtaatgacataaattttcatgctattatactgtatacatgtatatgtattttttaaaggaagaaaacttgtgtcatatgtttatgtctcagaagctgtatattaagacagcaaactgtgtagaaacattgaattacatcatatcgttaaacattggagctataaagtattatcattagctttggctatcgatttattgtttgatttctttagttattaatatgttttgtatacttaatcggttaaaatggtgattctcagcattgtttgtcttcttttgcttgcagtgtaatgggtttatactaaacagcattccagtttttgtgactgttatatcttttggaatgtttacattgctcggaggaaatctaacacctgcaagggcatttacatcactttctttgtttgccgtgcttcgctttcctcttttcatgcttcctaacattataacacaggtcttgttttcttaatctctatcctttgtattttttatcattatttactaattatattatacattagagcaaagtgactgcatgcttattgtccagcatctgactttatatctatatgttaaggaacacaatttttttcaagcaagaaaatattaggaaggataagaaatccacccccacatgacgtctatatgataaagaaagaatatatttaaaccagtgtgacttttttctcctttttcatgattatgcattattttttatgcatttattaatcgattgtatcactttcttgccactaatgatgctttagtatgacaggcagttaatgcaaatgtgtccttaaagcgtctcgaggagctactcttggctgaagagcgggttcttcttccaaatccacctcttgatcctgggctaccagcagtgtcaataaaaaacggatatttttcttgggattctaaggtctaccattatggcaatttcttttatttctttaaatcttgggaagggacagtactaatcccagtttttgattatactatagggcagta

SEQ ID NO: 37574 - DNA, 3614 bp, Cannabis sativa
ccccacccccaaatacacactcacacacccaacaaaccaaccactagtgctagcctcaagtggccttccttaaataaattattgaaggcagagacgttcccatctgaagctcagctgagctctacctgcctttgaaagatctcctcaaaaaatcagttaacaatgttgatgaacctaaattttcctaaaaattaacattgaactgatctgttctctcaaattcaattgcttttaatcttcaccacaaaactcctattacttccaagtcaaaaggaaagaaaacagattacttttccaaatggaagagatgactagaaaaaattcacaagatgctttgaatattttaactaaatcacacacggaacagaacctaaaagtgaccaacttatgcagccgattcgcattgaatttgaatgagaaactataataataaatcgaccactaaatacgaatcaaggtcagtgagagaatgaccgaatgaggcaaacaaaagtaataaaagaacaaaccttcgtcggggatgggcgggaggggagccgacgctgtcgtcggctgtcgtcggaatcggataagagccgtcggcggccgaacctgagggacagagagagagatcgagaggagggagagaatctgagaggggggattttagggttttttagaattaagaatgggatttttttttaatgaattcggatgtggccgggttttcgggtccaaaacaaatttccttatactgtatatttgaacccaattcggacgggtttccttatcctgcggtgtggacactttccgggttccatgagtcacattccacctgctcggcccaccatcattcgatcttttcggcccatttcccgattgggttggcgggttggtcggcccagacacaatcatgtgtcatgacatggtatcttttaaaaaaaacaaagatttggaggacaacgtatatctaatagaatctctccgcggatctcctgatatcctttttcaatcttaatcacttgtcaaacaagaattatttacatgcatagaaccaacctacaaaaagtaaagtttctatatataaatagtaatggtatacatacaattgacacaaacttgaaatataccaattatttttgtttaaattaggaaccactctctaaaaaatcacttagccacttaattgagaaaacatggttcaaaagaacaaaactcagaaccaacatttaatgacctattcaagatggtggtaaccatccaaaaattgtataataatttttttttcactagttttggagatggaaactgaacttcatttttcgttctccccaaaaacaaatttaattttttaaacctatttctaaagaaataaaaaaaatatgtattaataaaattgaaaaatatatgtatataaatagatatttttagagttgtaaaagcataaaacaaacaaactcaaagtcaaaaaaaaaaaaaaaaaaaaacatatgctgtaaaacaagaattataacaagaatggccatacatacatctgtttcgctaacaatagctttcattctttgaatttttgaaggtataactcttttgttttcactataatctttgtgtttggtctttttactataaagctttacagaaatatatagatttgaacaggaatcgccatgcatcctttcaacaaaaaaacaaatcacataaatccgaacatttcttcctcaagcatggtattcccagataacttctgtttatgtacattaagaaatgtattaacctatattattaatagccatcaaatggagaatggtcttagtttgttaattggatatttaggaatataatctagcttagttttacatgagatatttatttaattttgttactggttatattctgagagttttaaggaattaggcaacttctttagaaaaaaaacaaatggtgactcgtacggtagcaaaaaccaactatagtatgtatgtaagaatcggtgtcattgtgatgaacaaatatgaacaaaagcagcaaacaaacatttgtatggctacgactaagggcaacgcatagtgagtgcatatacaatctaatttcattccattttcaaagactagcatagcagcacagctcagctggtgaatgtgaattgcttcatagtgctgccctcatggcttctcttgcagcttctcgcttcatctcagcagccttaccactccctcggaagtacatgtatacttgctgcaagtcacaagttcacaacacagcaacgaacacaaatgtaaataagaggtgttattaattcaagaatcttttgttgagatctgagagttgaaacttacctgaataacccagacactgactaaagactccaagcaaaacaagccaaacccgatgaagtaaaagatctgtttatgagcgaaagaaaatacagttaatgaatgctattgctattccttctcatgtgttaattgatagagcttaagaagggaaaaaccaataaacattcttaccccaaccaaagcattccccccaataagatcaattgcaggaagaataccactgttttaagaggcacaacaaattgttatagtgctgaataaagtccaagagatcataagatatacatcaaattgagatcatgttcatgtacatacgtgagagattttcctttgaaaacaataggaggagcgaccgcagagaagatgcagaagccgatatgaagctgtagccaaagatattaaaaacacattcttcatttcataagcaaaaaaactgaggcacaagatacacataccagataaaacaagaaaaaccatccaaacttaaaagcactttcagtcctgcacaagaagaaacaggagcactcaatttagatgataattatgtgtggataaaagtaacatatgttggaagaacacataagcattctcaaggtaataaaaatcatgagaaatatgtacctaaaagcacggtataggggacggtaccacagcacataagaacctgggacccctgatatgaagtagataagagctaggaaccaaatcttcacccctgcaacgaagaacagattatcacacatcagataaaaaatgaataacacctatatatgaaagtgatgtaaagtgattttatatatgaaagtgatgtaaagtgattttgtattcaccttctcctttaatccatgctgttgtaactgctacgatattccagacaaggcaaactgtcaatcctgcatagtgcatacaccaaaattcataattaaatcatccatctattatagaacgtaagcaacttgagtctttaatagaataacatcacttgagcagccaattactactacaagcaaatcaaactataacatacaaaaatcatcagtcataaatcaaaaaaatcaagcattgatttacacacctaaccacgttgagaatgcaagatactgcattttctgtaagtgtattggtatttcgtttccaatatcatgatgaattattggaaagaaaggtggccaatttttctcctcaataactattccagctgcaagaaaagggagatagatctatgaaatgactatcacataaataatcattttcgctgtgcacttcaaacactttatgttaaggtaccagccatatttt

SEQ ID NO: 37575 - DNA, 2442 bp, Cannabis sativa
ttctgaacaaccttcattcgctttgtcaagccctgcaagtcaagtggagcaaggaaaggaatgtaatctcccaagttaggagtggcacccaagtacatcaactctttgataatttccttaaaacccttaggatcaaactcttcatcagagtacttcttcccaagcaccatccgacaactcatatcggcattacacactgcaatcttggcgctcaaatcgactgccacgcgattagtagtagccttttttatgaactcaataaaatggccaatctcttatcttctcatagctttgaaagtgcttatcttgagactacttagaagctcaagggtgcacatttttctcatgtcgcgccaataagagccatattgagcaaatgacaagttcctttgctcccaactcatgtgctgcgcagccaagtgaggcggtctattggcgaaaacaagatcatgggtcttgagaaaaagctcggcagccttagaggaggacacgacaatagtgggaattaggccgagctgcatatgcataatcgggccatactttcgggacaacctttgcaaatcacgatgagggtttttgcctaataggtttaagcttccaattagaggatacccttttggaccaggggggagattcttctttttctccttgctttgttttctcagaacataactaactataaagaatacaaaagccagtactttccatagccaattagccattttttttggtgttaacagttgtgggaaataggtttattcaaatgcagagatttttcataacttcagagtctaggtcccattgttttgttgggatcaataattgcctttttttttccattattatatttgtcctattgaagtattatattactttttgttgtaatttttctttttgagttgacaccatacagaaaattaatggatagatataaagtgtaggagtaggagatgctttcatgtttttgaaataaacaaaattaataattacagaaagagaaaaaagaaagaaataattgatagatacgtaaatctaactttatattaaaacttacaaattgtacaatgtgctatatgtgtgaccacacaatttgtatcaaatagtatgacaaaattttgagtaaaaaataagtggtgtattgacaaaaatatctttactttaaattctttggctatgatgatgacataggtgtagagctatgatgctttttcatatagatcttgtaatactgatgacattgttagattattaacgctttaatggtgattacactatagggtaaatattattttgaattctatgttttgcaaaagttaccgattgaattttctattttgttaaataacaaaatgaactttaaattttttaaaatggtaaaaataagaacttgaactcaattttcaacattttttttattaatattactagcttgaagacaatttctagcacgaacagatgtaaaaaatctaattaattttgtcataacacctcaaaaatcaatttagagtcttatttatagtgtaccattttagaaaatacagagtatattttatcatttaacaaataaagggtctaaacgataggttttacaaaatacatggtccaaaatgttagccggaaaccccacaaaacttcacattttcaatctcagattctcccaaaccattctgacccattttcacatttatttctcatctgtggtttccagagaattattacaagtgatacttttggtataaactgctcttctctgctgtttgagaaaatgtccataagaaaattttgcttcacttctatgcggataaactctttggtagtttatgagggtcataagtcaggctccattggtagttttgaaaaagaagaagaagaaaagtctacaatggctctgatttagctgacactcaaatctgtagaatggtatgagtgaacaacagacttgatttgagtaagatttattttctcactgtattgatttaatcataattaattgattgttagagtggtaaaatcaaattatgaggaatatggggaaaaatgttaagtttcttatatttttattgtttcattttcatttgttttaccaagttatatgttaatgatccaagtctcaattgcttgttgtgaaattaaaattacttaaatttgttttgccagttaaaagtaaaagggatatttgcggcgaaactcccttaacatttacaattgttacacatatgatcataataaaaaacaagtggcaccaaaagtaccttaccttacgattttgttgcagttgtactattttttagttgttaagtaccaattaagcccgttaagtgtcacctcaacaacacgtggcgacatatttctttaacttatttaatacatagtccaataatatatcgccacgtgtttctgagttgacacttaatggccaaaatatggtacgactgcaacaaa

SEQ ID NO: 37576 - DNA, 8488 bp, Cannabis sativa
  modified_base (27)..(30): a, c, t, g, unknown or other
  modified_base (106)..(116): a, c, t, g, unknown or other
actaatcagattgtaaagagttttatnnnnggcataaaacccaacagtatgtgtttacccgtacgagcttcaacgaacaactcaaagaacataaataacactcttnnnnnnnnnnntaaccatatcaggattaagattttttgatctactagtgatattaactcagaaagatacaacagtaagattataatatctttaccaagatcaatattagtcccagtccaatatatactccgtacattcaatactagcatactttgccaatgtgttagaatagaaagaagaacataacacttatttaaggtataattaaacgttatcgctgactatcacatcagtgtaaatacagtgcactgatgaatcatgggacattaacttttgaaacatataatcacaattaccttctactgtgttgacatcactataattgtgaataactatatattttggatttcacagaaattgtatattaaaccataaacatgagtaatacatgtaaacataaatgacttctcatcttctatggacaataaatcagattatattgaaattaattttatttagggcataaaatcccaacagactccgggtcccagagtggtaataggtattccgtgtccgggatgcaaggataaggcgaggtagacttccacttatctcttagtcttgacttgtctcccaattctgtgaagcttcttcgtgactaggcctttagtaggggattttaatttgtgaaattatgagcttatctattccttcatatgccacgtgtcacatattcgaaaacagagataacatttaccccaagctttcgggactctttgagttgcgagagcttgcagtcttcttccatctctttgagataagtttttgacacgtggtgactagtaggatcacggatgtcccttgagttgtcattaattaaaggactaaaaattgaaggtaccacgagtgtggcacatatgcggtgcctataatgcatttgttgataacacgcgcatgtaggggcaaatttcttgaaaaaagttgcactgatagtaggtcgattgaaatgatccctctttaatgcgtacaatactcgaggcaggcaatgatgataaataaacacactgagcaagttttaaaagccatcttcttaacttctcattcgtaggatcaaattgtacttttggaaagagtatctggaccatccatttcaaattgttaggatttttggtagaagtataggttcataaaacccattttttttttcttttttcaccatcttagacttttgacatcatttgcctttaaacttcaaacttcaaacttcaaacaaaaaccccatttttaagaaaaaactttaaccttgccatccttcagtggtgaatgcaagagatttttgattgcttgatttaataattcctgaatcttcgtgtagcctgatttctaaacacagagtcaataaacccgaactactccaccccaagccagacgaaggtttcgacgtttaagctggctttgatcgcatgattggttaggttaacaactcctaggtaaatttccacaacaacctttcattccccactcatatattaagtaagtattctgacgctatgttgaaccttgttattttgtatccatgatagaaatgcttagttcaagctaggtctcgaaactttgatatgtgtgaatggtaaaatggtgtatgtagaattttcagtgctaggataaggtccttttgaaatttcttatctaggagagtgctgatatcgtctggatgttaggacatggacgtctgaacttcgtaggcacttgcatgtttttatgattctagaattagggtttagatcaggcaggatgaacttttgagtgagtactatgcatgttcatcttttgtgcgcctatttagattttttaggactccgaatggacttaattttttggtatttgctttaaattttgttttggtatatttccctgggttcctcacaagttactttgagttgcctggcgtagacaagcttttaggaattatgggtctggcggggacctttccaagaaattataggggaggctttccctgatgcccactttgtcatttagatattaggtgtctaattgcttggcttttcttttctctttattttttcagtgatggatttgaaccgagaattccatctcgatgcaatgaaaattgaagaaaatccaactgctactcttggaggctactccatctgggtagtcattaaatccaaaggaaaagggaaggttaagacaccgcctcccacaccttagttcaacgactccatttgggaaatggatcagaaagaaaattactttaggtcgtatggcatgctaagctatatgccactgaagctggaatgcgcaacatttcgggactaatgtggcatagattttctaccgcgggagaatctactttcgtgagcactgacaggttcagcgcttggagctgggcccatatacaagcaggtcacatcttcccatgaggacttactttttagagtttgttgcgcagattgggatagcgcctttccaattaatacctctgacttacaagctcttaaccgaatggtatatcttttgaaaaattcataagttcgaggtgccccctggaggagattctgtacttttattgtgtgaagcctcaaccaatgaaaaccaactgtaagaaggtggggttctacaagctaaaaaggtattcagattcctattgtcctaccagccatacccaacgtcccatgacctctaggaatactggttcttctccactagtttcccaataaagagggtgcctaccttcaacttagcttccaaatcccaggtgaatattttaacactcactgttttggtctttctctttttcaaaatcttttttattttggtttaagtgctaattgggctttttcacttctcttttttggcagagcttgtacctcggaacactgaaattgaggaaatgaccaagaaagtatcccaatacaaggcctttactaaagcacaactaaaagttgaaggtttggtcaccaccaagttgctccgtgaacatagactaattgctagtttctaaaacattgataatgccagtggttggggccaaagtcaagctttgaaaaaggtcaaggaggtgatagctcgtgatttggctaagattatcacggaggccaccaaagaggataagctcttggaaggttattggatgctttgccacccaaattccttgacaggggaggaagaaattttggagagatatgttgtagcgtgcctgaatgggggtgtctcgggagacagcacttttagaagaggtaacaaacccttccgtgtactccgtacccccggccccagcctttatcgcatgtctcgaatggatcaagggggatttgatagatatttcttaaacttagatcatcttaagtaccccgagaaggacttcctagacaggatagatgaaattgttaggattcctaataacctagagtcatctccagaaactattagaatggaccctttcatgactatgtctttccccaactttagagaatatgacaacttcattgattgggatgacatagtcctctttgcccgtggggaaccttatggttgctcactaaataaatggttgcacccacacacatacattattaaactatgttgttgtgtgtcatccttgatttaatttcgttgatttgaaggttgcttgctaatcatttgattgatatgtttgcatacactccagaagcaaaaatgatgagatctctaagtgacaagatcataaaaagccttgcccagacagagggcaccaagggaaaagggaaagttaaggctagggccttcaaaactcgtaaaccaagacctccgtctacttcctcttccttaggggttcaggaaatatcccctcttgtgaaggcatccgcgaaggctttcagttctcaagcttcgctaggacagagaaaactcctatcataacttggaaggcctctcaggaactggttgtgttcaggagtggtgcaactcacgcaggtcatcctaaacatcaagccttggcataggcttcacttgcttggtcatggaggggactcccaagagaattcgaagaccaccgccgtctcggacgagagcttggatggaccaattttccacaggaagggggtttttgtgacaactaagcgtcagactcctccccaattcgaaaggaaggcaagctaagcctgcttcactcgagcagcgctctcaaggaggagaaggagacctccatggatttgttattccgcctcctaatctagaagttacactatcgctagtcatcagcatcaacgccattccaataacatcaacacttaccacaacaacaaccgccaaaaacatcactccccaacccgcctatagtcacttcgtctcaaataaggtccatctagcctttgaaaaaaataaaataagagagaaaagaaagagaagaatagaatgagagagtgaattttttcaataatttattccaataaggtgaattcctattcttgtacttagcatctattcttctataaatgttagtaattgacatttagagtttatactaatttttactttttacttattgtatatatttaagtttttgtttgtgttttgtttttttttttccaaagaaatgatgattaaaattatctttactcatttttgtattttgtcgtagctcctccaatgtgttttaggcaaaaatatagatttagtcatttgaaaaaatatttgaccaaaattttatccatgcaattttttgctaaattattgttaatgctaaatacttttcattaagtttagtgaaatataagatttctgttaagtaatttgtaattttacctatcaaacaattatcactatcatattttatccttcaaatttttataattatcaaattaagcttcgtttatttaacagaagtccaaaagttactgtatgatagtagtaaaatataataggaatcatattttgaaagtaaaataattaattatttaatgaaagtctaataaaatttaatagaagttccataaattactagttgagagaaattttttaacatcactaataatatccaaccaattaatatccaaaatagtattaactagatattatttggttttggaacttatatatactttgcataagtataacgtgagactatttttctaattgaacaggaggagaattatttgctgactattattattgttgttattattaggcatagtgaccaaatgtccttctaacggtaacatgactatttcagtgatgtagacatacataggcaacgactaagagttttgtaactttcaatggtttggataacaaattagataagctattttgaaactgctaccgttaaacatataattatttatggtgatgaaggagcgttttttagcaagaactaagtcaagcccaccaaaaaactctgaaaacaaatgactccattatttaatagcattattattaggcaccagtggtagttagcaccttctcgatatgtcgcgttgtgattgactagggatactctctacaaactattatattagattatatgtgacctaatacttaattgcccaataatgatattatccctgtagcatttttcttttattaactgggttgggttaatgtcatcaagttttactgctccaactacctaaactctttatataattaataaataattacaatttgttaggttgagataatgacatgggagattaaatgaactaaaaactctttgataagaaaggatttagtcttagaagcaacctcgacggaataattatgtagaagaatagaaagtgaccaagcattacatgtggggtttggctactacccatttgtgaaaaagcataggagattctctttcaacaaggccaaagtcccttttcactttcctaaaactccatacttggaaaaaaaataaataaaaaaaaaaacactgaaaaagaaaagatgggattgctctttcagtacagaaggagctgttgttcttgttcttagatctttttccccaagcttcattctttaccgaatgggatttttacgttgtaccttacttactaattgttcctgtttgatatttaaaaggggtttatttttttctacattagcttgttggtaggtgattatggctttcttcgatgatcggcctaagaagaagaagcagctcacaccagtaattggtatcacaaaaaagtcatctgagagattgttggttcatggaaccagtagtcttgcttcgattgaatctctctccttacctcttgttagtactctctctctctgttttttacttttttctttgtctattgtttatatggctggagagtttgtttgactttggtgaaaccaggttcaggaaattgttctaaatgccgatattggatgcagtgaatgtcagaagagaattgctgaaataatgtcaagaatgagtggtgagactcagatttctctgcaacttttcttcttcttcttctttgtttatctttacttagcttaaagatcatttgggtgtttgtttaagtagaataatttagtggttggtttttcaaactcatgcatttttactggcttaaccctttatttttattaaagtaacctgattttttaaacagtgatttggtcaatctccattttcatggaggaagttttcttgcccacacattacacataatcatatgaataatatacatgttctttcatcctccaaagatgaaaagataagatagaatttatctttccttatggctttgccttttgaattagaataaaatgtactgagcataccaatgacgatattatatacatacaaaacaattgctcaattttactgtgtacagcttgcctgtgcagctgtctttgacgttgttagtattgtccttattttaattatataatgacttactgaactttttgtgctgatggggacttttctgtttgttataacaagtcatgaattggaattatgcaattttctgaactaaaaaagaataagaaattatgtactctatcatattactctttttcatgcattgaaatggaattatttgtgtttttggtagagacagagtctgttgtggtgaatgtattggacaagaaggttacactcacttgtagatatcccatgaatgtttccaaagtaccaggtcgccaagtccctgccctacacagaaactctttaaacaaaatggcactgctcagaaggatcttcaagtcttccacaggtggttgatattaggaatttgtaaaaaaaaaaaaggaaaaaaaaaaacctcaacttaccctgataatttctacttatgttaattgcctttttggccatgtatatgaatctgattctcagataattcagtatagatgtgagctttttttttgggaaggggtcttaggctagtagtgattctgtttgtgtgtgtgtgttcaaatatatatgtagaaaaatagagatggcttggattttgtgtaatgttaaggcagactttagggtcaagaaaaagagatgttaccacatatagaaagaagttgataaatgtagtaatgcttctcctttgccctcatctaagggaacatcatgagaaagtttagtattgaagttaaaggatggattataaataagctatatgtagtattgtctaatctctacaaacaacaacctcttttattgacctacgttaataagaattagattccaaaatgaaggggaacaatttccacctaacaatccaaaaaagcatagaccatattttcaaagacaaatattctcattaagttcaataaatcccttttctttttttgtagcttttcatcacccgtttgtatcaaatcaaaatcaaactaatcattgatttttagagctctttctattacaacttcatgacaaaggcaggttctttttctttttctttttctttttgtcacaatcaaaactctcaaatcttattatttatacaaaaaacaaataaatcttacaacagattttcgtttttcttttattgttgccgatttgcagtattgttgcatggtgatgaggctgaatattgactgcaacgcatgttgcaagagagctagaagagccattctaaacatgaaaggttagcaccaattaaatgtcattataacaccatttaaaaataccctttatttatttatatatatttttttggttgtatatatttttaaaatgttgaagaagtagagtcacatctgattgagaaggagcactacagaataattgtctgtggaagatttagacctgcagatgtggctataaagctgagaaagaaaatgaatcgtagggttgaaattcttgaaatccaagagcttgaacaatctaatgaagaaatggatcaaaggcccatgatagcagcctaatattattatgcataaatctttaacatcaaattcaatggtggtgtttgtggaacacttagtatattcaacttcccatttgttttttttttttttt

SEQ ID NO: 37577 - DNA, 2711 bp, Cannabis sativa
ctctctctctctctctctctaaggaagctccccgctcccattactcccaacatgtacgggagctcccctctccaacacttagtcaaattaccaagtgttgctccctctcccaatacttggccaaaataccaaacgttgcttcctctctcaacacttagccaaattactaagtattggtccccatcataagtataggtggtgatggaaagaatatcaaagggatgtatgaccaaggacaagcccgttaaagctagcacgcctccgacaaaacctaaagagagaagatggttgtacaacaagcagtggagacactatttctctcactctatacaagctggcatctgatcaatactcctccattacccttttgatacgctaacccttatagtacaatcaaaactttgtccctttatttttgagaccacttgtattttagagccgttagagttcaagtataaaaatcacatttgaacacttgtaaaggggttgaaatataatcatttttaagtcaacttagaaattctatataataccatttttttcattgatgttctgagtttctcttaaacttttcattttcaccattttgcatctgattttctaacgaaagtttagttgacgagtttttactgtcaacagcttatattttgatgaatttgctttgttatttaatttattagtgagtcaaaactatattattttttaaagtaattggcggtaaatttatattttaatttttatacactggcaaaatcgttttaaatttacttttttgtaaaatttgaggcgtcaattaaatatcacagttaaatatcactgtgcaacctatatatacgtgaaagtaaaacttcaaagcccatacaataataatccaattgatatttaatagtgatatctagctgacacctcaaatttacaaataaaagtaaacacaagaagattttgctatcaaagaaaaaaataagacgattaagtgttaaaaatcaaaacataaaaatatttcaccacaaatttttttaaaaaaaaaaaatggttacatatattacaattaatgaatatattagagcacatagtatattaataattttaaatttatttacaatcaacaactccattcatactcaccaaccatttacattcataataaggaagattatccaactatcttttagagaacgagtaacaccacctaaaaatacaaataatttaataaaatgaaaatttaatgatctcattatatttttaataaatgagattcatctcttttatcatatttttgttgatattaaattatatttttaataaatgattaatatgcatttaagtgaatatacatttctatttttaatcaagtgaattgtgtagttacaattcgagaagagtgattttcattgcaataggaattgtcactgctttagctgcaactaaaagtcactaaagtgggtttgcaagtggaaattcagtgacgattttaacgctttagtattgagtcagattatcttaaaattgtctaattactccaaaaagagaaagagagctagagcgtattaggagattgttgttacatgataatgttgctagtctttcgtttgtataccgtaaaattaatcaagtagctcacaatttagccattcaagttttggttattaaattagtattacgtgaattgagattgatctttcttgtgtaagtcaagcgtaaattaataaaggtaaaatagtaatttaaaagtattaaaaggagataagatctacattctaactcatgttaattaccaatatattttcaaatgtaaattttgaaacccaaagaaaaatgaaatgtacacaaaataaaatacacatgagacaaatgtaattaattctaccaaataaatatttttagttttttagataaccatgtacaacacgatttgaaattttcaaaattcaatatcaccttttttttttttttgtgagatctcaataattacaagttgtatataaaagttattaaaattgatagaaattataagttcaagtcaaggcacacaaccctggattttagttggaaaaaaacatcatataaagaaattgataacaacaatattaatccttccatctaaataaaaataattattgatttatttattgttttctaaaaataaaaaatagagaaatcatacactgaaaagagatttggtagaaataaacaaatttaagggtcgtctgaaaagatattgtaattgaatttgtgtgtaattgacacaatttaacatgtttatctgactatataatatattataattgtataattagaggtaattaaggagttttaattacactatataattctcatgacccctataaaaattgaatgtaattattaaaaaaatttaattttaaatattaattagtaaaaaaatattatttttttatttaattactaattattttatcaaataagatattaagtatttatattaattacaacctcttatctaaagacatatttattttaaaatataatataattactagactgtgtaattaccactctaataattacactacttaataattacacaattactttcaactattccctaatatgaatatatataaaagacttgtatttggcctatttatttctcattaaattattgaaatataagatcaaacactaagtcagcaagaacatacattttaacttctagtatttatacatatttt

SEQ ID NO: 37578 - DNA, 4101 bp, Cannabis sativa
tttgcattgccaagcaactaaattgtcaccaaaaaagatggtgaaaccagaggtggaccgtcgatcatcgggatcggtcgcccaatcagcatcacaaaaggcaatgatgtcatgatctgaaggacgtttgagatgcaggtcgtgtgagattgtaccactcaagtacctgagaattcgttttacagctaaccagtgagtgagtaaaggattgtgcataaactgacaaaccttgttcacactagtcttgtgatgagcaagtattgtaaggcaccaacaattgagcgatataggtgaggatctgacattgtttcactgccatgagctaaaagacgtacaccagtggtcattggggttggagaaggttttgcctcttgcatttgacctttaataagcaaatctcgagcatattttgcttgagaaagatgtaaaccagctggtgtagagttaacttcgatgcccagaaagtaatgaagatcaccaagatcttttaaagaaaactggttgttcaaagcagcaatgatgttggtaacaactttcggatcacttcctgtgattaggatatcatccacatagacaagaattaaggttgtatatgtggatgtgtgctgaataaagagagagtggtctgatttagatggaaagaaccccaattgaagtagacaatgatgcaatttatcgaaccatgcccgaggagcctgcttgagtccatacaaagctttgtgtagcttgcatacaagaggaggagaagcttgcacttcaaaaccaggaggttgtaccatgtacacttcctctttgagatcaccattgagaaacgcgttattgacatctaattgtttgatgcaccatccacgagataaggctaatgtaattacaatgcgtatggtgactggtttgaccacgggactaaacgtctctgtgaaatcaaatcctggttgttggtgaaatccctttgcaacaagtcgggctttaaatttgttgtgagtaccatctgagttctctttgtgtcgaaaaatccatttgcatccaattggttctcgaccaggtggtaagggaactaatgtataagtggcattccgaatcaatgcaagcatttcatcagacatggctttgttccactgctcatcttgaagagcttccttgactgttttaggaattttaatggtcatgtagacctttggtttgtgtatccctgactttgcccgagtcttcatgggatgagtattggccaaaggattcggagtagcaacagcatgattggagctagtagtggcaattggctcaggaacagcagtaggaggttgtgttgcagcaatatttgacacatcagaggcatttagaactccagggaactccaggctttgttgagtatcattggtgatatcttgatggacagtattctcatgtaaagaaacattactgtcaggtgtagtaatgggaattgcagaagttgcagctggagtaatgcttgctggtggaattgtaacctgcacaggcacagaagaacttgccaaaattggcacagtttggttagtgattacaggtctgagatcaggattaacaggatgagattgactcagtgtaggaatgacagcagaggggtagaattctgagtatgtgtaggagtctgtggtctgtttaggtagagtggagaatgggaaagatgtttcatcaaagatgacatctcgagatatgtatatgcggccagaattgtctaaacatttgtaacccttatgatttaggctgtagcctaagaaggtacatggagatgacctgaattgcaacttatgtttattgtagggccggatgtttgggaaacacttgcagccaaatgtcttgagtttggtgtaatctggttgaatagaaaaaagtttttctatgggagagacattttgcaacacaggagtagggagtctatttgacaagtatacagatgttcgaaatgcctcatcccagaatttgagaggcattgaggcttgggcaagtaaagtaagaccattttccacaacatgtcgatgtttgcgttcaactaaaccattttgttcatgagttgttgggcaaggatgtctgtgcatgatcccaaactgtttgagaaggtcagtaaagggtctgaactcacctccccaatcagtttgaagacacttgatagactctcctaattgaagctcagattcagccttgaattgagtgaaagttttcaaggcttctgatttttgtttgagcatgtatatccaggtgaatctagaataggcatcaataaattggatgtaatatttatatccattgctagaagtgtgtatggctggcccccataaatcagcaacaaccagttgcaagggtgctgtatagacagtatgagaaatttttggaaatggcaatttatgaattttgcctaaacaacatgcagaacatattgaaagaggtgttttattgctgaattggatattacatgattgtagtacagatttgacaatcctttctgagggatgtcctaacctattatgccacaactcataattggaacattgagatttattacaatttggacagacagtagcattgttggtggaactctgagacagtgtggctgtgttgacacaaggagagacatctgttggagtgagttgaactttgaactgggaagggttaaatgtataaaggccattctggtgtttcccagtgagaaggactgctcgactgacctgatctttgacaaaacacttgtcagcatggaattcaaagaatacattgttatcataggcaaatttggatacacttaacagatttttagtgatttcaggcacatgtaaaagattgtttagaacaagaggatgagaagaattggaattaataaacgatttaccaacatgttcgattaacagacctgaaccatctccaacatagagttggtcttgcccttcatattctgtgcatgtggtcagattttgcacatttggtgtgcaatgattggttgccccggagtctggataccagcttgagtcctcagtttgatttgtctgtacaagattagcttggtttgtaggagagtttgtgcctggaaacacccctgtgaagcttttatcaaatctgtaaaagcagtcgagtactgtgtgtccaattttgtgacaaagttggcactgtactcgattagcttgtgttggatatctacctcctctgttgacagtggaaacaccacgactgttagtgaaattaggtgatccataattgttacctgtaggagttgatcgagaggggtatccacggcctccaccacgagttgtgccataaggaaagggagtgcgattgaagttttggaatctggtgccacgattgaagttctggtatgcaatattggcctcaaaagattgatcaagttcaatagttgcaagatttgcactgagatcaacatcttgatcgagatcaatcttttcaatccgagattcagaggccaacagtaaggcttcgatctctgagacagagtattcctcaattctggtattagtggagataataaatgtgtcgtattcactaggcagtcccttgaatatggcagcaatatgatcccttgagctcagaacttctcccacagaggcaaggagatcaacatgttgcttgactttcaacagatagtcattgagggacatggcaccttttcgaagcttctgtaatttggttctaaattccaagatcttggaggagacttgaagtgtgaagtgcttttcgagtgcattccagatctgtcgagcggtgttgcatcctaccatgcgagtgaggaggctttcagacattgatgacaatagccaactccagaaagtctgggttgaatgtgttcgagatctgatcagaatcgctcaagaactgtggtggtggagctcgatcttgaatgtatttcatcaacctatttccacgaattgcagctaacacctgctgtttccacaaaaggtaattgtgatcatttaatctgatggacatattatgattgaaatacacaggattaagatcagtggaggtgtttctcgatcgattgactgcaggtgctccattttgctggttttgaactctgctagtgttggagttgattggatcgccattgttgcccattcc

SEQ ID NO: 37579 - DNA, 1698 bp, Cannabis sativa
tatatataaatatatatttctatatataacaaattatattgtgatcatataattttgaaaaagttttaataatttgttccacactcacatgtctagtttatgttgaatgacaaaatttatggggttctattttaaaaatgtaatgactaaaattagtaataagtaaagttgtttatattgttatatatggctaaatattttttcatttaatcgtgtggaacaatatttttcaatatgtggaaagcaattattattttgaacttaaatttgaaaagtagatttctttaaattttatagaaaataatttactatgattataataaacatattgttatctttttaaaaagaacattaataaataataataatagattttgttataaaaataaattgagaaaaagaatatcagaattactttcattaaggtggtacctcaccgggagcactatcgaaattacaagtgtttactattttgaaatataaatataatatatatgcatatcactttttagtttttttttaaaaaaaaataaataaataaggaacaattttgaatttctcctggcaaatcaagattccaattacagttataaaaagtaacgaattataaaaattgttagttaattaattatactatgtgtatttatacattgattattaattaattaaatgataagattaattacatggatgcagaatatgaaaataataaagaatttaagccaactaagagtaacattgaatactggttaaaatggttggttaaggactgcaaggcaggagactctttagtgttctacttctcaggacatggtttacgacagcccgatttcaaaggcgacgaactcgatggcttcgatgagaccatttgtcctgttgattttgtggagaatggaatgatcttcgacaatgatatcaacaccatgattgtaaggcctctccccactggtgtcaagcttcatgccattgttgatgcttgtcatagtggaactattcttgatctacaatatgtctatgatatcaaaaagtaagttttattgtagacttaatttattatgatatatcttttatatattattataatttgtagactaattattttttaatttgtaatattatataggaagaattgggaagatcatactcctccatcaaaagcattgaaatgtacaaatggtggatgggctctttgccttagtgcttgtgaagatcatcaattggctgctgacactactgtaagggattctatatatcttattattaatgtattaattataattactaactaattatattcatatcattaatatcaactgtttaattaattaagattttaactaaagatcagaaggagagtatcgggttcctcataaagtttttagtatatgaatatatataataggtttcagaatatataattaaatagatgatgctcttagaatttctttatgtttttttaaattttccttgaattagtactatcaaattaatgcgtctttcagtctaaaaagttagcattattataggcatcttatcacgcgttataaataaatagttagcaatttcttatagttactcaatattaatttacattaataataatttttaatttcgtttagaacgtcgtattagatcgtattatattgtattatattgaattagattatataccatatttttatataatactatgttaaa

SEQ ID NO: 37580 - DNA, 1916 bp, Cannabis sativa
tttttttttttttcatggccaatttcttcattaataatgcgtatttattaattcttgggctttataggaagaaaccctcatcaacagaaccaaaggcaaagaaagcaagagttgggaagaagtctaaggacaataatcctaacaagcgcaagcgccctcccactgcattctttctcttcatgtaatcatttttctactgctttggattactcatttcataaatgtgcttgtaggatacgtgatactaacgttttttcacatgttccagggatgatttcagaaaggaattcaaggcagctaatcccgactctaaggatgttaaagtggtaagtttttttttttcttcttcttcttcttgtgagtgtttgttaaggttctctataatttgtataaattatgatcttgttttcttttccctggagtagggttttttctttttttgttgtgagttaacttgttgaatgaaattcaggttgtaaaagagggtggtgcaaagtggcgggctatgtctgatgaagagaagaaagtttatcaggacaaatctgcagaactgaaggcagagtacgacaaggctgtgcaggcggataattctgaagatggtgatgtaaatgctgaggcagatgcagaggttgattttctctacccgattctgacattgtggatttgtttaatattgtgttcttttttagtaagaattggtttgtttctttatatctgatggtttttttttttcatctgcatttgatttatttaggaagaagcaggttcggataaagaagcttcagaaaaagaagttgaagaagtagatgaagtagctgatgaggagtaggatgattgagtttattttatattttggtggaaatggtttcagtgaccattttgcttccttttttggattttatgtataaattttttatattgtaagaatggtagatagagggttcgtaatggcaatgtagtctaagttgtcctttttggatcttgaatgcttgatagctacattatagacaacttttgcagtttgttattatggcgtttttctcccctcctgttttatgcaattttatatttatttagcccaattcatacctgtctaacataacattagtatctattatattctcaacatcacaaattctggattgtactgtaaatctaatatatcctctagaatggtaaaagcaatttcattgatgtaactaaatgtgaaaatgaataaatattatataggtggaaatggaatagtggaattaatatgtgaaaatgctcatatgacatgagcatatctttgagcaacggagtcagcattttactggctcttctcttctgttttctttcccctgcaaggtgccaagggcttgccacataaacacagattatgggcataagcagctgcagggaagatgttaaatggcttgccttgtgggatctctccacataatctgtttgccctgaagcttgcatgtctcattgcttcaattcccaataagctatttgggatttttcctgacagggcattgatggagaggtcaagccattgaagttttatcagaagtcctagacttgttgggatagtgcctgtaatgaggtttcttgaaatgtctagcttttcaaggttaatcaagttggaaattgaactggggagtactccactgatcttgttacttgctacattgagtgttttcaacctcaatccttctctgaactctgggaatttgcctgaaattagattccttgatacatctaaaacctccaaaaagctgcttgtcccattgtttatgatcttcgagaggggtccaacaatttgatttgagctgaaatcgatgactgtgagcccttctggcaaattcatttgggaaagatcaaacttgagttggttgtttgagagcttgagcttttgcagacttgacatgttg

SEQ ID NO: 37581 - DNA, 3122 bp, Cannabis sativa
tatttagaaaaagattcactatcctacctgaacatgccaactttcattatcagtggaaacccataatttcttatcatcttcaggtacaattgtaacggcagccttatcctttgatgtttttgattcaggcatggaaggactaagtatccatgagatacgtcctatttttatcatggaatcatcgtgccaatgtgcaacttttttacagaacaccgtccctgtccattttgttgatttcctccaacgctgctcgaagtttataagaacatcatatgctgcaggcccgtcaattctgcaatgcaggtcgtgccatggttgccttggagccttggttcccgcctagcaccagagaaaagttattcgattatcaaatcaagagattttcagcactacttaaaaccaagtttatagaaaattgcagagaactacttacaggaaaagtaggattatggaaatcgtccttgaatacagtgtcaagatcgcgaaatagtctgtgttgtggcgtgtcataacgaccatcacaaaggtcaatgcctcctaaaaatgcagttatcctacggttatttctgtctgcctgtgtatccacaagaacacatttctgatggtgtgtaaatacagttccaacaacctgtaagacaacataggaacatagttataagaatgtcttgaaaactagagaacatattccatcaaaagccaatgcaatcacaactacttgtaaccaaccaaccaaattactagataatgattgagataagaagcttttacctgttgtttgatataactcatcttactgcttccatagcgaggcgcaagcacacaaataaccgaagaatgcttgaaaaacttctttgtttcttcatcatgtgttgccattactcctgcctgcatcactcaaatcaaacccccatttcaccattattaatcaatttccatttcttggaaacaaacaagagtgttttgtaaaaataatcattatcgaataaaatttatcagcaaaataaccacatttggtctcacgagcaaccaaaacaaaacaaacatttcaataataatactacaaagcaccaaattatccgaaaagaaaaatctataacaattaattatcgaaaaatttatcagcaaaataacatcccaaaaaaaattattagcaaaataactatatgtttggtgtcacgaactaccaaaaattatactctttcatattgttagttaggcaaatttcctgaaacaaaacaaaacaaacatctcaataagatactacaaagcaaaatctattaacaattctcaccgtattaatcaagtaagcatcatgtgaagtcttatcatcccaaaccaacaacaaaactctaaccccttcttcagatttatacttaagcaaatcaccaagtgtcaaatccccacctctaggcaatggtctagtgggttctctaacaagtttcaccttatgataaatcgaccaaccaacaaggtaaatcatatgatgagcttcagaaatagcataacaaatatcttcccaacatttctcttgtgtaaaaaccttcccaccatcaagctcaattcttggaagcatttcatcagacacatgagcatcttgatacaatttcacagagcttcctttcctcaccggaaaataagtctgtctaacacctttctcctccggatctccggcaacaccgtgaaggtacaaagggttttcctcacaacgagtgaatttcatctccaaatgaatcgccgtatcaggcttcggcggattcccattatagccacaaatcggaaaccacccactaatcgttttaccgctcgaaatatccaaagctggaatctttgccgtaccgattaaatcagcaccgaagagatcatcatctttaaccatgaattcgagattaacgagtggatgagccaatgcaatagtgaatttctcatcccatttgggttctcgtgcgttcttgatgacacgtgtacgagccacagtagcttgagggacattaacggttacgtaagggtcactggttatgattctccggtgaggtttgccaccgtcggaggattcgttgggatctggttttgaacttctaccgtattttatggttccacaaccggtaacacaacgacgaaagtgatctgaaacgacgtccatgttgggtaagctacgagctccgattatgtgaaggtcgaggtcgccatggaggtaaattacctccgaagaatcaggatccgccatggaaactcaaaaagcgtgtttctttgatttatggaaactccaaaaccgattggaacccaacaaaaccgaaaagattcaagctttgtgttgtttggttatagaaagaggaggagttttcgaatcaatcagtttaacgttagccgtttctctttttatttgtttttcttaaaactactattttttatattatattggctaattagtaatttttatgtactaaattattcttctaaatttttttggctattaaaaattttacatgaggttaaatttaaaaaaatttgtctaatttcattctattttattatttcagtgattgtatatatacgaaatcatgatccttcatgtcccacaaactttaatatgtactaaatcatttaaggggcataatttaatacatgtgaaagttcggaagaaaaattactaattttattttataaaaattactaaattttattaaatgacaaaataaactttatatatttcaaaataataaaaatattagagatataaattttggtgtgtccacatcacacaaaccgcacctactataccacagtgtataaaaaattttagagtgtaattgcggttagcattttcgccaaattatacggtacggtacaatttgcagccttaaatttaataaccatagttcaaattgtaccacattaaatattacaaaaatattaatttttacattatgatttccttttcatatatgagtaacccatatacttataaaattcaagtcatataattaaatttaagtaacatttatataattattttttatttttctaattaacatatttaatttataatatatatcatataattttttttggaaacaattcaatacaataacttcactaatatatatgttataacattaaaaaat

SEQ ID NO: 37582 - DNA, 3100 bp, Cannabis sativa
acacattatctccatgttttttatgaagccactgaagaatgaagtaaatggctgatattgaattactctcaacatgactttatccgaccaattttgaaagatacatacctgagcactaatctcaacatgaccactacgtagattacgaactggatgatttcctccatggtgaccaaacttcattttaaaggttttaccacctaaggcctggccaagcagctgatgacccatgcagatcccaaaaacaggaacctttccaattatttcctttacagtttcaacagcatagggaactgctgatgggtctccaggaccattgctgaacagcaccccatctggattcaactttaacacctcagatgctggccacgttgatggcacaactgtaatattacagccataagatgctaagcgcttaagtatattatgcttgattccaaaatcatatgcaacaaccttcagtccaaaaaaaatcagtgttaattaccgatagttcgcaacagtaaaattatttcaacaaaaaccttttcaactcacacgaaatgcttctccatctcgactagagttaaaagcccactctgaatttgtttcatcaacccattcataaggggccttgcatgaaacaccactgattaaatcaatgcctgcaaaaacaaaacaaatcaaatgaagaattgagggattttttcattgaaaaccagtctattaattattcgaaatcataccaacaatgtcccatgatcgcgacatttgcaatagttcctcatctgttttagatttttctgtgctcaagacaccaataaggcttccatcttccctcaatctgcgggtaattgcacgtgtgtccacatcatctagtgttaacaaaaagcatcataagaagaagtcagaatttactaagaaaaaggataactaataataagccaaatgccactgagccaatgcaaaatcttaaaatgtaagtttctgtgggaaattaacttacaaattcccatgatgttcctttctgctaaataatcacctagtgtttccttgcatctccaatttgaagtactgcataaaaaataaatacatcatgtccatgaaacttcttttcatcaatttatgaaaaaggagcacctgaatcagcaagtcacaaagtgtacctgatacttaaacttctgatcacaaggccaccaagaaagcattgtgttgattcttcatcatctgtcaaaaatgtaattgacatatgaagttatgttcaaagagacaatgaagtgcaaacgtgtgaaagacaaaaactaagtgaaagctacctaccaaaatttacaccagtatttccaatgtgtggatttgtcattaagacaaactgaccagcatagctaggatcagttagaatttcttgatacctgcaatacaaaggtatattagtaatgaactagagagaacaccatttattcaagtttcatggagtttaaaaaacaaaatctctcttatttctctttaattttggcaagattaccttgatcaatacagccatcagttcatgcattaaatgtcttgaatctcaaaagagagataaatgatgaaacaaacatcgctagcctcaatattattcacaagatttgcattaaggaggtggtgagtgttacagaggcaatcacaattagcttaaatgtattttcattgacttcaacagctttacttacatcttctgaagtgtctaacctcaactaatgttaaagccaatatactctgcagaacaaatagttatcatttactcttcaaaaaaattggacttttttttttcaaaatatatctagcaggaggattatcatatataaagtcattataaaagaccaggaaatttccacatattagtggccctaagttgaagttagtaaacaataataccaatcaaagatttgggtggtgaatagctcattacatccactaaagggagcttattatgtaaaagtaaaatagtttctgtcagaagcaaattatctttaggtcttcagtgacgtatctatctttccaacaacgaaataaaccacattttccaaaggaaacaacacacagcaattatgatacaattttcctttttctttgtctcctcatatgaatataatcttacccagttaaagatgtattgaataccacttcacccacttgggttcctgaagcaccaaaggacttagctttccatactgaaccatcttcaagcactaatctagcatctgaaaccttccaaggtctttctgccaagcccaaagcataaaagggcataagacaaaatataatgcaatatattatacagacaacaatgtgatcagcaagaggatgctgaagctatacttccgaatttcaacaagtcagaagcatatttccaattgagaagaaggttatataaatgaggaaaaaaaaccaaaacacttagaataatatatattacatatacatgtatatacatttcaatttgccaaacctaaagcaattatgggctgttttcccctccaaaaattaagctaagctaacataaaagtgtcaaatttacaaaatagccacataaatttatactgcccctgaagaacgttttaagataatctttttttgaaaaattggttccctcaaataaagtctatttttacacaacacttctatcagcatacatataataacaagagtagagattgaactcttcctatcacaccaaatttgtttcctaaattttatagaattgatatggagaatagataactaattggtgatataattttagtacaatgatgcaaaatttacataattaaaatttagtcatcatcacagtagcaaattaagttccatgatttttcaacttcatcaaaacattttgagaaaaaaaaaaaaaaaaaaagagtagtaccaggggcggaaatgtcagcagagcatttgacagtaaaaaccctaaaccttgaagaattggaggaagaagagaatgagtttgggaagaggccagttgagggcttgctcagtgtgaagcacatggcagcaccagcagtggccattctctctctctctctcttctttctctcactaaaaataaaagtaaaaaatggttgtgacgttgagctggattgga

SEQ ID NO: 37583 - DNA, 1993 bp, Cannabis sativa
tacatcacggattacaatccgtgaaagtacaataacgaaacaaaatcatatcctaaatttaatatttaattataccaataataatataataccgaaaaaattttacacgtgaactttttaccatttctcaaaaaaataaataataataagtaatgaaaccaagaccacgtaagcttgttcttttcagtccaaccatgtgcatacacgtgtcttaacatcaaaagtcaacactttttaaggataaggaggaatcaaaagtcaacttcccatgttatccctctataaaatatatcctaatatatttttgacatccgatcgaatattggacaaatataaagtcttaatttaattcttttgaaaaacaaacaaaaataaaaagattcaaagtcttaaattaatgttaacacaagactttccaacccaaaatacaaataaacaatcagaatatatataatcgattcaaaatataatcaattcatagaattattattactaaacaataaaaaagagtaaaaatttatatatattcctaataaaatatattttttaaataataaaaaatagaacaaaaatatttatacagtggcaaatcaaacacgtccattacataattgtattctattttttttttatgtaatttgtatgtgtttccaatttatttattttttgtgtgaatgtgttattatttaattaattatcactattatatgttgtggttcaccactgcattttaaatataccattttgactttgtataaatggcattgattatttctttgatgataaaaaataaagtaattatgtcattaaattgattactaagaaaaaggatttaaaagactatttcaaacagtcaaatatagtattatcgtcagttcatataatcggcacgtgactgaaataaaacgagacagaataagtatcagttaaaacaattgttatgaacattatcgatcatttataactgacgctatagggagaaaggaataggtgattattttaaacagatggatagagtattgtcatcagttctagcctaacactaacactaaccccctttaaaaaaaatcagatctagtcgagcacaaactactcgtctgagttaaatttgagataacaaactcataatattcacatcataacaattgatcccagtacaatatctctagctattttgtcattccaaatccaaagtacatatattcttatccaaaatatgatcaaatccaaaaaaaatacacattgttaaatctaaaatagtttacaatcaaaaataagattcaaaaataaaaaataaaaaattaaagagagaggagagaatgatgtttaatagttgttgaccccaaaattctcccagtgagaatctcaaagtcataataaggatagaaaaatttgaagggagacaaggagaccatctcacgaagctcccgagggtctcactaggaagagccatctcggcattgccaatagacattttggcatgcctggtgaggcatgcatcttgacaagtcttgagctccatgcctcgaccatacatctcagccaagcatccttgaaccatctcggtcaagcttccttattaaagcatctcaacaaaacttccttgaagaccatctcggccaagcttccttgaagaccatctcaaccaaaacgtggtaaccatctcggcaccaacacatggtaaccacctcgacaccaccctcatggtgaccatctcggacatactctcccaagagaatctcagccatgctgctcctctcagagcatctcggccatgctctcctaagagtttctcgaccatatgctctcctaagagaatctcaagattctcaaccattgggtatactattattgtcgaaggtttaaaaccgtcagctatagtacacctaacggcgttaaactgtcgaggatagcattataactcatttttgaattttaaaattataattgttttgcacaattagagatactaaaataactgtttaaaattaaa

SEQ ID NO: 37584 - DNA, 2798 bp, Cannabis sativa
taaccattctcatcacgggccacacacccataaccaaacctttgttgagcttcaaaaataacaccgtcgacattaatcttgatcttacaattaatcggtttactccaatggttgctgctagaggacacaccaatagcaaatagggattctggtgagtgagatttagcaaccctccattgatcaaggactgaccttgtcgacttaaccacctccaaagcagagcagggtttttgctgccaaaagacctcatttcgtgtctttcaaatactccatgataccatagtagcatctattaaaacatcaccttgattatcatccaaaagctggaaaaaccagctgccaaaatcatccacaccatagttcattgcagcaacagagaaaaaccagcaagattggccaaaacgacaactaagaagcacatgaaatattgtctcgtaattgatattacataaagggcagatgagatcaacatttacatgtttggtactaagttgtactttagttggaagacaccctgagcaagctctccacagaaaatgaagaacctttggcagaacatcaagcttccacagttttttccagcaactctcctcttgaagatgtagccaatttccaaaagcaacttgaaggtacttgtacgcactcttgactgtgtaaaaatctaaagtttctattttccaatgccatgaatccataaccatcgaaccactcagctgaatactcaatattaattgtgcatcccactccccaaacatgtcatcaattacctcaagatctcacaacctttctcccaccatcatcaaattcgagaccaatttgttttcaaggcctagattagcagtaataccatatggattactgtcatgtggtagccaaggatcatgtgggatactaacagtcgagccatttccaatcgatcttcttgcaccctgctgaacaagagattgagcttcccaaatactccgccaaatgaagctaggattttggcctaactcagcattaagaaaagacccatttggataataccgagctttataaatccttcccacaaacgacccttccttagtgagcaatctccacccttattttcccaaaaaagagaaattataatacctaagatccctaaatcccaacacaccatgcttgtgttgacatagacgcctccaactgacccaactaacacccttgctcgaagagctagactgagccttccaccaaaatttcgccatcataccttcaaggcttgcacaaatttctttagttagaagaaatacactcattgcataacatggtaaagcctgagcaacacctctttaccaacttttgatagaaatttaaaagtgaaaatataaaaaatttaccaaaaaaatagtatattatgtaattatccctttaattgggtagttttataagtattttttttttaaaaatttcccttggaaaaatcacaagcacatcataaaacccatccaacttcttttcttttttgctaaaaacatcttttacttcttactcgtttatatttctactctctagtctcttgtttctcctaacttcagcttaaaccgcccaaagaaacacaactaataatttacaatttaaattagttgttattcttcttcttgtttagataactaattagtcacgcacatcataatctctagcacattcccaatttgattcttttcattgctcaacttttactttattggataaaaaaagacatgattgaactgcctgaaattatgcttcgtttacttaattaccttttttccattgggggaggttaaaagtaatgaaagataattaaaaacattgcattttgataattttgattctcttatactggtcatgaaaaggagttatcacatatttggccacacacaacatagcatattcaactttcaatttgatattatttaatggataattatactttattatatatattttcccttgtttcacaagtctagctgagtcatcttatattatcaacctaatccttaaaacatatcatatgctatttatttgcaggctttatattattacttattgtaatgcctatttgattttgtgcgatactcactataaaataaacaagtgtttaattggataattttattataattaaactaattacttaatatgggaccctatacttggattctaaggacaaaccttcagctttggttcatgaaccttctccttattttaagctcaaaatattgtttcatcgttttaattgagtgttccatcaacttgcttatttattttatacacttgcatatatattatatataccatattatattgacttgtaatagttttttttttaaaaaaaaaaaaaatagaaaaaataaaaaataaaagtcttatctgatataaatagtttcatggatgccaaattgttcaaaatagaaaaaaaaaataaaaatctttttcatttttgtctccaaattgtgccttgtaaaatgagaatagaaacattcttttcccttaatatatgttaataagtgatataataaagaataagacatttttttttttcttgctgggattatactattttgtcgatcttgaaaccaatttagtatcttgttgtttacttaatactattttgaataataattgagaaattaataattaattatacactctatttagatattattatataaatatgtatttaatttatatcatataattaaaaatgatgtggttcttacaatgtattacccgtattattactttattataagggttttttttttcataaatgtacaacaaaaataacataa

SEQ ID NO: 37585 - DNA, 4851 bp, Cannabis sativa
atcgctagccaatcgcaacgcgacatatcgagaaggtgctaaacaccactggtacctaatagcaatgctcttattactaacaagtatttcaaaagtcctttaaatgcatcttgtcattttgatatttgggtgagttataataaatggttttaataaatataatcagagtaaattatcactataatattgtaaatattttgtaatttttcattaaaataattatctcaatttaacttaaattccaataatgttagttttgtttcatttggacaattctacatcaattcaactgtttccattgatacatatctaaaataacaaaaaacatggaagaaaactcacaacaaaaacaccaaagtatatattttatttaatccttactaagattaaaaatgagatttctctatttacacaatatttagccccaactaacttgtggtatcatcaataaatttacacacactatctcaatattaaaccagtcagttgtgccttcatttccaagttttcctatgccaggaatttaggcagccataatatgaaatcaattcatcacaaaatggtaccttgaatccacatagctctccacatcccacagaaaagaaccaaatgtcacagcttcaagaacaagccttttcaaaccaccgaagctaatcttgataacctcatccttggaagaatcaacggttccctgaggtgttataacaatttcgggtcttccaaagagtgcctcggtgtgcttttcgataatgctaacagcctctttggatcttatggttgcatatctctgaagggtctccccatcaaatgacataacgtagcttctcagtcgggaattcttaacaccagcaccaaaacccgtagaactgatgcccccagcccatgaagaaacttcgggatgtgaaggcgctccttggagagactgttctccaccgaggggtttagtttcaatgttgttactttcttcatccaatttatctggaaggattttcatcgtcttctcaagttgaaacctctgatcaacccgcctgaggaagtatccatacataaccgacgctgcatacacctgcccaactcggagtttgcttatttgagctaccgaagtggagtcagctaatcggtttcctaaaataagagatagatgattctgtatcatctcataagcctccggtgagtgaagctgctcgagcttctcatcttgacttggccaggaatcgacctgcgatgaagaatcagaagcagcagaagggataatggatggtaccaaagaaacactggcatccatgaatttctgaacaatcaaagcatacaaaatttcttccaaagtctttctcctttcattagccttaacctcagcaattctcctgtaaatataaatcaaaataaatttcaatacaagattttaaaccccaatttcgtaaaggctgtacattcttctacaacaaagagaattttacaactaaaaacgcagataattgcaaagttttttgctttccagcttgagtaagccgatgacatgattcaactacaagattttgaaggataaaaacacgaacctgtagagaactaagtcggtgcctgtttccgaagattcctcagccgttttgtcagccgtttcttcagcatcacggtcaatttgaagctgttcgagctgctgctcaaccgcagctggaacaagatgcggatgacttgctaagatttgtgttaaaaactgtcctataggagattcaagttgtaatggagcaattggagcagatgatcctcctgaattcggagttaaggatgctctaactaatgggaacctcctatttccataatttaatcttctttcccctacctttgattttgcaatcgaagtttggtgctgccattatgcacaaaaagttataattaaaaaacagaacatcaaaaatctaacataaaacaatcaaagttcaaactcccaaccgcacaaaataaaattgcaaaaccaaaatcccaacagtttagttttgactttggacaaaaacaaatcaataattccacattcaaattaataagttaaagaataaataggtatttttccctttgaactttggccgacaaaaaatcaagccccttatttataaccgatgcccctgaattatgaccgtcctttaaataattagtaattttatccccgaattatgactgctatcatattttacccaacaaatttttatcattgtcaaaccgtgctccttcaacaaaactctaacgaactttaacattaccgatgttaaacattcccctgaattatgaccattagtaatatacgaggcttcccactaaataattagtaattttatcctctgaactatgaccactatcatattttacccgacaaatttttatcatggtcaaaccatgctccttcaacaaaactctaacgaagtttaacattaccgatgttaaacattctccctgaaatatgactgttagtgaaatataagaattcctttaaataattagcaattttatcctccgaactatgactactatcatattttacccaaaaaattattatcactgccaaactgtgctcctttaacataagtctaacataagtcccatatttcacaaaagttcaacttaataattcagtgagtacaatcttattagtaacaaaaatcactggtaaaaacacctatttattctaagtttaaagtaatttacaaagaacatatattaaagtacacacatatatatacaaaaactgcacaaattacatcttatgagagaaaattcaggcacaataatcacataaataaaatacccaattcagattctaagctgatttctaccacaaaattcaatctttactttttggaaaataaaaaaattgaagaaaagtttagataagaacatataataccttgattgagagaccaaaattggttccgaaattgacgaaacgagaacaagtagaagtgaaattacgagatctggaaatagaattggaagctttacagacagcgaaaggagattgcataagggttactgttgcagcttccatgttattcttcttctgcacaaatccataatagattgataaacaaaacaattacatgagaaattgaatattaaaatcgaaaaagctaagaaatttagagataaagtcttcacctttggatgaaaaaagagagaaaccctagaatagaatgagagagagatgggttaggtatgaaattgggggttttgatggtgatgatgatgactatagtagtttgagaaacccaaaattttcttttctactaaatatggtgaagtcttttatatatttatatttatattttatttttcttgagaaaatgaaatataaatttttatacaagataaggctttattctttaaatatttacaataatacactctttagacatttaatcaaattgattgtccttaaatttgttggtactaaatggttggcaactaaaatttaaccacaaatttcaaccacataatttttaggaataaattagtttattagaaaagaaatcataagataagatcacacataattataaattaaatatatatacttttttaagtcaaaatgagatgtggggatacacaataaagtaacttaaattatgatgttaggaattttttaaatgccaaattttatatatgatattttgttaaaatttaaagtttaaaatgggtaaattatagtttgaattttgtgttttataaaagttgtcagattagattttttctattttgttaaatgataattttgatcttttattttttaaaataatacttctaattcaatttttattaaaataaaacttaataataacttgacttacaagtgttataactagattggttatatttttttgcatctattagtacagttggttatgttaaacaaaattaatgaaaatttaatttaagatattattttgtactattttaaaaaatataaaatctgatttgtcatttaacaaaataaatgatatgataaattttacaaaatacacaataaaaaataatatttacactttagaattttgccaaaaatagtctttatttgtggcatatcataaaacattttacaataataatataaatatattttgagaaaatagacaatcctaatatatatttgaggaagactaattataatattatccatgtaaattttttaaaattctgaatagtttatattaccaaaaatagttactgatattccagtgtaccactcgtgttcaaaaaacttcaaacttattttcggccttataaactattcaaattttttcaaaaatttacagagacgatgttgaaactatatataacgaacactgtcatgaaaaaaaaaataagaaaaaaatattctggcatgtatttttgagcacgaagattgatcaagagattgtaatttgagattgacggcagcaaatatcaaatacatatattgaaattataattgaaggaacatctacagtttttagaaatgctaaatagtaaaatatattaatggtgtcacacactatctagaattgtcatattgttattggtgtaattggatatcgagtcacacatatttaataactattataaaatatcgcgaactttttataaagcaatacttacactgaatattaatagacaacattggaatagcatttgttaatactttgttatatttaagtatttcctcacctcttttttcttgctttttgcctcaccgacgccattcccatgtcgtcgtcctccatttgctgccctctctggccttattgttttttcttgggttacttcgttgacattgacgaggtagaaactaaggtagcgtttggttgggtggaatgaaaacataagaat

SEQ ID NO: 37586 - DNA, 3975 bp, Cannabis sativa
  modified_base (2298)..(2317): a, c, t, g, unknown or other
acaattgatcaccaacaacatgggttaacacagcaaagaactatccaatcaacccaagttttaataaaaccaataaaatttaatgtaagcccaaataaaagtctaacaaacaagtcatgactcacctgataaaatgagaaggaaaacagagggccttcatcaaatcttccagaaagcataatcaataatatcataggcctcgttaagatcaatttttataacatagcgaggagaaatattatttctgtttaatctttggtaaggtcttggaatatcaaaatattatgtgcaatagacctctccttaataatagcactctgattatgagtgacaagaatatgcaaaactttagcaagtttcacacaaaacattttagacattcttgggttgtcaactttaaggattaagaaaattacagcattattcaaagagtcaagaataatagtagcattaaaaaattcaagaacaacttcaaaaatgtcaggaccaattacattcaacattgctttgaaaaaattagatctatacccttcaaactcagaactttaatagaatgaatattataaatcaatttctttgtataattttttttaatatattatatttatattaattaaaataaaataaaataaaaaaaataaataaaaaaagaaatacactaatgctagtggaagagcacattatatttctctaaaaaaaataatcacaccataaatagaaaagtttgaaagctaaactacatgtaagataaaagtattagaaaaatttaaaataaaataaaaaattgcatagatacatccttttcgtgatttttgacatataatagtgtatatcataattctctaagagatttgataaaattttgaaaaattcaaaataatttaacgtgtcgaaaacatggttcaaagaatctgttgcacacatactttatttctataatttataagtgtgtgaaatagacagttttgaaccctacattttgtattataaatttaaattattttaaatttctcaaaattgtggatgatatttttttaaaaaagaaatgagcatgatattttaaataactacaatatacattataaaaaaaattatgattataactatttttgaggtgcattatagaatatgggttgattaattcaagcattattaggactaaaaaaaatgaaagtgcttttcttttacatttttacttgctggtgtttttttagagaaaaataacgttggttccatgttgtcgcaacattaatatttttacaacgtgtaatttttttagaacaacctaaaaataacagtctgtaagaaaaaaaaaatagtattccatacaaatgtaatttttttttggcatttctaaaataatcccttttctttagatcatctctaatgtaagatgtgaaattatttgtgctatatttgacatattatttacaattgtgttccaatgcacaagatataaaaaaaatataattattgttgatcatcatttaatacgttattgaaaatatacaaatattattattttttattgcttaaataattgtaatatggtaaataaagaagataaaattatgtaaaagttattgaatcataataattagtagcattatagtaaataaaaaaaataaaataaaatttattgtggactaaattgacccaatactatatcttgtgaaaaattcagcacaacctttaacatgtatcaaatttgacattttacaaaatactattaaagtagtattttttttaaatgtgctataacatagcaataaatcactattttggcactccgttgaagatgctacaagtgtatattttcctttagtcctacattgtttgtagggataattacataaaagacactacttttgtaaaaaaaattatatttttatgtttaattttttttttttttttacgtttttacgattttttataaaaacaacacgaaaataataagaatattacataaaagtagcatgaaaataacattaaaataacaataaaaaataacatacaaataacaaaatatcaacaataaattaataagagtataatataaaaagactctattttctgtaataaaataaaaaaaaaagtataaaatatttaaaattctgcaaaattgtaattttgtaattttttattatttttgtgtataattgtgaaataatatgctgttagtatgtgtagattttaagaagtatttatgatagaatgtgttttctaaaaccgtgactgtgttttgagatgtggattaatgcaaattattggactaaaatgataataataataataatnnnnnnnnnnnnnnnnnnnntaataataataataataaaagatttttagcccttttacatgttgagatgctactggagtccaaaaaagtctacttcatattagtagaagagccagccgactcatatttttttgcttatatatttcttcaaaaccatatatatttcttatattttttaaacaaaatcagaactataattaattcattaattttgtcaacacatatttaattattacgatgtatcacatacaaattttttattgatatatgcaccgttaccactacttaggcactgtgttaaagcagatccactgttctgtcttaaattgacgttcaactacttgtacttatatatttactacaaatattaataaaaccttaaatttaaatattttcttaaaataaaatgtattttctctcgtagatcactgatatttttatcaccaaggagtttcaatcttcaaccaatttttttctcacctaaaatgtccaacaatttattgttttcgatattataataaattgagaagcctctggatctctagaataattgagcttcgaaaccccacctacgtgcatactccaagatctccttatttattcacataaaaaaaaagtctctttatttattttgttttcttcttaatttgtatcttattcatcatttattttcctgttcacaagttatagtcttattaaaatactaacacgatctttagtaaggtggaaatgaagatgagtgaaaaagagagggtgaaaggaaatagatggaaactaggataggtgaaatttgtacggcaaaagggaaagagaaagggagaggaaaggtgtagggatccctcttagctcaacattttcaatcatggaggaatttaagaaacagacaaaatatatatatatacaattaattgttatattattttatataatataatatttaaattaaataattaagttacaaataattaaatgtggtaaattattaaatttattaaattgtaacatacatttggagttacaaaatgtgtgtagaatgatcacacaataggagttacaaatcctttaatttaataatttctcgaaatatgtaactctcatctttttttcactcttaaattagttaaagatgttacaaactgtttatgaatgtgaataaatgatagctattaaaaatataatttttggaaatttgatttattcatttataaggtgtataaatggttcaaaatcaagtgggagtgatttggaatactttaaaaaagaattggccaaagttgaaaaaatggtaactaattactttttttttagcatatacaagtgcatacatttttgaaagtttgacaaagtctttctaatagccaaaactcctccaaatcacctaattaatatcataagctcaatttatgattggcggtaacatcaaatgactttatggtggtcattcatatttatataggagttgaaattatttgttgtggttagaacattgtgaagatacgctcatccttaaacactaaaatgagcatatgaggcttgataaattcttaagagcatttttagcatttctctagggaaatttacatgatgtactaacttttctccatttattacaaaaatactgtgacacgctgacatttacatttttactgtttttatttattcggcagtatactgccatt

SEQ ID NO: 37587 - DNA, 3803 bp, Cannabis sativa
aaagttctctgaatttgattctaatgcctcaaacatgtttatggtatgtctagttcatgttccaatgcaaagtttgacccatttgcactaagacagcccccgtaaactgaaaccctagttagggttgttaacttgggcactggtgaaaccctaagtgcccaggttgatttctaaggtgctgattcgtgaatttttagctcttgatgcctggatttggttactccatgtattcatggtaaataatactgaatgatagtgagttggaaatgacttatcagaatccaaacacccaattcgaagttctcggaatcaacctgggcagagggctagggtttgtcgacctcaataactcaagactacttaactttgagatgttatctttcttgccacatgtaatattgatgtccacatcactagggaatatttctgggttaacattttctcccaagtcaactttacactagtgtggagttgactttatgatgtgtactgagctcgtttctctcaaaactactagatgggcatcaattttgacaatcttaggcaatcatttttgttcttcaagcattcccaataaaacaaggacttgaattccctgatcttgcacttggaaatttttgaaaatttattaagcaaaaaaagagaggaaaaactaatcattttttgcctatcttttatctttttctttaaaaacttaagattttcatgtatttctcatgtcattaggattaattggatttaaattctactcttatttggatgtgccattcaaaatttagagaaaaataagaagagaaaagatttttgatattttgcatatcatttatcattttctttttaaactctaaatttaccttagtgttaattgtattaggaattgttgttacattttaaatttagaatttctcttcctattcttataggaatttcaaaattcattaaggagaagagaaaatattattatctttttcttatcatttatcttttccttttaagcttaaaatttaaaagactctcaataacattaggattaagggatttagctcacctataaataagagagccttcaatcaagtttttctcacttcccatacttcttcccacgcccaagtctttttgagagccttggaatttcatcttcattcaagtgttcttcatctgctaaggtagacaatttttgttccttttttttttcagtgccatttttgtttttagtttttcttccttctttgtccttttctaaacttttttcaaggatcctagaactctccagaaacccttaaattccatatttaagaccttcaaaaatctaaaaccctattccatgtgagcaactttgaactaaaatttctcttgtaattaccttgaatttacctttccaaagcttaaaagacatttcttgagttgtaagtaactgagtgttgaagtcgtcatgcctcaaatgaagagaagcagaagaattcctgatgaatatgatctccatatgactcagttcattagagctaagcttacagtgcccaaatctaagaacttagacaaggcgcctggtgggaaagtaatggcaactgaacttcttaaagctgtcattgagagtgatgacccaagagattaggctttcaacttgagacctcttgtattcaacaccatctctgaacatcaagtccaattgattagagatgattatcttttcccaaaaaatgttgttaggaaaccacaatctgggtgtcccaatggtttcaagaatccatgttgcagtgcttgtttgagattccatatgaatgcgggtgcttacttgcctttacacctgtggtttatatcaatagcagatttctttggagtttatttctgccaaataaacccaaacaattgtagaatctagtccacctttttcatcttctactgcctgaaaaattggcctgtcccaactccccatgaaatttacttcgtctgtgacttgaaaagaagaccaactggaaaagaggaaggattttaccacttccaccaattcaatccatatataaaaactgtaaccaagagtaactatgacctttaccatcaagaatacttctatacctcagtccttccatcaatacatattaccttctagaagactggcacttttaagagacctgcttcattgattgacatgaagaggagagaagattctatgctcattgaaattgatgcatgggaaagatatgggaggaatttttttactgctaaaagccttcgcaaagtcgggctgataatgtattggaagggagtttatgttgacactcgcttttctgataactcttggacaatgcttcttgaacacgatgaaaaggatggtcaaagtgaaactgtcatcttgtctagaaccgtgatggaagatgaaagttttgcttaaaacaacctagaatatttagggagaatatctgtgtacttagattgagatgatggagaagttacttctactcaaactattccagaaatagtaagggaatcagtaggttgctgatactccatgttcaacagttttatcttgttgtcttcttttcttctgttgtactaaccatttgccttttttttatttgcagacaacatgagttttttggctgctatggcaacctactaaaaaaggaaggttcctgtagcaaaggagatcaaacctccagctgggaagtttttcagggtatccttgttgattattctgctcctacgaagaagaaactcatgaagaggagtagacctgttgaagtttttcctcttgcctaagaccgtggcaaggagaagtctagagttgttggatttgatgagggatctcccattgagatctctctagatgaatttgataatggtgttttgtactctagtttggatctagtggagtagctgcgtgtgtggggctactgacttcgtgccaatggtgatgccttaattggatccaaggctgaaaacattccattgtagaagttaattagcctccagacattcacatgttattgcccaaagatgtttcactgatatctttagggtaacaacttttcttgtcttcttttgaactagctttcttttatttatcatcacctgaatttgtcttcttctttttaggcttatgtcagttgtgcttacaccatggataacaaacacaagagggtggttgaacttgttgacgaattctcaactctagaggagtgtgctattgctacagaagaccagatgactgacttgaaagaaaccattagtgctttggagaagagtgtggccaatcaccgagcgcaacgactcataatgccccaaagcttgagagagtagcttgaagaagagtttggctactgcttgaaagaaaacttcagaggttgaagattcttcttgtttgaagcttgaagagaagactttgggtatggcttagttgaggactaagttagacatttgagagaacaagtaaccaaactggaggagaaggctaccgctgatgtcactttttatgatggcttgtgttttgatgtcatctactgtgattggtcatctaatggaggagcataatcattcaattggttggccttcactaagaaagaaatcccattctttataaggtgctatgagcagcgtttcaatgatgatgctctttagaggattggctttaacttgaatggcgatgagccagtggttgaagaagctgcaagggtcaaaagatacaaccccaagcatcctaacattcctcctacttgtaacaccctaactagcataggcgtattgttggaaattattttaccaggatctagatttactaacaagtatgctggattaacaacctaata

SEQ ID NO: 37588 - DNA, 3628 bp, Cannabis sativa
cccccccatcttagatagaattagttctataattatagagaacagttaaacagttaacaaactataataaacttgtaattatagttgaaactttaaaaacttgctaaaacaatacatgaacacctctacagtactccatgatgtaatcctcccaaacaaagtccattctgggaccattgtagtttgcccaagcactgacgataatactcatcaaatatgttgagaaaatgatacccttataaagaaatgtcaataaaaagaagtagcgtcgcctcctcaacatatggacgactgcatctatatgttgcatataaaggttagaggtagtagttagacaactaaatatattaattgtagattagtttagtcataatatttagtacaaataaaatgtagtaaaattgtagattggtttacttacatgatctataagccattcctgcggtatcaacaacttctaaaagaacgatagaccatgatcaccagccttcaaatcccaaagttgatggttgggaatgagtctagaacaccaccttcgaagagtatccaacaaccactcatccggtggagccaggggatcaaacgtcaaataatgcctttgtttcttcttcatcttcgtgtagcctttaaacaaagtaggaggatttctcatcctcctaccgaactgaaccctttaggtggtgcctctaaagccataacatcactctgtgactcactgtcacatatggagataataggtgcatcgacaggggtacgtggagcatcgtcatagggatcatacccattaggaatgatgaattcatctttatccatagcagatggtggtggtgatgcagctgctgatggctttggtgctagatctacggctggcgtacgatacaacatatttaatatagatctaattttctctttcatgatgttttggccacccttcaactctatatggctactctgatatgcctccttcagctcggcctgagaagcgtaaagagccttttgctcagcctcgatcttgtccaacctcatcactatttttttgtacttagcaccactaaggcctgaagatgacatagtgggctgagggtctaaagcagtggcctaaaaaaatatataccaaaagtatacggtaagcacaccatcaaaaatattcaacaaaatatagataaactattgccaaataaaaattatttacaaatcaaagatgtgtaataatagaaatttgtcgatagattgtcgacatatgatcgacatcctattgatattttcacttgtcaaaaaattgtcgacattatcttaatgaacaaaataacaacttattgagatatttgtcgacaacatgttgacaatctgtcgacaatctatcgatattatcttaataaataaactaacaaataatttaaaaaagtgttgacaaaatatcgacatcctatcgatttatcttaattcaaaaaaaaattaatatagcaagtaaatattgtcgatatgctatcgacatactaaataaagtctaaaaaatatcttaaataaataattaactactcattatgattttactaataatatcttgttgacattgcatcaataaaatatcgacaaacacaataaaatataaaaaatgatagcctaaccaaagtatcgataaatcataaataacatatcgatatcctaaccaagtaaaaactagttatgctcaaaccatgtaaattataactaaccaagtaatcacaactaatgacaaataataatcataaaaaaaaggtaaaacaaatggtatatgagtctctacctcagccataggagcatttttgacatgtttcactgctttttttgcttggtttttaaaagcaactgggtcttggaggcatccacacaaaccttaatcaagatatgcacaccatcgttagtgatgatccttgcatactcctccttatctaggcaaggaaatagccccttcatcacttcaagtttctatttaagatatgaaaagataagagaaaaataatttagcatttattacaagaatttctcttgaataattactctaaagacaaaagataatcatacccgtctcaaagataatgcactgagatccttctttcctatctcaccatatcttgtccagctaagtatccttagaaactgaatcccattattcgtgccatacctcttcccaacctctaaactagcctcatacgtccaatattgtactgcaagtgtaaaaccataagctgtgtattggcactcatgtcgaacttccaaatttagcttcttctcgtagtttgccttctgttataacatgtccttttgaagggactacataagtctagcaaatgtgtacttctcccaaggaatttagaagaagagcttaagatctttgacatatctaaatatgtcaagcataattaaagtgttagcctcatgacccagtagcactacatcaataaacatgcagaagtcaagcttgtacaagtcttccagattatgacaatttgaaaacctctcttggagtgtttttatcttcacactatcagaccgttaaaatatttgttgatcaatcggtctgacccgagtaggaaatttttgtagccttctcctcttttgttggccccgaggtgaagttcaggcttgtaatgagtgcaaactcaactactccaaatttgagctccttccggccaatgtaaaaatgcacctcctctgccttctcaacatcaaccttcatcttgtgcaacattacttggtgaaataacaccaaagaaaatgtgaagggtatgacattccaaaaattactgaaactgcttgctttcgttgtctcattcaaattgtactcctcataccgcatcttaatttttgcaaaaacaccagtgcctctatatgtcacgtggccaataaaataatcggatgctggaactatgagtcatggagccatttgaaaaaatatataacaaaagcatacgttaagcacaccatcgaaaaataatgggtaaaatatagataagccatttccaaaaaaaattctttaataaatcaaagatgccctctcatagaaaattgtccacaaaatatccacattttgtcgacattctgttgatattatctcaattaagaaataacaaaatacaataaaattttcaaaaaaaaattcaacaacttgtcgaaaaattgtcaaaattataaatcaaatgatgcataaaagttatcgacaaatggtcgatattctatctacatacataatatattctaaaagaatatatattaacgaaaattgtcgataaaccattgataatctatcgatatcgtattgatatacatttaaaaaattaaaaaactcagttatgcttaaacaatcaactactatcgataacctatcgataacatatcgacaacatattgacatattcaataaattctgaaaggtatattctaatcaaaattgttagtaaaccatagataacatgtcgatatcctattcatatacagtaaaaaaataaaaaataattatgctcaagcaattaactgtaagaacattaataataaaccctagatcaatttgtatataacatagaacacaataataatgtataataattaggtatgcgtacctgattaatccatagcaattacttcaatt

SEQ ID NO: 37589 - DNA, 4139 bp, Cannabis sativa
ggttgattcaggaaccatgtctaatgaattttaaagacaagaacattatgcctatatggaaatagaattaccttgaagcgggtaccaatagaagagaactttgattgttttgaactctcttcagggagtggagggaacagatttgcaacaaatgagcaccttgaggcatctaaaagagcttgatgttctgctactacatagtccttatttttatcaagaaaatgatctgcttggtaagtgacctgagtagagaaaagaagagaaagattagcccaacaaacttcagcatttttagctgcctttcagtaacagaatttgtcttttctcacatctccagcataatggttaatcgtgaagtctgtccgagcaagctttggcttactgaaacgcttgtgtgctttataagtctgatacatcttctgagcaaacgtttcatgtgtcgattttggaaacatactgcatcagaggctaacttgttaatgtccagacattatccgaagtggtgtctttttccttttacatatttatgatttaaagtttatcttcattgtccaacatagctatattattatacaaatgggtttgcaaagttcaaatttcttatcaaatcgttcccaatatagttcttaaacatatcaaatcattgttggttgatatttaatattccagtaacaaatgctaatgaaagcgtgtaaacaggtgaacataccaggcctcatcaagaagggcaattatgccaccaggtttctgcaagcaagatgcaccattatattccaaaattgtccataacattcattgtacaatataaaattagcttttgagaaataaataccttttcaataagatctaaaacatcttggttatctacaaactctacatagctccagtttatttcctcttttgtgtactcttcttgctccatcttgaatacgtgctgttaaaagagaaaaaaacaacacgttgataagaaaatttcagcagaacaaggtacgctaaagttatatttgtatgcattgtcacctgattaaaatgttgttgcaacttttcattggtgaagttgatacacagctgctcgaaactaagaattaccaatatcaccttagatatccccatttggaattaaaatatttctaaagcatataattgctgacattatatacctgttgaccttgaagctttcaaagccatatatatcaagaactcctattaagcttgctgcatttgaatcttgacctattgaattgtttatcttgtccacaatcctgtcataaggaatccatttattctcattaggtagctgtattcggattgtctagtttatatcatatcatcaaaaccagataactgttggttgggacaagtttggctgagttacacttgtctaattcacttgcttgagcacttaatgctgtgttccacataatggataactaatacaagtagtcctaaagataagtgaatctgtatagcttaccaatcaaacagtcgagagtatactgtctttgccaaggcatcacgactcagcgcagctgattcaggatccaacggttttgtaatgttaccgtctggagtcactatgacacgcttgcaaagggagtcttctagggacttcttgttactcctgaaaatataaaaaacaagagacaaaacagtggcattatcagaaacaagtagatcaactttcgttggtgtgaaaaactctgaccaagatttctaacatgagtagctctgctgctgtttcaagatggtactgtgatttttcatcttttaatttggaagaatcaacttcattccctttgataaagactatgttaccgagatggaggattgcagccaccactcgaaatatggcatcctacagaagagaagagaagttctcaatgtttattagtgtttaatctaaaatgccaacaatagtataatatttttgctggtgttgaggcagaaaatgaaaacctgttcatcctggctgatgcctacgatatccatggcatttctggtttccaagtactcccttgcatcatcgacatttgctacttggtaacaattagattgatttaggtagtgaaattgtcttggatcacctaatttgtacttcttgacatcctgttgcactaaccatgttagttatctatacatattaagtaatttagtggctaaatggtttaagtgaaaagggaaatcacctcaggtggtgctgcacagagcatgtagaaacaatggtagtttctctctgggtcggagacttgacatacacgtgacctttcaagaagatatgtacgaatagcagctccggagatcttcccatgtttgtcaaattgtatctcaacaaattttccaaaacgactggtatgccgttgacacaaattttcgtcagtttagccatgtcaaataaatcttctaagaaaggtaacaaacaatgttgagcagccacgattacttacctcgagttattgtttttcactgttttggcattcccaaatgcctcgagtactggattggactgaagaagttgaaatatttgttacttaccactaaacaagccaagtcaggtaataagcaatggaagtagtcaaaactcacctctaaaacctgctgttctacagtccttccttcagtacctgaccttccccccatgaaggcaagatatctcatgagcatttttgttgtttctgttttaccagctccactttctccactcactaatatggactgactcccatgttcatttctcatggccctgttacatgtcactaacaaatcagtttgtctatcgaagaacagaaagccaaaatcgaagcgagcaacagtggccttttaggagctatcacagatatttatggtgggattgtgtacctgtagcaagtatctgcaacagcgaaaagatgtggacttagctccccaaaggcagctcccttgtactgctccatcatgtggacatcatataaatgtggcagtcttcgaaagggattcacagctattagaatgtttccagtataagtctgtttatgcaatcaacaccaatttcagataactagttcgaaatcgcatctagattctcttttcatagataatttgttagaatcaactcacatatatttcattgagtgaaaatcgacaagcaagattgtataggactcccggttcatggaggtaagccaacttggtcatgtcatcaacgcctgctggcggtgcttctgtgtctttcgggtatatactgcagatgtctgcaacaatctgtggttgaagaaaaatgcaaatcatcaattcatagtactattgtgcaaggggagacaaagtgaccaagtgttgacaacttaatatgcatttacatgagtttgaatttaagatttaagttttgcttttggagcctccctgagttgaatcaatgacttgcatttcaaaactcattttttattgtaattagtcgtttggcagaagtgtccatgaaggtgataatggatccatttactgttttttctttttcttcctaatcaatcacttggataagaacttttctagattcttaattctagtagctaagctaatggatctatttcctgttttagctttcttattttctttgtgtataagcaatcacttggatcagaacttttcaagtgagtctagctaaagcaagaaagagtccataaagagaagaacagtagaagttttcgaacacaatatttcgaccatatgctattgaaaattgatcgaaacaatcatgttgatgacaacagaaaaaacagagaactagcttgtgaaattccagtattgtgggggagttgagaaaaattcttacagttttctcatttgtggtaacaatggtggcatttttgcctttgatttctgtaacttcaccatcaatccaagcagcctcaggatcctcaacccaaacatgtgatccaactatgatgtttactggagttccttccctgtgatcatcatcatcatcatcattcacaccacaccaagtgttaaaacctcattcattttgtatttaaacatttagagccaaaaaaaaaaaggaaaaaaaaaacatcatcactaaatcacacaaatccccatgattcataaccatgcttaccatgtctgaaggatctaaaagatcatcaaaactgggacaattatattcagca

SEQ ID NO: 37590 - DNA, 2241 bp, Cannabis sativa
cagctgctccgatcatccaacgaacattctcggcaatcctcaacgacaaatcagagagctccggaagcaataaggaagtcggagcagttgcggcgcagagagccgccgagtggggtttggtgctgaagaccgattccgagaccgggaagccgcagggtgtcggcgtgaggacttctggcggggatgagccggcgagtagtaacgtactgaagggtaattctcgtcggagctcgaataattcagttagaacttccggtgaatcttccgacgacggtggaggagggaaggagagagggtttccgagagtgtctgaggatttgaaggacgcgctttcggcttttcaacagacttttgtggtttcggatgctaccaaacccgattacccgattctttatgctagtgccgggtttttcaagatgacgggttacacttctaaagaggttattggtagaaactggtacgtaactaaaataaaagcagttattatttaattatttaaaattaactgtaataccggtcagatcaattgtttaattattattattattatgtattattaagtgagttaatgatttgtttaattaaattaataaataatgtggtgtgggtccagtcggttcttacaagggtcgggtactgacccggaagagttggcaaagattagagaatcattggaagcaggatccagttattgtgggcggatgttgaattacaagaaagatgggacccctttttggaatttattgactattgctccaattaaggatgaaactggcaaaattctcaaatttattgggtaagtttttattttcataatatatatttgccatttctacttggagtaaaattaaggactcatctacaattaaaaaaaaaaaaaattgattgacgtaatcagaagttctacagtacataggtacacatattttttgtttctaacagttgagcatcctctacaaaattataatcaaatataatttaattgtatttgtattttagttagtttgttttttatattatttcatgtaattgattattttatttttagtattataaattatttaattatttttttgaaaaataaaatatataaaatagttataatttaaataaaaaaaagtttgagttgtaattttagaaaattacttcatatttttttaatttttattgtgatttaggttgttctatcaattgttaaggtttctatatgaattttcgtaaaaatatgaaaaaaaaaaaattattttaaaatatatataacaaaaaaaaaaactcctataaatttttcagtaatacagttagaacaaaataacacttcaattattgttcaaaaataaaaataaaaataacactttaattatataatcctatatatataataatgtaatgtatatatgtatatttgtcgtggacctcactcacgtgtgttgattaatttggatggttgttgatgaaggatggcccaagcattacacaaggcgccttatagtaataaagattcatctttttatcatttcttatatataaatattatacatgtttttttaataaatgttcgtaaatatgcatttacaaaaaaaaataataataaaaatttatggtctcaatacatatcattttaaattttttgcacattctagaattatgaagttttttttttttaagtgaatttataaagtattaattaatatatatattttaaataaaagttttaattttaatgttatggtatggaatggatttattatattatttttctaatatatattttgtcacatcttgttggttactttatatgtggatggtagcaaatggtgaatgagacatttttgaatgaacgtaattgtgtaggaactatctttgagtttgagtgatgatactaacatatatatctatatatgtgtgtattactactattaatttatatgaacacaataattcatgaacactatatatattcaatattcatagatgaaagactagttaatatagaatatgtcctaaagcacataccacgtgtgtgatgtgttacacgtgggaccaaagaacatctcactcactcatatatctcatcttcaataatgtagcaatgaagcatttttcaaatttatttattatttttgaaaaaattccattatctgggccagttattgatacaaagtgggcctatgtaattggataaggagattgattcaatcaagagatctgtttctgtctgtctattaatttgataatttgatt

SEQ ID NO: 37591 - DNA, 2269 bp, Cannabis sativa
aaaaagatgaaaaatttactcacccctctatttttttcttagcagacaaaccccataaaagaccaacaatggagagcttgaagccagcaaagcaaaggtccagctatgggctccacaccactatggtaagaagaaaataaaacaaaaaacaaaaatttgaagattaaagagagaaagagaggtcaatgaaatgaattgaaggtttataattatacatacattttgataatatgtacgacaatattataggctttccatgaaatggagttcacgtgagaaaacgtgtaacaggtggagagtgtctattgttaactcctccaaacctcgttttatagttcacagttttttttttttaagattaaaaagaaaaaaaggttcgatttttaccttaaaagttgactaattttacattagtaaagtcaaaacatttatgtaagtatataattaagattaacttcttcaaatccttaatggggttcgacgtaatttgttattaaattattaatgaactttaaagattgaaactttataaattctagaaagaaaaaacaaatatgataaggctccacgtgtcgaattctggaggcagtagcatagaaaaactgtacacctaagcacattgtagtttaccgttatgtaacggagtgaaaacgtaatagctttcaaagtccaaacacaggtcaattgtcaattcagtctaaactttgtggtttctttcttttaccatatgacttttctatttatttttttcttctaagaattttatttttaaaaatattatttaggatttttactcctaactatcacatttatattattgtgcttttgaattatttagagtattgtaaatcggtctttctatctaattttatcacacgaaacaaataaattaatagcatgagtacttaatcaaataccacatcagctctacatgaataattatacattaagaaaataaaaactataaatttttgaaaaaattattaaattaaaatttaattaataattaaaaaaaattacgtaaaattaaattaaaaaatttaaattattttttaaaattaattatatatatagtgttgacatggaactaatgtagtaacggactaaaaagttatgtcatcattttgtttgtcatgataaaaatggatagaagaaataaatagtttaaagactatttttaacgagctaaacaaatttaagatctaaccacttgaggctagctcaagtggccataggtgggtgtgtgagtgtggaggcctggttcgaccaagtaaaacatgttgtaatatacaaacgcttaaatcaaaaaaacaaatttaagatcctcaatatgcatagatcatagttcaaaaagccaaaaatagccttgaaacaaaataaaataatttgactcatattttaaggttaagtttttaacattatatgaaatttcagaaatttgtagtatacagctcattctgagcttttcttttcttttttgggcctttctttagattttaaaccggccacacttttctttttttcttttttggtttttagatttattttattatttgtctttttcttttattttttttacatactattttttcttggatatgaacagttagaaatttttctttaatttaaatttatgagaagaaaaagaaatatatcattttcagttatttcaaatttcaacaaaaataaaataaaaaataattattttaataaatacaacatttttttaatagacattattttccatggtatttattgagctcgtggaccccttttgaaattatatcattatctcctgaccgcgaatttagttgaaaaaaatggcaagttttttttttttttataatgaaaaaaatggcaagagttgaacatttttttttaatttattgtttattttttatataaattttcaaaaatattatttttcttatgtttatttatgattttacagtttaaaatttttatttgtaaagttttaaaattacaaaaatacaattagtttaacaaaaagtaagaaaactattaaaaaataatttttttttttgttgaaaaaaacaactttttgacaactacaaatatattataaaacaataaaaaatagcaaaaaaaaataataattctgtgataactataaataaattataaaataaccaaaaaatagaaagatatttttgtaaataaaaaaaattaaaatatttttttttcgtattgatatatttttgtaattttttttaaaataattgatttataatgtaattttttttatata

SEQ ID NO: 37592 - DNA, 2128 bp, Cannabis sativa
agagagagagagagagagtcttatcaaggaaaaatgaaccaaagaaaacttgttgtaaaaacatccctcagatgccaattagaatttcaatcattcacaacattgtacatcctttggtcaaggatataaagtacatgaacctttaaaaaggctgaggaagatatagatgaacattagtttctggggctgaaagaataataacaaactcagtacaatcttatatgatcactattggttaaaatctactaacctctcataacagagggacaacacaaaactgggaaactgatcacaagcaaagacattcatagttctcattcatttccctcttggtaaaaaacaatcaacacaatcagtcctaagtatcaggtaaaaaaaatgtcaagctgaggtctcagtatgcagcacacaaagcctcatggaacaagcatggcaattatcctgtcaactttcaaggctacaacatgtcccagattatctctcaagtccatcaaatttacactaattacgaaacaatgctggtccaatccactctcttgagagaagttttcacagtttgagaaagctactctttttagctatgctgttacactgtttacatttaaaccttacaatcactctcctagactaaatatctacatctccagttcagcccacaagcccggactagtaccataaacggtacttacaaaaacgttctttatgttagtgtgcattgctacagaagtaaacagtccccccatacaaaacaaagcagcatttcaccattaaaatcagggaagaacaatgaagaaaatttataccatttatgggataagagtgaaaaataataaaaagtatagccgccaggtatacaattacaccatactatgcagataagctagaagtaacagtacaaaacaaaggcaaaaatccacctgagagaactgggaaagaagctttccccatgcaaccttcggatttgactttggcagcttgcttggacgcttcttagaccgagttatggccggaccaagtgccttcgatttctccacatccacagcaggttcccctaaaccaaagagaaaatgacaccccaaaaccaatctctcaataaaaaaaaaacaacgaaaatccaataacttcgtagctgcaagaacagtttatgtacaaaagatcgcacctaaagattgcggcgaaaccaaagccagaccatcagcaccaatctcagcagacttctcgggcaaggcctcatcaaaagcgctttcagtcttcaaaggatcaggagtcgccagatcagaagaacgaagctccaaacctgctgattcagaaacagcttctttaaccggagctaacagctcagccggttccgaaacctgaacctcattggtagacgaagaagcctccgcagcctagggtttagaaacaaatatcgattaacaatcagaaacccacatgcaaaatcccaaaaattcacaaacacaaaaaagagaaccacaaagaaacctgcacagaccagaacaagaacgaaagaaaacacaattaccttggatcgtttggggttaggaggaggagaagaagaaagggatcgtttggtagaagagctccgcctagtttcaaccatggtgtggtttgagtccttaagttaatcgtttaagatgagcagaacctctccgcctctgatccaagcaaggtccggtgacggtgagagagagataaagaagcaagaaatgagaggaaacagagtcgggtgaaatgattgggggaagaggaagaccaaaccagtttatcgaaattcctgtatctctcttcacaatttgttttctttctttgccctttttatctgaaaataaattaaatatatgatatatatatatatgtattttatatttatatttatataaattgggaggtcatgaggcggtggggaaagacagtgatttctggctttttatttttttttttaatttaatgtttctctatttcaaaataattttgtggaattctttactacaagaatcttgaattatatatgttatttatttaaaacgttacccaaataatatatattcatgttatttaaagttaatcttattaaaaaataattggaaaaataaaaaacaatttaatagctttgattgaatagtgg

SEQ ID NO: 37593 - DNA, 2238 bp, Cannabis sativa
aaaaaaaaaaaaaaacatgttaggcggaattttgaactgttgactaagcatcttgaaaaaatgaggaatcaagaatgcaaaaatatataagatttcactaattttgccagtgaaggttttgaaagtagcaatgatgcttccactgtcatagttgaagaatttttttttttttttttttgactcttaaattttggattttggttgaaagttccacgtgtgtacatataagtcatatgattgttgaattattttgattgacaataattttagttctaaagttggaatagaaaatgtttaggtaaagatgtttaatggtattataagaacaattactgatgtaagacattttcaacattaaggatgagctaatttattatttgggagctttagatacttgtgggctgtggctttgattattctgcaaaagatagtgaaataactatcaagaaaaatggcttggtactaggtagtcgtgaaggataaaaaaaaatagaatttctaataattagtgggaaaaactatttcaagtgagttgtgaaggtgaaatcaaatcacaaaaatattcaattaaagtgaaagagtgcaacaaagtggggaagactctaatttcatatagaagtacttgaaaaaagaaagcatcattgaaagattgaaaaatgtaaaaataagtgctcagttaaagtttaataagagagaaggaaatatatctttttcttgtgagtttaataattttaccggaccaagtaaatttctttctttcgttctttatttttctgagcttgaagtttattttttttccaatgctttgcgacttggcccacttcctttgaaattttacgtttttatgatttatagattggagaaagaaagaaatttgaatgatcgagaaatagcactattgtgaaaaatatgttgacttattctaaagagtaaagaggactgcaacaatgttaaaagatttataatttgtttattttgttgttggaaaagtgtttattttatgtagtatagtgtattttgctaaattagacataaataaaagtagtgaatctattgagccaaatcgttgagctcctgctctgcctggtacattttatggctttaatacccacctcttggttgtttagttttcaattgacaatgtgtgtgataatgtaacttgtttggatttagcttcttacgctttatactccaaatacagattaacccttccatcccgctaattgtcactggcggctctctgggagggtcaatcgcctcgctcttcaccttactgctgttagaaagcggtatctttacaaagaatgggaacaaggacaagtgcaaactactttgtatcacttttggttcacccctcattggggacagttgcctgcaaaacactctggctaaattttcatggaattcttatttcctgcacttggtctcagacaaagatcccgtgcctaggatttttgaagacctgaaaccgtttggtacatttcttttgtgttctgaatcagggtgttcatgttttgaggattccgaaaccatatcggatttgttggtggaaactgcaccctcacaggaggctgcaaatcaaaatcctattcaaggaatgcagcagttgttcgactatcaacaaattttagaccgcctctggggtaaggccttgtgcaaactcaactctaatgctgactcagcctcaagtcctttcaaggcaagcattatcacacagctctctgccatagggattacaactacacaaccccaggtagctaaattagtccaatcatgttttctttagtagacaaaccagatgtatgatgttattgataaactaatctcgtttcataattcttgtttctgaactgttttctgttttggcagcatgaaaatcagctgaacatagctgatctggttgagaagatggaaaaacagcaaagaaagttcttgatgggaaggaacaagtctttgattatgttgaagaaattgtctgtcataaaaatatttatggcatatattgaatggtacaaatattgggctaatgataaagaaattggatactatgatagctacaagaaaaaacttttcaaaactgatatggatgttgatgagttttgcaaaaaacttacaaactattggatagacatggttgacgaagaggagaagaaaccccataaaggattgttttcttctaagatattccttttggctgctacaaattacagaaggatggtggaaccacttcatatcgcc

SEQ ID NO: 37594 - DNA, 3971 bp, Cannabis sativa
  modified_base (3899)..(3904): a, c, t, g, unknown or other
tcacatataaatttggtgccctcttaatggttactagtattattatctatcgatggtttcttgtcttgaattttacattaaatcaagatccaatgatccatttttttttattttttttagcgaaagaaaaaattccattaaaaggcacaaaactaataaagtcacagacatcgcaaaatagttaaacttagcaaccgagaggtaagtcaggccaccaaactttagacaaatttaaaaacaaaatgatattagctaaaaaaaatgagatataacattatgagcccaactacaattaaaaaaaaaattatctatgataaaaagagaagtcttttttaatgtcatgcacaatggtactaaactcatatggccgcctataattactaaaagtagcttgccacaaacagaggtaatcagagaacaccgcaagactcctataacgaagccgcaaacaaaaaagaaggccttgcaacaaagtcgtagcctccgccacacaagctgcaaagccaacactcgttggagaagccaccgaacgaaggaactcatcggtctgagtcttcaccaccgccccgaggtcaatttcaatcttgatcattaatgtcaatatccataaataaatcaacatcacccaaaactaaatcaacaatagttgtcccatgagaaggactacccacacttggagcacatggccccatatccatagcagccaaaggagacagagcatcttgatactgccaaaggaaaatcaaagaccactagctagtcatagaatccgaagtaatttatgatcatggatgaaagtgttttgtctatgccatattcgccaacgaagaacgacgaactcctccatttcatgctttgagataatatccatacagccaaacaaaagctcataaaaattagaaattgctttaagtacatcaagacctttcaactccctctctcgcataatccctttaagggaggggaaaaatcaaagagcatgcacagttatttcattattctagaagcaaataggataaaccttaggcgcgtctattccatgtctagataaattagcataacaaggcaagaaattcaactttgctttccaaataaaattcttcacttgtggggggatggacaaagaccacataaatttccaccaacgaggctgctacatggccccaccccaaccttgccacggagctccaatactcactttttgcagtatattggccattctcagtgtggtgtcaaatcaaacaattctgactagcataaaatagacacagggatagatagaacagtcttagcctcacctgcatcaaaaagaacattaatcaaagagacattccactaacccgaaaccgtcttgtgatcacaaacttattgaaatgtataactactctgaagaaaaaaagtacaacccacatgatcttttggaacccaaccatcttcatgggtacaaacctgagtcccatcattcacaagccaacgagtccctttcttccataaatcacgacctcaaagaatacttttccaaaaaaaaaaaaaaaaaaaccttttagtctcctccacctcaatcaaattactcctactaaaataaaatcctttcgttaccttagccgctagagagtgcggaaaaatgtataattgtgcagcttccttgaccaataaagcttgaataaaaaggaacgtatcccgaaatcctataccactatccgacttgtaccaacacaaacgagaccatgtacacgagtgcataatttgtttatcagggtcacccacccccaccagaaatgagcaaaaagccaatgaatttcattcacaatgcccacatgaatcttaaacaacctcatagcataaattggtattgcttgaatcactgacttcaagaggacttcatggacgctagaacaaaatagcttactcttccatctaaacagcttattccacatacaatctaaaatggattgaaacaacccacttttactcttccctgcaaaacaaggcaaactaagatatttttcatagcacgaaacaagagtcacatagtagactagccaaagaaacacacagattcaaagccaaccgaggagaaaaacatactacagacttgttcaaattcattaactgccttaatgaatcttcatacatagttattaaggatattgggaaactgagtacaactttcagtcattgcttccaaaaataaaaaactatcacccatgaatgagatgaaaaaccattagtcctcgtcggccacacaccacaccaacaatattaccaatactaatctcatgcttaataatatatgataatcctttagcttaaataagaaaaaggaaagtagaaagaggatcacctcgacgaagccattgagtaggaacaatattcccaatgatgtcatgattaacattgattacatacgacattgtagcaacacatctcatgatcaacccaacctaactagaatgaaaccccagtcgctccatcatcccacgatagaagccccagtcaacccaatcattgaccttatccatgtcagccttataagaaagaaaccccttctaacctttcttgtgttgtttgataggattaatgtactcaaactcaatcattgcattgtcagaaataagcctctttggtataacactgataatgatagtctttgacattcttttggaaattgaacaggattggggtttcgttggttggatgaagttgtagtgaatagaagccatcattgaatttgtccccctttttgggaatggacacgagtttgtaaaagtataatatttttgtggggttgggaagactccaatccctaatgttatcccaatttttatcctcgtgacgtgacatgcttacgtggacaaaacttgtgccacgtggcagtacaactcaataaaagaaaggccaagccgacatctgagcaaataaagaccctggcactcaaatggggatcaagtgacagatcaactcacttttaggagctgaccaacccagggacaacatcatggccggccagcctggccagcacaaagccatggccgaccaaggattgcagtgtaggccccacaagacactcctacacgtggacatcaaaggtgggctacaaattgagccttaaaagcccaataaaatggtttaataatatctggaatctaagggcattttggtcttttctaaatatctaactaactatgctattttcaagggatttcaattataaacctaggatctaaggcttcttatacaaaggccttaacctctagctgaaaagctaagttgcctaagccgcctctaagctaaaaatctcaaactctctaagtgttagactctttctctcttcttcattctctcacacgcctagcctaggctgtactacaccctaggctgttcaacacttgagttctgccagacatcgattcatacattataatcctaagggtactatagcagatcccacctatagcgatttggatagtaattctctcagtataatacaactaaaagggaagtaggtcattacccgctatcacaagggggccgaacctctataaaaaaatcttgttgtttattgctttatattcttatttgtgcacacacttggcaagcatcagatctgcacaacctcgttgtcggttgatcacttttcaaggtcaacatctaaaaacaaaaaaaaaggctcgatagcaggtggtagccttagggaataagttggtaaggatctaatcctacaaaaactaaaaaaatcgataaaataattttggagtagtaggctagacccgaacatgagatgcatatggctctaagccccgaacccctcataattatgattaggggtcttagattcttgagctaggcaatgcaaaaccccatgttcctggggtatgatgttggaaatattttaccannnnnnagatttactaccatgtatgtgggcactcactcattcactcaaggtttgaaaatttagagaagaaaag

SEQ ID NO: 37595 - DNA, 5770 bp, Cannabis sativa
atcttaccataaaaaggaaaaattattttgtcacctaacttgccaaaaaaggactttacaaaactcagcgagagaaacctcataaggaaaaagagtaccaagacaataaatcgatttgcaaataagtactaattaataaaacagaatagccataccaccaaacaaaataatcatccaaggtaagagttaattttgccaatgagtgagcaacactattaacgatcttaggacaataaacaaaaaaaaaatctttactacaaggaatacaataagccaaagtatctttaatattacaccctaaataagaatgatccaccgaatgacttttgagcacattaatgacataccaaaacacgagcatagccaagatgaacacaaagcccaatacaatataaaatggttctagcttcagccatcacatgagttaccataccatgaaaaggccaagtggccattggtaaaatcccaccaaaagaatcccgcttcaacaagccaaaaccagctatagcatttagaatattcaaaccagcgtcacagttttaataataccatttggaggcttcacccacttgtgagtaataacgggcctatagccatcactagttccatcagaatacaaaccattggccttacgatatcgttcaatgtgctcaaggatccactcaacaacaagcttattataaatcattttcttttcattaacaagtatattgcgcttataccaacttcgccaaaggcaaacaaaaaatttctcaagagttaaagaagaaaatttatcccaaagagacagtaaaaaatcattgaaatccagccctagaatgtaggatatgcaagcaaaactagccaaagagtctaaaatgtgtctcaaagaatcacaacccaaagagcatgatgagcagtcttagggcctttggagcaaaattggcaataagtactcaagtagatgcccctaagcatcaagttgtaaaaagtaggcaactagttgtggccaagttgcggctagctttccataagaagtgtttcactttaactggtaagttcagcttccacaatttataccataacaaaggtcacccatttagaacccgaaagaccagctaagtgaattacatgccagtaaccactatgcatcgtataataatcagactgatcatggtacttaataagtttatccacaagggaaagatgaacctgaggaatagaaaggatagacttagccttctcttgacgaaaagagttgtgaatcaaatcttcttttcattgcccataagtatcaataaaaaaagtcaacagtagtatccaagataagggaatgaagagatggtgatttattcacatcaagatgagaaatccaactatcatgataaataaaaacctgcataccatctttaataagctagctagtgccatcttgaaacaaattcttgccctacaaaatggatctccaaatgaaggaagacctcttagtattagtagcatcaagcagagaagaagtgagaaaataagtagccttcacgaatttagcagcaatgatctcaggctcagagtaaaggcgagtagcctgttttccaacaatagcttagctaaaaagaaaaatatcacagaaccccactccaccatcttttttgtgccaacaaagcttttcccatgtgcaccaatataacttccttttatccaccccaccccaccagaaacaggcacacaacttatgaatctcattaataaaagtaacgagcaatctaaaaaggttcatggaataagtacggatatattgaataatagatttgataaggacctccctaccactagaagagaatgatcaagatatccagtgaaaaagtttactccaattactatctcggatagattgaaacaaacctttcttactttgacccgcaaaataagaaagaccaatgtatttctcatgacaagctatgacattcactaccaaaatagaagctatggattcgactacctcaacaagaacctgagaactgaagcataaagtagattttgtgaaattaaccaattgacccaaagcactaccataccatcccagtagttgcttaattatgctacaagaaaactaagttgttttgaagaaaaacaaactatcatcaccgaaaaaagatgagatataggagggggtccccttgtttgagacccctactaaggactatgaccatgaatttcaccattcaaattaaaagtgtagtcaaccaaagagatacatgtgaacaccaaagaaatccatctctcatgaaaccccacacaattataagccttagatatgtcaagtttaagagtgaacaccccagtcttgcgcttaactcagtgtttgagatgataacacactcgaacccaatcatagtgttattagttcttagactatcagagagaaaagcactttgctcatctgaaaccacatcccccaaaatctcataaagtttgttagtcataactttagcaataattttggaaaggacattgcaaaagttaataggtctaaaatcagaagcaagcttgggctcatcaacttttggaataagtgtaatcaaggtagaattagtaccagcaatactccctttctcattcaaaaaatcgagacaaaaattacatgcataatgaccccacaatcacccaatatttttagtaaaagccagcagatataccatctttcctaggacttttagaatggtacatctaaaaaagagcccatttaacatcactacgagtataaggatggatcaattgagaattcatggtagttgaaactttcatattgacaacattaagaaccagcctcatagacataaaggaaggagagttcgaactaaaaagtttgtgaaaatacccttagaaaatagaggcaagataagcttgggcttatctcaaaacattcttctcatcaagcaaagagtaaataaaattttgtttcctcctagccgaatcacacttggaataaactagtattccaatcaccaacattaatacttttctttacaatgaagtacatgaagttctttctcaatagccacagaaacaccccagtttgaagaagagataatgagggtctatatgttgcaactatttttttttatgcataacattcttgttatgcctcttgtaaatattactagtctattttgtaagggccctctcgaccttattaattttattcactaaacactcaccattagaagttgagttcacttgccacaagaaaaagataataagtccacacgcctgagactgcaactcaggaggatgctataccttcctataagctttatgtagatggatcctccaacgagcacagctctggtgcaagacccatcttagtaactcaaaagggatttcaaactcacagtgcattgtggttttagttcaccataataaacaatgaagtggagtatgaggcactcttagcagggataagattagcactagcaatgaaagtcgagtcactcaaaatctacagttactcatagcaagatgttaattagatttattagcatacttaagcaaagctaaagatttattagctcagctcaagtactactccatccaacaagtaccgtgtgaacagaacgtaaacccacactcactagctaaactggctagtgcaatagaaattgacattatcagtgtaggtcccgtcaactacctatccaaatgaagcatcaacgaagactcaaagcctatccttatgactgaaaatagtacatcatggatgaccctgattgcacaatacttagaacaaggtattcttccaaatgatcggaataaagttaagagatcgatgaggaaagaagctcgcttcatcatcgtggatggagtaatgtacagaagaggctactcctaattaggagaggcttacaagatttactacacgttacgccgataggtcttgatccagaacgatcaagtaagtttgaccatatagtgtcttaacaaactatagttattttagtgatccaccatgcagcaagttttcggtacctaattggatcataggatcattatggaacaccccctaattaagtgacatgtacaaaatttacagcatatttcgctgataggtcttgatccagaatgatcgagtaagtttgaccacatagtgtcttaagtttgtaattttttgaacatgcgtactaaactggaatatcaagaactctattctcagtactataaattattcggaaattttgaaaaatttacaagaatgatattatgactatagtgaatactactatgaaaaaaattttaaaaaaatattctgacatgtgaaattccgagtggtttacgatgctgagaataaagtttaaatattttgttgcatgcacgactattttttcttatacgtgtggtaagtagttgtttgaacatcaattttaacattgtaaactattcataattttttaaaatttttaagtggtcctatatagtaataacacaatcatgaaattggtttaatttttttttatatcaaaaatagataaaaatttaccaaaatactcttataaaatgtgtgatacataaatttcctcattgtattaaaacaaaatattaattattatttaaaaatgtatcaatttaaatttcctcccaggaccatataaattaaatgtggatgcttccttagacaattatgaaagcattgtacagggttaagagcgttactgattggaaaggaaacatgacagtaggattttcatttcctatggtgggttctgcctttcccctttacgctgaagttcaggctctttttttatgctcttagatggtgctctttaatcaaaatgtcaatcacgcacataaagacagattgcctctagcttacattgaaggttaagcacaaatggaaagatcgtttcatcaatctcaaggttcatctcaaagattgtcgactcttatttacttttcgtaatgtatctttgtactatatatctaggaatctcaatgtttcaactcataatattgctagagatgcattacgaaaaagataaagagttagtttggaaagcttaacttctttttctttgttgtaattgtaaacttgtttcccttctttttagttacaattacctctaaaaaaaattgtcacaactacatcgcagaaaacattccaattccgtacgagagagggattaactcggtacccaatgtatagtatacataataaatgttcatagaagtaaatatgcacttagtacttacaaaaaaaataataaaattttgtggtcctaatacaaatgattctaaaatttttacctattttaaaatttatgattttttttttttgaaaatttaatttatgaagtatttattgataattttttttaataaaggtctaattttaatttcttgcccaaagcttctaaattgctttagccgaccctaattgtatccaagtttatattttttcgtgtctggtcatactcacgcctcccaaagtcatggcatattaaaaagctcaaccgatattttgagcactaattaatttctttccacgctcacacatctcaccaactacaacgtttcctagttatgtcatttcagcttatactttcttctttaaatttattttatattaatttgtaatcttagtttgtaattcagattttttacccagcaaaaaaaaatatatttttatttgaaatttttacataaaaaatcacttttgcacaatttattaccaaaatactcctacacgcctatatcaacttttttacttacaatgttggttttattacacaaataccactta

SEQ ID NO: 37596 - DNA, 2202 bp, Cannabis sativa
atttttgtttgaaatatgtgagaaagaatctaattctctatagtacttggcaatagggtctccatccaaatctcaaactgttgtgttattttctgatttcaaaagcaaaatagaaatataaagtatgcccaaaaagcccaagacttgtaactattttgcttcattgatgacatgattagaatctctttgtcatgtggttttaaggaatctattgaggtagggcacaccgtttttcttttatttttcttatgccattaaaataacttttaccactcctcgtcgagtggtggtataattgttgggatagacggtttgtgttttattatcgaattttaatctttgatttagttcgagtgtaattttttttaatttaaaatacgatatttataattattatttaacaaaaatatagataagattaacactaaaataataacataatctataattccactatctttatgattttagagtatagtaattgaaattcaaatgcataaaccaaccaaacaaagggtaagtggttggcctactatatccttttagaaaaacaaaccctagttaaataaatgattattagcagtaaaattcctatacgttttgattttatacacttattttttttaatgaaaaaattctcttaagtttatttttttttttttttacaaatttgaagtgtcagttaaatattatcgttaaatattaattgaatgaccaatgtattagattcgaagttttaatgtcatttatacacagatttacatagtagtcatctaattagtatttaacgtcaacttaatatgtaactgacaccttaaatttaaaaagaaaaataaacttaaataagttttttcaaaaaatatataaaaaaaattaaatatataataattaaaacataaataaatttcaccgtcaattacccttaaataaaaaaaaaacacaagataataagaaatcatatgaatgacattataatattttgcaaagttaggcaagtcatctctttttgacctcaatgacctcaaactcctcaaactaaaaaaaaaaaaaaatcattttagaattttgagccacaaaactatcaattagtcaaaataattatgatgtaacataatccacaaaacaaatacaacacaaacacttggactagttaagttagggtttaagtgatgatgatgcccaacaaaggatcaatcattgagtaaaataatagtttatgaaaaatctaaaaatattttttctatcaatttccaaatctaaaaatttttttagtcaattttttttttctggattgcatatattataatattttaagaccatgtgtacttaaaatttcagaatattctaagtagtctacagtgccgaaataaaagtttaaatagttacttatcacgcttatagaaaaaacaattacacgtgcaacaaaatattttaaatcttatttttcagcattataaactagtaatacttttataaaaaaattatgaaaagttctaggtaactacaaccaaaaaaaaattatatgaaagaaaaaaaaaatagactaaaaaactatcgaaactaccattttagaatgtatactatagaattaccaacacccccataacatgatatgatgtcttattgagtagtcagttgtctcttataataattattaataagaaacgttaaaaggtaatattggtgtgtaatacttttatcagtgtcatattgttattgttgtaattaagtattgagtcctatataacttaaacaaataaattttaagaaatatcgctaaccaattgtaagccgctacctataaaaagtgttggatactactagtgcccaataacaatgtactaagcaccattaatatccttaaggcatttctgttaaaacaaagctaaaagaatgtgaagcttagcatgatcttgttttgtttttgttaagaaaaccaaagctggttaatgaaaatctatggaccatttaaagcttttgaataatttggtacaaatttctatacagaattaagttttaactaaaaacaatgggccaaaaaactcaagccctttctttcttcagttacttttgctcttattattatttaatcaattcttctgagtcattcagatttgtcttctttccacaaaaccctaatcattcataaactagtgaccccactttcatatccaaaattggaactctttaattcttttttaa

SEQ ID NO: 37597 - DNA, 6034 bp, Cannabis sativa
ccaacgtctgccacacaagttacgtaatcatcttcaatgaaacacaaacaatcaaatttcatcaaagccgcatcatcaatttcattaggacgagtttcaaatcccctgatctctagaaacttctcaaaaatatcaggacaacaaatattcttcaagtacaggtttttgaagaaactgtcatctctttcacgatagatttcttcatcttcaccatttttgtttaaagggcaaacaaaaatacaaatgttcttggagttattgtccaattcgtcaatttttttcattaaagcattgaacattttcgtaccgtagattgagattgatggagtttctgtattcttagcatccaagttgaagataccacattcttcccaattcaaatcatttggtagacgcttgatctgaccccagttgacttctttaaaggtgtccaaattcgggagccgaagcttgttcaagttcttcaattttgagatccaatacgggaagttttggagttgagtccccctgagatcaagatcagttaacttcaaaagtttttcaatttgtctcccgtctaatttgaaggcttcattggatttctgagtagatgattggccaacaacaaatgtagtatctgaaagatctaaaacctcaagcaattcaaggttctccaactctggctttgatccaacaaagacacacttgcgtaaagatagcttcttcaaattggtacattgggaaaagttggatgtcaaagaaatggatgtctcagaaaggtcaagagactgaagctctttcatatcattgaatggtaatcctgcttgcaataacttctttgcaccgctcaagtttatttcctcaagttttgatgatgaactcaaagttggaagttttaccaactcgacacaatttgacagtacaagttgacgaagctctggactggaaacagaagacaagttttgaatctttgtttcagagaggtcgagtatctgaagttgagtcaatccctcgaaggattggttattcatttctagtttcttacagcctgaaagatccaactcttcaagatgttcaaaggctttcaaacttggaaacttctcaagattcccacagtttttcattagaagcatgcgcaactttgacgtctccaaccgttcatctagtacttccttcaatgcagtggcacctgaaacatcaagtttctcaagatttgtaagtccttccatttctggaagcttttccaattgcatacagttggtgagaatgagctctcgaaggttactaaggttggaaagtgagggaagtgttttaataggagtatttgacaagttaaaaatttggaggcatctgaactggctgaagctaatatttgtcaaatcattcaaagatgacatatcagagagatcaagcttctcaagtctaggtaggtcactaaaacttggaggcaattgtttgatgttggttttagacaggtcaaggattcgaaggaaacttttgttttgcaagcttttgacataaaattccaccaactttgtagcaccagagagctcaagaatttggatttgggacaactggtcaaagtgaggaactctggttatttcagaacagcctatatgtgtgagtctagtgagcttatgtagactgtgcacaaatggtgcaggtgctattttggcatgagaatagtcaagcactctaagatccttgagttctccaaaatttttatctttaaatgtcatcaatgaagaaaccccagccatgtcaagtactttgagacctacaaatgatttcacatttggcatctcctttaagcaagagcaccccctgagaatgagccattgaagtttagtcaacttgtcaaaagacttgggcagatgctcgacttggacttcggaaaggttaaggctgcgaagattaggcatgttgtcaaatagattatctgggagactcttcaatgatttggcgccagaaatctccaaaactgttaaattcattccactaattgaatcaatattctccaatacgtcacaacccctgaccaccagaactcgaagctttgggtgagaagaacttgaaagaaacatcaaatccttcgacctcggattgatcaaaacaagtgtttccaattcactcattggcttaaaaaatgtctttggaacatctctacaaagacgatttccatgcataaacaatgtagagacctgttctctccacttgttatgtttacaaattgttctgatcatgccatctgcaactgatatcctcccgaaaccacctttccattcttcaccatctctttcaagtgccaacacttccggtaagcccaacattgcagagtcatcgaatcccctgttatatcgtagatcaggagttttctcatcgaacttcttgtatcgaacatcaggaacttcaagcaccactttttccattttgacaaactcataatcttctcttttgagaatttttcggtctcggagttcattcaaaatgcggtaaccatcttcatacgccttttcaatagagttagatgactctaaataaccctccaagatccaatgagctatcaactcgttgtagtggacacattgatttttaatgctggagaagaacttcttgctatgccaacaacagttgatcaaggcattatcatcactcggcaacatctcataaacaaaacaagccaatgtcctcattatcttctctgcactatttaattcaggatgttgatcacatatttttttcaaaatattgaccaacaatgactcataggtggcaccatcttttccaaccttgtaggaattgaatgctttaccaacaagaacagccattgcagcaggaatctgaagttcaacatctttaaaaatgccatctttaaacagcttctcaattttttccttttcattttccttatcctcatccgaatctattttttgagaagctctaaattgctccaacattaacttcaaaaactcgtcatgcttcaaaagaggaatttcatctgaactctgtgttgaagtagtattagtagcacaggtagtcatcaaaaccttcaaatgatcacctttctcatccttacaatgagaaatgacattttctctaatggctatgctcgcatcatcaacaccatcaagaaccaaaagaacaacagatttatgtttctctttatcttttgtatgttttgatactatttcttctatcttcttctttatgtttgtttttaatttatcctcataagactccttcgtctttttctttccatcttctatagagtcgttgttgacgccattactgtcattataatctccttcgaaacctccttcgatagggtcaagaacagacaattgtcgtgcgaggtcttctataagggatcgctcctgctcctgttgatgatgatcatatcttttgttgagagatagccaaagagtgacagcgaaggagttatgatcatcatcaggtttcatcagtatgtttcttctttcattgttgaatatctttctagccacatgtgtttttccaactccagcttctccggaaatagtaaaataggcatgtccagattcgtctttaatccatttttctacaacttcctccactaagtatgtgtacatatatcaatcataaaaaaaaaagataaacaagtaaatatatttgaatagtaattatgttggaaaaaaaaaatttaggtatgcattaaagtatagttatggcatgaatatgcgaaaaaaattatttaactacaaaaaagtattgacaagtataatttactaagaaagagaaaaaaataagagagtcaaaatttatattttttttaacatacaaaatttacattgtttaataataataaatttgattagaaaacattcaatttttttcatccaaacaaatagtaagacatatacatgctcacgtgttatgacgtatattaattaaggattttttatttttgacatatataaataaattatagtttaaatgttttattatattgattgcatacgtgattataatagaattttatttattttattttattctaactttagcgaaaaaacttattttcaagtgtattgctatagcatataatttaccagttttttaaaaaaatttaataatttatatcgttaaaaataaattttaaatagccagtcccacttttgtacttttttttttcttttaatatatgcatacaattgactaatttaaactctatatttttacctcgtaaattattgaaaatttcttaaaaatcaatgcgacgtttgttataagttataattatagaaaaattgtatagtgcacttctttaaaatgagtgtactgttttggaagaattttttagtctatttttattatgattgtatacgttacagttatttaagatataaaatttaacacactgaatacagggtttaaatagtctgttgcatgtgtaaaattattatttctatgcgtataaaatagactattggaatactactttatatattataaattattttgaatttctaatttttttataaaatattttaaataactatataataacgtgattatgaaaaaaaaaattaaattaattttttcaaaatgctaaaacaaacagaaaatgcatcggtgcaccccatctttggagtgcattgtaaaaacactaataactataatatacgccgctaaataaaaaaaattataatttttatattcaataagttgccaaaaaaaatatctctattatataattttttaattaattttaaaaaatgattttttttttattattgttttctttttaaacaataaaatagaaaaagaaatgtttatgtttcttaaataatcactattatgacgttttattgcagttataaaaaaatatttttctatatattatttaaaaaaaaatagtctattaagtggattacggttaaacaaattataattaacaatttttttagatagtattttataattaattaatgattttttataatgttttattaaattaaattaggggaaaactcatattcataaacgtgctaaactttctcatttctaatgtaatgtatgtaatgtatctaaagagagcataaagggtttagaaacatgtttttcttcaagtaataataataataataagtttgtacgaaaaagatatactctatttttagaaaatttacgtcacgcatatatttctcttcgcaaacatacattattcatagacatatacatgtattttaacaaataatagtgaaataaattttactaaaatgttttatattcttataaagtttttttttgttttttggaggaaatattcttataaggtttaaaatatttttttacgacttttctaattttcaaaaatgacgatgtaaaacaaaatcaacctaccaaaaaaataaataaatacttaattttataaataattgttttgatatgttcttacgaacaaattgtatcttgtaacattgaacttatttattgtcaaaacttcgaaataaaaaaattaagtattatattagaatcaaaatatatttccaaaaaatattattcttttgtcacgttaatagtatataataaattaattgatataatttcattgcaggttaatttagagctacaatatagttaattaattttactcatgcaataactatataaatatgagaattgctaaatgtcactagtagtgcctagtaccctcctatgtgtcaatatagatattggtccaactaacgtatcgggtcccatataatttaagataataatttttagggagtatcgctaatcaatcacaacgcgacatgtcgagaaggtgctaggcaccactagtgccttatagcaatgttcatataaatatatatcttattaaatttaatttaactgtgaaattagataaatataagaacctgagctttttgtaggacatgggccaagctgaggatctgtctccgtcgtctctggagccttttcttctggcttttgtggcggctctggagcctttacttctgttgatggatgtagttttgaagccgctgctcctgtggcgggcggtgtttgctgc

SEQ ID NO: 37598 - DNA, 4338 bp, Cannabis sativa
  modified_base (3307)..(3312): a, c, t, g, unknown or other
  modified_base (3545)..(3556): a, c, t, g, unknown or other
atatatatatgtcaacatatatgtactcatttttagatttacactaaaatatatgtattcattactaaaataaataaattagtatatatttatgtgtatgtgcctatgtcaataagaatattttttttgatgttttttattataaaacaaataaaatatacagactcaatatattactaaaaaaaattaagaaattagaagtttgtgtcttttttttaatattactagaaagtcaatgtatattatatattatattttcttaaaaaatatatataattaagtgtgaattggatcggatacttagcgaaccatctttcttacattgttgatggttggttggcttgagtcattcaaaatttaactagaggtaagtcttgttgtcaaacagcaatattttagtcaaatttgttagaattagatgcggttataaaatttttactacgcttgcaactaatacttgaaatcgattttttgacaataaaatttctaaaatgcaatttagctttttcatcaagtttctctcttaaatatcatgttagactatttacatgtgcacttgtacaagtgttaattttacattgtacacgtgtgagatttgaacactagtttctatgttgtaaattactttgaatttctcaaaattttatcggatatcttaaataattatgtcatacacgactataaaaaaaatcagactaaaaaaattctcttaaatgcttaaatatataagagtgcatcagtgcaccctttttataggagtgcaatatttatgttcaaataaatatatggaccaatataaatttgacacgtgtacaagaggtacgcgttgtggcaatttaggtcaagacatgatcacacgacatgaactcgttacaaattattgtgagttaggatcatgaaaaatagacgcgagtcgaaattggccaaacctgaatgacttgattattatttgggttggattagggttaatgcatgtgacacaaaatcgacatgaattgacccgtttatatccaatatattattaaagttatttatttatagttaaattattatttgtttttatagaaaaatataagaaaattacttataagaatataagatagataatttgtgataaattattttaattaattaatattatttatttggagtttgatatatttttatttagtatattatttaaatgggtccaaaaaattattatatatattaccaatcttgttggttaacatgtattgtaatataagtataatcaacacgcgaacatggcaagataacacgaaaatacgataaattgggttacggtgttgaaatttcttgacacaaaatatatatagtttttgttagagttgactaaataaatatgtcaacatgcataaaacgaatacgaatatgacacgacaatacgaatttccacctttatacacgtggatagtcttatatggcatttaacaagaaaatttggatggaaaaactaaattgctaacagaacattgagttttagaagattttttgtcaaaaaatcaatttttggtgagttgcaagcgtagtagtttcatagtttaaccacaatttactcaatttaatttgttatgtgtttcacttttggtttactaatatatttttattgtcttgtgtgttggcttgtttgtgttttgtgctaccctaacctcaaatactaataattatgttatttttcttccttcacctctgcagtttctttggcaatttgtcacattaatcacatgaatatgtcccaaatcctaacctaacttaacaattatttgtagagttagatcagctaatgccacaattctcaaataataatgatttgttgtgatacttccacgttccctgcttcactttcaaccaaaaagtagaaagcaccacacatcatgactccattgattccaccttaaaagtctcttcataatcacattaattagcatccatacctataaagatggtggtattttattattataatagagactttgctaataaatttaattttaaatataatatgttagagagtttttttctttttttttttttctaaatattgaaaaaaaaaaatatcagttttattaatattattattaggggctgattcatttatttaattttattttgttgatattttataaactattgatgatatgttattttattggacttgctagttgaggtttgtgttatgagtccaggtttggattcgaagtctatggtccaggtcgtggtttgggggttgaggtcggagttcaattgcctgatttaggtttaaaatattgatgaacgactacaaataaactattaagaaaaaaaattatttaaatatattttgaaagtaatttttttattttaaaaattttgaaaactctttgttgttgtaattgaaattttctcacattgaaacttaatttatatcaatattttccttttgggataatgtaaagctgaatagggtattaattaaaatttatagtaggtagtattcaactcatattcatctttcttatcagtccaattttgactttctaaagagaaattaacaaattcttaatgttcttcttcttcttctccaagtttgatctttttcttttggtagagtacattattgggctaatataagtctactacatgatctcatatcgtcatcaagtaagaatttcttttggtctaaattttggagtcttgactatatattttaaccatgagaataattagcatcttaactccataaacttgtgatattaccaattaccaaataatgtctcttatgatgttaaaaatactccttagaaatgtgcccttatactactttttttgctatatttaactgttaaattgtttatgtgatattttagtaaaagatgaaaacagtaattaacactaatttaagaggagaaaaaagagattaaacacaaaatcttatatgtaagagtaatttttactataaatatttttagtaattttcagttgtagataaatatctaagtttaattttttacggcaataatacgtcctaagttatatttttaaaattttcgtaggtacttgaccgttaaatatcaagttattatccatatgatagtccctaaatgatccagcactaaagtatctagcacctctataacatgacgctttataattaattagttgttttttataatttttattaaattaaaataagtagaattcaatttcaatattaaattgcactaataataatattatactcttatagagtgatagactatataacctatggatgctcatttcaggattattttacaaatacacaaannnnnnaaaaaaattacaaaaatacgataatcatagaattttaaatatttttacgatttttttttttattttatttaccgaaaatacggtctttttatattatactattgttaatttattgttgatttttttgttatctttgtattattattttttttttgtttattttcttgttagttttatgtaattttcttattattttcgtgttgtttttataaaaaaattgtaaaaatgtaaannnnnnnnnnnnaacgtaaaaatatatttttttttataaaaaaaaataccttatgtaattatccctttcactttgttatgttatctaatttgatgaatctattatttaagcgtttctttgaatatttaacgtcttcagccatttttacatagagtaatctaaattagtcagtactttttttttttttcttttaatacagtgagtagtagtgagtagtgcctagtgagattcgatttccttacgacgtatagtcactcgagtaataaatattttcaataatcaaaacgtttttttttggcaagcaataatcaaaacgttaagtggatcaagattttaataataagattgagacttatctcttcataattttaattatgaaaatacacgactcttcaaaatttataaaaagataataaataaccgaactttgatcaggttatggaaatatatatacaacatatattttttttgtaatattgaaataaataaattacatataaaattatgatccaacggttagaaacaatgtcacaattttttttttttcacaatactattatgaagttaaattagatggcttaaaattttatccaacccaagcgtttcgtcttcttaatgattgtgctattaatattaaaattatttgataaggcaggtgatcaattttgtggccgttcgggcattttacaaggacattttacaattttgtatacattattttaattaattataaaatatgtgcaaaaaaacttattatcattttctcatatacttttatatataattaaaaactt

SEQ ID NO: 37599 - DNA, 3885 bp, Cannabis sativa
  modified_base (3642)..(3646): a, c, t, g, unknown or other
actgtagcgtgccttagcattagggcgttacacatagacaggaaagagacatggggctaaatccttgacctggagttctatcttttcataagcagttttgaacaagatattggaagaggctccattatcaatcatttttctggccaccatcttgtttgctatctgtacctccacggccaacgggtcattgtgcagaaacctaattttgacaacatcttcgtcgttgaaagttatggtaggccctcctgcccatgggattttgggcttcctttcttctacggccaggataacttcttcttgctcgtgatgtgctattcgggcatacctctcccgaactttgcctaaatctcaagctatcactactacaaaaagagttttttgcttcagtttttaagtgacatataaagtatttgcttcagttggtccaaccgacattataaccgtagacgcacatactgtttttttgcatcagttatgaaccgacgctaattgaaaaaaaaatatttttccttcagttcataaccgaagcaaaaaatcagtgcaccgacgctaatcgttttttttttttgctttggttataaactgaagcaaaaacatttaaaaaataaaaaaaatctgaaaccaaataaatacaatatcacatccatcctttaatatacttaagaatttttattattagctacaagagaactcacaatggtttaaatatatcacttcacatttgcaagaaaaccaacaaacataaaaggaacaccctctaacatatagctcaccatcttcgaattgtagaaaccaacttggccaacatccatggatggtgttttcttcaaattggaccatggggtgaaacaacctcaagattgttcactttgttacgtgcaaaggaaactcaaatcagaatagatggattttttattgaacaagacaattaattctcttataatttcaaaagggaaaaaaactttaaacaagcattcattaatcaaattacaagaaagaaaaacaagccaagattttaccttgtatggaatttgttttgacaagctgaccaaagtattctagtaatccttcacttatatcatcaatggtttgccctttatgcagtcgaaaataaacatgggcagaagacattttatcgacatggaacttgcaacaaaactagtatattactgatatacatacatacaaattaatataatagtcaaagtttagcaaaactagtatttgagctatacaccattttggccaaataataatagtaatcttaagtaacttatttttaccaagacataaatttctagacaaacatcaaagtccaagaaatattttttttttgtcttaacacaatcaagtcccaaacaaaatacaattttgaaattagatgaatactaaataagaacaattgtgagggaaagactttttttacataattacataccaaaagttttgataaatggtgacttgagcatcaaagaccaacctaaagcaccatatgacacatgagtatgaatagagtaaatgcttatgaaaaagtaatgcacatatttaaaataaaaatattattcactgccatcattgatatatatatatatccttatagtatcatcttctattttctaatatacgaggcaaattaatcaagttataaagtgagacaattaaaagagaattatataatgaattggaaaacaaacttgaatactacaatgagtgtatataaacagccaaatggaagccctcaaatctcatagcaaatctagtcataaacaatataacatgagaattttcataaccagccttactataaccattcaaccagccaacaagagagagagagaaatatatagatagagaaacgagagggacagatgtaataaggctcataatgaaaaagagacagaaagaaacaagggttagagatctaagtggaaggagtcatttaattccgattcaatcaatgtaagatttctcatacacttatgtgtttaagtttcattgttctagatattcatatttaggatgctaaaaatatacttgttagtaaatctaggtcctggtaaaatataatccaataaatgtttaccgagattttcaataacagattaaaaataatataaactaaagaataaataataaataaagaaagtatgaagtgagacaaacaatttttaacatggttggggcgttaactagccttagtccacaagtgaatcttattcaataagcttatggttgtaaatgcctaaagaaaatacacagaatgtatgttcttaaatttgccttagcaaaataggttagaaagttcaacccttaatccatgagattaatggggtatttataatagtttgagtattacattagatttccctgttcccactactggggagtttacagtaaagaatattcgtgggctttctcatgagattcagcccatggagaagacgatctgttgactaggcagatcagattggaattgaatttgtcaacatcgcatgcataaattgtgggcaattaatctgatttaattgcataatctttgttataggaagttttccctttaatcttgattcgatgcatgttgcgatttgacaagtggagttttcttatttatgttcaggcatataaagggaaaccggaagggtcttttgggaatgtgatgccttgcctctctggtctcgtggtaccgaacatgtcttttgggctcagttaagtaaaggcggaagactttgcgagggcaaaaccagaatatgttcctagaaggtaacacctagatgggcctggcccatttttcgttaatgagggttccactaatgggtcttgaatgttgatcttgagtccacgtgtccaatgttgaaaatgcggatagcaaagtcaaaaatatgatttatgatatttattgaattaagataatattaaatttaatttagtaaggcattattatcctaatttttgctcacctgatgtggcatgtccacatagaaaaaactaaaaccacgttgaatacaatttgtcaataaccagacaatgtccccttgcacggcatgtcaattgtcacgatttcttaggaaatcaagcaagatctagcaaggaaaaaatggtcatgagctagggaaccctggccgaccaatgaagtcttatgtgctggctaggccttaaaaatagggttggctggctagcacgtgcaaatagcctcgaagagagactggattaatggtgaggtcgcaagctaaattttagttacaaaacaaccataactgcccatgaagatagttcttcctcaaactagtatctgcctattctctagagatattacttttttttttttgtaatttaaataaaagatataaagatttattttttctattttagagggatatttatctatttgaattatgatattttgtaaccttacattatataaatgaaattaggtaagatgaaaaaggccagaactctaagtctcacatggccaaggctcctctctctctctcacgccccctcatgaactctaagacaatatataaatttattgtatttagtatagaaagaaaattgtatatatatatatatatatataaaaagtgtgttatcccaaaattggcactttgacgtggcatcacgagaatggtgacacgtggactnnnnntggagcatctgttcggaacgatatgccgagcaggattccttgctggcacatctagaatggaatactcaacgagccttgtcgaatgatcaacacttagcgaattcagcttaacacatcatgaatcaccagcgcaatccctacaactcagatatcaacttacgtggatgtggcacacacacgatcccattatcggtgtactcagcatcaatcccacgatccttgcattcagcattgatcac

SEQ ID NO: 37600 - DNA, 3197 bp, Cannabis sativa
aaaaagggcttggacagtaaaaaaaaaattattgccgtgtggcagtattatttggaaaaaaaacagtatttttgtaagtttcccttctagaatagatgttgggctgggcccaaataaatggcagcccaatttaattaatttctgtaaatatctctttggaaaattcttgttattggtttgagtgaagaagctccggttgctgagatcgaatagaagctaccgaaaatggccgattcgcaatcaggcggagaagaaaaagtatcaccggctacagctgtcttacttggagctttagcccctggtgttaacgtccgtaaagttcttctttctcacaaagttttcctaacatctatttttgactgattgggtttcacctccaattttcaggctcctacatggaatgccctaaaatcagcatttgtgatgttgggtctctctcttattgtgatgatggttttggcaatcacctctagtgattctttcatggcgcttcatgtcgccttacttgttattatcactgccactctcttcgctcttctcagctggtaagtttctacgtttatgctttgataattagctctggctattgtttgaattttgtgattttattttgtgggttttgcttattgtttatctcttccaatatattttttttttcctatttttgacaagaaattgtgctagttaaggctcattttaaatttgttgggtgaaattgaatggtgaaagattatgcttaatgaaatgctcatagcattatcatttaaagttttacgggtttattgaataatgcacttgagtccttgattgctgatttgggttagtgtttatggatttatgaatagtgtctttaaatgccttagagctatagaattatacttttctcgtaagttgatagaagctggtttcagtttatgatttgagtatctctgaaaaatagttttcatttttcgtctgcaggtttcttgcggagactggtttggtttcgattgaaagccaaatgcaagacatgaacttggtaccaaatgacaaagacaataagaaaagtaattgactgttctagtttcttataacatggcaagtaaaacatcatcatgtttggattgaacaagccttttttaaagggtcttctcattacaattcatttgaaaaaaaaaaaaagaaaaagaaaaagaaagactaataggaaagtttgttttgttttctttttcactcattcttgctatctttctccatgtgcttgctctttttggacttgatgaaactgaaacacgagcaacatgggagttgacacaagaacttcatttttttcattgatgcaatgatttcgaatttcgaaacttatctatttagagtgctacggtactttatttgatttggtacctttcattcttgagatgctattcttacattttacagataaaaagatattcctgcagtatcttattacatttatgctgttatggtttattagctattttagggctgtacataaatttttgtaaaccgtttcactcgcactcgaataaattaaatcaaaataatccgacgaaaaatacaaaattgaaaaactcaacaacaatataacccgcccaatatttctagatcacgtcttggagcattcttctgggcttgagattctagatgcgagatcatagggaaataggtggatctcccctatatttactatctttactgacaattttcataggctacaggctaccgggctaataggtggcgcccattgtaggacgcctcctgggatcaactagcccatagattggccctcaactggatagcatggtcagagtgccacatcgagcaggggtagtattacctcttcatccatacttctgagacattgttgcttacttcaggatgtgtccaacacaactcaccccgaaaagtatcaagtacctttcggtgatgtttgttttatatagggagctaggctggtcttagcctactccttataagattggatattattttgatttggagtctgtttagaagtagaaccgatcttgataattttactttagccaagttggtcaccggtggttagatgatagtgacgtcacacctaagtcaaagttggtgagtacaccgagcaatacttcactgcttgggatgttaaggaggttcgtcatcgacgctttcagcaagtgtcgttcttcaaacgctctaaccccacattgcaaatgagggatagagcgaatcacattgtatttctctcagtagagaagagaaacatactcaggttgactagtgtggccaacttccacaagtatgatttgtatgctcctgcttctgaggttgcgcgagccccggctgcagtgggagcttgtcctggagatggacaagttcctgacttggatgacaacgagcctttgtctcgcattgcacagaatctggagaggaaggagagggccctccgctgacgcttgaccagcggaggtccaaatggtgatgcttctctccagatcgggcctagatgccagacttctgaggggcctgcttgccccttgcctacatctagaggcaagggcaaggttgtagaggattctaacagttcctcttctaaagatggtatttgatagttgataacaccatattcttgtcttgcattgaatgtttacgattgttttctaactttgctattttcttttgcagatatgtcttcggtctcactgggggaccttcggatgagcccacaggtcgagtgagggccaaggtggcccaaacttcttgtggcgaagatgatgttgggtcttctctgcctcctcttccaccagggcctgcactagctgggtagcctgtgatacggcctacgggacagggtgctcggaggcctgaccgagaagcaagctcagctatagggcagagagctatggaggtagcccatagacgcaaagagagagcttttcctttcatggatgaggagctcaaggagattggtgatggcgagccagacaggctctactccaccagccttcgggattattctttggtaagttgtatttttagctttgttcatcattctggcacagtgtaccggtcaagggatttgttgcatgggtctggccagccatggatgaatctgtgaggggctgtccggctgtagtagtttcaaatagagggtggtcggccaggtatgtgactacacagtttaagagagcttaaatggattgattggt

SEQ ID NO: 37601 - DNA, 5471 bp, Cannabis sativa
ttataagaattaaagagaacttacatcataaccatctgaactatctaaacaacagaacaaaccagtgcagcctttcaaagccaaatgaatagaatgatagtccaaaacatcaatagtaaatactgataatctttcttcatgaactttctttaattctgtaatttctttctcaatctcactttctagtcctgaaattacagtacaatacaatacccaattcagaaaattaattagtgaaaaacaaaagggtcatcaagaaaaagagggaaaatatataaaaggttaccatttctttgtatagctgcatgaactgtgtaccctctacttaataatcctttgagaatccaaaaacccacgtaggttgatgcatcaagaacacaaatacaatgtttttcataatccatttttggttttttggtttataatttgtgtgttggtttatgaatatgatgtatttatatatagagttttgagataataaaaagagcctaaagtggaatagatgggtattgtgctagtgctcgaaaaaagctagagtttggttggtgaactatttggtctatattgttacacattcctagctacttaccatcttaaaaaacaacttctttctcactttttcattttttgtttgttaaattgattttttttattattattttcagaatatagttatggcaaattttacaatacaccacattgaaatgggtacaaaaaatatttagtctaatttttttatggtcatttacttagtaattattatttgacaaaattttgagaaattcaaaaaaaattatcacattgaataaggtttaaagaatttgttgtacgtgcgacttttttattttatacgagtgttaaataaatgttttgaatattgatttctataatgtaaatttaaatttcgtaaaattttgcagtatgtcttaaataactacaacgtacacgagtataaaaaaatttagactaaaaaattcttatagatactgaaatagttagggttgcatcagtgaaaagaaaatctactgtattcaaattgatgtgcccttcttgtcccactaattattttagtacacatcatctatacctatttaatatataataaattcgttaacaaactctaaactaaattaatacatataaaataagtatagatgatgtgtcctgaaataattagcggagcagggaaaatacaccaatttaaggacaaccgattttttttggtatcagtgcacccattttagtgaaataaacacctataattataatgaaagtagtttgggatttgggaggaaagaatggtaggtttattattagtaataatgtaaataaagtcggtattggggatgcatgtgtgtccaactctggttttatatgtttgtagagttccaaacgtaacttgttttttttgctttgttgcgctgaaaaaatatgtgcaatcatcattactttttaagttggtgataacgtcctcttttttggttaccttccaaaacaaaaacgtgcttagttagagagatgaaacaaccatattttggttattttggtaatctatttataataggagatataaaaggcataaaattattagtggcataagtacctaatattaatagatttgtaatttcgtccaattctagtataaactctggtgaggtcggccgaaactttggtagtttagattattgtttgtacatttttttaaagaaaagactttgttttaattattaaaactaaattgtggttttaatgtacacagttttttttttttttttattataaaagacccaattttaatcttttgtacaaggcccttaaaatgcttgggccgaccctgactcagatagtgtcttaaatttatgagaagtgttaccgttaacctcatgttacaacctcttagtcaacctctacccccaaaaacatatgtcggaatattttttttcaaattcttttttcacgtgggtgttcgttatgcttacaacatcatccctataaatttttaaaaattttcgaatagtttacagtgtcgaaaatacgtttgatttttttttttgaacgagcgtggtaaactggatatcaggaactctattttcggtattgtaaactattcggaatttttcaaaaatttaccgggacgatactgtaactataaccaataacgctatgaaaaaaatttgaaaaaaaatatttcgacatgtatttcgacatgtgatttcggacttaggttgactaagatgttgtaataagaagttgtaattagcactcctctaaatttatatttagttttcgaatttgttgatttttttttttaaaaataatatatactatatgtttctatctagacttaataattttaaatttgaatcttataagtgtcttgttcaatatactaataatatactaatggagttatacttaggaaagttacaattttattaatattgggtatttatattttactaaaaaaatattaaatttataccaattataaactcaaaattttatacccttctgtctcaaatatctttataataatatttgtttttttaaaaaaataaaaaaagagaataatgtgtttgtattgggtgcgggtaaaagattctttcacatggcaaaaagtacatttttttttttatggattgtattgtcattaatgggatattaatgtcatgtcgagtaaatctactatactgatgttgatcattcatcaaattaagtattacaatcctaatgaatggtcatgatctagtaacaaacgaactataagatgtgatgttgtgatgataaagatactcaaaagtctaattgctaggtggaaagagtacactagggatggatgaagttgttacctaactaatccaattttgtttaggggaaatatattcactaatttttagaaataacaaaatatgtcaactaacaaattaatacaaaatttattttattttttggtattaggaaaatggagattcaaattcaaaatctcttgaagtgtagtatgtatcattagactatatctgtaacctcgttcatatagtttttattcatgattaaaccaaataaatatattaaaagaaatctttgatttaatttaaagccttttcttttttaagtttatcatttattactttgtccataaatatgaaaactaattatagatttggattttttttttgacatagtaattagaatcacttataaatttacgatgaaaaaaattcacaatcagtgcaagatccttcacccttctcgaatcaagataactcatcgtctattcaaaaattatgctttgtcaaatactacccaatataattaaaggtaattagaaataactacccaatattttggacaaatactcattgaatattataggggtataattacctaatatcattaatcatataattttattcagttctttcccaacagattcatgagttttagcttaggttgccaactgtttgtagttctgtatggtttttaacggaagcccacttgagttggcaatctacaattcatgtcttcattatttgcttattgtaagctattttgtctaccattggtaatttgattgttaattaatacggatacactaaaatctaagttgacctgacataactattgtactctcatgcctaattatatttatttctatattttcgtttggtagaatatgtataacatgaggctgttttcaatacgatacatgtttcggtatttttttctttttaaactgaattgtggttgtttttcaattgtatttttgtcaaatatggaattgtgtcaatatataaatgtatcacatgtcgaggtagcttactagacccatacgtgataattacatagatgccctgttcttcataacagatatctagaagatgattatagggctacttcatacagtttacaaacctaaaagaaaaacatgttaaaagtaaaggttaactacacttgcagctaattttcatagagcgtggctgtaaggaaaatattaagaaacaatattatcaactgcgaaaacaatgcaccttaaagcttagatagtttaatcacctaattacttgatggcatatttagcgtagaaaatttaggacctgaactagtatattaattgcataagtagttaaataccagatataaattatacaagaataagagctgacctctgccaaaaccagagcctagtaccaacccggtttagttggctcagctgataccaaaaaaataaaataaaataaatggtagtactcctcaacgagttaggctattgattcacaattactaaacaaattcattttgcacgagataataaggaaaaggtacaaatgtttcgttacatataattttgtgacactgctgcattattagtccaaaatctttcgattaaataaaaggtgattttgatgtgtgtgaagtactcttgtgtaaatatctgtaaatgaatgggatggagattcaggagaattggatttaaggtaatatatatttttttttttgaaaaaattcaatatacagttaaaagaatgaagagtgtagcgacatgcaatctacatgtctacttcaagaatcaagatgtatgcttttattatttggccagccaaactgggggagcatggtaagtaatactaataggcctaaacctctaagtgtggctcaaaatttactagctacgtttggcaagaaagaatttagaaagctgtaggactctacttgtactaaccctttcttcaaaagaattatattcaacaatttctgaacaaactcgatgggacctgaaagaagtaacatggaacatgttagaaagaaaaactagaaatttcacagaaaatagctaagctaatttctgctgtagtggagagagaaaagtgtactcttttccaaaaaaaaaaatagaataaaaaacaatagtgtacaacgtcccttccctgattggattcaaaagggaatggaagacaaaatcggttaaaaattttcggcaaaatcaaagctcatgtattatcaaataaagggtagagatgaaaagaatttgaggagaaagactaccttaagatggtgtggcataatcttgatgtcgtagggtacatgtagccatgcatcagaaggatagagcgaaaaattttctggtttactggtataaacatctgcatactgatgaatatgataggcaaaagcggattcttgacctgtgtctgtgaggaaggtggctccaaaggacctattgaacattttcttcatcatttgacgggccttcactcgctccacatttagttcctccaacagcaatttataagctttgctttgatgattactagcaacagttgaatgcaatttaccgaggagttcttgaattatgtgaaattttgcctgcattaaaagagaatggtaaagggatataagatctgcctggctgccttaactagacaaatagttatctgaaaaatttcttcgcctaagtacaaagccatgtaaaa

SEQ ID NO: 37602 - DNA, 1640 bp, Cannabis sativa
taagcatataagttatataagttataaacaagttataaacttgttataaacttatttataaacttataacaccttataacaccataaataacaccataatacaccataatctatccataatctatattctctatattcgttagattaaaataaaataaaaaatgcattaatttcaaatctaaaatacaaaaactaagttccaaactatatataatatattatatattgatatttttaatatattatttatgtaataaaaataaaatgattatatttaggattttttttttatttttaatacattatatatgtaataaaagtgaaaaatataaaaataaaattaaaagtgatcgggttagcaggtgggttcgggttcaatccaaaatctggtgaccataaaaaaccaacttgcgaacccgcccgatggtgtactgggttgaacccgacccgcctaaacagaataggttttttaaaattctcaggttgagcgggtcaggttcgtgcgggttggtctctgggtcaaactcggtcaaaatgttcaatcgtagctaaaactgtcacctatcgcataaactataagccatagtgtaaaactatcggctatattagaggctacggtttaaaactgctgcctataatttaatacaaaggtttttgtccaaaatcttggtgaactagttctactaaggtggaaccttcaaccgctacttaaggattctcttctttctctgaagttgaataactttaggtcattttgacaaatatgtgcaaatccttcatcggtggaaaagcaactctaataccgaactctttaggacgcttctaaaagagcggattcacaaccttcttctgttttacaaccagacacataattaaagatttgcaaatcacaccataccctaaattaagagctaactaaacgtttaaatactgaaaagaaaaatataaaagcaaaaatagaatactgaaagttataagtttttattcgagagtacatagacttttctggttttcttcagaggctatgtgacaaaatcaaaatcaaaatcgaatatttgataatgaaaatgcaaatataattacaaaagtcatgagagagagagagaaagtgaaaaaaatgagatattatcatggttgatgatggttgagatcttgtgtgaagaaaatcctaaatttaaaatgcaaggaggaggagggaggcgtcttaggataagagagagcaagagggaggtgttacataatttttgagcaactacgcaagtgtacgtacttgtttgtagttttaaactcacacaggtgagatcaatccatagaaaattgttatcaattaccacaaaattagattggcgtttctatttggcaaatcaattaaaaagattgaagaattaaatgactagaaattaaagaaacaaggaaataataataaaaagtgtaattaattatggatgagtggttaagaatacgaatcttgttagttcagtttctcaattgctaatgttaattatcaattctctccctcttggtgacgatagaatatcaatttaaccctaactcttctcagatcattaaggtcctaaatcatatatcatctactcgcatctgtgcagtaaatcaacatataacttgcattaaaatcagaa

SEQ ID NO: 37603 - DNA, 2229 bp, Cannabis sativa
tcagaatcatcccacttgatcttcccaggcggtgtgcgattgcacagcttactcggtatttttccttatggataatgggaccactgactgtcacaagtctctataattgtcttctgttccacagacgcaaaactgggcgaaataggcgacgatggaaaattgtcggcaaaaaaatttaccgacaggttaaaactgtcaacaatagtagaaattatagcctacaatttaaaaatgttggctatagtgtttatagttgatctcaattcattaaatcatactacgctcaccatcaacctcaagctaaacaagaactcatcaatctaacataaagctaatcaagttcttgttgatccaaacgataatgacagtaacaaattcatcgatcagaaaactaaaaccaacaattaaaaagcacaagcatataccacattttcacatgttaaaaccaaacatgttacatatgcacagatctatagaaaaaagttaacaaataaaaaagcactaacttttaatggagtcggaggcggcgatccccttcagacacaacagttggtgccaaatctgtgccggatcttatggtaggcattgtggctgacttctctccaaggagacagaggtgttaatggggtccattaccttggaaatggggaaactgacggtggtgattcaaaggttggggcagaggagattagggatggcgtgagtttctcaagaatggtggtggattggtggtggtcttcaatgacataaggaatggtgcgggtgttcatcgaggtggttcgtgctagaattgccaaagagaaagatgaggcctgattttggatctaaaattgcatttgaagataaaataaaaaattggagggggttattatatgcttggaattgcccacaatttttaaccataggcaattccaatttaaaaaattaaatttcagtatagtcgatgggtctaaaccattttctattctcaacgagtgtttaaaaccaacgactattctcctataggtgttaaacactcacttaattttattagcaatggtcctcgaaaaaaagcaatttgaggactggcaggaatattggtttttatagtagtgagaagccttcaatttgagagcagatgacttcttgaccattgctttctttgattcaaattgaggaggttatgaataaaggacgcgataaattaactgttacaggtgtaatcgttggagtgatagtgacagttggagaaatttcgtctcagaagaggtgctggatggagcaatagcaatgtcgaccaactttcttgatcgaccaatgttcttagttttggccatgggatttctgtaaacaaagaaagcaaagaagagagaagagagagttattagggaagaagaacagggttggtgagaaataaataaaatcaaaattagttatataaaaagagagggaagataaaatgggaaaccaatttaaaatggaaacaagaaataaaaaaccaatctttctcaccaaataataaccgatcctcaaggaacactttcattttttatttatttaatgaggacacagaaaaataaacgcaaaaaaatgaaagagaagacaaatgagaaattaatcaagattttcactatatttaaataagtgctaaaataaaaaataaaatcaaggtaaaaaatttcacaaaacacattaacaagagatcatttaacataggaaacttatcaaaattagaccaaatattgcaccaatcaatacttatcaaaagaacgacaattgacaactatttttaagccaacaagccaaacaactccccctcctccattttttatttgaacaaatataaataaagaattaatttttttttacaaaatattaaagaaactaaaatattttatacaaaaatcaagttactctaaaatgggtatatagtggcataagtacccaaagttttaggtttgtaagcggcataaactcaatgattccttttagtggcattaagtatgcaatatttataaaactataattttcctccagtttcattagtgcagactctattattgacttaaacaaggcacatataaggtctagattctacagtattgggtttggttgaaaaatatagtatcaattacttccaaatcttattttaataaattcaagatggagtttgtattgatgaaaatgagaaaaattatagttttacaaacattgaatacttacactgctaaaaaaatcattaaatttatg

SEQ ID NO: 37604 - DNA, 2076 bp, Cannabis sativa
tggttcttcatcttcgttggaactttggcatcaacgtcttggacatccttcagagaaagtcgtaaagtctttacctttccttcgtaattctagtaataaattaaataaggcatgtgatgtgtgtccccgtgccaaacaaactcctgattcttttctcttagtgaccataaggcttcctgaatttttgaattagttcattgtgacttatggggtccttattcctcgtgtggggctcgttattttttgactattgtggatgatttttctcgagctacatgggtttatttgttgattgataaattggaggtgtttaaaatgtttatgtcattttttgctatggtcaatcgacaatttggtcataaggttaagattgttcggagcgataatgggacagaatttaattgtttacaagattattttctttccaataggattttctttcaatcttcttgtgtgggaactccacaacaaaatggtagagttgaacgtaagcatcgccatattttaactgtagcaagggccttacgttttcaaagtcatcttcctctctatttttggggtgaacgtgtcttagcagcttctcatttgatcaatcgaacaccctcaagtgttctccagaacaaaacaccttatgaaattttatttcatactttgccaaattttgatgaattgcgtgtgtttggttctttgtgttatgcccataatcaacgagctaagaatgataaatttgcaagtcgcagtcgaaaatgtatctttgttgggtatccttttggtaagaaaggatggaaactttttgatctaaaaaataaaagttttttgtttctagggttgttaagttctttgaaaatcaatttccttttgctgcaaataatccttctcctattagctctacatatcattctaccagtatgagtttaggtgatgatgactttgactttgaattttttggtgctgaaccatcaactaatgaacttgagcctacaaatgaatcctccccactaaatgtcaccacccaaattccaacaactaccactttagagtctgctctcccttttcctgttacatctaatgagtcacagtctaacccgactgttgtatagagtcctactcagtcctcatctccactccaacatccatccacagggggtagcacgggctgctccaaattctatcaatgacactcacatgggacgtggattccgtgaaaaagttccatccactcggcttcatgactatgttactaatactgttatcacacaaagtccatctactatctctccaagatcacccacgccatcagctccctctggtacgccctttcctataacacattatattaattgtacaaaattctctgtttgccatcggctatttcttgttgctattacaaaaggttgtgaaccgaaatcttttaaagaagctatgacaaatgaaagatggcgtcatgctatgaacacaaaaattcgtgctttagaggataatggtacttggattatggaaaaattacctcccggtaaacgtgctcttggtagtcaatgggtctataaaataaagtacaactctgacgacagtgttgaacgatttaaagctcgtttggctatttttggtaatcatcaaattgctgggatcgattataacgagacttttgcacctgttgcaaagatggtcaccgttcgtgctttcttaggcattacagcatctaaaaattgggagctgcattagatggatgtgcatcatgcgtttttgcatggtgatcttaatgaagaagtctatatgaagcttcctcctggttttcggtcctctcaacctaatatggagtgtcatcttcgaaagtccttatatggcttgaaacaggcaccaaggtgttggttttccaaacttgtcactactttaaaagagtatggttttctacaatcctatgctgattactctctctttacttatactaagattcctactcaaatcaatgttttggtgtatgttgaagatttaattatttctgggaataattccgctactttgaagatcttcaagaactatttgagcacatgttttcatatgaaagatcttggggtt

SEQ ID NO: 37605 - DNA, 2755 bp, Cannabis sativa
attatttttctatggtggacagggaagtgaagagttattggttgtagttgggggtggagcagctggcttttatggggctgttagagctaagactgtagcacctaagcttaatgtggtggttattgagaaaggacaacctctttctaaggtttgttttccttacaattttcatgttcttattagctctttcttttttggatttattttaaactcctgaaaattgatatttgttgtattggcaggttaaaatttctgggggtggccgatgcaatgtgactaatgggcactgtgttgaaaaaaaggtgagctttgttttaagctattattattacttagtacaagggaatcagttttagttaagaaaattgagaaaaagaactgtatagtttgcttattgtggcttttagaacaagtctatgctgttgcttgtgctctattaaataaatgtaaggaggcagaattgattatttgagcatgttactttgccttcatgtgagttggacaagttctacaatttgttttttttttctttactgtaatttgagccaattttatatgaatgatttgtttaaaatgataaattgttcatagattttggcagaaaattacccaaggggtcataaagagttcaaaggatctttctttgacatgcatgggccagatgataccatgtcctggttttctgatcatggagttgacttgaaggtttttcctataaactggtgtgacacttgtttcttattttgattttctttatgtgagctatatatggaaaagttcttataggttgaggaggatggaagggtatttcctgtcagcaacagctcttctacaataatcgattgtctcatgtctgaggcaaaccgaacaggaggtagtctatgaattgaactatggtattactcagtttccttatagtagggaagaggatggagtggaatctctcaaattgcattatgctataaaatcatagttactgtttttattttttgctgacagcctaagttgcattttcattaacagttgttttgcagactggaaaaactgtgagaacggcatctgctaatggtggaaaattccttcttggaattgggaagcaaacaaccagtcctgttgactatgtcgaagcagattatctattgattgctagtggaaatagcagtcaggttatgacggacaaatgcagttttgaattcctatatctatgaaataaatcatagtgttaatgaaatatgctggttcttattacagggttttagtcttgcatcacaacttggtcattcgattatagacccagtgccaagtttgtttactttcaagactgtggatccacagttagcagagttgtcaggagtaatgtttctaattcttcttgttagtggttaaccatatcatgtgtataggtgactgttgtatttggaccctaacttcacaaggaatccataactggctgaagcctgtaattataaaatggtgtatccaactagtgcttttagacttaaaaagtgtaaaataattttcaagtagattcttgtgtggggttgatggttttcgttttctaattccaatagcataacatatctatttatttaattttattgcttccaacattcattttaaggatatgatttctttttgcttagaattgttataatcatttcaagtagattcttgtgtggggttgatggttttcattttctaattccaatagcataacatctctatttattttattttatttcttccaaccttcattttaaggatatgaattctttttgcttagaattgttataatcattaatatccttccaatcccttaatatccaaactcgtgattttatttaactatgcacgataccatatcttgattgttaattgttatttttttggagaaaataaattcaatcttcaaatgttatttttttcatgatatacaggttacatttccaaaagttaaggcaaaactgatattagaaagtgttaaaaggaatatacaacaatttacacaggtatgctttgctctgtggatacattattgatttgaatgtcacataccacaaaccacatatccaagacctgtgaaattgtaggttggccccatgcttgtgactcattggggacttagtgggcctgtaatccttcggttatctgcttggggtgctcgtgatttattctcatctggttacaaaggtaaagaaatttcccaagtttccctacttgttagatttggtcatgaacttgacatctcttaactttattgcattgaatgcaggaactgtcactgtggattttatacctgatttacacatagaagacgtcaagtcaatgcttagtcgacacaagcttcagttcttggtatattgacatcttattgtttgttttatgaagttttattattaaattatatgcaaattcatttgttaatatctgtctggtatgtcaaacatgaacgatctcactaattttaagttgaataaaacccagataacatgacaacccatttaacacttcctataaacagaattattacaagttggtaagtgtatttcaccttaaaattatagaactgcaattagggtgccaagatctgtatctggtgttttagacatgaaggtggataaaatattgagttggcttcttcttggctttataactgcataactttgcagcccatgcagcctgctgtagacttaattttcaggctttcttatgccaccttaacattgtagcacagtaattaggccatttttaacat

SEQ ID NO: 37606 - DNA, 3159 bp, Cannabis sativa
  modified_base (2516)..(2517): a, c, t, g, unknown or other
aaagaaagaaactggaagaataaaattatagatattatcaatataaaatataacatatatacagacacataaaaaatagtaatattggtcaaaaatgaattgggctgatgatatatgtatataccagatatgcgtcttctcaatagaaatatgcatagagtgcaaacacaaagaaaggatatgaattatgttatgtatatatatatatatatatacatatcaatgttaatgatacttgatatgttcttgagtggctgtaattgggaaaagaagaagaaaatgaattgttagctaggatttagggtgtataattttattcgatagggtataaaattatctttttagtttttaataataaaaaaataaaaaaattgaaattttcattaggcgttaaggcattattataattaagtgacaaaaatttcatagtttatatatgcatgataaggacaaaataataaatttaggaaaagttgaataatgaaattaaaatcaaagtttatgtatagataattaatataccgcaacgttgttattgtgtatatatacgcatacatactaaaacataacattgtacgatggagatgatgaagtagacaaatttgaattgaagcttgagtcatttcaaactcagttactcggacatcgcacatgttgtcaatttcgttccgacgtgccaatgcataaaatgttatgctcccacaatattctatataaatatccatctgcatatgcatagacaaatgtatataagtactagatatataaatgataaataatttagtaacatatatgaatattaatgaaataacttactagtgaatgatagcaattgttgaagtgagagtatttaatattcttgttgttcttgaattggggtaattgggacctagttttgttggtaagcagaatattggcaatacgagcgaaattgtgattctcacgctcttgttcagcaattgcatcgtctaggtcttttttagcatctatatagtttggggagcctggttcatgaagcttaacctgtacacgtgcattgcatgtaaatattaaaatatatatatatatataataaaaatatgtaagagaaatacatttatatatacataccctgttacgtaaataagttaattcaccgctacacattggccacccttggaatcccgtatcatttgtatgaggagtagtaggtgggtcggtacttcccatgaaagtgctgatagaaaagtgagagattgtcatatttccaaattgtacaggggtacgtagaatactcctcgttgtacaacatactctctttcacctacatacatacacatatatatatatatatataatattttcaattagctacctcatcattcctttatatatcatcatataattaatatacgtatatattatatattaattacattttcatactggtcatccaaagtgcgatactttgtagcaagcctctccctgttgtttttattcccaaatatacaaacaaaaaattaattagttaaattgttaattaattttatatgttaatatatatttatataattatataaatgagtatatataccaatcctcggtccatgcaacaccgaattgagagcccaagcagacatcaaatggtgggcttggtagatatttaggacaatatgctgcaaaacttaactccgttccatttgctgatgtcaccatatatatatatattcattttctcaaaagcctcgtccattccttgaaaagtaatccccgagctacaagcttgaatattagtaattaataatttgatgatcatgatataataataattaccatgcttgagtattttcgctttctatatatataaccagactagggcatggcggaatttcatatcggcaatatctggttcttgaggcatgactagattatataataattcaaaatatcaaacaaatatataattagtgtacgtaataccatatatatatatatagagagagagagagagaattacttagataacccggaacgccatgtccggaaaaatatatgaaaattgtgtcagttgggccactgtataaaaccctgccagggcgtacaggccgcaccccaagagctcccccagaaagaacataccaaagagtatccgcattaacatccattccccaataatcctagatatatataattaattatttacaagaaaagaaaagaagaataacagtaatcatgatgagttagatatagaaaataactggtacgattcccgaatacacatcaggcccgtcaaagctgttgaaaatctggtgaggtctaggattttttggatttctcgcaatatcatcgtacattataattataatattctctttctttaaaccaccttttagtaatatttgatacgcgtggcatacatcagcatacattttcattaaacacaaaaaaaaaacttgtttagtaataaaactatatatatatatcataatagagattgtattagtagtactacttctttcctatatatatatatatanntatatatatatataaatatacctgaagagcatagtctttccagcctttggcgccggcaacaagtactgcccatttagtattttcagatgttacaacagcagtaattaggcccaacaaacagatagccagccacaatgaacgagtaccattgaggatgcaggagctaaaagagagccaaatactcatgattttcagatatttaggtagtaatgtactagtaagtaataaggagagttgattcgtatatatatataagccaaagcagctacctacaaatcaggtagaggtaaaaaacttcaaagaaacgcgttggattgtttttttcatcttaatataacgcattagagttatatgtatacgtagttcaatttcaattattatttttagtattattttctattatctggttttctgtataagggaaacctaaaaaatggtaacctaagaaattatttgccttaattaattctttcgtgatggttaagataatcaacttaattaattaacccatgaataataagtttcacattcacaggccttatttagtaaatattgatttataattacagtatgttcttattttgtcaagctatatgtttcccaataaagaaattcacctcctcatagtcaaaaataaataat

SEQ ID NO: 37607 - DNA, 1556 bp, Cannabis sativa
  modified_base (647)..(658): a, c, t, g, unknown or other
  modified_base (916)..(959): a, c, t, g, unknown or other
atatattttccatcactttcataaatagtacaacactaattaaaactacaccctacatagaaataacttatatttttgttataaaaaaatagtttagattaattataaataagaataattaattatataacaattaccaaatgaattgtggtatatatttcataacaaattttgataatgaatatttttaaaagctaataataatgtatgtgtttagcgcgttaataataaattcgattttagagttaccttaagttacttaaatacaatgtcatattataaaactatatatatatggaaccaattgggtgtgttctagacacaagcttaatcatctttaaccgagactcgggccgaatacttgtgcccatataacaaattgttgttaaaagaatttattatttcaatatattttcaatttttggtgtataaaaatatatattgagtactcaaataatatataaaacatgcacacggatatttgtcttaatcacctaacaaaaactttggaaatgagttgttttgtgccataaaatcttctaagtaatacttaatatgatcaccacgtaggattggcaagtacttgtacgtgttatgttgtgtttggagatttttaaattttaattttttataataataataataannnnnnnnnnnntaataataataataaaaagtttgaatattttggattattgttgtgaccatatattacataaatttacaacaataataattttagtgaagagaggggtatagtacgtggtagctgccatttcttgtcactgtctttctttattcataacttatttataaagcttaaaattgtactctaaaatatatatatgaattattgacatataacaaaatgtcaattaattctatacgtatatacacaataataataataataatnnnnnnnnnnnnnnnnnnnnnnnnnnnnnnnnnnnnnnnnnnnntaataataataataataatatacacaaatctctacttgcatttcatcgacacataaggcaaataaaaatttgcatcaaaaaaattagagtataactctttatttagcaaaaattatcgattaaattaattttttagtttactaaatgataatttaaatcttctatttcttaaaataatataattttagttaatttttttttattaatttataattaacttgaagacacaataaagatgcaaaaaaaatatatatatgtataatcaatttagttataccacttttttttcaggttatatattgttatattttattttgaaaaaaattaaatctcaagtattattatgttctattttgaaagatgcacaattaatctaagatgattttaacaaaatttaaaatctaattaaaattaataattaataattttttaaaacacttatataattcaaaattatatttaccaatatatatattataggaaaattctacaatgcacacccttaaaatagatatattgatgcatccctatctgttttagcctctgaactaattttttagtcaattttttttttcatgatcatgtacgttatagtta

SEQ ID NO: 37608 - DNA, 3209 bp, Cannabis sativa
cacagacggctcatgcttcggccagcatatctgctgtgctaaacattttgagtagataaggaaagttgattttctgtatcaaatttcatttcacatgcagagaaggcagaatctgactatgaaattacttcattcttcatttgttggtctcagaacttgaagttatcattagaatatttcaataatttgctgaacttctgtagttgagcaaaagtgtgggtatggcagggatagctggcagtgggaacttcttctagtactttcaatatgatattagtttggtttttcagtcatgtccttagagctagttggcacaatatgccgtaatccaggacattactaattgattggcatgatgacattgtttttggcttaacctagaatttatattttgcaggctggtgagctggctgaaagcatttccaaaataattgaacctaattttgctgacacggtggatatgtcagaagttcaggtattaactatttcaaaacaattgcgaaaaaaaaggttgtttcatgtttacatcatgcacttagcttgcaaatcttttcaatattgctaaggtgctcgagcatctgtgcaggatgagttttctgcagttataaccaaatcattagtcactctagtgcatggcctggaaactaagtttgatgctgaaatggctgcgatgactcgtgttccatgggctacacttgaaaatgttggagaccaatcagagtaagccacgttcactataaaacaaaattttaattctaatgtaataccttatttctaaatattatcactttaatcttttgcagatacgttaatggcatcaatatgattcttactagtagcattccagttcttggtggcctcctttcacctctatacttccagttcttccttgataaggtcactacatatttcttgtgttattatcagagatctagttcgttatttttttctgtttcttttcttgttcttctctctcttgatgcatcatggttaccctctccaaccacttagtcatctgaatcactatcccaggcatttaggtagaaaatataagaatagaaatggaatgtaatcaaatttaaaatgcataaaaaaatttattaaattttttctcatcaagcattggaatggtctttttttctatttcaaaatggaatagtcattctaccaaaatgatggaaaggtcattcaattggaatgacattccaatatcttaaaatgcaaccaaataaaagaatagaataaaaattgtttcctttccgtctttccgtttcattttattttattaccttcaaccaaacgctaccttagcgcagtgttctaccaagtcacattactaagataccattaaaaggcctcttatctttcccacacaaaacaaaatctaaaatcctgaccagcatactttcaaaagattaccttgtacttttacatgtaaactatagttttttttttaaggacatgtaaactatagttagtcctcttaaaaattgctttaatttatatttaattgttcgttatcttttctctcattgcttgaatgtttcagttgcaagacatattcttaccttacacctttgctaaatattatttcatgcaaattttatatacaaagctcctttaaaataaaatgttagtttgttcttatattaaacactacaaattactcacacgaaataaaatgttagttgtttgcactaattatatctataatttcatatgcagcttgcatcatcacttggtccacgcttctatgcaaacattttcaaatgcaagcagatatcagaaactggagcccaacaagtagggatcattttaatatttttgtggtctcttttatttattaaaataaatctttttatgtataaataattgcacatctattttggtacaacaaataataaagatatgtgcaaagtatacttctagaggtgtgtttctagatggcttggagggatgtcaccatggcaatccttgagtttaaagattaactagaattcattaatgaagcatctatcttttgagttttcattttgagatgtgcatgactcatacataaaggacatttcccgcttttttaaacatggcaagcttatgtgataataatcatgtcatccatcttaggattaaggttgtttattctttaaagttccgtctcttttataacaagtgctatttgcctttgtttttctggtctcgtgatgtttgttctacttttggaaaattagaatctgaagttagtattataatttatttaattgctttagttgtcaaagttgagtgaaatatgttgatagccaggttggtattgtccaattacagatctagagtagtctgaaactttgataatcattcttatagaaatgtgtttatcctgacaataagtttctgcttccaatcgatacaatttaataatgaagaaattgttggatgcaattttcagatgttattggatactcaagctgtgaagacaattcttttagaaatacctacccttggtcgacaggtaattagtaattcttgtattattatcaactttaactcatattgcagaagaacgtgtaccatgatgtatatatttatgcatatgtataaatgggtgtggactatgtatttatgtatatatgattgtatatggcatttaatttaagtcaattatgttttattagaattaaaacctcatgagttaggtttgcaacaataacataaatgcaccactacattgaagtggttttgggtactagtactgcctatcttcaaggatttatttttcttttttccttcaacgcagcagctttattgttgtgtgttaacatgttctttttcaattattattgattccattatccattttttttacctgcatcagacatcaggtgcggctagctattcaaagtttgtaagccgtgagatgagtaaagctgaagcactgttgaaggttgggttttgattttcttagtaaatttctgacattcgtcaactatttttcttttttctttttggcagttcatatttcatttcttttaaatacaggtcatactgtcccccattgattctgttgctgatacgtatcgggcattgttaccagagggaacacctatggaatttcagcggattctagagctcaaggtaacagtcactatatttatcattttgttttccttgttctttagtcaagtaatttaatattgcacaagtaatgaactcct

SEQ ID NO: 37609 - DNA, 2386 bp, Cannabis sativa
aatgaaaatcaagcgtaaaactactccaaaagacatcaatagacgagaaaatgctaactttaaagacccgaaacataggttaaatataacctaacaatactcacggatacagctcaagaaaccattagcttctttcaccgaggcttgtccaaatagcacaatgtcatccgcaaacataagatgtgtaattgtcggtccattctttgtgattttaaaccccttgatatctccagtcctattcttggccatgaaaagtctggaaaggacatctgctgcgaggatgaatagagctgatgataaagggtctccttgttgaagcccacaagtcgggttgatatagccatgcatcgaaccattaatcaaaaggcccattcgatcaatctcaatgcattttttaacccaggtagtgaatggagcattgaatcctaatcccttaagaacttgtagaacaaatttccaactcattttgtcataggctttctccatgtcaagctttatcatcatatatccctttctccctctctttttgaccatcgagtgaacaatttcccttgctactgtcgtgttctcagtaataagctaccccttgaaaaatgcagtttgagccggagaaatgatttgaggcagcagtggtttcaatctgagagcgatgatctttgaaatgcacttatatgcaacattgcacaaggcgatcagtctatagtcgttcacctcactaggacagtcttttttcggaataagaacaatgtttgtattgtttatgaattggggaagattcccattactgaaaaagtgaaggaccattttgatcacatcttccccgacagtgttccaatgttgggtataaaatccaggtggcataccatccggtcctggagctttgtcgtgtcccgttgatctcatgcactcataaatctcttttgcagatggaatggaatttagaatcccattataaaggaaagcacaatttttttttattctatttttaaaattttgtgaattttttctattttgtttagaaaacaactacaaatatactcggaactaagagcctgtttggtcgtattttcagttttcagtttttaaaattgtgtttttaaaagtgagaatagaaaaaagttttttatcattttaaaaatttaatggtgtttggcacaaatattttaaaactatttttaaatatttcttactaaaaaaaattaatattttaacaccatgacatgaacccatccgggttagggttcgggtatggttccgggtcaaggatccgagtatgcgagtaaaaatataaaatataatatgttagacaaaaaaaaatatttttgaaaattgaaaacaatattttggtgtaatctgttttctagttttttaaaactcaattttaaaaaactgtttttaaaaaaattttgccaaatggctcttgttagtttttaaaaactgctttcagttttaagaaacagaaaacagtttttaagttatgaagcccaacaacctctaaatgtcccacattgtttataaatgatgtacatgtaggttataaatattattatttttacgccatattaattcatttaaaagtatttttgtttatgggtggttgattaatttcttaccgtatgagtttttattattttatttttaatgttttatagtttttttttatctttcatctaatatacatttcattatttatatttttaaagtaataatttaataaatatttttttataagttttttatatttgatgtaatatatattaattaataatatacaatttattatgagttaattttattttaagattttatatgtataattttatatttttattagtccaaaaaatattcaaactaaattattttaaacgaaattaaacattatttttttctcaatatatatatataaaaaaatataaatcaaatgagatgtcattttatgaatattttttattatttatctattaatattttatctattttataatatgtcttctaagtaatatatatatatatataatttgtaagagtcttccattgtttattaactatgtgagtattatacttattaacttcaagtaaagagagtatatattatatttcattaaaaaaatactacaagtaaaatatttcttcattcacactgatttgtccaaaaattaatattgtttctctttgtaggggcaattgaataccttattcaattaattttatatatttttatatataaatatatatattcaattgatcaactttatataaatatccaaaaattaatattttttttctgtagatttgatttttttttatttacttattgttgctcgtaaattcgcccaaaatacgtggacctgtcgagaggggacacgtggatcagataacttggaaa

SEQ ID NO: 37610 - DNA, 2753 bp, Cannabis sativa
ttttcagaaatatctcaaaatctttaaaaaaaaatgttttgttctacgcttctcttttcttttttttttttttttttttttttttgtgatagaaaagaaacattgtattaatatcaaccttttgtttgtttgtttttagtatcacaagttttgtggtactggtagttgttaactacctatttgtattgtcatactttcatattattattatcagtcgttttgtttcaaggaaaaaaaaaagtaaaacaaattaaaggcaagggacattttaagaagagacggccctagaaaacttcagtaaatattctgacataagttcaaaaactatgactaacaaacaaattaaagtactatgaacttagtcttcttaggatcaagagagcaggttatcactaccaagttaccaaccaccatatattcaaacccagaaacaaaaaagcatctcacacaagtaagactcaagttttaggaaataaaagctcatgttgggttgcttgttcgcgcacctctgaatagcttgaaattttgggagcattggtataacctacatcatggtatcatcaaagcagaaagttttaccatgttttgggtctatactatgctctcggcttattcttatatatattgtgcaaggcaacggtctacctagttatcattctcattttgcccctattatccagctcacacctaaaagtaagaattggaatatcaaaatccaatattttccaccatataaaactcaagatttatagaaaaattagaaattgatacacaattgcaccacaaatattatatcccgtggtgcatatatgtatttgtatacacaagatgaacagagcataaagatatgtcaccctaaaacagtctataaataatgaacattgaatgaagtcagcaaaagatgcccctattgcagcttaatctaccatttttttttttcactgagtaacaaggaagatattacagtttagatacaacgtaagaactgtggccttttaattttgcaggaaagcaacaacaaaacttataaattaagttttagcagaatccaaagcaagcaccagcaagtattgtagcatagaatcaccaaacactgattagttccctagggagaaatagacagccacattaacaaaaccttaaacgacttactttgcatgtcatcatgtcgagtgctcttctcaattagaagacatttagccaggatcactgcctgatgtattgcactcaaaggggaatcagcatcaacttgaatgccttctctagtaccatatccattttcacactctaaaagttttggggtgatcaaaatgtcagaggcttcataattttcatcattactagtctctgtttttgaatggccactgctatccaattgacaattttcattgttgtttgatgagtttctgtttgcaacaagtaccatttgtgcctttggctcaacctattgaggccatgtcaagctaagaactcaaattgagaaaggaaaaaagaaaacgattatacagttacacgcataaattattaacctgatgtaaagtacgaaaaccaagaacgccagtaacagaaatgtcaagtccagctgcagcttccgctgattcaaaattcaacctgaatcatgtacaacaaagcacataagcagctagaaaaagctaaaaagactaataatttcaaattcattaaacaatgacactggcagatcaagtctagaggcataggcctcgaatgatttttttaaacactgtataaaagtttgatgaattaaattacaatgtgtaaagttacagcaaacagaaaaaatgacataatttcataagcactcacctgcaagaatcaactcgcccataggtatattccattatcccagcttctaaataaagcatggagactattgcgaaaccctcatccttatgtaaatggtcaccccaataacttgttactttttctaatgaaccaaaatgaagcaaagtttgacgtgtaaagacttgcaagagatcgaacaatgacgacgaccgatcatccaaaattctctgctgaacaagtataactcgagcaagccacaatgaaatgctcctaagcccatctaaagccgaggtactcctccattggaatagtaagtctttagcctttgttaacagcatattggcaaacactatgtactttggaaagggaaaaaaaatattatataaaacatttctatacaatattatactatacaattcagcataatacggagcatcaaacgcacccttgacatctaacttatagtgaaaataagatctattaaattaaatcatttatattttcagggcctgtattagaaaatagcttaaagataaaataaattaaaagacaacaataacaatatagtacctgaagattagagaactttccaagcaagtcagacccagcagacatgagctgattacgagcccaattatcccactcaacaaacttatctgcacttttgctttctatatatggcagaggacattttggcaataattccaacggtctaaaaataaaaggcaataaaaaaatttcaaactaagatgaaaaaaaaaaacctaaatttcaattgaaaaattggaaaactcttataaagaatggttggttaactcggagctgtcccactcacccagtcgtgttacattgagtgaacaagagaaatgcagcgaccgccatggacataacgattacaactctgaagcccttttccttgccgtcaccgccttccgacaagaaggattcca

SEQ ID NO: 37611 - DNA, 3222 bp, Cannabis sativa
gcaactagcgctgcaacctctttaaaaactcaaaccgtaaatttgaaacaaaagttaaaaaaaaatagtatataaagtaatttcccttttttttattcatgttataatgtgaataaaatattaacatgacatgaatgtgacttgtttaaatttcgtgtaaatagtgtcgtgtcacagatttatttgtttatagctatgttgtgattgtatttatattttatgatatattatttaatcttcatgttaatcataatcgtattgtgtaaaagttgtattgacccaaaacagaatatgaatactacacaaattaccctaacaaaatccttctcaaccaaacaccctattttcaacacaagacacttttggatcagtcaacttaaataattgatgctattaaccaccctaattcttaggcgtcaatagtgaaccgacacatataagtactcaatggcgtcattccacataccaacataaaaatttaaactgacgccaaatatatgatctttagcgtcaatttagaaccaacgcttaaacctttattacgccacgctagcaatctgtgtgctccatctctctttctttctctctctctctctctctctccccatcttttctaaacacacttcaactgtcccatctctctctctccccatcatttctaaacacacttcaactgccccatctctctctatatatatatcatctccacccgaaatgaacccacctcgacacgacccaaccccatgacaaccaccccgactacaccctaccttgattgtttccaccccgattgcaccccaccttgacccattcgtgggtgctttcatatggtagccatctcctcctcttactacccctctatctctctcgatctctttctctgtattttttttagatttatatatatgtatatatttagatttaaatttgtttgtatataaatatatataatatatttgtgtctaaaatatatacatataatatttttgtaaattttatatcatagatctaagatgtgttttatatttttagattagaatagatctaggtttgatcaactagaatagttcgtatgcagatttggattttcttttacttgcatcagtgcaaaatcgatgcttaaagtgcaaaacaaatttcccacttgtctaaattgatgcttaaagtgaaaacataaaataaattttaagtttcggttctaaatcgatgcctatgctcaatagtgtcagtttagaactaatgcaaaagaatatactttaaagatcggtggaataggtgtcgatttcctgaaccgacacaataagtttaggagtcaatttagtactgacgctaaatgtgtcttttgtagcagtatatctttctacttctcttatccaacgaccattagaaataaaaaaaaaaatccaaatggctataaagtatcattgaagcatccatagaagcgtcatcctctcaccatttttgcacctatggaaacacccattattttttcaacatttttatgtttattgattgaaagtgcaatccaaaatttaaatgcttaatattacatgatttttttttaccgaaattaaattttcaattaaaattgatgctttaacaaggtgatatgaaaacttaattttctatactaaaaagatgatttaacgatgaggtcataaaaatatcattttaaggcaaaaatgataattaacgatagtgttatgaaaatttgatttttggaagtacaaaaagctgtccatccatagtaccatgaaaattttggtttattaattttttaggcaaaaaataatattttaacgataatgttatgaatacttgatttttgaaataaaaacgataaaaaacgattgttttgcgaagtgcagtagtgagtatcatttcatatatattttgtcaataacatctaacaacaacatatatgaggtgcattagattagaaaaggaaaacatatatgagctgtttcctactcgtaattttatgcgtatttttattgactttgtgtagggattctcttcattttccatttgagaaccttttaagcatttcgttttttctaataaaatcttagtcttttttttttttttttttaaaaaaaaagtaataaataaaaaatggcatataataactcacatgtataaaatttaatatatttatttatatataaatattagagtgattgcttaatgctacgtattatgatcattatgtatatattaattctttttttcttcctacgtgattggcacttttcaagtgatccaccaatatattcaaaattgaaatttttaggttgctcaacagaattataagcttgatcctcaaataaggtcagtgttacgttcatccaagtagtctactggggaaaacatattaattatattaaaccgatgggtctcctaactaactttaattttattttatttgaagaaataataaagtgattgcatacaaagtatatgctttttttcatccactctccaaaagattttaattcacaaattaataattgaataaaaaaatctaaagtgtactgcagtcagtcttatcaatagtatcaaatattaaaccaaccattttgactgatttttcagttttcttactcatcaaaacatactcttttataaaattgaaaaactaataataaagaaaaagaaaaaatgaaagacgcattaattaacgttgtggatgacaatgtcgctcaaaatattcttacaccccttttgatctgttccgatcccatcaatttagtatgtgcttccttcaaaatattctcaagcaaattaagcatcaatcgtacttggtttttaatgttaattctatcaaaagtgactatgtataaattgaaagaagtaaaatagataaataccatcaaatgttgagtatataatatagaccgttagattggtgtggtcctaaataatgacttttaattttaagtacatttggaatcccatggtggtggacctcacaatttggttcggttcaagcttttttttttctggtcctgttctggacagtcaacatctattactattttgtattatttattttcttttaagaagaactctcttttaattaaggtggttttttataacacttttttaatcagttttctgtttttataagtaaaaaagtgaaaatatttttcaaaaacatgttatataaaactgtttttacttttcaattttataattaaaaatcaaaatttaaaaaaaaaa

SEQ ID NO: 37612 - DNA, 3321 bp, Cannabis sativa
cctcctcaagctatacttagtgtacaaagaaactgaaaccttggtgaagacaagggttttgtgaagatgtcggcagtttggtcttcagtgaaaatgtaacacacttcgagtttggcagctgctatttgatctcgaatataatgaacatcaatttcgatgtgttttgtacgagagtgaaatacaggattttgagcgagggcttgagcactttgattgtcacaccatagcactggtggattcttatgtaatttgatgttaagttccttgagcaaggagcttatccagactgactcaattgcagctgaggcaagagccctgtactcggattcggtgcttgagcgagctattgctctttgttttcttgaactccaattgaccaagttacttcccaaaaacatgcagaaaccgctagtagattttctatcatctaaactagatgcccaatcggcatcagagaaagcttgaaggtccaaaacagcagctgctttaaaatgtaagccaaggtgtggagtgcctttgatatacctgagaactcgcttacaagcattctaatggttcactgttggggcttttaaatactgactgagtttattaacacagtaagccaagtctggtcttgtaaaagtcaggtattggagggcgcctatggtgctgcgatatagttcgggttgatcaaaagaggaactatcaagtgctgcaagtttgttggacaaaatcatgggtgtgtcacatggttcggcattttcaaaaccaatttttgcaagtaagtctgaggcgtacttggactgtgtaagatataaactagaagcatttcgataggcctcaaatccaaggaaataactgacaggtccaagagatttgagtgaaaaattggtatgtaagtccttgatgagatttgtgatggctattgcacttcccccagttattagaaggtcatcaacatagatcaaaactaatagtgcagagccatttttctcagtatagaaaagagatgtatcagagagggactgttgaaagcctcagttaactaaggcaagctttagcttatcaaaccacgcacggagtgcctgtctcagtccataaagcgatttgtgaagtttgcatacatgatttggctttgtctcatcctcatagccaacaggttgcaccatatagacatcctcctgcaattcgccatttaggaaggcgttgtttacatcaatttgttgtatttcccaaccaaaagtgacagctaaagcaaacatcactcttattgtgcatggctttatgactggactgaatgtgcctttgaagtccaaaccaggatgttgttaaaaacccctagctacaagcctcgctttgagtttctccacacttccatccttattaaactttatccgatacacccatttgttggtgagaatgttcatgtctggtgtaggaagaataagagtccaagttttcttccgttttaaagcatagaactcatgatccatggctagtctccactcaggtgattgtaaggcctgtttaacagtttttggaatagcaaaatctggattttgtgtggcagtgacaaggtaaactttgggtttatagatcccagattttgacctagtttgcatgtggtggccttggggaatgggtgggggaacatgtggtatttcaacagcaggtgttgtgatttcggttgtgtcagcagtggagttggaaaagttgttgtttgtgggaattgtttgagaagtggtgggacttggagataaggatggttggggagttggtaacggcatattggaggatgatgaggctgtagaggtatctaaagatccaaactgaacagaggtggtagtggtgtcttgattaggatgtattcatccacaggtgtagaacctttcttcgtcgactgaagcattccacagagttgcaagactctggctcgagattgattagagctggattagaacattccatagttcagaggaagaagcacatcttgcaacatgtcctaacatagcttcagagatggagttgaagagccagctcatcaagaactgatctagacgcatcgagtctgcaagatctaggttggggatgaatcttgaagcatctgtgggatctggaacagttgctggaggccgtgctctagcaccagtgagaaaaccttcgagttgatgagcacggactgttgagagaacttgtgatctccagtagaagtagttggatcgatcaagtcagagattcaggggaacgatctggtttggtatgacctgagaagcagcgtcggtgatgccagtagcagatgtagaaccagcagctctaggagcagagtttgatgtggacgccatggatgaaagctcgagagagaaggagaagaagaaaggaaaaaaaatgaaccagaggctccgataccaagttggaaagatgagatgtggtgaaaagtgagttagcttacttacagctaagactcactgagtattatttatatatgatggaattaatacagtaaaggttacaacagaaagttgttacaagaagataaagaagctgatatgatgtcagcaaataactaacttctgactacccaatacagttgaaactattcactaacatttttaatacgaagaaaatatgaacttcattaatcaaacaactagcttatgggccagtcccgtcttaagttaattggggattttagtccaaaaaatctaattgaactttttttatatgaaaatctttatatttttgttgtatatataatagtaaaaatcaatatcaatataattatataaaggatattttaaaagtgatgatgtggcatttcatattttttcatagtatttttattattttgtgagagcttcaagttgtgtttaataaaaaaaagtccactaactttgtaaaaaatcccacattgtttaaaaagtattgtagttttctatatctaaactataaataagcttttctttgtcacttccattagtttaatcattattatttgctatagtatagaaagtattatagaaaataaatattttgttagtatgttattattttggactaattaataaaattagtcttatccaattagttatatatttttagttttattttaatattatatattttattatttatatattttttattcatataatatattatttaataattttattttaatgtcacataatttaaagataaatatttaattcaaatagcgtctttaatttttgaacaaaatattttcaaacaaaaaatataacacaatatgtataattttgcgaataattcaatatttatgtcaaatactaaaaaattaatatcagtatcaatatatatata

SEQ ID NO: 37613 - DNA, 4002 bp, Cannabis sativa
ttgtgaaataattcctttagattttggggtagaaaaagcgcctaccgaacccgcgcatttttggcactggtatagatgtcaggtttcaatcttgtattagggtctagaatttaatttccttgcacaatattcttctctattgtttacttttcgtgcacagtatgtaattgttgtatgaaaacactataaataagccatacaaattcattctacctatttgattaccaagaatctttttgtgtgtgatatctaagaaaagttttgggtagtattgggcctattgtataaaattttacgagaataccatttttctcactgcataaaaatataccatttttctcacaggctaaagcttcagccaagattgggcctgtctgtgatatatcatgatcatcatcatttcatggtaatagaaatagaatcatcagtggtgtaggatcgttcaatagagtaaggctcattctcatcttcagactgatcaacaaactgaatctcctccaactctctaacaacctctgacatatcaggacgtttctccggagacttctcagtacaatgcaacgcaatctccaacatcctcaacattccaggaatagcacttcttcgattaacagctatctccacatcaaagatctccgccgtccattcttctcgcaccgccttgtggacccaactacacagatccactcccttcgcgccggttggggaagtgtatgctgccacttttccggtcaagagttctaagagaagacagccatagctccaaacgtcagtcctcttcgaaactcgcctagttgatttgtactctggtgatctgtacgaaacggtgcgttgaatcacgacgggaagtgcgatgatcagaaaagcaagactgtagtcggttaccaaaacggtgtcgtttgtttcgagaagaatgtttgtggactttaggttcccgtgagggactgtaacttgggaagaagtgttgaggtggagatattctatggcacgtgctaccccacgtgcaacgcttaaccttgggccccatcgaaatggaattcggtttctagtacctttacctcctgcatttttatttacattatataattgtaaaattgaagataatgctttaaaatagtcggagtcactttttcttttttttagaaagttttaaataattcatggtacagaaatcaaaatttaaacatataatcacatatattttttttaatacgcatgcaattgattattttgaagtactttttgatttcaaaatcgtaaattattcaaattttatgaatgtctaatgtaactataatgtagattgttgtataaaaaattaacaaatatcaaaaataaaaatgtccctacctgcataagagtaaaaggagtattcttactatagttgtatattttagaaattttcattaggcaaattggatgctcatcgagcataataataataataataataataatagactaattaaaccatttataataattaaaaaaacataacaacattttcaactaaaagatggtccataagctcaacacaataactctttatatatatgacaataattttttcgtaattattataatgatatattattaacaaaatttgtataatgttgaaatagaattttattgctcatgaataatttgtgaggtttatattatacttttaactatcataaccttaacaccatgacaaaattagtaaatggatataaaagcaaaattttgtgtaattctattagaaataaaactaaaaaaaaaaaaaactaggatcatatataaattaccatagttctataccatcaccattcatttatttaagtgaaataaattcatatatacataaaataaaaactcaccatgaagtcgttgaaaaaggttgcctctctccacgtacttatatagcaacatcttctgattcttgttgttgtagtaagccataacaggaagcaaattagggtgtttaagcttagcaaccacaagaagtttcttcttgaattcctcatcagtcaaaggcttcaaattcttcaaccgcttaaccaccaccgccgccacatccctttccataatcatcgccttataacaattccctaacgtcccttgtcccaacccttccgccgaagctttgagaacatcttccatctcaaaccccatcttctcatcatctccaccaaggaacaaaagcttacctttctcttcatttacattcttattatgatgatttgattttactaatctattactagtacttgcactagctttatttattacttcaacggttttgatttgatcttcattttccacgtttttgatcacgatcattcgttgatcattattatttttgttgactttcaattgatcttggccttgtttggtttttcctttaattactttcttaagcttcttccttttccttacgtacaaaatgaccataacaatcaccgccgctactaaaacgacattcaaaagaagcaaatactttgtgtatgattttgatttcttcttgtcgtttttagatgatgattcttctgtcgtagacgaggtcgtgttgtcgttttgaacacgagacacgacgacaaaagagtagtgtagttcactatttcccgaaaatgaattagaggtgaataatttcaacgttggagttaaagggacaacaccactgagattgttgttggagacattgaattcccttaagctagattggttaaaagccgggacccgtcccgtcaaagagttttcctccacaaaaaaccgctccaatctcgaaactctcaagaccgagagaggaatctctccggtaaaagagtttcgagaaaggtcaattctagtcaatttcgagttcaaatcaaactccatcaaagtaccactcaaagaattgtttttgaaacttagaatagacaagtcagtgaatttgactaatgcatctccactaatacgtccacttaaattcatattttccaatactaattctgccacgtggccgtcgtcggagcacttgatcccgtaccatatcggggtaccgaaattgcagtggggaccggtccaggctttgttgaggaactgatgatttagaattgctttaagagagtaaagggcagttctttctgagtaataatagtaatagtagttttgttgatcttcttgtttggctatggggacaatgagtaacaagagaaatgttgtgattaagactacaaagtacttattattagatttgatggaaaataatgaaggaaccataatcattatgattttattaatttgtttgggggattaatttgattgaacaaataatgaggagatatcttttgtttataaattaattatgataagattaaattagtatagattgacaattttattgcatgtaattaaaattaataatgtaatattcttattgacattccattttatttgtagtacagctgtatacttatataatacatgaacgtttctatcattgcgatggaggagaaaccaacaagcaagactcatttttgacttctttagtttggtttatttgattattatgtttgatgatctgctaattttgtcctcattattaataaaagttttataataacgttaaattaacttctgtattaacatattatgaattatacttttttttttttttaattgaaaggctaaatcagccataactaaatcagtaatgcaacttagaaaacccaaccaccaaagataaattatactattgatcttaacacattaattttgtcatgtttggaattggagcaaagaaaactaattaaatagtcgatttagaaacatatagttgatacatttcacctagatttatgttaaaggtttagaatttgtcatatactgttgattcatgtggtataaactatgcactgatttatttagagacggaaataaaacaaggaaaataattatgacagttgtaatcgaatatacaaagatgttagatttcccaatttgttaaaagaagtttgttagagtgaattgcggcataaatac

SEQ ID NO: 37614 - DNA, 4089 bp, Cannabis sativa
gttggatgatgattgtatgtggtttgaggaaattccctctaccattttctctgttgttgtaaatgacgctctataatttataataacagttcttttcaaaaaaaaaaaaaaaaagttaatatgatggtttttcttttttttgaggaaaagttaatatgatggttaaagagatacaaatatacacatatacaggcggcaattgattgctttaagatttttaatggaaggaaagataagataatatcctgaatcaataatttagagattggtaaaataagcaaggagtttgctgtgaattgttgatttagagattggttaattaagcaatgagtttgattatgtgaaaacatcatccgtaacttcaataaaaaaaatgttctcttgtgatgcagatattgtcattaaaagagcaatgcaattctatagtgatcacaggtcattccttagggggtgcaatagcttctctttcaacattgtggcttcttagtcattgtcacctccaatcagtctcttattcaccctcagtcctctgcatcacctttggctcaccattgctgggaaacgagtccctctcacgagccatccttcgcgagagatggggtggaaacttttgccatgtagtgtccaagcatgacattatgccaaggctgctccttgctccttcagccacagtcactcctcaaatgcagctgttgcttcatcattggcatgtctcaatgggaactactactacggctcctcattttggcagtcatcaaaatgttgctgctgcccaacttggagacccagagaaagcagagttctttggactcattatggcttgcttgaataattcttcatcagaagaggctttgaaaaacttgttgttttggcccttcggaaactacctgttgtgctcccaggacggagccatttgcttggacaatgcagcatctgtcattaagatgatgcatctgatgttcatgacaggctctcccaatgagtgcattgaagatcatctcaagtatggagaatacgttggaagaggttcttcacagtacctgaaacgttttgtccaaatgcagccttctgaatcatgttacgaggcaggacttgccttggcattgcattcatcagggattccttcccaggtaatatcttgtttttgtcttttctaacacttggaagtattatatcaaggaaatttagttcacatagtccaaaagaatgtagggaaagtaacaatcattcacaattattcaatgatccctcattttcacctttatatatatatgataaggtatctcaatgttgagttaatttgcaggaaccagctgttagttcagccaaagactgcttaactaatgcaagacgagtggggcggcgcatgcctgaaatcacgtgtgctaatcttgctgtaaaattatccaaaattgtcccatttcgagctgaaatagagtggtataaagcatcttgcgatgagtccagtgatcaaatgggatactatgatgccttcaagaggagaggatcctcaaaaaagggtaaccaagttgatatgaataggcgcaaacttgctggcttctgggacaatgttattgacctatgggaaagcaatcagctgccttatgattttcataaaagagcaaaatgggtcaatgctttccattcctacaagctaattgttgagccacttgatattggagagtactacagaaaggacatgcacatacataacggacattacttgagaaatggaagaccaagaaggttccaaatttctgacaggtggtggaaagaaagaagaaaaaatgagaaggataatgatgcaagaaccacacttgcaagtgcgactcaagattcatgtttttgggcaaggctggaggaagcaatggaattgctagctaaccttcaaagtgagaatgaagaagtgaagaaggagacatgggtcaatatcaataaattcaatgaatatgctaggagattagttgaaaggaaagaggtgtccaaagatgttctggccaaaaactcaagctacactaagtggactaaagatctagaaaaactaagttcaccacttgtttttcctgtgactcctttccctgagttccctcagatgaagttctgaagtttccaaatttcaaggtgcctttggaaggtcatttgagaattagagttcgatgtaattacgggtaattaccaggataattacgtagtttgacgtgtttttataggcacgtaattacataataactagaagataattgggaggcctgaattactctctctaattctcatattcccataaaaattaaatgtaattacgtaccaaaaaataattttaattatttaattaatataataattatttataagatttagtcttttatttttattttctttacttgtatacataattattttttttcgtcatatgtgtataatactattttatataattttttagtgtggattttattgtattgtttgtaaataaaaaaaaaaactaatatatgaatataatatgtgatgtgattattttttaattaatatcatttttttaagtttttgtttgaattaaatatttgataaatttattcatgatttaatataaattttgattgatgaaatgtttaaatttattttattattaatttttaatctacataaaaatgacaaatactcaaatttctaaaaataaaaaataatacatcaaatagaatatggaatgtaagagcaattagatagttaataaataaaaactattttaaatatttgttattatgaaatttgagtttattttataaaagaatttttgtttatttaaaatatatcaatagttaaaatttagagtctttttcatttttacacttcaaaacaattttctttgtatttttacaaaattctgtataaaaaccctattgcaactagcgttacaacctaaaatttgaaacccctattgcaactagcgctgcaaccattttagaaacccaaagagtaaatttgaaaaaaaaaagttaaaaaaatagtatatggaataatttccctaaaatttattttaaatatttgttaaataataataataattattatatcaaatattacacaatattaatttactatataattaccaagtgtcttcccaatcatgacgatataaatgtacatgtaattaccacttgatattcaaacacgacttgcattaaaaatataatgtaattaatatatagtaattaaataattgcttccaaacctagtctcagtgattttttgggaaagggtaattttgtttggtgctgcttaattttgaaagagtgctgagtgtgtgccaataatgtaaaatattttcctaattaatgacccgttttaatgttgatgaaatgtctcaatgatcttgttggttcaaaatttcttgagatacacattatattcatgctgtgcatgcttaaacaatggtgctaaatttcttgacaggttttgatgatagaatcttactaaaatctagtactggatataataaatgagagaagaaaggaaactataatttcatgtgatgaagaaacataacaaagttcctaagaagcctaagacatttccattttcttatagatgctatatcttatcattttctatctcaatgtttctaactggccctttgaaccatttccttgcatccaatacccaccaaagcattatcaaacccaaaccaacacccaaagcaacaggtgcatagttgaaggtgtcccaagagattggatacaaagttggcaaaaggaaaactgaacaggtatagcaaatccataggaaggctaccaagcaaactggccttcttgctttacccaaatagaatggcccaggcttgaagttcttctcagccattaccattctagcaaagattggcactgcataacctcctacccatccaatcgtgcagatggaagttatagctgtgaagaccacattgactatcaagattggaagtccaagaagaaagcacattccagcacacagccatacagcatttgagggaactttgtgctttgggtgtatttttctccacgtagacgaaaatggaatgcctttatctcttgataaagcatatacctaaagcat

SEQ ID NO: 37615 - DNA, 2205 bp, Cannabis sativa
aaaacaaacaaaaatgagttgataattaagaacaaaattccaccccgaaaacgtgtgagagggaacaaggtcgacaaagacctttcaaataaataaacaaatatagatatatagatattatacaagacaaattaggcttggtaattattaaaattattattttttatacataaaatctcacatttataacattattaaaactttatatcatgggttatggcttggtaactattaaaattattattaattagcaataatgtatatacctactacgtactaattatatatacaacttttttattgttttcatcgatttatatgttaagggtttttattttttctcccctattctattctataatatttgatgtaattacgataaaatacaaattggctatatattattgcagcgcagtgtatttataataatattaattggaattatcccaagttgcttctggtacgtaccaagttctggatttaactaaatatagcctatatatatataaaatgatgaattaatacttcatgacagaaatataaatataaatataaattataaaagaataagtttcatttaattcttataaacagaaaagtttcatgttatatatagatgatttacaaatttagagtgttttttaaactcctaataaaagtaggtgtacccttttctatttttaatattcaaatgtagttattatgatcttaattttaatttttgatgtaatagtatgtattgtagttatttaaaatattttgtaatattttaaaaaatttaacttatatttaaaagtatggttcaaatattttattttatgacacatattactcaaaaataatctataattggtgagattgatttcatgcattttgcatttttaatttcataatcagtctatataaatataataattataattataaattgaggtttagccaagtgaagagtaccaagttaccaagcagaaattattgataaaagaataagaatatactaatggaacagtgtcttagatttgacatcaagttcatactttttgatcaaatcataaaagaaaaatataatcgaacaccaagcaaaggataattcaaaatctaacaacaaaacgaagaaatatatatttctttatttactttatttgttgttttcttatagaaaaatcaaagctgaacacaatcaacacatcaccatttcatgataaaaagaaatacacattgcacaacggccccactgcttttccggtataagctagggtaattacaataattagtccctaacgtttacatatttgcatattgaaccgtattatgtatttatttgtcttttaagcacctaatattttcctttaataatgtagtctagtcttgactcttgattgagtactttgtttattatttttactcttcttaagaatttaagttgatatagtaaattgcagttttaatattttgaataagtaattctaaaactatttttcttttagatggtgaataatactagctagagggattagctactgcaaaataatagtttgattagacaatgaaacgaaaagagaatcaaactttctattttacgtacaaatatttctaaaacttttggctgtgtaattatttttaatacaacttgataggaaaaaaatatagtggtttgacagtggttattttaaaaataggtgtctgtacttattttatattttcgggtctaattattttaaagaatttaaataatttaaaatatagaaaattaaaatttaaataatctctttaatatatataataaaataagaaaattactttatatgttatttttaattttttttttttttaaaatttatcatttttaatggagattttaattgtgatttaagttattctgctaattatttttatatagaatttcgtaaaaatatatatataaaaaaaaaactattttattaaaggacgtgtaatattcttattccaaataatatataatgaaacatatgaggactagtaggacaaaatatataaaaattagggatccacaaaataaaattgtgaaggcgttttaataaaataatagaaaaaagaagccctcctactaaaacgtccacacaaaatctgcctccataaagaaagagtcctcttcttccccaaacttctctgtatttctaaacataccaaaaacagagtcaatacaaactctctctctctctctct

SEQ ID NO: 37616 - DNA, 3670 bp, Cannabis sativa
taaattcttcttaattgataattacattgattgtaccataatttctaaaatatattattttatttatgtaatttatagctcattggtttactcatcatatgttaatatgttatcaaagaccgataagcatcctctatctcatctccccaaacattcttcatttctgttacagcccatcactgtattatatttaagaaataattggtttgtgaattaaaatgtatattttttaaaagagtgttttggaaatataaatttcagttttatatgtaaaaaaattattattagaaatgtgattagttatagtgtaatttaataattttgagttttaaaaaattaaatttgtaattggttgggttacaaaatcttaagataaaaaagataatatttgaagaatttttgaattcattctttttttcgataaagaattcattcattcaacaacattacacaaaaaatggctagtcacactattaggcttaactcacacaaaaagaacaaactcaattcacatagcactaactttattaatcaaagcttcaatagctaacacatgtgccacttgattagcatcccaataaacaaaagataaccaagctaccctcatttgaaaaacatagaaaacatccaaaagttattttcatattttagtctaaaactcaaattttattttcagatttagttatttgaagcttccaactatatcaaaaactctaataccactttttttttttttaatgaaaataccagttatcattaaactgagaaacctgccacaagagttacgacctgtgaaaaacaaaatgcacgataagatgagaggcctttaagcttacaccatcattcacaaagcaatattattattagaccaacgaaaaaaatgcaacaattcaacaaaatactgtatcccacacaattccatcacaatctaaacaaattatatccactgaatctattaattcaataataatatataaaaattcaaactccaacatcatgtgtgaaattctgaatatacaatgaatgaaccttaagacacaactgaagaagaatatcctatttatctaatactaataaaaagttacaaaactgtgaaaatcatgtgaaacggcgtgtctaatttggtacttaacttttctgttttgaataactgctgttatcgaaatcgctatactagtaattgttctattggatcttgtgtgtattgaccattatgacacatgatcttaaagggaaaccaaataatttatttggaaccgtgcagtgtggagagatgtgaatattgacaaaattgaattaaatattaaaattacttttataatgcaaagcaagaagctcaaaaaatttgagatgaggatagggaggggaaccaaaccaaaatgtagaaagaaaaagaaacccaccattacattaccaagttgtttttcttcaagcaaaacaccaagaaatataacattcttaagtgggtatatcattatcaaacttaacataggaaaacataaaatgtgtagagttagttttgagtagaaactcatacatggttagagtgcagagacataatttacaagcacattacaacattaaatttttgatatgttacaaacgtactttcactctgtatgtaaatacgatcttaggcacaaatgaaatgtgtgtatttgaacttcatctgcaccgtccatgtctgtaaacactctttaacactcaagcacaaatatcctttgttattcagccctgccatgaacagagttgtcaaaatgagtttatagatctccatgagcactagaatgcttaaactaataatcatgaactttaaaagtcaaaagaaacaatgatctatttttcttttttgtgacagtaagactctacaaaataccttatctcccctcttatttagtttcttcttctggttttttctaaagcaccaacttgaagccctcagaaagaaaattatccctgtaaaaaaaaaatcataaagaagcaacttatatcaaatttaatattgaaattgcaaaattaggaatatattaaatcagtcaagccaacaatacacagctaatcaagagataagagcaacagaacagaactgaaattacataatgatataatgtaaaattaattaagaacataaattaatataaaaaaaaaaaagtgtaagaatatatagatagggaagaacttgtcgtttacctcattctgtatcggtcctctatttcctggctcaagccattagcccttctactaggattgactgaagcaaggctgctgacacaaactaatgcctcaaaggagtctggcacaccacaaatattaacatcttttactctttgacttttcaaattatacataaaaagcttatcgtggtcagtttcaaacagaatatcttggccatctttggaagaagtcaaaggcctaacaagtttataagccttgagattaaccagcttcgtccaagattcctggaccccatagtttttcattaaccacacctcaatatccatatcttcatgaacagccacaatacagagacatccatctaaaacccccaaatccagaagaaacaaattcttgaatgactcgggcaaaggtacttccttgtaacactctcccacaacatcaagagccacaaccagttcattttcgtccatttctagcttccgaagcactacccagtgcaagaaaccattgacatgaacacccatcttcttggtatagcgaagtgcataaggcatatcttgaatgcccttccattcattcgttctcaaactatatatcttcacctcagattcaaaagacaggttattcaatccaatatactgcgaaaccctcacaagcttataatcgtcaagagctgcgtcgtaacctaacccataaactctcgggccacgcagacacagagccgggtcacgaacacgctccgcggtcaaatagggcaaaagccgatgagttttaattgatggattccaaagagctatatcctcagccacattacagatacagagcaagccgttgcagagacccaatatcttgatttcattgctgtaacacattaacgggtgaggaagctcgacggcctcgtttgggttatcgaggtcgacggtgaagagctgaaaaccctttctgagaattaggcgtagattggatttggtttctacggatttcaaaatatgaaaatgagtgaaatccaggctgtcgattaaggaccgccatggtttgcaaacgcaccttagacagaggagggacttgacaggaagacgagcgagtatgtcggttattacctccagcggtagataggccatgggagggcgattgaggatagagaaatcgagctcaggttgtgcatctaaccaagatttggttttgtggcattcgtttatcttggtttcgtgctagggtttgagaaatgattcgacaagtgtctcgaacacgaagaccacgcactctagcagactatagactactgactatagtaaccaactaaacttgaggctgagacttgagaatcagtgaggttagttcgtggttgttgccttttctgaaaaacacatctcattattcacgcgcttagtgggacaacgtgtacccattgggctcattatttcactcctatgtccaagtagaggcccaatctttattccttgatccagtgtgaatttgcatttgagaaatt

SEQ ID NO: 37617 - DNA, 2230 bp, Cannabis sativa
tgacaatgccataaatataatgtttaccaaagttatttatgtaaacacacacaaatgtgaacacaattgctacctggagtattactcagtttgagcacaagcacaaattttatagttggattggcaaagctcctctaacagtgacaagaggaatgcttaggaatattaaattgctgttctttactggtttatatcctttgtatttgaaactgattccatatttctctttctatattatattagagctatactagcagagtatgctggtgctgtccttggagtattgtctgcactgctatatgggaggagaggacatgtttggaaaaaggtgctctgtgtatacgagtttcataggctgcttatatttatttttgcaatactatttattgatcgtgtaatatcatgaaccttgagcaaattttagttaagaaaatactttaaccaagggaaaactacatcattcttctcttcagtaatgaaccaattaaaatctacgtacgtaacactatgataaaccaccaattcggttcacctatggatggagacactgtaagtaatgaaaagatttggggctgggatgttcttgcgaactcaataatatcaaaattttatttatttattttgtttctgttttgagttactttctaattttattttgtttattttgggagagtctggagggattaaaggagagaaaagggaagggaaaaatcatgtctggtttattgtaattgagcttaggcttgggagaggtaccaggtctctcatatatcctgggagtgtttgagtttattctgctatctcaataaaactttcctactttatatttctttgactgaaaatgatacactactggtgtgtatcatgctagtgcatgggctcttttctagccagattgcttgagtattaaaagtcactggattggttgccataagatacttttgaatggggaaatgatgtaccagatcaagtatggtgactagttatcaactgcaatgtcattaaaatataaagattatcttattatatcactgacatttattttatcagattggtgggcttattgcaatggtgacgtctttctacttcttatcccaaggatgggccatggaaacatattctcccttctatatcctctctttgatgtcttgtacttttggaatttatcaagttcttttataagactcaataaatgcattaatcaagctagttgtgttttatagtcgagtatcctcttaactttcattactccttttatattgatcaaacatttgtcccttttttgtgtatgttgagaacttaacttaaatttaccattcaaagatgatcctgatcgtgaggttgaaactaaagaagttttgggcatggcagcaatgactattccaatatgcgccggaatcttatcagcgttgaggcgggtgattgcacgacgtgtttcactcaaggtgttgatatatgactgtcttcatgtttgtagttatcttgcaaatacattgataacctgaacttcttcagatgttatatatccttcatttttcagttaaatcctaattcttacacatggtaactttatacgtcttcagaatcaactgaaaaggcgacttcatgcaataactatagcttctgcaacatgttttctatttcctgtggccatgtgggacatgatcatagtaagtcttaaggttctatgtcaaagtcataaagattggcattttttgtgtgtttctctttttattttacggtgccttgttaatacttatctttgctgctctttattcttacttttaagtttctttttttttttttgcatcctaaaatttattgcttcttttctattggagcacctagggatcaccttcaagtggcagtgaaaagatgccattctctacttgggctttcttgagcaccattatttttggagttatcttgatattctatgtggacagcatggcagaggaaaggtatcttgtataatttttttttttccaaggcagctctggggttttgaccactgctaagttgaaatgcttgcttagttttccggcatgtgttgttacttgtttaatgtttccttccaagttctgtactctctggcattgtaatatttttgagtttcttaatcttattaattcgttgatattttatagtgttaatttcaaaacactaatcttttgtaagaaacaaaatcattgttgtcttatcatacataatataaatgtatatatattag

SEQ ID NO: 37618 - DNA, 5251 bp, Cannabis sativa
tttcataccaaaacaagtaattgcttaacacactaatttttaacaaaagatcttgattcgttgattataatctcttaatcaatttttaccctagaaatttatgagtgcacaccgggcgagttagtattaaaaaaaacaaaaaaaaacaaattagaactcaaatgggtgttcgaatctgtaacatgaaaaaaccgagattggaacgactccttgttacaccaacgaccaactgccatagtttcgcactatgaaatttctccatctcaaaaaatcatcccattatgcggctctctctcctatttcctaagaccaatttttcattctcatcaaatacccagatgactagacctcttcctcagaagactttcttcaaattcaatgctaaagatggcctcattagccgactgtgcggggacaagagatacaaggaagccatggacattctttgcaaccagaaacgtttaactgaagcacttcagttactcacccacatagaacgaccttctgctttaatatactcaacccttttgcagcattgtcttcaacagcgagctctcgaggagggaagacttgttcatgatcacattagaggttctgggtttgtgcccggtctgtttatgtataatcgttttattgatatgtatgctaaatgtggctgtcttcaggatgcgcagaaggtgtttgatgaaatgcctgatagggatttgtgttcttggaacacaatactttctgggtatgctaaggctggtcagcttgatgaagctaggagattattcgatgaaatgcccgaacgagataatttttcttggtcttcattgatgtcggggtatgttcgccagcatcggcctaaggaggctttggagttgtataggatgatgcaaagaaatcaaatttcgaaatcaaataagttcacggtgtctagtgctctggctgcctcagcggccatgccaagtttacgtttggggaaggagattcatggttacataatgcgaacagggttggactcagatgagattgtttggagtgctttaacagatatgtatgggaaatgtgggagcataaaggatgctaggtgcatttttgataagatggaggaacgagatgttgtttcgtggacggctatgattgatagatgctttgaggatgggacaagggaagagggatttgctttgttttcgaagttgatgagttcaggtactaggcctaatgacttcacgtttgctggtgttttgaatgcctgcgctgatcatgtggctgaggaactcggtaagcaggttcatggatacatgactcgagtgggatttggcccgttctcatttgcagccagtgcacttgtacatatgtactgtaaatgtgggaacattgagaatgccaagagggtgtttaatgggatgcctaaaccagatatagtatcatggacttcactgattgttgggtacgctcagcatggtcagcccaaggaggctcttaagatttttgagttgttactcgaatcaggtataaagcttgatcacgttacttttgtaggtgtcctttctgcttgcactcatgctggattagttgatgaagggcttgcatatttccactcaataaaaacaaaacacaagttaaaacatactgcagatcactatgcttgtatagttgatttattagcccgagctggccggtttgaagaagctgagaaaattatcaatgacatgcctggaaaacccgataaatatttgtgggcttctctactcggtggttgcagaattcatggaaacatcgagcttgctaaaagagcagccgaagcattgtttaagatagagcctgaaaatcctgctacctatgttactctagctaacatttatgctactgctggcatgtggagcgaagtggcgaaagtcagaaaaatcatggacgaacgaagggtggtaaagaaacctggtttgagctggattgagatcaagagggaaacttatgtgtttacagtaggggatgagtcccatccaaagtataatgaaatacgtgagtttttgaaaaagatttcaaagaggataagggaagaagggtatgtccctaacacaaattttgtgttacatgatgtagaagaagagcagaaagagcaaaacctctcctatcacagtgagaagcttgcagtggcatttggtatcatatctactccaccaggaacaccaatcaaggttttcaagaacctaagaacttgtgtagattgccatactgccattaaatttatttctaagatcgtcaagagaaaaataatagttagagattcaaatcggtttcattgttttgaaaatgggagttgttcatgcggagactattggtgatttgagccactcagaagactcacaatcattttaagagtacataaaaaactagagtaagagaacatttaaacatcaaaaatatatatggtcaattggagagtgaaaaagtttattttaattctaatttatgagcaaatattatttaaagggagtaatcaagcaaaatcatctttacataagtttaaagcattttttgcataatacaatgtttttacttaatctggaaaccactctcaaaatggaatttcagctactgcttccactcatgaaaatcttcatcaaagccaccattctcaccagctcctccatttgaactgagttgctcttcaaggcaataacttggtctaaactttaaaggaagattaatctcaacaagctaaagaagtgaggcagtcaatagcatgagcttcttgaagtagttgtacttcttcaacaagttccaccaagcaacttctaaacactttcttcagaagctgctctgttatcccccaaatctcaacgatttcatcatttgaagaatgacccatcttatctttggctttaagcggttgactgttgtttcaagctctgttataacttataggtttatagcacagagctgaacatgcataaaccatgccttgacaagcttgcaattaaaaagtgttggtttccttatagttttgcttgtaatttctttggctaaaaacagttcaaacttcttctaaactactgtggaaaagttcagatttattaaagtttatgtataattaaatcaatgggagaataagagattgcatcaaccagcaaatatttatgtgtcatttagaaataactatgtaatttattataagaaaaatatatagaaatgataaataaaaattaaagtgggggatttgaacccgacgtgaatcgaacacgcaaccttctgatctggagtcagacgcgctaccattgcgccacggatccactttgttatacatccataacaaattttatatattcaaaataaagaaaaagtaaatattgtattaattcaaagtctagaaaaaggaaagccttctaattatacacaagtacatatcttattgagaatttaacctaaacaaaagccaaactaatcaaccttcttctccttttctagggtgggggtgggggtagtggtagtggtactactagtagtagttgttcccatcatgctagtcaccttcttgatcactttctcatcaaacatgtcataatacctatgcaattgtttcttcactccttcactaagcctctttatgttatcttcatatttggaatatattaccggtaatgtcatgcccataacaatgcctacataagaaaaaaaccaaaagaaaaaattatacatctcaaaagacaacattacttcaaaaacatattagtcttataatctgagatcagtgattgagtgtttgattattattacctatatattgaatggttaagaagtcaaagtagtttcccacttgggatagtaaccatagtccaaaaagagttgaagcaaaagttaacaaatcactctgggcaccaactttgaacatccaccttattgattcttctgtccatgtacgaagagccatcgccacttttaatgctgattccactgtaatctcctctccagacaacaactcttttgtctctctatttatataattaaatccaaaaaaaaaaaaaaaagcaaatgcttcagtgtcaaattaaaacacaaaagccatgtcttttgaagaaaaagtttcaatttttattaaaacccaagtcatgtttttctaacaaattaaacagaagaagaagataaataaatgaattttattaatttttttagaaagtaaaaaagtggctagcttactttccgaaaagcctaagcaagtttccccaaagaaatagtgaaacgacaataaccatggccacccatgaaagaactgtaacgaagttgaattgatagaattgaagtaaaacccatgttgctgttgatataagtaaaacaagtgagctctgtttcttctttttccagaagaatatgtctctcatcatggttcctgcaccaaattaatcaagtaaaacaaaggctatatgtattaagtgctactctgtaaatttaatctaattacctgaagttgaacttggtaatactgaagaagattgagttgttgtactagccatgattttcttgctgtcttttcttatagggttgaaagaattaaatgaaatcactgaagatgatgaagagtactggattatggtgatgatgattattgttgtgtttttttctgtgagttgtagtgaatttggtcttcttgaatgaggagtgagataatattaattagtagtaatagtagtatagtgttaagttttttggggcctacacgtgtagctccggtaggacacgtggaggctggacagcacacgtggcacttgattatgaaccagagacgagagcatacgtggcctgtatggtcaatctcaccaagagtctgtttgacacagctgtactgtgagaaaaaataactgtagttgtgctgtaaaaaaaacaattatagtaaaactgcagaaaaaaattaagttgtgtgtttggtcaactataaatttcaaattacttaaattgttaagatctattatagtgataatgataattttataatctaatttattataatcacaaatacacaaatatgtaaaaatttattttatataatattttattttttatatatttttaatttttttaaatataaatttatatgtattcaataaaaaatttatagtatttttttattatatttgatcaaatgtaaaaagaaaaaaaaaattaaaaactcaagtatataataaaaattctaagttgatgtaacttattaatattaaaataaaatataaattattatttaaaaatttaagatatttaataattatttatt

SEQ ID NO: 37619 - DNA, 2838 bp, Cannabis sativa
agtgagatcggcctcatgtcactcatatgtgttggattcttcttcttggggatgagaactatatgagtatcattaatagattccggaagcatgcccgtgtcaaagaaatcacgaacaaattggacaacatccgcccctactatgctccaatgcttctgatagaaagccggggtcataccatctggccccggagacttatcaggatgcatttgaaaaagagctttcctaacttcatcctccgaaataggctccaagagctcattattctgatcacaagtaattgttggacggaccccattcaaaaccgaacccaagttgatattagaagactggaacaactcttgaaaatacccagtaataacatgttgaagacccgtttcccagttcacccaagcaccattattgtccattagttgactaagactattactcctctttcttgaactagcaactgaatgaaaatacttactgtttctatcgcccgaattcagccaaaactgttttgatcgttgcttccagaaagtttctctttgggcaagcacttcgtctagtttctcctttccttccttgtgttgttgaacagagaccgcatcacggccccattttgagttgcggatttggcttttacattggttgattcgttggcgaaaattcccggttatatctctaccccacttcccaagcatctccacacattttgaaattttctcttgaatgttggtacagcccgtccctgaccagcagctctcaatgatctgcttgcataatggttcacggatccatgcgttttcaaagcggaaggagtgatgataagttgttgggaaattacctttaagaagtaagagtagtgggcagtggtcggaagaagagaactccaagttgtacaagatagactgaggaaaaagagccagccattcgttattgatcagtgctttgtccaggcgttcttctatccagtcggtggtattcctacctttttcccaagtaaacgggtacccctcaagagccatgtcggtcaggttacagtcattcagagcattgttgaagccgattatcaactgttctggatagtttcttccacctttcttttccaattgcgagcccaagttattcatgtctcccataaggcaccacgggagattattttcttcctttaaagaacggaacaggttccaagtttgaaaacgcagctctctcctcggctctccgtaaattccagtgaaacgccaagatggattccccaccttctgaaccatggcgtcaatgtgatgagtagagaaaccttgaattatcacttcattttcttctttccacaacaaggccaaacccccactatgcccatgggcttctactacaaaacaaccttcatagcccaagtgggctctaatactttccatccttgtcttattgcatagagtttcacaaagaaaaagtaaaatgggcttcttttggaatacaagatccgataagaattgtttagcccgtgggttcccaagcccacggcaattccaactcaaacaactcataattctgggcgggcctggaaaccagaacccgccaaaagcccattttttgaaaaccccccaccatcttgttccatttcttcagcattaccagcattgaccgtagcttgtgggcccatggacacacccacatttgaatcaggtcttcttctttttgagtcagtgattgtagtgattgtggaatcaaaaaaattcccattattattgacatttaaagtcaaatcttcttcattgactcccatgattttatccccatattgatgcctctcattcggccaattattattgatatcatatcccataatgttgccagccgatcccactaattgctcctgaatcccaggagacaaactgacacctctttccccactgccaccatgagaagcttgactcgactcgccccttaccgccgcccccgaacggagccattgtgccccaaaggtggagtgtcttctctgtgtcgacgcccgcagctccaggttgtaaggcttttcttgcaagtgcaatggtttcagaaaaagcctcgggcaaaacttctctgcgtggcctaattttccacatatgaaacaaaaagttggaagcttctcatatttgaaattgacccagtaccaggaggaatcatcgttgctcactttcattcttctcttgattggtttgtcgacatttacccgaactcggactctaaggaaatctctccaaacacccacaaagttattaggatccgactctatgaaagtaccaataaaattccctagcgccgtaacaacactaagggtcatgttgcccgattgaaggttatggagttgaacccacatgtccatatggttgatctccaccagccttggattgtccccttcctttaatcttgtaaaaataagaggtttgcggtcataagtccaggggcttccgtctataactctttgtatgtcgatctcatggtagaattggaaaagaaaaagatttgggttgagttcttttacgtacattcccatccccggttgccacaagaacgccatcatattctggaagacgttaaaatccgagactctccctgtcaacagtttacccaccaagcaccaccttgtatcgatcacgatctcttcggtcctactcaccggaagctttaacacctcttcctcttcctcatccaatctaacaactccttctgtattctccattccctctgtatatttctgaacgagaccaaaactaacaaaagcaaagaactggacaaactctcaaggttgagagacagcaaaacgtatcaacagatacgaccaagttcatagatataaattattgtttagaaaaacaa

SEQ ID NO: 37620 - DNA, 3521 bp, Cannabis sativa
gccaatgaaaacatgtaaccgcactaatgggtgcgctggtttagtggtttgctttaatacttttctgtctcattggtttgacttatataagaaacagtagcaaagtttctatatgacaaactttcttgaaaaaacaaatataaatgttttgcggggatcttcgtgctttcgtcttcccagaccctccagcaattactttgctaataactttaccttctgaaatctatagctgttatatttacagctcattaatatcactacatttaatttagtatatctatctacactaatagagtcaagacaaagttatttgtgtcttggttaacaccactactctatagacattgataggattgacagcaccattttagagaagaatgtgcctagagtctaaatttgaaggaaccttatctcaacaaaatcgatatcaaacaaaacttgccaaaattttgtacaatgttggctcacttacactgataattgaaggcttttcttttcagttttatcttggagcataatgaaagtaattacaaaaagaagagttaagattccattttgtacttaatctttatacctccgttttcttaaagatcatagagtcaatctctccttatcaggtcaaagccttattttcagtgtggtttatcctattcccacagagacattggagggaagagtagcattttcctaaattatactgggcttaggagagtactttatattttcattttcatttgtataactataatacctcgccatcatgatgcagaagttcaatatcaggaagataagcttcttgcctcatcttcaactccaacatactcaataattcgtaaatctgatcagagtcggggtgaaatctatcaccagcaacaaagctatagatgttctttcctgcttcaactgtactctcaccaaatgtcttcttcagcttcttctccttaattagagttctaagttctgccacactttcccatttctcgtccacggcatagatatttgacagcaatatataataccctgcgtggttaggatctaacataaaaagattcctggctgcaacctctcccaatttgacattgtgatgaatacgacaagcaccaagcaaagctccccaaacatgtggccctgcttgaaatggcattttgttgataatgtccatggccttttccaactctccaatgcgacccagaagatcaactatcattccataatgctcagaatttggtttcagttggtattgcagcattgtattaaatatttctaacccctttccaactagacctgaatggctacaagctgataaaacagagagaaatgtgacgctgttaggtctaacacctgaattcttaaccatttgatcaaatatatttatagcttcttctccacgcccatggattgcataagctgcaatcatggcactccaaataaaaacatctttattcacaactccttcaaatatttggaaagaattatctaggctaccacactttgagtacaaatctatcagtgaagctccaacaaaaatgttcttgtcaaatccccttttctgcacatagcaatgaaggcagagagcttgctgaagaatcccggactgtgcacaagctgccagaatcttcaccatagcaacagcatcaggtttaatctcatgtaataacatgtagcaaaatatccccattgatttatgaggcattccattatgagcataaccacctaacaatgcagcacaagaaaccacatctttcttgggcattctttcaaagatatttactgctttgtcaggggtgaggcacttcatgtacatatcaattagagctgtagataccaagacatccagctcaaaacctttcctaacagcaagttcatgaatcttaataccttcttctaagttacaggcaatcgaacatgcctgtaatgcattaacaactgttactgaattgggttcaattttccgattaaccatttcagagaaaaaatctaatgctttcacagcagccccgttaagagcacaacaggcaataattgagctccacgatatcacatcttgttctggcattctattaaacaagctagtggcagattttacagaacctgtctttgcatatagattcaaaagtgaattgaccaaagataaatcagtattaacgcccctcctaatgacaaagccatgtacactactaccaagcttaaaattggataactgagcacaagcagaaacaacactgacaagtgtcactctgtcagaatttaaaccttccaacataaccatttgggagaaaaaaattagtgcttcttcaggatatccattttgctcatacccagtaaccattgaagtccacaaaacaacatcaggcatagaaaattccttaaacacttgtaaagcatcatccataagcccacattttgagtagaattccactaaagcagaacccacatacatgtcttcacaaaactttccatgtttctttatgaacccatgtaatgttttgccatatcccaccgcccttaaccctgcacacgccttaagagcaatgggtactgtaaaattatcaggcttttcatcatcagctcttccagtagataccatgttgtaaaagagactcaaggtctcttcccactgtttatctctacaatagctcctaagtgcagcattccacaaataaacagtcctatgaagcgtttcatcgaacagtttgcgggcatgcccaattgatgcatattttgcatacaagacattgagttttgtggcaaaaaagctatcttgatgagtaaggccagctttgaaggtttgacaatgaagctgtgccactgatttcaaactattacatgattcaaacagattaacaagcagttccctccttttcattaggaaaaactaagtgcctaataagaaaggatggtgtaaagctggattaaaaatgaaggctttatagtgtttaacttagttgatttgcagtagtgttacagtcttttcacattcgggttatataaacttaattatgtatatatatatgtgcatatatccatggttggtggaaatcccatataatataatagagaagatagcaaagattagatacctgatagaaggtagcaacagcgagtgagagagagaatggttgtgagaaataatgtggcgctgcttaaaccctgaaactttactcagtgacgaccaactgcattgatatttgctactctaaattgtgttttgtgttgcattgtatttgatagtattttgttgggttacattgtatagtatttaatacaatgttttgctaaaaaataataattttttatatataaataattaagtttttaaatttccagttgtaaataaatactaaatttaattttttgtgatacaatgttataattttagaacttttgtagatacttaacttttaaatgttaagtaaattgtaagaaaataacatgtagataatgtaaatatattaaaaaaatattgaaaaaaagtgttatgggattcaaacccgtgacattgtataatatgtcttacacct

SEQ ID NO: 37621 - DNA, 4315 bp, Cannabis sativa
  modified_base (3683)..(3686): a, c, t, g, unknown or other
ctctctctctctctctctcgtcaggcaattgaagaagctatctttcgccggcgccgccaatcaccagctccaactgctccacctctcaaactacgcatttcctgcgtccctcaacctcaaacgaggtatttcttgctctttactgctcaataatttcaattaaatacaatgtatcaatatacactatagttatggtctctaggcgggttcagttttaggatttcgttagtgcatgtaacatatttgtttttgtttttaaaaatctgagtttgtatataaacgtatagacattcaaatacatctttgtgtagagatttaagaaaggaaagagaagaaagattttctactattaatcaatagttgcaaaagcagagtctatatacaagcagagagaaagaagctaacaaccgaaactaactgaccaacagtaaaaactaactgataacagaaacctaaccaactctaactaatctgccagctcatcattagttgtagtatccttaacagcccccttcaaacttagtgtggttgaagaagccacacaaattttgtctctaagaaagggaaaattggagttggaaataggtttcgtaaggcagtcagccaattgattgtcagcaggaatatgttgaaccaggatgtctttgttgagcaccttgtctctaacaaaatataaatcgattttaatgtttggtcctggcatgaagcactcgattggctgcaagcatggttgtgctgaggttgtcacaccaaactataggaggagttgaaactgggatttttagttctgaaaatacagactgaatccaacttaattcagtcacaacaaagataaggcttcaaaattcggcttcagtagaagacctagaaattgtagtctgtttcttagattgccagccaattagattgtcaccccggaagatacaaaaaccaatggttaaccttctatcatccggatctgcagcctagtctgcatcacagtatgcttcaagtctgagatgagtagctttctgcaggtgcaagccatagtctaaagaaccatccaagtatctcagtatcctcttaacagcaacaatgtgagattgcaacagatcccgcatgaattgacagactttattgacagagaaagcaatgtctggcctggtgattgttgcatactgtaaaacaccaactatagacctatatccagagggatcaagagcatgatcactcccataatttgagagccttagaccactgttcataggagtgctttgtgttttgactccttgcatttcagctttgcacaataggtcttgaatatatttttgctgagagagtaaaatgccatcaacattaggaattaccggaattcctagaaagaagttgactgtcccaaggtcttttaaggaaaacttgttgctaagggcagatatgagatgagagacttgggtgttgtcactgccagtgatcaaaatatcatctacatatattaagatgtagatgcatgattgagatgataaattgataaagagagagtggtctattttagttgagatgaatccaaggcttgtcaaggcagaggcaagcttttgaaaccaagttcttggagcttgcttgaggccatataaggccttgtgaagcttgcagactttgtcaggttcatttggatcaatgaagctaggggattggaccatgaaaatttcttcttgaaggtcaccattgagaaaaatgttattgacatcaagctgtcgaattgtccacccttttgtcacagcaagagttaaaataactcggatgatgattagcttgacaatagggccaaagttttcattaaaattaaagccgacttgttggtgataacctttagcaacaagtctggctttaagagtggtgacattgccctcagcatcctctttgactctataaacccccttccagcctatcggggttctgttgggtggaagtttaaccaaggaccatgtcttgttcttcttgagagctacattctcagtttgcatggtgttataccctaaattcggctaccatttcaacggaaaatacgtgtcatattgggaagaatatagatcaatgcatggaacggtaattgtatttgaaaatggaataactcattaaatgcggaagtgacagagtatatttacaacttgctgactataaggtcttatgcgagataaagatatacaaattgttgcctcatgcattaatgagaaacaatacgacattggatgtacaaggcaagacatcaacctcgttacgcctgagtagacgtaagcgaggcataatgactgtgaagacacttagcgtataatatacagtatacaaactaagtatatcagttgggtaaacccaagcaactaatagcgaggtgcacatctcgctataggaaggcacactccttatactttcaccaatcagcttcagacatcttttagtgagatttatagtcttgacgagtcaaacctgtcgagcagaagctgacattcaaatgatgttaactactgaagtactctttgtcattaagaactgcgattgtcaaaatgaagcgttatatcttcaagcgaagaagcgacgaggcttgtattatcaacctcggaaagatagggaaaaagctccagctccctatcaaggtcattggtactgagttcctatctagatatcctagaatgtcatgatttataacatgtttaatacacgattgccttaatccggtaaaagcagaataatcacagctatgtgatattcaaatattaaccgcatttatactacgtgatatgtaatcaaaccccacgatattaggggataattgttgtaaagattaaagtcaactctgtaattaactgcctggctatgtaattataaatagaggcaagttagactgaaaaagggacgaaaaactcataagagaaaatgcctaagaacaatatcagaaatctaataagattgactcgtggactgtgcagaattttaactgcaaaaccacataaaaaaccattgtgttcatacttttttcattactttttttttttattttatagtgcaaacttatcattgttaaggctcttatctggttaacgaaaatctgcgttaacagtttgatgctttcattgagagcctttgtgtaaaagctcagaaaaaaccctccttacatatataaaaaaaaacaatctccttcatggctgacaatacagagaacgttaacacaccacatgaagaaactcatcacagtcctagaaaggagcccatgggctccagaaggccttccacctcacagtctaaacgaaccactcgctccaggagtatccaactcgagggtggccccagcactcggaccacctgctccaggaggacccaacctgagggtggccccagcactcggaccactcaatccaggaggactcaacctgaggttcgtcccagtacacgaacgacacgttcgaggaggactcagcctgtgaatggccaaaatctcagaatgagagatgaagggcccagccgtggaggtgctcagcccatgtgttagggtacttatgaaatggaaaactgccatcttaggcgctgcttggaggaggcaaaccggcggaacgctgaattagaacgtgatacagtcgcaactagggcaacataggggaataacactcaaaatcgacctgaccctggagtgagaagaccacgaggcagacctnnnngctcacgaaccaagagacaggaaagtgttcaggaagaacaacctggggagaatgaggttccccctaaaaatccaaattatcattcggaaccctctcatagaaatgagaatgggaggcaactagaaactaatgaacaggaaattcctcgtggaaattaggaagaccctggaacacagcctggggaacgtatgtcaccggcgaggaatcaccagcgttgttcccaaacccagagagagagggctcgtacaaatcccaatgggagaaatacgacaaaccacgctcaggggggaagaacagggcatgaagaagtaagtgtgatctcggggcgctcaaggactcacagtcgatccactcgaggaggagaaagtgctcgtcgtgataatgatcaagaaagcatgggaattagtaaatccataagtcacgcaaggacgaggtccatgagtaggatgaagtccatgagcaagacgagattcgtaagtaggacacaatctgtgagtagaacgaggtctattagaaattattcccatccggatatgcgagaacacttgaatcagaaaaaacttgatcttcgccaacaactcggtccaaagcaagaggatcctatccaattgcgaatagacgagttggag

SEQ ID NO: 37622 - DNA, 2654 bp, Cannabis sativa
taaaaagtgggatttgtgcttgtgaaaattatcgagttattggaaataacaaagaagacccaaaattttgtgaacaatattgccgagtctacctgagtatacctatatgtgcaagaagacttataacagctgaatgtgatggaattgttaagaaaacgattcaaacaatcagggtctggggcacaaggaacatctcctttgcaggccgagccacattaataaactctgtcctaatcaccatccatgcgtattgggctcaaatcatggtactcccaaaagcaattttgaagaaggtatactcaatatgcagatcatttctttagaaataggagttgctgacacttcttctcctggttatgttgcatgggattcactgtgtaaaaagaaattagaaacaccactatatggaactcgactgccttacagaaatatgtttgggccattgcgtcaaagcaagacaacctatgggtttgttggattcgtagtgtatatacttaaaagagaagagttggtgggactctataattcagctgcttcggggagttggtattggaagtagattgtcaagatcaaagaaaagcacaaaggtaattctgcttttcttctactaatgagctagggttatagtattaagaaaggatatgaactactcatgaaagaggaagacaaggttggttggtgtaggaaggaacatattagtttccttcaatatatgtggagatgatacttgtcttctctgtggtgataaagtggagacaatggagcatatattttttgtatgtttttacagtggcaggtgccttggtttgctgaaattgtggctgcaatggaggactcctagttgctccttggttcagctgctaaagtggatataaaaagcgagaatatctcggttcaagaagcaagtttttgcagcaatggtaacatgtgctgtgtaccaaatttggtgaaatagaaatgattgttattggacctatagagtacaaactattgattcatgtatacaaacaatgaaacacaatgttgaaaatagaatcaagagtgttaggaaaacaaaggctaaacaaaaagacatggtgtggtttgattcattgtaaataattagaagattggaactcttgatgggtgctgactagtttgtaaattgtattattttggaagtaatacaattttatctgatttatcaaaaacatatattttaaataatataactaataaatttactataaagtataattaattagttgaattaacgtctaattcaaattttattttgttaataattttatattaagtttaaatatttaaaactatttttttttaaaaaaagataattagttaattgatttaacgatgttagtttaacggttaattttaaaagataaataaaataaaaaaaccgttaaaccaacaatttatattagattagccatgttcaatataagagagttatataaattatttgtaccttttttgttgccatctccaaacaaaagcacagaatcggtagaaggaagatagtgaccgggttgctccaaaccgccgagaaagtaaccggcacaacaattagctgaaatatatgtaaaaggaatgtttgcttcttcaatggcttttctgacttccattttgtcatcaaatactactctttctgcacccattgcattattcttcattcgtgctgggtcagttccaaactcggatgggagaaacctctgcacttaattatattttcattcatttattattaatctattattttttttattaatggcaaaaaataataaattcgataaatatttcaaagtgaaaatggtatgaattaactattaacaaatatatagttaaaaaaaaggtcaattgaaaaaaaattggtgtttgaagatgaaaaaaaaaaaataatttcattaatgctgaaattaaaataaatacattataaatatgtttacatttataataagaaatattataaagtctatttttatatttattagtaaatatgctatataatttagggataattacataaaatactcatttttgtaaatttatatttttacgtttaaagattttttctaatatttttacagtattctataaaaatatataaaaaaaaaaacatgaaattaataaaaaaaacaacaacaaaataacgttaaaacaatgcaaaaaatattatacaaatgacaaaaaaataaacaaaaaaattataagagtacaacatataaaaatacctaaaagagtgtattttatgtaaataaaatctaaaaactgtaaaaatgttgaaacttccgtacaaaccgtatttttataattttttttttgggataagttgagaactaccttttttattataaatataactacaaaataattttaattaataaataccctctttgattatcaaggtacaaaatataatctcacataacttataaaaaattagagtctttaacgcacacaatgaggatatatgacttataaaacttggtataaattaaagagtaagaaaagaaaggtaaaaattaaaataggatatgaaaagtgggtatggagtctaatttcctctttttttttgttgtttttgtatttttttgaaattattgttagacttttatttgggcttacattatattttattggttttattaaaactt

SEQ ID NO: 37623 - DNA, 3085 bp, Cannabis sativa
ttttttcttaacaaaataaagaagaaaaagatattaatgttaagatgagcaattaaacaaggatatttttagctctattgttgaaataattggtttgaaagttttacaaagaaaagaaaatcaaataagaaaagaaagatagagtaagtgatttattattaatcaactatgttatttatattattaagtatagaccaaaatatagagaaaaagatatatattttagattggtacaagtttttgttaagatgaaataataaggatttttaagtttattgaagtgttgtaaactactcacttgactatagtataaactatgaaactttcatttattttttcttcatgacaaaataatgaagaagaaaaatactaatgttttatgttgatttgtattgaagatgatctattgttgaaataattagtttaaaatgagattttaaacaagttttacaaagaaaaggctatgcaactttggttcatttatgagatcaaagttattattattattattattattgttattgaaaggttagttttggaaatttattatgttgtatttgtttttgtaggaacttgaagcacttacagatcccatgaggaaagatattgcagtgattcgaaagaaggttgatttgctcaacaaagagttaaagccattggggttgagttgccaaaagaaggtaaaaatttaatattacatatgaaataattaccaaaatgatctctttttggtctattttcgattaggggaatttttatttttatgatttttaatgtataaatttgtaaaaatataatttttttcaaaaaatattactttatgagaagattttagaaaaatgttaaaaaaatatgaaaaaaaagacaaaaacttagttacctatttatggtaattggttacccctattacaagggtacttagttatctttatttttttttattttcctatttttcaattttttcataaaataatctttttaaaaaagaaattatatttttattgaaaaagaataaaaatctataaaatttataattttctgttttgattattatttgcaaactggtagtgaccaattatttaaacttttttaccactctctttgaaaaaaaatcgactagctatttatagtgtcgaggactatttcgcaatgaattatcgaaaccagattaaatataaaatgaattcaaaaaagtcattatgcctactttaaagggctttcttttcaaaggttattttatctattatcatgataattcacaatgctattgtttaaaaagaaaaatgagttgattaatcatgttgatagcttataaatcaagtttataaattgatactttcataaatttggtcatttctttagaattcttaaaagagatggtatgttccaattttcacatatgagaatttcatattctttctttgcttctaattcatttcttttcttctttggataaggactacatttaattatgtatttccaattctagtgcagtgtcattcttaatatttatgaccatttaatattttctttattttgatggagtgagtttattaaaactatgaacttggcttcactcttactccaaaagaatgtgaccacaataatatatacatataattatttttgtagctaaggtgatcatttcatatagtacacaacaatttgtttcatccaaattcatgagtgcaattacttctcttatgtatttaatggttcatcatttgtcataatagttaataaataccccaaataattcctagaatttttcttttgttttatcaaagaaaaacaaaaattaagatcttaattcttcattgcttgcaggagaaagaatacagagaagctgttgaggcttataatgagaagaatagagaaaaagctcaactagttggaaagttgatggaggtaaatattcatctttacctaaagataaaatataagaaaaattattacctataagaattgctaaagagttagagtattaagtgatacccaatactacctaaaatattacagtgtaattttatatcgaatcctacatatttttcataaaaggcatgttagagagtagcacaactttttaaagtaatgataataactagagtaattcgcagtgaaactcttttatattttaattttatacacttaatctcctaatcattttattttttgtagcaatacccccttaacttcgtttttttaccattaaatactaactgaattacctgtgtatacatatctatatgtggcatgttttcattagcttcgagcttatactatcacgtctcatgtacacaagtatatatagtagcaattccaattggtatttaacaataaaattcaactagcgcctcaaatttgtaaaaaatattaaaataacaggatattgccatacaaaaaaaaaatcaaaaagttaagtagttagaaattaaaacataaagaaatttcaccatcaataaccttaataactattatgaataattgataaatactcccaaaacactatcttatagtaatgttggatggatactactagtcaatgttttttaaaatttcttcataatctttgtctgactaatgtcttttcatttttttggttcagctggtgactgaaagtgagagattgaggctgaataaactagaagatctaagcaaaaacataaaaggtctcctgtaaaatatcattgaaaaatatatatataaccatattgggtttgtgtgtgctttgtactaattagagctacttattggtttgttgattttttcttcttcctctcttttttcacctgatattgatttctgtcactgtaatttgtatttctttgggtaatggagattttctcatctaaaaagaaaatgggtacccttcaacattgattgtcagttattaacacttccaacttcagaggatttgcaatgttattgtatagtgttatcatagggtgtttgtaagtgtttcatggatatgaaaatttaaagtgaatttctgattgttgtctctgtattttcattaccctaaattgatgttattattgtatagtgttattaagaaagtttatttccttgtgatgttattgtcaaa

SEQ ID NO: 37624 - DNA, 2106 bp, Cannabis sativa
ttaaaaaaattctaccctacagtacaaaaaaaaaaaaaagtgaaaaatttcagtatgtggtgtaaaaacttcaaaaagaaacctctttattcaaaacagccaaaacggtaaggcaactcgacgattaacgccgccaaggcacaattcgaaacaccgcctatccacaggcaattacaagaataggaagaagcatccttaaattttaaaaacttaaaattctttatcttaaaatttggtaaaaagaattgtttgtgtgtcaccctaacaaaaattaagagaatacttgatgagtaatgattgtcataccctcaatttacacacaaaattacttactatgatgtgtacttaatcgactttacaattaaataattaaatgtgatttaatttttacttcaaaatatatatattataatatgtaattatagtgtgtaagttaagaatgtatgccagtactatacattattaatttttttttttaaatagtgaagttatcattaaaataattgaaaaactcatctaattaggttttttttttttttccattcttgtacaactatttcataagagatcatagaataaggatacttttaaaaaaaaaattattaagtaaacttgcaaaattatgaagtgatcatacactggtataaacataatgccaaatcataaaaagccctaaaactataatagaaaagctgctctagatttttcgcattcacaaaatccacttgaattataagtgtccctacaaaagtaacaaaaaataagaatccatcaaattaattttaagctaaataaattaaaaactttcataaaaattataataaaaaaagaaaagaaaatgagaatcaatggtatgatattgattcccaaataattgtttattaaattttgaaagagagacagtggttctcggaatacattttcttttcataactcatcttattttaattttaattttattgattaaaaaaaatatgccggccctttaaaatttataaagaaaaaaataattacatattctaataatatcaattttgtcaaattaaaacattttaattacatttcctaattatgtaaacaaaataatattattttacttttcttttggtacagtttagtaaacagcataataaaatattatttcaaattattttttattttaaatcgattcatttctctcattgattagtctgattccaattacagtttaataaatacgaatctccaaatctctaaagagaaatttacgcacagcaacataattttaaaataattattataaataacggtgactgtttaattgtgtcaacctaccgaactttttttatttttttttgaaaatgtgtatatacatacttacccagccttagtaattagtattactttttctctctcaaaagtttaaaaaaaatttctagtcacactgataattgttgagcttaaaaattatattattacaatctattctttgaggtgatcattttaacatctgagaagcaaatattctttcgctgtcaacgaaaaaatataaaaaattaaaagtaacttttaagtttcttttaaatttagttaacaaaaataattaaaattttaaatttaacactttatttttttagtagttgttttgtaaccgagttatttattgtactgagtagtttattttgtatgtatgtttatttgttatttaaagattaaagtttactgtatagttttctaatggaatgtatatatatatatatatatatatttgttattttaggttttctagtgtgttttttatttttaatgttgtatgttattaaaagtttatgatttattagtatttttggctatagttttggttggtatactaattagtttctgttgtattagttttatattaagtagattttttttaggtttgtgcttgatcaatgtaatattgttatattactttttatttttatgttatttacttgttagtttctttttaatgatgttatgggtaaatatttgcttggggtatatctatgattaagtgtttttgatttgattaagtacttatatatatatgctattttctgagttttgtgccttaatgcccattttcttgaccaccatagaaac

SEQ ID NO: 37625 - DNA, 1755 bp, Cannabis sativa
gtccctacaacaataaatatttattaacactttttatagtgtcatatcactattagtggaatatcgaataaatcctatataacttaaaaaaataatttttagacaaattgctaccatagtgctaaacactactgatactagatatcaatactgaaaatattattgtagaaaaacaattccttaatatttttatttattttgcttgatttaaattgaatgaaagaacaaatggaacccttttttcttttcttttctttttttaatatggaagaggaaactatgtttttccatgtacaagttttttacatggggttatacaaaataatcaatatatagaacaaattaaatctctaaaaaaaataaaaataaaaactttttacaaaatacaaaagaatttaactggtcaacgccactgttgttgacgatgttacaatagtcgtagtagtagtagtagcagcagcatttgtggcattattaacgccgtaactctccgttaaatctccgtccaaacccgccgcccatcttctcaatatcctcaataacgtcgcagccttccgtctacccctagacgaaccagtccccataacttcccaaattaccctttcgattcccgccacacccacaagctccgccaccatctccgccccacctttccggcaaatcgtaaccagagtcgcagccgagctctctcgggctcgctccgacccgtttctcaaaaccgacccgagtttctttatagcactgtaagctgctgcaatggctaacaaaccacctctcttaaccaccacttcgattatcgtcacaccttcctccgttaaaccctcgtcgatcgcctgaacggagacatccacaactccggcttccactaatcggaaaacaccgtctctatcgccggctaaattcaatatcgctgccaatgcgtctcttttggttgactccggacccgttttggctaattcgagcaatcctttcacgacacgtgtcttcctcacgagtcttttcctgtgggcgtgcacactcgataaactgaatatcgttgcggctgcgttacctttagcttcccacgtggcacccgtgcgaagaacctcaacgacgccgtttaaggctccttcagtttccattatacggttcttgttctcttcgagaattgataagttgagaattgctgtaacggcgttgacttggaggtttggctgagccgagccgatatcgggagataaataacggactaagaaaggtacggctccggcttcggctacgcagattcggctttcggagtcggttttggcgagtgctcgaagctcgtaaacgacaccgtttgcgtcctcaaacgattgggattgagataatttgttgaccaaaaacgaagccgtcatcttcgtggcttccaaagccgccttgtttattaatgcaaggccttttggtttgtctttactctcagccgtttcgaaaggaatcttctgatcacggcaccacatggcgataaggtttttcaacgcgcagttggggattaactccgtgtgggccagggtctgacctgtctttggacacgtgttgtgtcctgattcgatccacagcttgattgattcacgatcgtacgtctgacctgtcgccactactactgggtcccgcatcagatcgagacttatcggacaccggaaatctgacggtacaggaatttccgatgccgattgccggcgaatgatatcaggctgaggagtcgaagcgccgaacaagacgcatttcgtgtagcga

SEQ ID NO: 37626 - DNA, 2347 bp, Cannabis sativa
  modified_base (2319)..(2321): a, c, t, g, unknown or other
tacttttggtataaatatgagtttcagccctaattggaataaacaactgaaaaattatcattcagtttctttttctcttttcattttcttctttaagtactttacaattttattcataatataataattctaggtaaggatcctagtatcctacctattaggttgattattatgctaatactagaattgtcatgtgtaagaaatcctcaaaatagatattctgtgcaaggagtcccaaaaaagtacaggaaataaatttatgacaattgctttttgtgttgaggatgaattctaataaaaaaaaataaaataaatgaaatccactaacaatataataaatcataataatggcccatgaggatacgcacaaaatctttgcctgaaaatatgtctaatttggtctacatgtgtggttctatgattaattattacaaattgattaacagaaaataattaattgatatagaaatggactaattaatttcgtttggctataacacaaagctagtcttctcgttcctcttattatttacaaagaagggaacatgcatcaaaagcatacaagtatcttataatttgaataaaagtatttgatgtaatttctttccaactaaaaagaaaaaaaaaagaaaaaaagaaagattccttgctcttttacttaattaatgaggtaagatttcttctccaaaaaaaaaattgtttttatgaagtccggtttgattttatcaacttcatcattgtgataattacaataattctacagtgagatattttgatttgatatattatttataagaacattgctattagataataatggtacttaatactttctcgacatgtcgcgatgcgattgactagcgatacttcctaaaattaattacattaaactatatagaacctgatatttaactgaaccattagcgatattgacaacagtagagtacgagacaccgttagtgtcttttaatattgctttatttttttaatggagatcgttaatggtattcattgctgaaaaatcaaaaagaaaaaaaaatacattggtgtaatacattacatggtgtatgaatcaatcttttgatcattagattcttttgtgtaatccctgtcaatgtctccgccgcatgttgctttcatatatttcttacacgaattctgaacccaatgtcggatagatccgaaccaattaaaatcatccaaatcataaagatcattttctttaattaacaaaataatgtcaaatattattaattagttattcgcaatatgaccaaatcagtaaaccttcctacgaaaaattggcacttttcaagtcgttttagataaattgatgagaaattataataaatcatctcaaattatatgaaatgtttttattttaaaatttgttaaaaataatattttttttatactatttattatttatagtctttttttattacataaaaaattcatatcttttaaatctttttttaaaattagaactatatcatttaaatatcatgatatgtttatagtaaaattactttatatactatttttttttaaaaaaaaaaaattacaatttaagtttctcaagaggtttctttagtagtttctatgtgggtcgctatacagattttagttacgatttaggttgctctcttaattacaataggagtttttatatgtaattccataaaaatacaaaaaaaaaaaagttttgaagcgtaaaaataaaaaagccccatatttatattagttttgttaattttttatttatttaaagttatattgttttttttttttatgggttgttgtaggttgttggtatatatttttgttgtacacaatatatttttttttttgttgtatgatatattattattcttaaataatttttatttttttattttactatgtataatagtgctacataattttgttagtataatacatacatttcagtgtaggtatataattttattagcataatacatttatttaattattaattttataattttaattatatgacataccatttcttttttttaaatagtatttaattagtttctattttattatatataatagtgatatataattttgttgtcataatacatatatattaactccagaatattcctactaagcttcctcttcttcaagaggagcacggtggaaaagagtaaaagtctattatatttatatttgtataaacagtcaccggccgttgagcctaataaaactgactcgtagactaagcatagttaacgcctgaaccacgtaaggcattaacttcgcaggagaggtctctgttgggttttatgcccnnnataaaactctttacaatctgattagt

SEQ ID NO: 37627 - DNA, 2934 bp, Cannabis sativa
cttgtttgcactcaacatgtgcgagacatgtatcgtgcctaacctttgaacttatattcctgcaggcgcgtttaggctgacttgctagctcggtgtgccagcaagtgctacacgttccacctatttgggggtgtccaaataggcggcccatgacactgagcaaggggggtcttgcccttgtttccctactttagggacatagccaagttcttcaggcggtgtccgactcagattgctttgaaaggcatcaagtaccttttggcactctttgttatgtatgtagagtcaggtttgtcgcagccctcaccttacgaggtgagttactatttttagctaaaatctacccctaagcaaggtaggtatggatacatttaccttagccagctagggtatcattggcttggaggtaccaacgacaaggccatgtcaaggattgggaagtactataagagttacttcattgcttgggatgtcaaggacgtacaccattacttttgaaaggtcataacttaccttcgcccaattcctaccctcaagccgagggacagagctaaccatattctgtctctccctacaaaaaggtgcaacatctgcaagttttcctagaaggagaattttagaaagtatggtttgtatccttctagacaagatgccaagggcgttggaaaccctcctgaggattcagataacactcctgtgatgaaggaggttggaaaaaagaaaaatcaagtgcctgaacaagaaaaggccaagtctgatgatgacatccccttggccaagattgctcgaacgataaccagaagggagcaggccttttggcaacgcctagcatgggaaggcacaattgatgatgcccccatattgatcaagcctaaaagataagagtttgttagacctatctagccaacacctgcatctagagacaaaggcaaggctattatttctgacgactgttatgatgagtcctcttccaaggatgagaggtttccagatcccacttttgactcttgacagtagtaattttcttacttttacttgcatttgttatttataacttgtattctaactttgttattttcttttttgtagatatggcttctaggatgagagaccttgtgaaaaggtcctcgggtggctcttcttctggtcggcctcaggctaaggtggccagaacatgtgggtcttctaacatgacccagaccagcctgcctcctcctcctttaagtcccccaccggccaaccagtctatggttatggatcttccttcgaggatcactccttctccttagagatcatcaagcaaggcagcccaaaagcaaagtcaggcggcctacttgaccaagggtgagagggaaaaagaggtcccacagctataatggcaagtgcctgccaagcattgatgagcagctccaggagttggatgtcgacaccctagattaccaaatagctagcaccctttgagatgctacctctataagttgttattacacttgtcttactgatacttttcgtacaacttttttgtatagcttttttcactttgcttcttcttggtttcaggtactattgaagcttagccacacccatgctagggctaagggttttgcgatgactttcaggaaaaaaacttaagagcaaggatgttgaactcaaggtaaaagatgatgagcttgcagaggtgcgggttaatatgggcgtaacatcgacccgtctgagggaggtctaggaccagtatgatggcatagctcaactgctcggtattcgtaatcaagaggtgacaaactttacatctgataccaccaagctgaagaaggagttagagatggagcgtagcgagaagcaagtggcccttaaggagaagcaggaagctttggatgagtttgttgaattttccatggaggttctttatgaggtatttctccataaccccaacgtcgacctctcatacatggattcttctcttcgtgagagctggcttgctcgaggtaagtagttgtatgagagcagacctccagtggaccaagttggccaaggtgatgaggtgctagttggcaagatcccaaaggcacctaccgactagcttactggagtgctagctggccagcctgtggatgagataccatccgaccagccttttattggtcagactatagaacccactttagaggccccaactgcccaggctaacgtcgttgttcaggattcaaccaatttggattcgcctactctcttcattactcttgaggacgtttgaaggcttatgttcatttcatgcttttatttcacatactttattatttatttattttttttttttttttgttcttttatggcctataggccctttattttttaacaatgttcatgtatggccttagggccttttacttttgaacagatgaccaacaagacgatctttaatcctagctttaacttcttttgttagacatgtagctgtctgaacttatgctctttatgtctaatctgaagtatgtcactcgcacttagatagatttcaatttttttcttaacaaagctttaaattttgcttaagtttagttgtccttgtttgatgttatacgttgtgggtgccccaagtgatcgagcagacttatggtctcttggtcacttgcaatccaccaagtactatagaccttttcctgtgtattttcttgaagggacttgtttgtacgcatgtggaactaaaaaataaagattaactttaagaagttaacctattagcaaattgtttgacagaattttgaactgaaaaaatatttttattcattaattggtcttacatatgtgttgttgttgtgcaacatacaattttttaatctaaaagcttactgattacgcccaaacttgtcttcacaaagcggttgttgtagtgtagtatgggcggtcgtatccacagagagatatcttatcaaa

SEQ ID NO: 37628 - DNA, 3452 bp, Cannabis sativa
tatctatatgtttatattaaatgtcactatataacatataagtgtggatgttaaaatgtgtaacaaaaaatacaatgtatcttcaaaatttgatggtaggatttgactaaaaggctctatacattgagagagtaattttctttgccctagttacaaatttggtttaaaagtcttttatcattacaagagtttttttggcttcattaacataaaagatggcagttttagtagttaaaagtaatgataaattttgtacctaacataatttaggtacaaaatttaatgtatatcaacatcattacatgcatatgtaagtctaggttaattaccttataattgacttttattatatattaggctataatgagtatagagactagagggattaattaatgataatgaatgtaattaagtgcttgttaggtaacaattgaataattaattttttgttaagttaattaaaaactaaaataagaagtatttacccaaagacaacagaggcagaagagttagtgtgagaagaaccatcgattgtgtcaaacgacaacaaatctgaaacataaaaccctgtcgttgtgcttccatctccataagtaaaagtgtaaatacatcgattagagtggaaagaacaaagagattcttctactccaactccatctttacacatttgatttgaacataatatcgatgaagatgtattcgaactctttggatcataagaattcagctcaatctgatcatcgtcattaaaaattcagttaaatcatcgtcaacaattaatattacactattatataaaactttaaaaactatattctttctttttataataattgatcatatttgtagtataagtaattaaagttttaagtttataagtgaaataaatctatgattatatcaacaacataaatatttattattagtaaaactataattttcatcaagtcctattagtacatactttgttacagtgtcttaaatttataatcaaactttagtttttgaatttgttgaaagaagacttaaagtaattgatactacatgtttctatccagatttaatgatatagaaatgagcttacacttgtaatcaaacttacttaaagtaattgatattacacttttcggtccagactcaatgattcaaaatctacaaacactaacaaagtctgtactggtgaaattggaaaaaaaattacaattttactaacattgaatacttatactgttaaaaaatcataaaatttatatctgttacaaactcaaaaatttaagaattttttatactacaaatatctctcaaaaaattaatgaactcacatttaagcttgtaaatagtgggcaaccaatacatggaaaaccgtagagccaaagaacatcacttcctgtgtcaatttgcacatggtatttttgtggaggagaacccaattttatttctgcataataaagcctaaaaacaaattatcagtttaattcttaaaaaattaaaataaaaatcaatatatatatatgtatatatatttatataatatcataccctacttggcttgggttgaatgttcctccaactggaaagttaatgacactattattagtgtcttgtaactttctaccatgtctgagctcgtcacgagctctgagttgtctcagttcaattaaatgatttggtggaaaagccctttttaatgtcatcatacttgaagaataatgcaaatcatgcatagttgttgtcgccgttgtgtgtagtagtgtcacgacggtaacggtaactaaaagtaaccttagttgagaattattcattcttgtattcgccgtgtagcttagtgtatttatgtttttttttcttatttttgggagtgagataagaagagatatatagagatagagagatattgggagaggtagttaggaggaagattatgactttagaaaaagagattagtggtaggttagggaagggagaaaattcttaaccactactttaacataattttaaaataaaaaacgacgttgtgtattgacttttttaactattatttatgagtattattaaagaaatgatatttttatttaacattacattaaatattatatcgttatttgtgcaatttaattttaattttgtttcttattaaattttcaaaaaaagatgaaaatggtcgctaagcggtacttaaattattagcaacttttatgatctaaattttagaatttagagaataaacttatacttgtttaacataacaatagaatgattaatgaaatgtgttgcatcaaaatataatgcaaaataataaatatgattggttcaaagaaaattgtcataacactacaattaatattttgtgtctatacaacaccaactttgtttttgctgatgatctctagggtttttctccagaagtttttagtcgctgtttgatttttttgcctgaccatggcttgtgagccgtttctcgaccttatggcacgactcagatcgggtcttattgattctcagatttttttcgattttgctggggttatcgctatcattctgcccgagcgttctttttttctccatcttctttcttcaaaggtgtcttggagacttgagttattcattgactatggattgaatcttcattggtgtaaattatcttagagtattatttatttgtcttgtgttttgtttttttatatctatatttattttgaataatagtgttgatacacaccttactattgttatggtagtatgactttatttatatatgacaattttagtctcatttctactttttagaatattaggagaatctcaacgagctcaaaacatatttatgttagtatcatgacttttcctatctctatttagatcacagagattcttaaatttttattagttccataatttatggtacaactgtttgttacgattgttatcgctacgattggtcatttagttattttattttattctatattgaatattcgagctgttattacccattttttattagaagatctttgactgatagtgattgataaatgtgttttgtcacatgttcatttagattaaagatctaacattctttcagtttgcacttctttgatgcttcaacgttggcgacttttcattcctatttttgtaaaccgcatggtttatctattttattgattctgctcattgagtaatatatcatcatgtaatagattattgtcaaattttcctattaataatgaaaatttccaatttactttcaaaaaaatatattttgtgtttatttttggtgcattattattactcaatataatcagaattcaattttttctagaatacagtaattcattagttttgacttcttttttcttttatattttttaacaatttttttgtaagagtttttttgaacaaaattgattgttaagataaggtattggcgcaagctggtaatcataaaagataag

SEQ ID NO: 37629 - DNA, 3604 bp, Cannabis sativa
agaatttgaattactacaattcaagaatttgtcttctcaaataaaatatagtgtttgtggggtaactctctgcctttatctgggttagatatctatcttatgtgatactaatgatgcttgtatcttttatcattgggcctaaaacattcataagttgataactacgcactctggtagctaaatgggaaatgccttctataagacttgaagttgatacatgcctcgcaatttggtacttaaataagaaattccttcgtaggactcacaattgatttgtccaaggtaatgctctactaagtcaccatcattagactcaatccctcaaatgttgggataataatatcgctggcaatgaaagaaaatgcttgagagcatagtttatgttgatgagtcactacatgaagatgaatttccttggagttttttttaccctaaaagtactatatatcttaatgtgtaattaaagggttaagaaacatatgcacattcttttaaaaaaaaattatcttatagattagagcttgttgtcgtcgtgatgagtccaaatacagtatgttgttgtaaatgaaagaactttaagtgttgtcgatgcatacaagggagaaaggtgttttcattcaagttaattctttaggcactgtgagaaacatatcataattgactattccccttgttcctaggtcttcttgatttttgtgaaaagaattcgggtctatgtggttcggattttcctctgtgtgcattgctaagtccctagttattatctactcatggccctttcagttgcatcgtcatttgctttcgtatccttgttgtctaaaatctcagttgtttatagattgaactacagtgcatgtaaatcaaatgaaattaccaaattggtttcttgagacaaaaaagaagttaaaaaaattataatatttgaagtgtgcttatccatttgttaagaaaggtaatgtgatatgagtaagagtatagtttcattaatgcctagttgaaaatgactatgctctggtaatgttgggatactaagtgcatctcagcatagtttatgcacactaatgttagtaataagtgcattgaaacatagtcacttgaattagtttcattagtgtgcttatccatttgttgaaaatgcttgagagcataatttatgtttacgttaaaaattgtggtttgatgggaaatcacttgaatttagttatccaataaatgttggccctgagcttgcttttctcgattgatgtgtatttttgtataaaattataatgacattgacatgactagaagtcaagtagctaaacacagatcagtacatgacgagaggagctggtgttaaaaattttggttggctagacaatcgttggaatttgttattcatgttttgagttatattcatatgtcacattgttgatgttgatcaaataaaagtttttctagacctagttttgtggttggtgtatgttacacttcattgcttaagtttagtggttgatttagttttgttctgccaattgctaattttcagctgttcattctcaagaaaaaaaatgcttatcattaaataatacttacattttgcaggaaccacacagagtgcgtataaaagtagcaattctttgagactttcgaatctgactcttcccacaaacagcgaaaaatccacatcaggaagtcttcccactcctaggtccgaaggagaaatattatcatccccacatttaaaagcatttacattgaatgagctcaagaatgctacccgaaatttccgtcaagacaatcttattggagaaggtggttttggttatgtttacaaagggtggattgatgagcacaccctaagtgcttcaagagctggaagtggaattgtagttgccataaagaagcttaaaccagaaggttttcagggccataaggaatggttggtaggttccctttattgtttttaattgtcctgtaaagcagtaattgaaaacattttacagtttagtagaaagccggtaaattttaaattaatatctcttaatctgtaatgctggtctggttgcagtcggaggtgaattatcttggtcaacttcatcatccaaatcttgttaagcttgttggatactgtgttgatgggagtaatcggcttctagtttatgaatatatgcctaaaggcagcttggagaatcatctatttaggagtatgtcaaactttctttttttccttttatagcaagagcgtttataattaatgtgcatgctttagctatcactctgctaaaaaacaatgaagaaaattgcaagagcgttccatttgcaaagaaagatactttatggcaacaatagttataatctcttatctaattaataattggcacactcctacttgagttatcaatttacttatcccaataaaaaggaatgcaagctagtatattaattaatagattactggttctttctgcaaggaaatgtaaatttctttattgggtgtgtgtgtgtgtaatctataaatgatctatttgcacttcacaggaggtgccaggccactctcttgggctaaaaggatcagagttgctgtagatgcagctcgagggctctccttcctgcataattctaaggagcaagttatctaccgtgatttcaaggcatcaaacatcttattggattcagtatgtcttgttaattattagtgtatgaactgcttcctttcgaatgcacatgtcctgttataatctatgtggggtggtggggtggggttgggtgatggacaaaagggagcaaataatgagaaaacacattctaaggttgcgtttggttgggaggaatgaaaacatagaaataagaataagaatggaattgaataaaatttaaaataaataaaaaaaaaaattgataaaaaaattattaaattttttctcatcttgcattgcaatgaactctccttctattcaaaattgagtactcattccattccaatactttaagaatggaataaaaattgattcttttccattttattaccgccaaccaaacgcaacctaagttccttcagtcaattaatttttgttggtcaggtttatttgtctttccatatggaatgcaaggtaattccagctggctgtttgttttttttttttggatggaaatatttattgaaattttgatgatgaagatcaacatttgtcttctttatgggtaatatattttggaactttgagtttcactacactactctcttgctaaggaaactacggatggccttttctcttttattgttcttcgcttgaaagacttgttatttactcttagattctttttgcttccttcctttgaaaagatatgattggattgtatttgtaataataggtactgttttgtgctcagtaaaaaataaaatgaccccatcagatattcacttcttttcctgcaggcagtccatgtaatttgttttagttctaatttacgctgtattgtttcatttcattaggaattcaatgcgaaactttcagactttggtttggcgaaatcaggccccactggtgatcgtactcatgtttccacccaagttatgggtactcaaggctatgctgcacctgaatatatggctacaggttct

SEQ ID NO: 37630 - DNA, 5749 bp, Cannabis sativa
tgcaaacgcttacagtttttatattttcgtatatacaactgacatttgcaaaaacacggtttttttttttttcttgtttaaatttagggtttcaatttcaatatcattgaaattataagtgtcaatggtgtcttgtatttttaatccaaagttgtagtgttggtatttattatggcttattggttttatgatgtacaaacacaaaatggaagattgtgggttggaatactctgatgaggagcttgaagaacaagaagtttgatatggagaactaatattgttaaatattattatatgaaaataaaacatatacactcaatttgcaaagtagaataataaaagacatatcgagcgtatatgtgaacgccaaaagagatcgtaatacctccaggtaattaggtattgatatttgagattcaattccaatgttgcttcaaattggataatcgggcttccaagctctctctactctcttagatagaattttacaatttcgcacaaaatgagtgagaagtttggagaccaagaccttacatttatatttaatacatgatccttgtattacgaccaacttcaagaaccttgtattacaaccaactacaagatccttgagatgttgaatgtttattgaaataacatctcgacaatgttgaaatatctcagttcataaatcttgtgattcttatttatattaggtcgcctcataggttgagtcctgagtttattctacctatcccacaatgtacttgttgggagaattattatttatgtcacgtgacatataattcgtcttaattattaaatagtcccaaaaaaaataagtataacattatatatgaattaaaatttaccttaataaatgttatacccatatttcaagcaattaatatggtaatgacacatattaaaaagctagaaaatgaaccaactcgtgttataaaataataaatatgttcaataaactcgtttcgaaaaatacaattggtaaaaatatttgaactcaccttttcaaagataagggcgagatgtgaataataactaccactttatgagaccagcaagatgaacaaccaacgtgaaaggtccatctcgggatacacaaaatacaaagtagaacgacaatgcttagaaagggtagataatgaattcattaaagagcttgcagctcattgacccacatactcataagtatgttgaaagactaagggaagcagtcccagtacaattcatctcgggattgtcgcactataatagtatctcatgtttgtttctctcaatatatatagaaggacacgagaggtactacccagaatgtacttaggcgcagagagtcgccttcagaataaaacaactcaagaagattatttgcattgcaagatgaataagcatagtcaacataactatttatagataaagacaaggaacaattatgcaattattttattatcatcccatgtgatgtaaatacgaaacgtgggactgatccacgtttcatgacagttataaggataagatcccaaggaaatatctgtcaccctaaaactctaataaataggaacaaaacctagggaacaagggacgaccaatttgagaaaagagagaatcatacaaatattttcttgtattctgtatatgatttataaaaatcctaaaataagatgaactcgtggagtgtgaagaattaacttcaaaaccatgttaaaaaacttgttgtcatttattataattattatttatttaattctagagtgtatttattacttcaaggctcattcattggttaacgaaaatatgcattaacagtttggtgcttttattgagagccttgtaagaaaaaactcagaaaaataccctctctgaaatatattcaaactttctatccatggcagacgatactcctcgaaacgaagatactcaaccaggaggaacaatataacgtccaggaaaagaacatcaaaatccccataggacaaatacgactgagactccttgctcggggggaaaaatggtgaagtatttgagcaaactggggaggagattccagagagacgtaattaggacgcttatgatcccattggatacatgccattagtagaattagaaaatagacaactctgacatcgattggcctaatcgaattagagaaatgcaaagttagagcgtgaggctgctgctatatgggctgcacgtagtgatgcacctcctagccaacaaaacaaatccactaggcgaccttatgaaaggcctagaggctcaaggaccagaagacatggggaaattctaagaggtgataactacgaaattcttactaatccctaggatgaacttcagggaatataagggatattcaagtggatgatggaggcccccaaaatccaagaaatactggcattagagaaactcgacccaacgatcctggaacttcccgcggaaagacaaatcatgggaatgtgcatatacttgaaggtcagtgagagtaaaatttgtttttttattttatatgtgagcgatattcttcttagatccaatgataatgggttgttatgtgaagtaaaacaatttctttcaaagagctttgagatgtaagacatgggtgaagcatcttatctcataggcattaagatttgtagagatagaaattcgaggcatctcttaagtttatctcaataagcctatcaataaagtcttagaaaggtttcagatgaaagattattcaccgagcgttgctcccattgtaaaggggtgataaatcgaatttgagccagtgtccaaagaatgattttgtaagacaagaaatgaagataattctatatgcttctgttgttaagagcctaatgtatgctcaggtttgcacaatactcgacattacttattctgtcaaagagttaggatgattttcaaagtaacccagggataaaccactagaaatctttaaagaaggttatgaggtaccttcaaggtactaaggattacaaactgatgttcaaacgaaccgacaatctagaagtagttggctacttagattcaaatttcacttgttgtactaatttatgtaaattaacatcaggttacgtgtttatgtttgctggtgaagttgtgtcaaggaggagcaacaaacaaaccttagttattacttctactatggaggctgagttcgtttcttgttttgaggctacatcacatggtgtatggctaaagagtttcatttcaggccttagagttgttgattccatatcaaggccattaagaatgttctatgacaattcaattgttattttcgtggctaagaacaacaaaaatagaagtcggccatccccgcttattccccaccggggagcggggatgggacatggacggggcgaaaaatctcctaataaaaaaataaatttataataaaaatttaaatattaaactacataaaaattaaaaatattacacattaattattatttaataaactaattattatccaaaacacaacgtaaaagtcataaaaaagatactaatatacttaaaaaatacaaacataaattataaattataattagaataaatataaaataaaatactaaacgagtcctgttaagacggagagtgtgatccctgtccttgttcctgccccgtttaacactactatgttctccatttagacgaaaatcccgcctcattaagggcaggttcccgtgaggtccatctcatggggaaatgtgcatccctactcttaatactaatacttttttaaaaaaaaaaaaaaaaaaactgaagaaattaataaatttaaaaatctcttaaattaaatcatgataaaagtttcaagtttctcaccaaccaataacattacatttacaatgataataacaaaatgaaacaacaaaaccatgataatcacaagaatttgatgggagtgaaagtgatcattccgaaccataaacgctagctaataccaatcaatacactccaaaataatgaattttctgtttgaggataacaatcttagtttatttaatcattcaaaaggattgaataatctgatgaagaacatgatgagaactccaaacaacatcaaacctcattgatgacagagtctatgatctgttcaaataaattattgttggatttcaaacgagtgcaaacctttgcatcgctataaatttttcctggtcgacagaaataatctttaccaggggcacaatgagcgtcctctgtacacctacacaaaccttccaatgcacaacccttcttcactatacttaacccatccttaattcccaaaacttggtcactccactcacttgagaataattccaaagggtcataagcctttttaaccttcaaaaactcttgaccattcttgtacttgtttaaaactccttcaaaagctatgttcctgttcttcccccaatggggcaaagctccatatttaaacatagccaatttctcaatttcttcaagtatgtcttcataaagtcttggaaccaatggatctttgcttcgataataagtgatatcaaaatcaattgcatctccatctttacccaaataagcagttgaggccgtgacataacgcatgagaattccattgtagcgttctatgccacataaggcctttggttttaacttgacaagtttttgaacatcttgaatgaagctattgactaaggacaaggctacactaaatgtggtttggtagaaaaactcacccttaatgttggggtcccatgcacacgctgtcatatttgcatcttcaaaactatctaaacatgttcctgatgcttggactttgtgttgagatccaattactggatacccagtaaacaaaatacctatttaatttgaataaatcattagttgtaatcaataataatgttaaatcactcgataatctcatgactcaccatcgtttgttaaaccataagcattttcagtaaggaaagcagtgacaagcttcgcactaatgcattttccatcttcatcatttgacgattcttgattctcctctattacattatatatgatttaattagtagtgaaaaatgactataggtgttttattaatcattaattaataactatatataaattacctgtgagcctgccgagtgctactacttcagagggggcagaacgaagtggaatgaaatcgtataaaccattgccagaagtgttggaaggaactctgtcatcaactctgtaaacagctttttgctgagcagggtaccatgttatatctgcaaactcgtgcttcctaccaaaactcccaatttcatctcccaaattggagtcatctttggtcacgtaactaattgaccttttgaacagagcctctaatttaaacgtcacctatattataaattattacgtcaaaattagataataattttaactaatcttgttttatatatgaacagatgtaattaattttttattatgcagtcaaaatattattttaattaatttttaattcgttggtctattattaaaatttgaaacgttaattaggtgcctaattaattttaaaataagtagtattagttaatgacatcgtgctacccccattcattaaacaaaagaaattgggagccattttggttcggactaaccaattaatttatgagaaatgttaaatggtgcctagcaccattttatgtgtcaatattgttgtaggaatttactgctttaaccctacaccaacaaaggcttaatattagtgtcaaaggtcaaaaacgacctttacctgtctaatttaatc

SEQ ID NO: 37631 - DNA, 1712 bp, Cannabis sativa
acatgaagattagaacttgtcaacatggtgcaatagttcaaacctttccatctcaaaaatcctcaccgcgcagagccctaagaaccctagaatgaggagcatcagggtcaccacgcatagcattctgcctccatatctccgccgccctcttcagcgcttcctcagccgtatcaagctgctcccgcctccacaagatcacgtccccactcgtaccgtgataagccgtcccatcagtggcctgagtgatcggcttccgtgtatcggccatctccatctccgacaacggcgatgccttgtggtgcttaaagtactcaacgtcgtccttctcttgttcggctctatcactccacctctctccctcgtcattcggccacggagacccatccagacccgcgcaattcgtgtcttcaagagaaatcgtcgtcgtttggttccgtttttgctgtgaagtaggatccagtggctggttcactccagtgctctctagccttggggaactaccatgtgtggcggccggtttaggtggcctaaggggttcagttgtaccttccactttatactctgttttttctggcggctcagctggtttaggctccgcaacatttctcgtttcctgatcagtacagagtaagtacagattgaattcataataatatataacataaaaaatgacactattttagtaaggaacgcacatctgggtttccatgaggagaagcaggttggtgagcttcgtaatcctcggcatgaccagcagggtcagcggtgcgatacggcgtcgtaatggaggccaatccacgctggcaagctctagaggagaagacccagtgagttgactttgctgctacggttgcaaatcttgattgcatttttaattttttcggagaaatctaatgatttgagtattgttttgtgtctttagaaaacagagataatctcttactcttccttttaatataaaagaaaatacaacagaggagttgagggaattagtgaagtttctggagcttactatgattgacacgtggtaggacatctgacgtggctacactatacagtgccatgttgtactcgttgttgttctagcttcttcttaagtcctatctccatagcactgagtctagaaactagaaggatcacgaatataagaagaataaaatcatttactattttaaataaggggtattatgtctctcaattagaaatgaaattttaaatcccgatgtaggattactttttaataatataatacctcctacaactaatttttctatgtctttaaaaaaaaaaaaaactaaaaatttttctatccgatagtacacttttacatgttagataaattattatttaattatttatccgaaaatcattgcagggattttattaacgccttcagtttcttgaatgtaactaagaaaatagtaatgtaactgaaatgttattatcaatttaaaattaaaaaaataaaatattttctcactaactaataataaataaaaataaaatatcttttattaattgttgataaaaatatattttttaaatttatagtatttaagtcataaaatacataataatttttagttaatatacttatgtacttttttttaggttgttttttttacttgtgtcaatattacattgttaagtaccgataagactttgcatcaaaaaaaaaagtaccgataagactcattaaagttttttttttt

SEQ ID NO: 37632 - DNA, 6752 bp, Cannabis sativa
  modified_base (3969)..(3972): a, c, t, g, unknown or other
accaaaattataatcaacgttatgagttattatgcatagccttcaatcacttatatcacaagttatcttaatttgtccatgttaaactaattaaacaacaatatttggaatgaaaataaatctagcagttaaatttaatggttcattctacaataatataacctaatttgactgccagtttttttttttttttttgtctgtgataatggaccaaactaacataagtaacattaatttgtagagatgaaattaaaagcatttatcataacacagatagaattttaatcagcatgtatgtactttatattgtattaaattttctcaagggaaaaaaatgtcaatttttttatgggataaaaaactataactcttggctttgcgtctttgtcatggatttaatatttcccatttatgaaacaacttcctcctttaatttcttacatttacattttcttttaatttttttcttccttcagaataattaaccttccccccttctttttggaaaaaggatttatatattttaatataaaaacattaaggataaggaatcaattaattgtgcatttaatatgtggggaaaaatggttcattttatatgactttctgaaacaaggttgggacagcaaattaacaaaaaaaaatatataattatatttaaattaaaaaagcctgacaaaaaaaatatatattttgaaaaaaatcagtgggaccataagcgttaatggtgtttgccgggaacatacaacaatcatgttatgtaaaagccaggtcatacaaacacaaacacaccccatattacacttgttggtttaaaaaaaaaccatataaaagttaatttagattttttttcttgagaaattattgttaactactaatattagttgaaataattatgcctactaatacaataggatgagagtaaggatttaagaaaattttacaatccatcctgtaagagggatctgccgatgtatttctatttgttttggtatttaaaataattttttagttaaattttttttatggtcatgcacgttataattatttaaaacatcttgcaaaattttgagaaatttaaaaaaattaaacacgctgaaaacatagttcaaacagtgtgttacacacatgattattttattttatacgcgtataaaatagattaaacactggtttccgtatcgtaaattattttaaatttctcaaaattttgtagaattttttaaataattataacgtatatggaaatgatgcaaaaacaagtacaaggattaaaaacaataattttccttacctcaacttcgctgtaactaagctcacaatcagctcctaagatttatcattaattagtgaaaacttagttcaacaataaacttaatatttttgtaattcttactgtaaagaaatttaacctaaaaattgactcagaaagtggttgaattggacaaattattatttcacaaagtttttagataattgaaataaatttcggtataaagatcaatgaatcaaagttattatatcctaggagatatggatattttatcgaaacaaattattaaaaattgtggaacaaacggatttctaactacagcaacaaaacattagttttacacttacgaacattccgaattagacaacacttccgccatgaaaagtatatatatttatttaagctttaaaacgatataataatcgttaaaaacgaattaaaattgagagtgatggtgtattttaacttagacaacatttaaaggaaatctaagaaaaataatttacaataactagcgtagaaacactattttttgacagggaatgattccaaattggtaaaaattttcttaattaaaaatatagatcgttgaattatatttctatcaatacctggatcactagaaatagatgaccgaggagagatatatgatagttttacaaaaagatgttttttctaaaaaataaaatcaaaaacaggaaaggaaaggttacgaatttagatcaaatttgtcaatattaacaaagaaattatcccaattaactcgatatgctcagattaggagacaaaaaaaatattgatcagacagaaccatggctaagtactctggagttagctaagattgaagtggtaaggttgaagttgactccaaagcttcttagggtttgaaggaattgtttcggagagtgagaataaagagttcagtttagggtttttgtttgttctagtcgtatactcactacttataataataataatactagtaatattaataatatattatgttgaccaaaagtcaaacactcacttattttgatgataaacaaatatttgattatcatttgtttctaatcttttcttgatcattttgtaagcaaatttataaagtatcaatatttgcttaaagtcaaacataatcaaagaagtggattcaataagtatatcaactacttcttacttcataagagcaaaattttcatcaagagatcagaattcaagaccatatccaaaagaaaacttcaaaagctcaaagttaaagtcaactctcaagaaaagtcaactttggatcaaaacatgcaaattaacttagaaagctcatctacatcatgaatacacacaatcaaatggtataagttgactttaatcttgttaaagtaatttgcatattatattagggtttataagttcaaaagtttggctcactaacttgggagtaagttatttcaaaaaaatgatatctaaattttttaaattaatttttaaggtcacatatcatttaactaagggaacaaaactagaatttctgaaataagatatgcgcattttaaagctaaaaaagtggcatttttccattgcctcactttcggtctccgtttttaaaacgacagaccgtttttcatagaaacatgcagtagactggtttaaaaatggcagaccgttttttccagtaaatttttttaaaaagcgtgctaactgctatgaacgactagttttcgttcccacactatataaactcgttgttcactcaaaatttaaggttgattgaacttctattcatcttattatatcattctaagtgttctaagttaaaaaattaccatcttttcataaacacgccaaccacacacacttgagccaaagttattcttatcttctctagtgtgcttgcaattctctttaggattcacattgtatttcatcttattagggagagttttctttgtatttcaaaatcaaatatctattttattgagatgtgaggttggcatcagtataaaaataactcgattgtaggtgaggttgacaccggttttgtaaacaacaagagaagattgagattttcactacaacaattcgagagtgagattggcacttcaacaatctaaagaggttgatagtccttggcggtggaaaactattgtaaaaggtttggaaataacttggtaaaaattttcggttgtaagggttagtcaagcccgttaacttagcttgatagtggaactcaaagctaggtctatagctttgaagatcaaggatgtaggtgtcttagctctattgaaccttgtaaaaattgagagtttgtaatttcttacccttaaactctttattttacaagcttgattatttactatatattttttcttgccatactatttgtattcacttgattattttgattaattgtataattttgtgtagttttaatttactaaaattagtgtaaatttccaattcacccctcttaaaaatatgtcttaggctaacaattagtatcatagcaatgattattgcttttgggtagatttcacaatctaagagtatgtcgttttcaagcaattcacacaatagcatgttagaaggtttaagcacaagtagagcaccattttttgatggggtagaattttcttattgaaaaattagaatggaaacttatattcatccattgattatgatttgtggcatattgtatgttatgnnnnttacattcctatgcatgttgtagatggtgtaaaaattgtaaagaaatatgatgcatatgatgaaaataataaaaagataatgtctaagaatgctaaggctaagtatgttttaatatgtggatttgatagagatatatttaaaaatattgagcaagtctccttggctcatgatatgtggaaaatgttagaagtaacacaccaaggaactagtgcaatgaaagaaactaaaatttaacttttatctactcaatataaagatttcaagatgatacaacatgaaaccattgctaacatgtatacttgtttcacaactattactaatagtttgaactctcttggaaaggtatttacacaaaaagatatggtgaccacgattttgagaagtctcaccaaagcctatcaaggcaaagtagttgacatccaagaagctaaggacctctcaactctaccattggaagagctcactagttctctcatgaaccatgaaattttcatgaatgctcaagaagaagataaagtcgataaaaagaagaagaacacaattgtattcaaatctactttaaataatgataatgaacagagtgaggatggtgatagtgaaatggagaatatagacctactctcaaagaaatttaagaaattcttaaagctcaagaagaatgcaaagaaatttgacaaaagggagtaagttaatggagagcacaagaaaaggtgatcaaattatttgctatgaatgcaaaagcctgatcatgtaagaacagattatcctttgagaaagaggaataaaagaagggcaatgatgactacttggagtgaaagcaaggaactaacctctggggatgagcaacatgagatagccaacacttgctttgtaatatctcattaagcctaatggtaatattaaggtttatatttatattatgggttaatcaggtgataagtaggattatgatcctactagtctattttaacattataaattataaatttgttataattggataaatacgtgtaattcattaattacagagatttatataacatatgtgaaggtaatatgagctatttgtgtaataaaaatattttcaagtttggcgaccttagagactcgatcgggggccaaaatttcataacaaatttaattaatagatttgacatgaatgttatgataagttgatagtgtaaatattggggtaattaggattatgtggaatttgacttagtaccctaagtagaagtagagatttcttattaactaaaaataaaagaataactattaataaaatgtttttgttaatattaatattattattattactgttattatattatattattattattaataataatatattattattaaagttttattaaaattaatctgaatatatatatgttatgttttaaaacataaatatacgaaatgaaaaccctttcttattctctgtgcgataaaactctcatccccctcttttttttttatttacaacccaaaacttagcgattcaaagtccggtggtagcaggatagtaaatccttaaagagggaaagcctaaggtaaggattggtttcgttttaagctaaaaacgattggttttatatagtggttttgtgatttagaatagttatggagattctaaccttatagaattgtttttgggtagccacgggactagttttgatgtttgcttgttaaattgagatgattttgagttaaaaattgaatttagaacgttttaaagcttaagtttgagctttaatggcattttccgttgaagggctcgattttaatttatgttacgtaaagattgttgcatatatggtatatatgtgtatatatgtgtcttgtgaagtttgaaatgatttggataggtttcggtagtgtttcagtgaatgtaaaattcaggatttttatgcaagaaaacggtcggccgtttttggaaatattagggagatcaaaaatcgtaattttatcataacttttcactcgggtgtccattttaaatgttctatataccatttcaaagcttgcaacaagatctacaatatagtatatgttttagggccaaactataagtttttattttagtgtgtttataccgtggggtttggtaaaaaatcctaaattgacttatgtgaatattaagtggtgttttaggatagacacttattggtttattgttgtcatgacatttggccccggatcattgatcgttctccaagtaggtcacccaacatacctgaactgaatcttgaggtaagaaaagtatattatactgcatagtaagttatattgtaatataattaatattgttgaaaattgattaatattggaattaagatacggttattattgttatgtaatgaaaagattttctgattagggaatgaaaatgtgatgataccatgaatgtgatactggcgcacctaattaggtgatgcgatatacctgttggcgatacctgattaggtacgaacggtagtgacatatgaatgctgggttatggcatagactgaaaccgttgttaggtttcttcctatcagtgatgcctgattaggcacgagcggcagtaacatatgaatgctaatcgttgttaggtttcttcctattagcgatgcctgattaggcacatgctcacttgattaggtgatgcaatatgttggtgccaggatatggctgttgtcctcaaaagtgagtgttttaatatttatactcgcaagtgcacgaatcgtttcggaatatagtgttcatgtaagtgcaaggtcgaacccatggg

SEQ ID NO: 37633 - DNA, 4734 bp, Cannabis sativa
acagagtgtctagaggcatgtcttcttaccgtatgttatgcactcgtgaatggtttttcttttttttctgaaaaggagaaagggacctcttgtcttagacaggaccctccccgttacgtattaagaatcctaacttgtggcggtgggggaaagccttggttacaaaaatagccccagacaaacaaggcctataacagttagcactcaacagtgctgaacaaagtatgcttgacaaagaaaataataatgccactacatcaatgacttacattctctacataaatctaaaaaagacaaatcctcaaaatgtttggttttaaatacccaagtagctgtgatttttaaagaaaaaacaagtgataaaaaacttagatctagatgaatattgtcgatcggtttgagtaacaaaaagactttgcttagagtttcactgaatactaacccactctcgatttaaaagaaaaaaatacaagcaactagataatccgatgtcggatagcctaaatctagcctacgatcctatctcaattctgtccccagggacattggtaaaacgtgcagtttagtacttgaccattaattctagtaattgcttcttttattactaagactgacttatctttcttgtactgtaagtaaactaaggtttttgtaaattgtacgagtatgatgaaattaacaatacttcttatcttatgagttgttctgccagattggtcattcttacctaaattggatttccctatcgaacaagtacaaagtctgacacatgtcaaagtgatggaaaagaaagaacatcttttacgtatccacctattttgtcaaccttgttagaaatgatacaaggaagatcgaggacagattgaatcttggcaaagtgatccactttacccatctgcctatacgaggcaaattcctcacttcaggtttaggagttgggaatgaaggagcatactctgggggctctcccagcacctaaaccgatgggaaagacccagagcacaagatttgagagcttactagagagcaccaaattcttgcattgcacttctcattcagtttttctttttcccttggtaggttatatcacccttttcaggcttagactgttcagacagttaatttaaagttcaaagtagatagttctacacaaacagataccttgatagtcattacaatttcaaagcaaagagactacacccttaaccttccatttctccattttctttataaaaatatttaaatcaaacagcttcgtgctaatattgaaatttagtaattcattcctttgtcagcaataaagtttctgcttatagtatacagactaaaagtctataagaactgaaacaccaaaccataactagggaagtaataattcaattatgttcctcctcaatttgatatatcctcgtagatgatgacaagatatttattttctcatattctataattgataacagagtctagtcaatgcatactctctggtcaaaatattgatagctaaacataagttgttaactagtataacactccaagtcacaatcataaaaataatagacagaaaaatggtaccaacaaccaatataaacgatctaacaaaagcaaaacaagcttacttgtacagtgcagcaaggcggataagctcactataatgagtagaatagtacttggtctttctccattcgaaccaggcagaagtaaatacatgggtcggtgtatccttcagcagctcatcaagatttggcatagcaacagcaactttataacttaagaggggaaaataaacgcatcaaagattcagagacataacacaataacacataaatatttcaaaacacaaggacgtcagatagataaaatacccatcctttagaaagctctcttcaaagaaatcaagttcaatggtctctgacaacacaacaacacaggcctctcgatgatgatagagtaaactctcgagtcccctttggtaccggacactatacatccatggtggagaattccataccatgaaaactctcatctcacacttgccaatcttgaaaaactcatcgatgaaatccgagaaagacagatacggcagcaaaccaggatagtaaccccatctcttgccatctgcgtaaatgtgactcgaaaactccgatttcccacgaaccccattagagtccacacccaggtcgccattaacgggcttcttcctatccgatccactttccggaacttcattcaaacctctcttaatcttacttctggacaagacaacccttcctgagacattctcatcacctctagatttgagagaaacccctgaaactgaattaactctcaattgcttcttcattagaaatggaactctcttaaaatcattcaagatcaatttctgaaccagacgatcgcccctcgtgagagtggtgacccccaatccgtcagggtcttgcaaaaatggattattcaatggattcaaaacctccaaatttgacttaaacattcgatctctcctcaaaaaatcgctcttcttatcgaaccattctccccaaccctctcttaacggagaaactctcccacccaatttcagtaacagcgcatcctcgacacttgccacttcgctggccttcctcctcacagcttcgtccacaggaacatcgtcggatccaaacgcagccttactctgatcctctgtcgtcaatcccacattaaaccctaaattctcgtcatcccaatcctcaatcgatctccgactgaaggccctacgaatcacgccgttcacgtgatcgtagaaataaccataatccctaggtcgattggatttcttcacaggagttgaatcatcgtcttcctcaaaactttcttccctaacggaagcctcctcaacgacgtcatcgagctcgtcaatgcggtcctcggcggaggctaggggatcgtcgtcctgggaaacgacatcggaaatgagagggttagtgagggaaacgtcgtcgtattcggaggcaggattcctgttgcggttatgactgaggagggaattgtggggatgagagagggagaggcgggagtagagaagggaaacagagaaaaataggaggaggagtacggctgatccgacagcgcaggcgtagtaggcgccggagcggggacggcggcgagaccggacgggaagtttgttcgtcattacgtcagaatgagacacaaatcagcataggaagaactcagaagaagaagaattcgccattgatgaagttgaggtgagtgagagtcagtgtgtgtgttgtttgattggaggtatcgcgggagaataattattttaagtatatttttttagaaacaaaacgaccatacgtaagaaaactagagtcattacaaaagggttctctgtaggtaaggtcaccacatcgaagcaactatactttacttttttttaaggaaagatatgtccattaaagaatggaaccaacattcaagacatagttggaaaaagcttcctgatctaagcttaaagcatttttagctagatgatggtcgatttcattagccccttgaggaatgttgctaatattaactttaggtaaagaagataaatttatttagatgaagattgtgagaatattttcaatctagttcaatgcaatctggttgaatggaatgatgtcgataccaagtgagagcatggtgtaaggcgtgtgcttccattatcaaaggcgaatagatgcctctccatggcgttgccaaagtcaagagtacttccctattattattgtgaatagtcatgccaaaactcattttgttgttctttgtattttgggcagcatccaccttaacttaaccctgagattgtatctttgtggtttatgtgttgggtgcaatgaggatgtataaatagtaggtgaaagtgaactgttatggtgctggtattggtctaagtaatcttcaacccattgtagtacattaatgggcactagaaacgaaccgtggtgcaaaaattcattcatgcaattccataatttccaaagcaaacaaacgaaaaaatgaaagttgctagctgtgaaagtgctagcagctaggtgaaggaagtccgtacaattgagaaatgcatgtttatcaataaaaacagaaaagttagttaattcccatacctactggacagttgaacacctgaaaaaagcatgaactagggtctcattgtgatagtgtcatcgacaacaacttggtgaagtaattaaatttttttgcttatagtgactggttggaagaatatcatgacaagcttgccaaagaaaatatttaattttgggaggaattggttgagtccacatctgcttctaccatgattaagtagtcatggtgtccgagggtgttggatcactttggtagagtaaattgtgtgctttgtgataacttgaattgactatgtaggttccatgtggtgtcaggcaccagtaataagtgtccggagagggaagggtggtaagaggaatggcaaggatggcttgacagatgccaattgggaatatagttaggatatgaggtagatcccaatctttggaaagggttaagaggtctgcaactgttatactactgtctaaaaggtgcctaaggtaagccagcttgccatatcttgggatccaagcatcattgaagattgaaactgtggtaccatcaccccactgatttccaaagatctcacatgaggagttttagtgaattattatccaattggattattgattctggactaacttt

SEQ ID NO: 37634 - DNA, 3728 bp, Cannabis sativa
  modified_base (59)..(82): a, c, t, g, unknown or other
aattttgagaaatttagaataattcacaatatagaaaataatattcaaacagtctattnnnnnnnnnnnnnnnnnnnnnnnntcacgtgtgcaacacattgtttgaatgtaattttcaccgtgttaaattttttcgaatttcttaaaattttgcaggatgtctaaaataactataacgtatatgagcataagaaaaaatttgattaaaaaattatttcagatgctaaaacagataggggtgcatcaatatatccattttaagggggtgcattatagaattttcttatattttttttattgcagtaaaattcttaatattttcactttatttttactgaactccaaaatttaaattttagcggtaaaacccccaatatttgtattttgttagcagtttactattttcatctaattttaactgttaactgccatgttggattgtccacgtgtatacactatacacgtggcacaatcttattgttccatgtaataacattattttaaaaaataaaaataatattttaaaatgaaaaaaaaaataaaaattaatcatattaaaattaaaaattaaaaaaaaatacttaattttttttttttgtctctctttgtaactcactctctcccaaaaaccccttctctctctctctctctttaactcccactatccccaaacccactaccaccataaacaccaccaccacacaaaactgaaccataactcctctctcccataaccaccaccacccaactcctctcttccacaaccaccgccaccattacagcatacccaaaccaccactgttacaccatcccattgaaatcccaatgcaacaatcatcaccaacaccattatatttctcatatttaaatctaagaaatacaaagatatccatataacaagatttatacccaaaactataaaaaaaaaatcaaaaacaattttggaaaacccatccaccaagctgtgatctagaaaacaaatcgagggaggacaattaagatctctgtggagaacgactgagatctcgattttgtgggtcagtctgccattggagctgagaagaagggcaaggaaacctagcccagattcgacttgtctcaatctagatccaaccagactcaagccaaatatgactgcatttccctccgacaacgacttgcaagaagaagaagataagatggtgagaaaatctgagcgagtagaagaagaagaagaaaagaagagatatatatatgtatatatatatatatagagagagagagggagaagttggttggggataacatgaggtgtatcctgtaacgccctgatacataggcgtgctacagtgatttttcaattacagtgacatctttgctaatcaaaggatttttcttgaaaattgtgtcaaattaaaattttggacttaattgctaaactttaaaaaaatttataaactttagacatttatttacaaaagtcgggatcccgtatttaaacttttacaacattatcaaaatataattagtgaggtcacacagcaactacaaaataaaaccccatatgtcttgatactgaacactccaggtcgcgtcgtctcgacatgtacaatcttcatccaagcccagagctcactcctattcagcctacacctttcctttacctacacatgaaagtagcatttgtgagtcaacagactcagtcagaaaagcatacaacaaaccatataattacaacatgtgtttaggcgcccatacacccatccacaaggcttatgagatgacttaagaacgttcttaacaattggtgctactgaccataatatcatccactatcagcactatggttgcactgcgggactaacactatgtttgtgctgctatgatagcatcaatagcacccaaaagtataattggccatgatatcactcttaactagtacgatactcgtactgctgaaccgacacaatggttgtgtcgctatgatagcgccaattaatattttctagggtgaatatcattcttaaccagtacgatgccattattgctaaacggacacaatggttgtgtcgctatgatattacccaaacatatatatcataaacacagcatgcataaatttcacacatacatacattcgcatatatacaatatgttctatgctattcttacctcgtttctgaattcaattgagttggccgacctgaacggaatacctcatgctggatggatgccttagtcacattcacgtatactggtaaatgacatgtcacaaccctaatccaggaaacccaaacccctaactaacggttctgtgattaactactaataccatagtaccctaattaacaagttattaaccaaccatggctctgaaaatagcacgaattgacgaattgaataattcagggaacctgcacctgttccggttaactggttttacagttccaataaaactggttaacatgtttgcactaggtaacccaaacaagtttgaaacttgctcaatttgtgcccaaactttaccaaaccttccagaacacctataataaccttaaacaatatagtccaagcaagaaaacacagaattcaaatatgccattaatgactcaagtttgagttttcaaactcaaacttgatcattccccacaactcaacccaaccagctagcttctagaacgcaattccaactcaaacaaaacctataaactgaactgcaaatatatctaaccataacagccacaaattttcaaattacaatatcaaaccaagttataacttaaataacaatgagatgagagctctagggtttaccttgatggaatacttccacaaactgttgaaccacacccaaaaatcagcaagaattaatcagattaaggaagaataaccctaggtccttggctgcccttcttggttcgaaaagagagagaggatggacaaatgagtttattgttttcttttgatttttcttattttccttcaaacaaagctatctttaattgggctgaataaacaaatatggccagctgccatcactagcgagagccacctaacccgcttaaccaaattactagaatacccttttacttatgacataagcaattttaagcctaggggtaaaatggcaaaaaatcataaccctgctcaaattcggtattccatttatctcaaatatttatccctctaagaaaaaggttgtagatttacctatccatcgcattttctgttgtcgccgagcaaaaatcataaaaattacataatgcatatataactcaaataatacccctagagtttaataaaatctttgaaattgaaaaattataactctaatgcctattttaaaaacgatacccacaacataatatattcatgcataattataaaaatatcaataattaacgctaattgcctttactaatccatattttgaaatgcggtcattacaattatccccccgttaaaaggattttgtccccgtaatctaatttgaatagctctggatattgagtcctcattctagactctaatttacaggtggcttcctccaccatgctgttcttccagagcatcctgaccaaggttatggtctcattttgaagaacttttttctttcttttttttatctggtatttgaaccgattgttcctcgtaagacaagtctgattgtagttcaagggctttgtaactcaagacatgagtcgggtttaaaacatatttcctaaatattgaaatatgaaatacattat

SEQ ID NO: 37635 - DNA, 2754 bp, Cannabis sativa
tagtatccgaaataattttttagtcaaatttttttcttatggtgatgtacgttataattatttaacacatcctgtaaaattttagaaaatccaatatgctgaaaacaagattcaaacaatgtattacacacatgagtactattttattttatacgtgtgtgaaacagacggtttgaacactgctttctatattataaattattttaaatttttcaaaattttgttgaatatcaaaattgaattaaaaaattcttccaaatgccgaaacagataaagagcgcattacccaatattatttaccatttcttttattgataaagctaatctaatttaaaaaaaaaataaaaaacaaacaccaagggtaaaatcgtaattccattcaaacgatggggacacatacattagggtttccattctcttccacaaaggtacaactagtcagatttttcaatttgtagtaatagcgaaaatgaggagacttatctcacccgcgggtgagataaacaaccaataagaaaagaagcaaagttaaagacgaaatcgacacgtggtggattgcagacgtggaccaattaaaaaagagcaatgatgtcatcaaaagtgacagtaaggtgagattatcagaggtttgtattaagaggagaggtggtgctatttgaatcaccgcttttggatcatcaaaaccctttctttccaaaaacccaaacccttggcggctgtgagacccgttgttgctccatcactctactctctctctctcttctcacctctttctctcactagcaaaatctttctcttagggtttcctaaaaccccaattatccaattctctgtttgtgtgttgttttagggtttattattgaagaagagtgaagatttataaaaaagataaagggatctttaaatctggtcatggctaccgtttcacctgcggatcgtatccttaaaagtctggttttttacttatgggttttgttttttttcgtgttttgttatctgggtctctttcgatctgtgaatgctttgttctgttttgtagtgtgtagatcggtgtaaagcttttcttttttgtttgttgaagtggttttgaaatgatgttttaggtttaaagctcaaagttactgtgctctgtagttttgtatctgtatatgtatatgtatggagtttgtgttttgagagctgttttgtttgggtaattcgtatgttttgaattggctgttaattcgtatatgtatggagcttacttgtatctgtatctgtagttgtgctgtttaagatagagttttttatgatcttaattgaattggatttgaaattatagaggattgtgtatgttttttttttcctttactttattctgtcaatagaaacagctactgatttgcttcagaagttgacattagatactcaaaccaaagctttggatattcctgagccaaccaagaaggtataattactatttgtctcagtattatagctcttgtaattctctcttgttttgtgttcccgctttgtttttgaatttggtttttgctgacaattgtgggattgttaatttgactatggcagccaactgctaaccagtttggttcagttgactctggcaatgctcctaatggtcagatcccatcagcagagcggtcaatgactccagttctaccggatttcatggatccttcaatgtgctatgtcccaaatgctgcttatccttcttactactttggaggaggtaagtttgattgcttaccttgattttgattgtgatttgttccttttgtgttttaatatgtttattgtttgaagttatgaacctttgtgtttgttgtctcttgcagcctatgatggtaccagtaatgaatgggatgattactcaagatatgtgaatccagatggagtggatatgaacactgtgagtggttttctatgttgattctattttgttaaatctagaatataataattctgtagctaataattgtttgtttttgtgttttttattagggagtttatggggataatgggtctttgttgtatcatcacggttacggctatgcgccttatggtccatattcaccagctgcatcaccagttcccaccatgggaaatgatggtcagctgtatggaccacagcactaccagtacccgccttatttccagccgcttactccaaatagtgcgccatttacacctaatcctgcagtttcacaaagcgaggtttctacttcagttgctgctgatcagaagcctctgcctgttgaaacagctaatgggaatgctaacggcattgtaaacactgccaacaacatgaaggggaataataatagtaatggttcggcggctcctcttaaaccagcatcgtaccagaactcatcttttaactcgaatggttcgtacggaaggggtcctttgccaggtcgtgtttctactcctggttatcaggatccgagatttggttttgatggtttacgttctggaattccatgtttagatgcaccacttttttcagattggcagccgaggccggtgacaagctcaactatgacttcatcaatatcaaatggcaacaatccatcaaggaatcaaaattatcgcccgaattcacagttcatggtatggttgctcgatttataatattcattaaatattattagtatctttgtttcagtgttgatgtttaattatgtatcatttgtttttcagggagttcatcaccctagaccgttgtctgcgatgagtccggggtacattaacaga

SEQ ID NO: 37636 - DNA, 1449 bp, Cannabis sativa
gaactaatcctatgttagttaaggtgttacaccatacctctttcggtcttgtaatcaatgtcactttttggacatgtattgattaggtaggcaacaatcacttgtagaaaatttatatggtgttcctctgaattcaaatcatgcatgcatgacttcgcaattgcatagaagtgttttgtagttgataatacaagtaaaaatatatatacattatggcttcaatatacactaaacaaataataatatatacattaaaaaataatgtggttttacaattttcttcacaaatttaatgtggcaagtttgaatctcccataaaaaagaataattagttgtgagtagtactaatttgaacaatatggccatcatgattgggtggagaggcttgagcactagaaattagtattgttcctaattgttctcccattggcattggtgaatttgagcctgtagaattactagttgatggacttggaggacagttggtattattagctgaaaactccacaaaatctgtaccatatccaccataaaattgattattacttctctttttaaaggtgtggaagttgaggtctttttggtcaaaaattttagaaatggctccaattcttcttggaatagaactttgggaattcgaccagatttgcttgtgtttttgaaggaacataatagcaaagattatgagtgttgatagtgaagaaactccggctattagaaataggccccagaagttgtcgagacttagactgttggatgagattttggggtcagagtttaaacaagtattttgttcagtagtcatgaaccatttgttctcgatctttttcatttcgtctccttcagtcacgttgagaattgcctttgaaatatcatgtgccaaaggagacccatttcgaaaagcctaaaacaaacagagcgcacatacacaatcagggacgaacttacatagagacgagggtggacaagcgccaccattaaaagaaattgaatacctattatgtattttaatcaaagctaattaattaataacaaaaactaatctttaatataccattttttttattcaaaaatgctttgaatttgaacaattttttaataaaattttgatcaaacacacgcacatcatgctcaatcaaaaacaaaacgtacattcaaccattctattttaaagagactattacaatgcaatttaataattttttttttttttaaatttcttatacattttaaattttattccattccattcatatttttattctcatttttattcttgtttctatatttttattccttccaactaaacacaacctttagctaattgaatattgaaccctttaaataggtctactatcgagaggttaagaggaaattatactctatattcttttcatattgtcctcctttatttttaccttatttttaaagtctatcatttttacctct

SEQ ID NO: 37637 - DNA, 4186 bp, Cannabis sativa
ttcaaggggcaaaaatccaaattagtctaaaataataagaaaaaaaaaacaaagagcgatagaaaatgtgaaaattctccttttcgattgatctttctaagccacaatcaaatatttcccgtctacctataattttccagaaataaatatatattatactcgtaattaatattaattaaggatattagctgcaatactactaaaattatacatttagttacatttaagttcacaaacctacttctgttttgcttattatacctctgtccaaaaaattcaattaagtgtcatggtggactgaccacgtaaaaaatttttagcgttccatgcaatattgatattaaaaataattttaaacttttcaaaattaaaagaaaaataattataaaaaatatatatatatattatttttctttaatttttcatttcctttttattttttttcttttctcccttataaccctaatcctctccaccctagtctccttcttccttcttctccattatcaccgccaccatagttactaccaccaaagccaccgccagaaccaccaccacaccaccgcagccaccactaccaaaaaccacaacaaccaccaccaccttaatctaaacccaaatcacaacatccactattgagcttaacgtaaacctagatcacaacatccaccttaacctaaaattgagcttcgattggctcatcaggaccaagagatggctcaatcggggacatggagctccggctctagcaaggtccaccacgaagtgagagaagtgatgaaggagagaaagagagggtctgagagagacgcggagatggttagaacccttggtcaacgatggtggctcattagagacatatcgaaaacaacgatgaatagagaaggagataagtcaagaaatagagagagaatcaaggtaggagttttgggtctttgggtagtctgggtattaggtgggggttcttcgatctcgatgatggtggctcatcggagtcgaggttggcgctgcgtgcggctaatagagaaggagaggtagagtttagagagagaaagagaaagggaaagattagggttttcaaaagaaaaagaaagaagaacaaaggaaaaaaaaaaagaacaaaaaaaggaaaagtaaaaaaaattttccagttttttaaaaattttaaatatttaaaattaatttttaataattaatattacgtggaccactaaaaatttgtcacatgtaagtgtatatttgctcagtctagtgtggcacttaacaaaagtttttggatgaaggtgtaatgaggaaaataaaagtgtggttcagagggttttaccactaaaaattgagtctaaatgtataattgagtctaaataacttttcatacgaaaattactccaataattgacaacttcaagagttgcccaccatggactcacatactaccatttaaataattaaattttattaaatactacaaattaatataatatagaccaaatatatattttcacaataaattgttgaatactataaattaattataattatatataagtttacaataaattattgaatactataaattttttaataattatatataatctcacaataaattattgaatatcataaaattataattatatataatgtcacaataaattcttgaataccatataatataatataaattttacataaaactaaaattagaccaaatataaatgtagtgcaacaaattacattacaataatctaacatatttctaaatttggaccatatgtgctccaccaaattggtttgcaaattgtgatgtgtgatatgaattttagcatttcttcgaagcatcatcgggaaagaggaaatatgttcaggtgatacttcaactctcgaagtttcagagggccttagtcataattaaaataaaaataacatgcatatgcatttctttcattatggacaatcatgtagtgtaatataatgcaagcatatacatcatgtctttcagaatatactttttctaaagctgacctggtcctcgcacaatagaaaatgagattaaagtactccaaatgctcgctcaacatctttacgcaccccttcttagcattgagcaaatagttttcttttctccccttgagttagcgaaataattttaacaaatgtacttcattctggatagatgccatctgccaaacagtatgccttattgtattgtttgtcattcatcgtgaactcgattctgggatcttatgcttgcaatgtcagtgaacaatggagattcatttaacacattaaggtcattattcaattctgaaacaccgaaaatgcatgccaaatccataaatcttgggacactactgccttcagcatgattgttggcgtgccatgatcaccacgtgtgaattgacctttccatgtaactgggtaatttttccatttgtagtgcatacaatcaatgcttcctaatattcatgggaaaccattaagcttgccccatgtgaagtaagagatatatgaatgtctttgccattcggtcgtcttaaatacctgctcccaagaatctcattcattccacaaacaaagttgagcaaacattcaatggcagtgctttcaccaattcaaacatactcattaacacaatcgacagacactctatataccaacattcgcatggcagtagtacacttttgtagtggaaaaagacctcttttaccagcaacatcatgcctcatacaaaaatatgttgaatgattttctagagaccgcactatgtgtaagaatatgtgtctgcgcattctaaatcgtctacgaaattgagcatctgtgcatactagttcaccagaaaagtaattattaaataaacgtcgatgtctttctttatgaccgcttcacaacccaacagcatatcgaagcatgatagaaggactgcagtacctgacacacacacgacttgatctgtcatttgtcatcaataagttgagtcaactcctccaaactctaactacaactcattagagtgttgtaaaatgtgtactaaggtacctaaaaggaacaaaggtctcaaccaatccaagcttgtcaattaaaaaaatgaaattgatgatgtgtgagagttttggttaagcaatcaactgtttgatcatggaaaggtatgtattcgatgtcgggcttttgttgagtactttatcacgaaaaaaatgcacatatagtttaatgtgtttggtcatggcctgatatactattttagttgcaagagcattggctcccacattgtcacaccaagttataggtgtatgaggcataagaaatcaagttcattcagtagcttggatctaggatatatatttcagtagccaaggctctatactctaactctatgctggagcatgaaacaactgcttattttttttttttgaagactaggatactagtgtctcccaaatacacactatatccagctacacttctacgatcatcagaacaatatgcccaatccgcgtatgagtaacctgttaaggacagttaaagtatttgatatgaagaccatggtacattaattccaacttgagagagactgttacaaaataaaatgtattggtcctcatcattagtacaatactctacccacacctaattactgaatgattctggtgtgattgcctcatgattttgtgtggtcccactgtaacaaattctaatattaccattagaatattttcttataatgattgcaataattgtaccattgtttgtaatgattgtataagatgtaatatttctagaatattctttgtattgtttcccttgatataagtataaacaaagctagctagcgtctgcactgtaaggctgagtatttcattattgagcttttatttctttcttttggttttcttttaccttcaatcttgcccagggcaaggtatatgcttctaagatacaattaaaggcttatgcagactcagactggggcagcatgtcaagatactcgaagatttatatcgaaatgttgtgttttttttttggacaatacctaatattttgaaaaagtaagaagcgacacattgtgtcctgatcatttgccgaagttgagtatgaggccatggcaaatgaaacttgtgagataatttggctattatcaattttggaaaggaatttaaagtcacaagcatagggttggatgctcttttta

SEQ ID NO: 37638 - DNA, 4428 bp, Cannabis sativa
ctctctctctctctctttgcatttagctcaacccaacaccaaaggattgtctctagtcactcttggttgaacagtggttgccaccatgcttaggggcccccaaaatcccaaaccctaaccgtccttcttgtgcctgctgccccttcatttgttaacgggccaaataaaaccgtactcgacttcctccaaaatcaagttcttttctattgtaaaatgaatttctattcctaattggtttttttatttgaaatctaactattatggtggttgtgctaataattttgaatttctaattttgtaattaggtttcgaaaatgggaaagaattttctaattattggtatttttcagtattgtttgagaattattggtgtgtggagatggtggtgatgtggtagttgtggggataatggggataatggtgataatgtttgtgatgtggcagtgactttggtggtactttgtggtggtggtgataatggtgaagaagaatgagaagaaagactggtggtactagacatttaacggttaagtgtattttagaagttctagaaaaataattttcgtcaaaaattaaatttaagtatttatttgtaactgttgacctcgtttttagccaacaacaatgagtcaattaataagcgataagaaatataattaagagagagcaaaaatcgataaacaataaagaagacgagattttcaaggggttcgacccctttagttcggtaatagtctactcccattaaattttattgacttgagaacaaaaacaaagtgtttcctctctcaaggttctcacaatgaaatctctgagtatttctcttagatttctctctaaagcaattattttgatccaatttttcagtgaagctagatcactatttatagggctaaatgcatgaggaaaggtttcccttttgcttacaatgtctatacatggtaagaacattcattacatatttagaatacatgaaatgggggattggacagtctgccgtatccctttgatacaatcccatgattatagggattatctttgtgcttgggcttcacgatatcaactcttgaagtaattaagtcttgatacacgactcggagaagcaacttcactttgttgctcgaacaatctatcctgtatgctgcttggtcaaacagacttcgtgcgtgcagatgtattgcttgaagtctatttggagcattcgcgccaagtataaggaatagcacacacgtgtcaccatcatatgttgccaccatcatatgttgccacgtcataatgcaaaaaataggataacagtaacgtatttatgccgtaaattactgtttaattttaattatttttataactattttatttaaaatttaaatatgcatttttttttttaaaaaaaaaagttagacattgtcaaatcccaacatgcccgtccgaatccgattggaattcaaaacacggaactctctcaaaatccttcacacactcacattcaaatcacaaatcccctaatgtgaactggatggagggcttaattcttatttaagagttataaaagatgttggtgttgcctgtggagtattgtacgagtgagggctccattgctcagctcatgttgggacttgggacttgggactgtacgtgtgccaattgcacacatccacatctacatccactgcacctaaattaactgtaaatttcacatatatacacactaccacgtgcttaaaactcttggatatttcctttactgaataaataaacttacgtggcaatctatgattggttggagtctcccatttcaaaacgcaatacattatgacactgaccaccaccgtacaagaatgataattgagtgctgagatggaagctacgtgtcgtaacagaaagggccactgtatatataataataattttttattttatttttttaataatataacaataataatttttttttaagtacttatacattacacccctaaaatcctaaaaaaaaagtgtctaatatgtgcatgaattttttaacttagattttttttattataattatttaagatattttatataattttgaaaaattattatttgaatttaatttttagattttgaatttttatgaattttttaatattttacaaattttttttaaataattataggttaattaggatttttgaacttttaagatcgttaaaaatgtcccctgaaattattaaatttaaagacttttttccaattttaataaaaaagtctaacatggatgaaagttcagagatgatgatttagtacatgtcaaagttcgagaggcatgatttaaagtctggggagcataatttagtatataaacaatcacagaaataataaaattaaatgaaattagacgaaagtctttaaatccaaccatctcaatagttcatgtgacatttttaacaattttaaaagttaaaaggcataatttagtatatatcaaaatttaaaggataaaaattttaattagccataactattgtaagtaactatgaaaaaaatttaattttttaaaatacaaaaaccaataaaaaaatacagcagaaaatcttttgtgcattataaaattttcctattttgttttttttgggtagacatataacaataatatacgcggctaagaaagcaccaatgaaacaataagtacaataattttatagactgaaaaaacaaaagacaggcagaaagggacccggcgaggaggccataagagaaaatgacaaaaacagaatgtccattgtggatttatttttattgtattaaataaattcttggattttaaaaataaaaaatcaaaattgattgataaatattgtaatttttattttattttttaaaaaagaataatttcattaaagaatgcataaagcacgatacaaataaaacactcttataatttggaggtctttgtggtgcgggcagtgatatttttagatatttttttcaaacttatttaaatgaattaaaattttttgtagaaaaaatcaaaattatttatatttatacaatctcataccttaataaatacagaaaaataattaaaaatttaataaaaatataaaattatttactaaaaaaatattgattttttattttttattttgaagggatataatttgatagttgttaaagtttatgaggcaaaattgttaattgataaaaacatgttatcattttaataagacgaaacctaacaaaaagactaaatttctgtaaatataatagttcagaagaattcttaacaagccgtatattttaagggccaaaatcaatattgtcaaaagtttaagaaggaaaattgctaattattcaaaaatgaaagaataattagtacttaaaaattcatttttttccagtattaaaattaattctaccgttcaatcaccaattgcatacctctttagtctttattgtataacatataaaaattaagaaccaaactagttagaatagttgaaataaggatcaaatattcatatccaacagtaccaaacaccagtacacgtaaatagattagaacgaatttaaaagtgcactgaaatatagaattaaaataaaatgatcccacacagaaaacaatatatatgtcaataatatactattatgtatgtgagaaatgtttcaataactcaacatcatatcattttgtttcaaatctttttgaatgatctgttaacaaaacacaatgtaatattgaaaagggttcttaaaaagaaatggggtgcacttttataaataggttgataaaattaaaacctatattttaaaaaaattatatttttgtaataatatggtgcggtttaaactataattattaaattctaaactgtaaatcaccgtaatgtgacgtttggcaaaaatataaaccacaaccgcagtgtgaaaaatttcaaactatattatttttgtatggtatagtgcagtatagataatttgataaatacccctaattaccggtaagcatgaagataagcctagcaaccatatacttgaggaacatctaatactaaagttaatcaagcaagaaaatgagcagtattagaaaagttgacaaatattgtattaatactcggattttgacaaagaaaaatggattgatatagataaatactttgaaattatttttgtattttgatgtttaataagaatatctgatgtgagagctaggcccgttttagtcgtatatattagccaatggacatcctattttgtccctcatgaatttagagtcaaaactaacaagaaatacatcttcaaatatggagcctttttggtagagatttttacactttgtaatgggaaatttgataaaacaggctaaaatgtaacacatggtcttaaattatttcttcccactatacacttataacaaaaccaaaaaacctcacattcatctctctctctctc

SEQ ID NO: 37639 - DNA, 2248 bp, Cannabis sativa
gagtctcattttctatgtataagaattagaaagttaacactaattgaaagtgggatttcaggttttgcattatgacgacaacttttaccggcacatttttgacgaaatgcaccagtaaaaaggccttttcttgtagtaaggaggtgtcagtgatgggaaagatcccttgatcaggggttcattccgcctgcagaagtaagtccaggagccgagttttctcggcaggagctcctgagacgcgtgcgcatgggacactgctacgtcccctatttttgcaggcatggatcctactacataagatagatacaatgctaataactctaagctctcatttttaatttttcttctaaaataattgcttttatttgcgttagacttcaatattcttcttttaatttttatttctaaatagaattaggaatttaatttaatagtacttaactacaatctttgtaggagatcgacctcactcctatgaatatatacttaaaattgatacgtatacttgagtggaaaaaaaaatcaacaacatctatgatacctcacaccattggtatgtagtctcttgaaaagatcttaatctttgattaagacttgaaatcatatttgcatccatactcgtccatatttgcatcaaactcgtaacttttaattaatcccataagcttggacccagccacagtaaaaccaccataattgaacttgtatatgttcatttttcacaagatttacaccattcaaaaaatctttcaaggatctagaacttttatacagaaaccatcttcacattcgaagtgtgtcagagtcagaattgcctcccaagtagcaactcacaaaagttacagtaatacacattcatccacatatagtttgattcatcatgcaagaacacaaatcaaattgttagaataagaactcaaacaaggtttatatcttcacaaattaatttttcaattgttcatacattgaataggtccatactcaaaatattagaatcaaacaatactatgtttagaatcaaaaactcaaaacttcgttatggatattaattttttttattgctggaaacttaggaggattcttatggttctaataatacattaatagaatatgaacatatataaatgtcaacattaattagaataacaataaaaggagtaaaatcaacaacaatagaataagaacattaacaatgttcttatggacaacaagactaatccaaaagagtaattaagcataaagattagtttagaaaacattacttttgatttctataaatcaatcttttatcaagaaggcttgccatattaagtttaatgttatctaaaaagcctgtactccaagcctccattggatcgctaatgggttctttcctttggaataatatctgggacttcaagcctttgatttgtttaggactagcaaaatcctaagaacaaatattggagagtactagagaatatttaaagagaggtatttttagagagacaaagagtaaaaatgggtgattcatacattttttctctcctaacacccttatatagtgtaggaatttcattaatgctaactcacattattaggtcacttaagttcatttgggtcacttctcgcattaagaaacttttacatttcccatgcaaagctccagtcaacatatcgccaatcactgggtgacatgtcaaatgctcgagaaataaaaatgcaaaatatgaagttttttcatgctctaggcgacatgttgcccagtgctaggtgacatgtcccttccaagtgatatgctgtctaaacttggcgacatatcccttgaaactttaacaatttcgattcattgctcgaaaaatattccaggcaacatgtcacttgtcgttgtgcagttttctctaaaacattagacatttccaaattgacctaaaacttctcaagtggcttcaaaacaagattttgagaccaaagagaaagttccattatgtgctacaatgtcaagtttaaatgtacaatcaaaatgtgctttagatttcaacttgaactattatgttaagcatattatattgtttagtctccattaatcttcatattttcatgttttaacattacgtgtttaacaaattccaacaattagcacacaatacttttgatcaatggatataaatgctcgttgttaagcaaaaatttcacatttagaatattaaaaataaaagcaaaacacaatttcacctatgctgaatttatagcataagagtttattaat

SEQ ID NO: 37640 - DNA, 4149 bp, Cannabis sativa
ctcatcaatgtatccttcatcaagggagcgagctagatcacgagtacgtttgagcatctttcgaaattcaatttcattgatacttggtggacgcttaggcttatatcgacggacagggggcgaggccgtggctggtgatgataaagatccaacggtaaaattcaaaggctgattggcgttgagatccgccatgatagtagcgaaagcttgagacacagggactgtgtacccggttgtatcagaagtgttcagagccatattggcagcaggtgaggccacagtaggattagctacagccgtttgttcagagagagatatatcattgttgctttgagtatttggctcattggtaattgggtatggtaaggtaggggcatgtctaggagtggggctatcaaggtcaacaaccacacccatgttttgccaggccgagagagaaggagcagagtttgggttaaagtgatcacggttaagagagatattgtgaggattttgggtcatgaaacagccaaccggggtagttcttggttgatggagatgctggattccaaaatcagaggttggttcattgtaaagcggttcagatatgatttgggtagatgagtgccgagggctgggaggaggggccagtgagacagggttggagatatgggggcggaggcgagttctagtgttggctatgtagaaaggattggaggttatgcgtatcttggctcccaaagtgtgatcatattggagtagaggaggggcagaggatgaatcacacttagcaaggaattcagggcagtgattgacaatatgattaagccggccacagtaatggcaaaagtcaggcaaattttcgaatcgaaactctaaccaaacaggggctgccatcccttgaaaatggaaacctgttccacggggaagaggttgagtaatatcaatctcaattcttactctaaggtatggaccccaggtctccttaagggaagcagtatcaacctcaatgaatcgacccagtacctcccccaatttcctagcaagagctcgagaacgcttcagaaaaggaattccagatacttgaatccaaaagggagtcgaagtaagcatatctgcattgacgattgaaccagcttccagaggagacatgactataagtttatagtcgaagtgccatggttgaccaataaggacacgcctgcggtcaccaaagcagccaaactcaactgtaaaaaaatttggctctttttccagaacattgatagagtagcgttcaggccacatttctctcagacgttttttgaaggcttcaggattaaagtgacgattggttagcaatttgactgcaagaaaagctgaaggctcctctctgttttcatcttcaggcaactcagttgattcgacaaaggagtgtattttggtttcgacttcggttaggttcaaattagcagagagattgttggtcagttcttccatagggacaggaatttgaggccagcaaaaggaataaaggaggagtaaaacaagggaatggatgggatacgaataacacagggttttgtgcggtaattgtgcctggtacaaagctgttagattctttatataaggaaagaaaatttggatcaataactcccagggattttcccaaataggaaataaatacctcatgtcagagagggtaatgatacaaatggaatttgcagtggctcttagatctattctagtggttctgtgtaagaagtagaggtcgcctaaaagggtaggattaatgattatccatgggggtgcagaaggaattgattttcctaatttagcatcggctagggctaagatgggaagaaattgggcatgattaatgaagcaagagaagagcaagcataaatataatttcaggcagtaatgatcagatgggacgcaaatggggaaattaatactgagaagaaggttacctgcatttgtggagatgtcttcgaagatggatttgcccagatgagtaccagccgttttcgttataaatgctgaagggacaggttccttcccaccgccaccaggaattgaaagccagggacggacgaaaacgccgattaacggcgacgacgacagcagacggcaacgatacattgagatccctagagataccctttcagagagcaccggaggagaactatccagaagttttttatatataactgttctctctaattctgtatagaactatatatatatatagagagagagagagattaattatagtgggtgttgtcggctcctgacattattagccaaacccaacactggtgatcaatagtggaaactgtactgtaagggcaaaattggaaatttatcactttctttcttacttttattttcttgggatttttgtgtattttgtagtaatataagggctattttagcaaaaatgtatttttgaagggctggacgacaataaaagtattttgagggggggtaacaattattactatgtatagagtacgggtgtttatcggttagtttggttaaattatatatagtgaatatttactaacttaatataaatattgggttataaattaatatctaattataatttatttatcgtctaatgaaaaaataaaaaaaaattaacctgtctaataattttattgatttggttagattaactcgatatttatttatttgtttttttttattattattgtttgattttagtgttcaaataattggtttgaaaaaatagatgtatagtatgcatatattaaaattaaaagagttatagtttaaattaaaagtaaatactattttgaacgctatgtattgtaaaagttatagattgggctatctgttttgttaaataaaaaaatagatcctatattttttaaaatgatacaaatatgatcttaataattacccgacctaaaggtgttatgacaaaattagcactaaagcttaggcactagtgcttaatattctccttagtatcatattattatggtgtaataattaagtattagatcttatataacttaaaaaaatatttttttaaaaaaatatcactaaataatcgtaaatcaccacttatagaagatgttgagcattagtgtatccaatagcaatgcttaatttgaacattactattaggcattagtggtgcttagtacctttagacatgttaccttacgattagctagcgatattctttaaaagttattatattaaaatatatacttaattagaccaataacgatattaacatgtataggcatcagagataccttttagcatttttggctcaaatatattattattggagagagtaggtatctaacataggcttgagttaggcttcattgggttgcgttctatctatgagttctcatcactattaaactccacctagtactatactctgcaatgcaattctctgatctctcttttctttagttatatatatatattattcatataaattaaataattaataatggaatctttgtcctttacctatttcatggtctaccaaagcctgcaactgcacgtacttacatatgtatttaattattatatatatatatatatatatacatatacttgtatgtcatgcatgcagttgttaggaagtctcgtcatcacgttactaaaacttattgtttttctcataaaaattattggtgcactatatattataaaacactccattttaatttaaataaatataagtaatgatatattacactttttttataccattaaaaatatatatatattttaataaaattaaataaaaaataatgtaaggtcggttactaattgattactcttctaaagagtaagactgtttttcccatatatttcccatatattttaatattttttttttaaaaaaaattgtctataaaataaatcataagtttgtaaaactttgtcaaaataaaataataataatgaaaatgaaaattcctaaaaaagtagttgaaaaaattatgtataagaagaccattaaaagtgtagcatatatatgataagatttttgtagtataatttctccaaataaaaagatttataaaagttgttctaattatggaaaaagttatatgtcattcggtaagacatttctgaaagtctaacttatccatacggaagaaatcttgtggaatgatagatgtcatc

SEQ ID NO: 37641 - DNA, 2803 bp, Cannabis sativa
  modified_base (2641)..(2646): a, c, t, g, unknown or other
ttcagttccattctcttctgcagataagtggagagtgaatgattcagcatcaatgttttttctctgcctaaaatctgtctcttgcgatattgcaattgcattcacaatattgagtctggggtcttcattatcttccctgacagagagtttcttgatctgtgagaggaagagaagaacttggggatgaattgtggacagttggtgcttcactggtttgactttctcaggcttcaatggcaggatgagaattgtggttggaagaccagaaccagaagtgccatatatctgctggagttcagggagagtgggattctcatcaacccattcaggaacaatgtagccaacattgcagtgctcgcaaggttcttcattgaaacgaatctggtatccattactgaatatgtacggccttgcagtgatcaagaacacacttttgaatccaatacctgaaaaaagatagacaacaatgtaaataaacaggaaatttgtcaaacaaataacatgaaattatgatatttacaaaatgattacattataaactatgtaacaaaattataatttttgatccatcctgcaaccaacctaaattactatgctaataattttttttataaagactatttcgcatcaaaaagttttccttcactcttaattaatttttttactagcttcaaacttttttcacgatttataacactttgttagatttgttaaacataacccaccagaaaagaaataaacagaaaatgatagttaaacatgaaaaacattaaactcatcacaatgaaaacaatgttaattctcatactaaattacttttgtttttgtcttataaactgaattctcattactaattaataaaatctattttttttaataacattaaaaaagagacagatagagaaagacaattgaagaaaaaaaaattgattactgcctcataaggaagaaaacaaatagctataatattcaaaatccttaactgtcaaaagtaaataaataatgataatggaaattcattccaacgtatctatacgacatcaactgaggaacgacattaatccctaacaaacgacaataataaaataaaacgacaagccttgggtattacaaaaattccagaaaacgacactatttgtataagcaacgatattaagaaaaacgacaacaataaaaatacaatcttccagagaaaacgacacgattaaaacgacattaaatttggaaaaaactttaaaaataatttcacctattttttcctctttctttttctttttttaactaaactttttcctctcttttaagcattttcagatgaagaacatttatatttttggtataaacaataaaattaaatcaacaacgatacatcttacatacataataaattaagcacaaacattaatgaaaaaggcaaaaagcatactaataatttatcaaaacaaaaaagagagaatacatttcatattatatatagtgatataataacatatatgggtacctttttccccaatgtagccacgctttctgttccctttcttagttgaacgacccacactgcaaatcgattcaatgtttttacaagaaaaccctcgctcgttgttgcatatcagcagagttgccggagctccagtcgccgtaatgtccttagacgtgattatgaactctaacgaaggatccactccctcgacgtactcattatcttcagcgttctacaaaacaacatttcattttcccgagaaaatcaaacgatcaattgatcctgtacaaaaagaaaattgtaaagtatatagacatgattaagttttcattacctgtataagctccataaggaaatggacgtctttggcgtaaagttcagcagagaggttcttaaccgcttgatgaagatcctcagtgagtggattaaggttgcctccaatggagaatttggtcctcctgatctcctcgatgtgctgtttcgccttctccatcgccatgttcggtacgatcaaaactcaaaaatcttcacagagagagaaagagaaagactaaaacagagtagagacttaagactgagctcttgactgacttagcgtgacttattagttatttatatataagaaatggaaaaaaaaaaaatattaaaaataataactccttgtatgagaagttttgaatactttttttttttatgggtgaaaaaaagctttggaaaagttatttgattggaaaagcaaaaaccttgggacgaaggaaactataaataaaagatcaaatttttatgttttaattttgggaaattacttatatactattgggtgcttttacaatgcattctattaaaataggtgtattgatacaatttctaactgttttggtatttataagaattttttaatctaaattttttcatagtcgtgtacgttatagttatttaagaaattctgtcaaattttgagaaatttagcataatttacaatatagaaatttatatttaaaccgtctatttcatacgcctataaaataaaatagtcacgcgtgcaacatactatttgaacattattttcgacgtgttaaattttttttgaatttcttaaaatcttgcaagatattttaaataactataacttacacgattatgaaaaaaattagactaaannnnnnttatagataccgaaacagttaggggttgcatccgtacactcattttaagggaatgtattgtagaattttcctatactattattttaattttttttttcaaatttacagtttgggtttctaaagtagtttctttgtagtttttatgtaggttgctata

SEQ ID NO: 37642 - DNA, 5961 bp, Cannabis sativa
tagatttttttaattatattattgtacaaatagtatttttaataatatgtatgaaattataataatgctaatatgtaatattttaaatgcttaaatttaaaaacacaatttttttatgtattcaaaagattaaattaatctaatttaaaaatttatcttttacttaaataaattctttttaattttttaaagagtattgtgtttgtcattaaaaaaaaaatgttcaactacatggaccccttcctttttgttgttgccagcgctgggccgagccataagtttttattataaagggcaggcaaagcccgaaggctgctatcccaataggtcagcaggcggaatgaggagagggcccctggatggggaactactcttttgatgggtatcgcaatagctttatttgcggtatttcctatctattattttagagatttataatccttttattttagtaaacgtaatttcaatgaattaaattcacaaaaactattaacttacttttcactataaagtgaatcttttagttgtctgattttatatacaaagaaagtgatatagaaaaaaaaatatatggaaaacatgttatagagttaaatatttaaatttactaatattatttataaattttataattttctatttctccatattatcctctctactctcaatccatacatctccctccattctatctatccttctctccactctaccaccaaacatagtgttgaactcgactcttgaccctttagaaatttagactcataccctacgtggatgcgtcatagcagccaaatgtaacacgtggaataagccacgtcatcaccgtcaccagttgacctgttgactttaattctcacatcacatcttcctaacatgtaggcctcagtactcaaatctccctatcacacaccattaaatcttgatacagaatattccgagctcatttcttcctcatcctcttcaataatgtctccttcatacaaaatctgaaatttttgagaagaaaaggtgataaagctaacataacatggcctggttgaagagcctaatccaactcacagtcaccaaatcctcgtccattagagctagaaaaacaaacccatttcccttgccatcgctcgctttgatagcacaattcagcacagctccgaccaacgagactccacgagtcactccttattcgggattggggcccgccaagccaggtgagaagccgagggtcgtggttctgggatccggatgggctggttgcagactcatgaagggtttggacaccagtatttacgacgtcgtttgcgtctcgcctaggaaccatatggtgttcacgcctcttttggcctccacctgtgttgggacgcttgagtttaggtccgtggctgaacccattgggaggatccaccccgccatttctcgggaacccggatcatacttcttcctctcgaaatgtgtcggcatcgatactgataaacatgtggtatgttttgtttattcttttatattcgctttctgggtctattgattttatattttgcgtcgaaaaactggtgtgagagttgtgatggatcttaaatgtaccaattttgagttttggggtcaattcactggtttggatagttgcaacttacaataaatgattattaaaatgataagaaatttcaattaaatgtacttttgtaattcggtgaagaataataagcctttgatttgacgtgggtgcattttgccataacccttttttgattcaatatatttggtgtaaaagaaattgtggggtgggggccatagtctgaagagtactactactggtggatcgagttcaaatctttgaatgtataaccacattgattttttctttttccacatttgcaaaaattgttaattaataacagttggtatatatcgaggtcttgggttttggaatggcttacatgtaacctcgttttggtttttgtttattgaaggtggaatgtgagacagttaccgatggagcagaatctttggatccttggaaattcaatatttcatacgacaagttggttattgcattaggtgcagaggcctcaacttttggaatcaatggtgtaacagaacacgcaatttttcttcgtgaagtttaccatgcccaagagattcgtaggaagctgctactgaatttaatgctgtcagacatacctggtattctcaatgcatccgtgttctagtgatttgttttttgatgggaattcagtactgtgatttggctgaatttaactgtggattttgttatggatgcaggggtttcagaagcagagaagtcaagacttctgcactgtgttgttgtaggaggtggtcccaccggagttgagttcagtggagaacttagtgattttatcacgagagatgttcgacagcgatattcccatgtgaaaaattatattcatgttaccttaattgaggtttgttaactaacaattgttagatgcaactaattagttttcttgcttaaaatctttgttcttctgttattgttactggagctattcaatttgctttacctaattttatttttattagacaaaatgatggtaaatttgcttaaggattttaaaccaatgccaaaatgccaaattgttatcgtaactatgtaatgttgacacaggcaaacgaaatattgtcttcatttgatgatcgactccggcattatgcaaccaagcagttgacaaaggtaaataaattatatatctacaattttcttatttgattgattccttttgtttgtgttttcttttaaattcatgattcagatgttaacaccttaatttgttgtaagaggaacttttgagcttacacgagataaatagtgacttttaaaaaatatctccttcaattttcacctattagtctgatccgaaaatatttggaatagcccactgaacttacttttccattgtacatctggatcttttcatttaagtatcctctctcagtcaggagttcgtcttgtccgtggggttgtcaaggatgtcaaagctcaaaaattaattcttgatgatggcacagaggttccttatgggctgttagtatggtctacaggtgttggtccatcgccttttataaaatcccttgaccttccaaaagctacgggtggaaggtaggctgctgcatatgcttcgttctttctcaaaccatgttagcatggcctaattttctacattaaatcttctcaaaccaccactttggaccagattaaatttgaattttcatggacttgctatcaacttattgaattgtatttaatgagaataaaaaacattgtcgagaagtgcctaaaatttcttgttatctctttcattagcttgttaagtaaagtacttctgtctttctttccatcgttctattttcaatattcaaacaatgcttcagaaaaatagatatttactaaggcaaattgcacatgaacaggattggtgtcgatgagtggctgcgtgttccttctgtggaggacgtattttcgataggagactgcagtggctttcttgaaagtactggaagaccaacccttccagctttagcccaggtaagctgtatttcaaaagacttttctcttttgtgaaattcctctagctccttgctactctgtaagttagctcagacaactcacctctcatcgcattataaaactaaatatgcagcttttcttgcttggcgtgccctttacagaatatgacttgttttgaaattttatgtaattgctaacagtatcttgtttgccaaatgaaggttgcagagcgtcaaggaaaatacttggcaaatctcttgaacagaatcggtaaagctggtggaggtcctgcagacagagcgaaggacatcgaattcggggagcaatttgtttacaagcatttaggaagcatggccactatcggcagatacaaggctcttgtggaccttagacagagcaaggtgaatttccaagttataaatctattatgtttttttcctttgaacttctcaagctaaaaccaggattgttcttcttcaggaggcaaaaggtttatctcttgctggattcccgagttggtttatatggcgctctgcttatctaacgagggtgataagctggaggaatagattctacgttgcaatcaactgggctaccacttttgtgtttggccgtgatatcagcagaatataaagttggaaaaaggtgtctattctacatttcatctttataccaaacccatgtacatatgcacctttctttgcttattacatattccgtttattttatgcaggccaacaataagtcggatctaatggagtttgcagctggacatgtcttgcataaatgaaaataagtcatcacagatcaagtttatagcattaaatgagataataaaatattcccctttttgtaaatgtcgctatttttttttttttgaagaaaaatcataatggtgtccgaatgtcattagctggtcattatgctatgtacatggagtctggagatctatatagtaatagtgcaagtacagtaccacgcttgtcgaaagttgaaaatgtaagactagttaattttgttttctggtggaattatttgatgatatactgtgtgtgcatttggaaattttcgtgcatgaatctcccaagccagcgtagtatgacaaatttcctatagtttcagttgaaaatttgcagtagtatgacaaatttcagtaattttacataaaatattgcaaaaatcattattgacagtaaattgatactttcatcattaagatagatttcgttgtaacaacgaatgcgaatattagtgagctctgcggagttatcacttgtacaataaaatactttatatagatttataaacaagtagatctacgatccttacagaaatgtcaagctacaaatgacagactccttttttatagcatcaagcaaggacaatccaactgaggaaatttcggaataagttccatattatattaaactaataatactacatcaagtattacgcaaaatacaaaggatctgttgtggcatcacaattaaactaaacctaaaagttatatccatgcagtgaactaagtccacaaacctccaacgccagatttacccagctttttgccaacaacgttcctcaattcaatctctccaggaaacctaccctcctttagtttagagaaaatctgtaatgcagaaaactacagtcaggaactttgaggcgtcaaatatcacctgtcaatctttcacagaagtacggtctagaacatttgtattgcaaaggaagaaaaggtaaccagttcctactaacaaagaaaaaatcaagagagttacagataagattaaaggtgactaaccaattcattgttgaggtagacctcaaatgccccagtgctttggaggaaggattgcagagcatttccaagaagccaagaagatgcaatggtgccaaatttgtttgcacgcagagaataataccaaggaggaggagtcataaatcccagcaatggaaatatatgttcacccgccacaacaagcccaacagctccaatttgagcaacgggaaccaatttgctgattatacgtttatgtaaagctggtggatgatttgcaagagcaacatcaatcccaggaaaagcagtctccaacatctttttcattgtaagggcatttcccctaaagaaagcagcatggattgatcaaaattaataatcctttactacacttaaccagtagaagaacgtgaagtactctcagcactagggaacaatttagaattaagacaagaaaaaaaaaagagcaaagagaaatacttgaaccagcaccaagaatggactttgtaggaaaggaaaatatttaagcacaaagaaattatcccgaaatattaatcaaaccccaaatgcaaagaccacgacacacagtaatatcacaaatccctgaaaaagagacaaaagcagagaattcgagcgtacctgtaag

SEQ ID NO: 37643 - DNA, 2289 bp, Cannabis sativa
aagaaattagttaataatttcttaaaaagaaaaaaattgaaacattatttactagttttcctagaaaaccaataatggaaaacttaatgaattttagaaattaattaaatgatgaaacaagaaaaggagaaattggatgatcataagaaatacctaaaaatataattttgtcacatgatcatatatataaaatctatcaaaatagccatgcatatatataaatatgtatatatagaaatatatatacctgataattggaaatgcatatttgagctctctggatggtataaagcagacgttacaagagaactttgctcgatttcagggaaactcatatgaccaaacaacccaccatggccgtgacggccatggtgatcatctccaaaaccaccacaagaattcgaagaagaacaaccgccgcccataagatcaaaagaagtagaattcgaaggagaagaattattcgaaggagaagatgtaagaaaagaataaggaaacccacatccaccaaacccggccacagctatggccgaggcagtagtagtagtatgagtattattaccactactactagaagaagcagtattgttagcggtggtggtcgaagtaataatattattattattattactttcatactgaattacaccaccaccgctaacagcactgcttccactaccattaccaccgccagagcctatgttgtttagttgagcttgcaactggcgctggcggcgtcttgacctagaacgacggttttgaaaccaatagaagacatttgcatctcccacagccccaaatttctcaaggagttttcttattctaacagtctcatcttttggagggtttaccataccactattgaagattgactcaagtataaggatttgttctggctttggtgtccatcttgacctcacagctggttcaccaccatcattattattattattaattctgatttgatctgacccatttggactatttgaggaatagtagtgatggtgatgctcttgttggccttgatgatgatggtgatgatgatcttgatccattttcttctatgttgttgttgttgttattgttggatttcaagaagttcactatatatgtatgaaacctaggtaagtgatattatataatatatatatatatatataaatataggaagaggttggagaatgagaaaatattgaaagtacatatataagtgaaaattgtgcttcgtctaggggtgtgaagcctctctctatatatggttatatatttatatatgaagtacttaggaattacagaatgttgatattatagtcaatttatttataattactttaatgccccttctcaatatagaatatagaaatgtatatcttattagatagctatatagaaaccgacttagaggatttgaagaagtagtatataataatctagaaaccaccatatatgtgttattattagaatgctatagtgaaacacaattaatgtgtcaatacatgttatgtaataaagacacaacttcttttcttgataagtataaatcttagttttaattaccacaagaaatgatttcaaaaaaataaaattatccacttttttttttttgaaaaagataatgttatctgtattttaagaaagatgacacgtacgtagtatttctagagaattattaagtaggaatcgcttgtgccaaagcccttccacataagaaggctcgattcagatgggagatgggcccaagcccatatgaagcctgttgaggtttgatctcttgatgtttggatttactgtcagatttgacagttagtaacttcccaactaacttaactgtttcgacaggtaagttagttagttactaacagtataaatacaccttgaagtcctctcatttggtgtgatgttaagatacaaattcagagagttaagaaaggattgagagtgttgttgagagttgtaattgctttctcttgagattgtgagagagagccatttgagaaacacttttgtaaggagcaagtctccactttgttttagggtttgatccctgttttgtacctctgttcagatcaataaagttcatcaccacagtcatgattaaggttgctttctccagtggattaagctcataatcacattgattatgtagcccaaccacgtaagttcctattgttctttactgctttctttaaggtcattttactggtttatttttctggtttaatgtttctggttttatgtggcatgtgttcttgatcattgtgtgttattttggtgttgtgttggttcttg

SEQ ID NO: 37644 - DNA, 3839 bp, Cannabis sativa
ttagcatttgtagttggggtgtcaatttgttcttgtgtgcttgatatgattgagtcaagagccctacaaccccacactacaatctgccatattctaacattttgttggtaaataaataactagtataaatatcattatatatgtatgataaatattattttatactctctgttttgtaaaatgtattaatttgactgtttgatttattaaataataaatgaatcttatattttccatgtacgttatagatgtaatatttctaacgcacaatgtttagtaaaaatcaacttaaaagacacggttaataaaaagaaaaccctaatcgaaccattttaaaaagttaatattccaagttccacacaacgagtaataaagataacatcgtcgatttattgttagaagagtttgaatatgaacatacctcatcatctccatcttcaaaacaattaaaaaagtgcattgtgcaatttggttcaacctcaaaccatttgattgaatctgcatcaccatatcgaggcataactccaattcttgcatattcatctttatcatacttaattaatctacaaaataaaacaaatctactaattaattaatagccaaaagttgtaaatttgcctttattttttttttttataaaaataaaaataaaacaatagtaattaattaattactcacgggcctcctcggactagtctcattatgtctatagtaagtggaatatccataatcaaattgtacctaaagcaagtaagcaagccaatattatttaagaaaaattatttattataatttttatacatttttttatatttttacagtattctatataaataaacaaaaacaaaaaataataaaaaaatcacatgcaattaataaaaaaataacataaaaaaattaacaacaaaataataaaattataacataaaaagacattaaaagtagaatgtatttattaatttatgtgaaaaaatcttaaaactataaaaatgtttgtaatttttttgtgtttttttttttgaaataatccctatcatttatatatgtaattaaataattaataatgaaaagcttatttaataatgattagtttaaaatatattaatttgtaattattaattacctctttgtgatgccaatgtcatggcaaattgggcatcgtttgagttttagatctgctctatgaactagtttctttccatcagctgaaaatttgaattaaaaatttagaataattacaaatattaattaattagtaataatctcaccaattaataagatataatataccagaaattactcctatttcaacgtaaggcttagttggggcaattccaattgtaaccaattccccactgcatgcaactctctgcatgtataaaatttaattaggatattaattgtatgtagtgaaaattatacattatatgagttaatatatcatatgattaaaaatatgatattttatattttatgaaaaaaattaaattaaacatgaaaaaaaatagtataaggtaactagttactctaaaaagaaaactggttaccaaagagaataactggttaccctaaactgttcatactttttcttaaccatgtttttttttaaaaaagaaaatatacttgaaaaaagagagtcatattttcgtatacttagccgaaaagaaaattataaaaatgaaaatttccggtaattaattaattgtatgaattttgtgaaaggaaattattgacaatttcttagttacctactataaagtaaaaagggacaaattataactatagtttttttttttttttcttttttgtaaatttaattacaccaacacataagtacaaactatagttgctaagaatgtatataggagacaaaatttgaaaccctaatttgtatataagtacataagaaatgagcttataaatacaataatgtaagtacctttggatggctagtgaaaggtctattccaaattggagaaagatgccaattggctaatgtttgtaatgtgaaaatgtcaatctcttgaggcatgtgattttctgcaatggaatatacctttccacaatgttcaaacacattggtgttgcttatgtatttgtttactttcccaaatctcatctaaaaagtcacataataattcatatatgagtaatgaattggtcaaaaaattatttgcaaaataattttcttttcacaaatctctttgaaatgcaaaaataattttgcattgttttgataattttcttacaaatgacaattgaccgaatatcataatgtcgatagtcatttatataagaattatcaaaactaaaaaaacattacccaaaaaagtaactatatagttaccaaattgaggagataagcggataaaacagctaaggaatcgccccctatggcgggaagaaaagagggtttgttccttagtttttcgagggtgaaagtttcggttttaatatgtctattgttgtagttgacactccaatagtattcttcatctaattttaatactttggtaaaatagagagcatgaagcattccttctccttctacccatatgtgatttgactttccaaaaattgactttgttgatttaagtcctccatgaagtgggtttggtcctgtaattggagaagaaaaaaaaaattacatgactgatcatataatatagaacaaacattatttattgaatttttaaaaataaaatgttacatagagccataatataatatataagatactcatatatgtacaaaattatgaattataagaatttgtaaatatttattttttaaaaaatcaaatattaattgtatatttataattagtttttttttttcatgtaattaatttctaaaaaatgtgaatgataaattgtgccaaatgcatataatgtaaatgttgatttttcccatatttttgtaatatatcatgtgttcacaccatattatttgtattattatacccactcaaaattttatctaatatatatttttttatgtcaaagaaaaataatatacatactttaatttgtcaagtaccggccactctaaaataatattaaaaaaccttttaaaaaaatattattaaaaaaagaacctatatagaatatatagtgcaaacaaaataatattctcaaatcctaatatataaattaatgttaataatgttgcacatcatcacgtacgtacactgaaataataaaatacttggctatataatataatattacagcagggctactagttcatatatatttaattgattttgtcatttacatgatgtttcacatgagaaaataaaatattgtataagctttcaggtgagattgaattggttaatactgagttttgtggttcgaattaggaatcagacttatgaacatatacagattcaaatgaccttcaacctcgatctctcgatctcttgacctgtctctctcttctctctcactctatctctaaaattttggatttgaatttgaatttctatcttctctttcatgaaaagtaattttgttttcctcaaaagataataaataaaaaaaaaattgaaaatggtacctgatcaccaaaaataatttcatgcttaatattaccaaccaactactaggtgacactacaaattcaaaaataatattaaaaaaaacactcaaaataatttgacatatctagttcaaaataaaatatatatatatattcattaaataatgcgtcacattttaatattgactctgaagcacccacccattgatagaatctttttttagaagccctatatataaaaaaatcccctatagttaaatataggcactaaataatttttgtaattatttaaataa

SEQ ID NO: 37645 - DNA, 5506 bp, Cannabis sativa
tttttttacattcccaacggtttaaaaccgtcgcctataacagggtatagtcgacagttttaaaccgtgccctatattataagcgacagtttaaaactgccggaaagtccacattagcgacagtttttaaccgtcgcctatttgcccattttacgatagtcgtataggcgacggttataagtactttaaacgactgtttaaaaaacgtcaagaaagactatttttgtagcaataataattatattgtagtatgtataggtttaattacagaccatctttactcataaattgtcccaagtgtaatgtttaagttctacaacatatactactcttttctttaaggtgcttgttgttttaatattcaaaaatatgtaagcatgaaatagaaatatattgattattgccccaattgacgacttcttaattaattatatgtcttaaacaagatatgtatatactgggtgctgttgatccactttatttgttgccacctcaccttagttatatgtctttggttctttgagagaaaaaagtttgagagaatatgagaatgagagggaaaatgaaaaattctcatttcgtacaaagagggttttttactcgtcatagtcacccagtgtgatcatgatacgtggcaaatcaaaggttatttgatctaataactatctcaagtcatgcttacacagaccctgaagggtataatgatgtggcgtattagaaagataaaaatcattatttcaggcatcattttgaaaacccttgataagacttccaaacgtcactttgatatgacaacacaacttgcctatcactcgagataatttcactactaacagacagctgtcattgcaaaactaagggtattttttatggcacgagtttttgttctaaaaatatgagtacagtctcgtaaatagctgacacgtggacttaattctcaatggaaaatgatgacggatcaatagatagctcttgtggagctaaccttacatgatgtgaacttacaagaaagtgcaatcgagacagggtctagacactatacataatataacatcgagaaataagtaaggtaccaagagaagttagtactaatcgtgcatgtatcaattatatgtgatgagcaagtatatctctaatgtgataggtaaagattgtttctttacacatgtttggtttgaaagtctaatgtgtttgacgactcattaggtactcacaatttctaagtgttcaacgtaaaaatattcgaatatgcaattaagaatgatcgctgacattcacctaataatcctaaaggcccattatgtgagtgaaatacctcagagcctgcgcgcttgtgcgtttggaatacgaataattataatgtaactagacaagttgcgcacgttcaggcatttaatcaaagaagatacaaaatttatctttcatttattctgttaacattatcttaattaatgtaataaatggtcatgtctggtcgattatgtaaaatcaaaggacacttgctttttatataacggagtgatccaaatcaaataaactaaactgaaaagaatttccaaaagtgacctaagcataccaagctctaactgaactactacacttctctgtctcatttactttttattgtctttattttgtctattttgtagtccaatctttgagtattcaccacactaggtgaatacccgcatatttgtaagtgtgttcttgctttgctcgaatactcactatttttggtgatgtctaatttctttcgacaacaaagatgttgggacttgaagatgggtccaaaggagttacaaaactccatttttgattatgctgaaaatgagttaggtgacatattgcttaaagtaattttcattgtaaaacctcccaaacgtttttgttttattggagtttagtcccaacatttattctccaatgtctataacccctatatcactgatttgtgtgatgataacatatagagtgtcatgaaagtgtgattatcttaaatataataaatagtagtctaatgtgctcatttgtaaaacctagttttctatcattaacagcactttgttagaaaactctaaagcttgataatacattattaaaatcatggtgatctccacttttttacactcaaaattgtgagtgaaagttctcttcatcatttttatcttcttacatctagtatattatttgtataatatttttcttctacattttatacataaatatatatatatatatatatatatatttacttacaaaatacatacatacatacatatcgcctaaagcctcacaaaatttaagacctacattttaaaagtaatgatttttttttatatatataatatgggtaatatacattaaaaaatatatttagaatatatttttagaaaaaaacttcttcattcaattaatttgaacattaatatttaattgtcaacattaattaattttaaatctaaaactttggaattattggttatgcccatatttcgagtcataaatatagttatgatgtggaaagttaaatacgaaaattgtgaaaaactcaataataaataaattgtctcaaaaaataattaattacaggcaatgttagtctcgcattacgtattagcagttagatcactagataagcaacatctcgaagtgataacgatagaagtcttctcgggtgtaacaaatcgaaattatatcactaaaaatggtagataatgagttctttaagagcttgcaacttattgactcacatactcgtgagtatgttaaagaaaataagtaaagtgtaacttatttcaaaatctcagaagactaagtctaagagttactctaaaaaggctaaactaaagcgataataaatattttaactagtatctcgtaaaatgcgactagctatccttgaaaattgttgaaagatgcaagccatgcttggaacgtgttacgtcaaccacaaaagactacttccacacaagatcaaaaggaagctattagcaattattttattttatccacatgttgtaaacatgaaatgtgaagattgtccacgtttcataaatggttgcctagataagatcgaaaagaataattcatgtcgtaataaaaaccctataaatgggacaaaacctaaagagaaagggatcaatcattttgggaaagaaagaccctgtgagattgagtaaaaatattcatagttattcatttgtaatccaagtacaatacctaaaaatactcataaataataataacgtgtggagtatgtaaattttaactacaaaactacgtaattagtgttttatatatatatatatatatttattaattatatatagttaatttttatttagaggaccttatttattgataaacgaaaatttgagctaatatattaataattgatgatttttttaataaaaatttttatatataaaacaaatataaataatattataatatttttatataattatacttattttattaattatgatcatttttatgcttatttattttttatgaattttttttaaaaatgaattaaagtttatattcatgaagagaaaaagattaatcatagtgtgatgattattaataaatatgtgaagaataatataaatttaatataaaaaataaaaatcttgaaaagtaagaatttaaaagtagtttatctgaaaataaaaattttaataaatcttgataaaattaataattttatcaaaaatatttaatttaattttcacctaaagccttattcaagtttcacttaaattttgtacaagcttgagacggccctacatacatgttataaaaatgtgttgtatttatttaattaatatttgtctttgtattgctatattataattagttgttcttgatttctattcttgtaataaatctctaacatacacatttttattattaagatggataatatattaagttttgtccaagtgcatggatcatctaccccaataaactattatattatatctgttgctctacctattttaatattctttatttataaaactacaatatagtactcattaatttattaacgtgtcactatttactatgaatttcgaaaaagaaaaaggaaaacgtgtcatttactatgcataaaataaatgataaaatgtcttatagttcacaaataattgaactcacacctaccattaattatccaacgtgattcttttttttttttttaatgagaacgtgatttaagtgtgtactaataattcacctaccaataaggtaaatttaataataaatactgtccattgtgtgaaagaaatgaatgatttattgactaatatacataactttcatgataataattaaactaataaaaaacatttaaataagttttcctatatattaagacaaatatttctttcgtatcacatgaatgataagtttgaactacaaattaaaactagttaggattatggttttcgcaggaccatctcaaatttgtataagattttaggtaaaatttgaacaagtccttagacgaaaattaaattcgacatttttaataaaattattttaaaatttattaaaattttatttttcagactaattaattttaaattcttatttttaagttttttattttttatattaatttcattttattcttcccatgttttattagatatttttttttttctttcatgaatgaaattatatttatctataaaactcttttataaaaaataaattattagcagtaataaaaataagtataattataaaaagtttagatttcttttatatataaaatttcttattaaaaaatattgattattaattaaaaactctagatttgaaattgattgaattgtaatgttaacaattaatagttaatatatataaaacaaatttagtactttagagcatttctagtgagactttagagcatttctagtgaagtatcaaatagtgaagtatcaaataggtggtgtattgttattttttagtacttttcaataaaaagtttcttcaatagtgtgctataagttgtgtcaaatttaatacatacgttaaaaattgagttaaatttgttacaagatatagcatgggctaaatttggcgcacaataaatacaacttttttaattatacttttgtcatcaatcattaatgcatgaaatactttaatacatatattttatttacaatattgccattagtaattttttaaatatttaatttattgtttgtcattaatgatattttattttttaaaccaattacctcttaaaatgttattgtgcattggagcaacatagcaaatattgtgctaaatataaagtttgtttattttttgtgctaaatttaatgcaatatttaaatattgcattgaagatgatcttagacgattgcctaaattatcttataattaaaccagccctgaatttgatgatatatgattaataaatagggtaaatagtggcataagtactcaaagttttatgtttgtaagcggcataaactcaatattt

SEQ ID NO: 37646 - DNA, 2694 bp, Cannabis sativa
ttgtgcatttgtgaaattttccctaaaaaatacctacaattaagtggacttggtatccaaaaataatatgtgttttctaaataagtcttacaaaaatatacaaactcaataccatacaaaagttccaaagacattcatagaaaatggacaaataaaaacatgccataaaatgccatatatttcaaatattgtttcaaaatcccttgtaatttccacttaaggttggttttggtttttaggagcccaacttttttcccttgtaatgggctttgattttcaaacccataacacctcattcttagccggagaaagctcgaaatcacaatttcacaaataaatccacttatcaaaaaaaaaaaaaaaacaaacaaatccagttggagaaaattcaaaatcacaaacaaataaaccaaaaggagaagaaaatcattatgatatgatttgatttgatttgatttgatttacccaatattaatagaatgagcataccatattcaaaacaaaaatagaatgagcatacccaagctagattcctaccatctattaaccatgctagaatatacctaatattcaatctcaactaaatagatatagtatagaggatcttaacattttatgccatacatatatatcctatgtatttagtttagattgaaaattatactctaatacattttcctccatttaaggcaagagatatatctcatattacaacacaaattttcacttaatataatttgaaaatatcaatacaaatgataattaactacatgctcttttaagagaaaatgattagatttcattttgaaacatgtttgtttgatatgcttatataagtgttcttttttcagcttagtaaacctacaaatccaagcttagctacctaaagtcccacttgaaaaatcaaagctaaagcaagattaaataaataattatatataatggcagcacttcaaaagtttcttatgctttttctcattgctactgctttggtttccattcaacttcacagctctagtaatatctcttttctttaattctcacactcactttctcttgttaattatatatttggttaattgaataataaaaatgattatacataatatgcagatggtgaagatgtgcatccaaaagggccagttgacccattttgctatgtaccatgttcagtgatatttggggataaagaatgctcatcatattgcatcaaaaagaagttcagaactggcatatgtatgcatcaagatctatttctatctacaccaaatgttgatttaatgtgttgttgtagtccttaatttttaattaagaaattctaataatattattattgcattatctttaatttatatgtctactcaagcatgaccaatgaaactaggaagtattatgttttttttttaatatgaaataacaattgaaatattagcattcaaagcaagaaattttttaaattaacctaaacattatgctcaaaaatactacgactaaagagaaatttagagtgtcttgccacaacatgagtaacttgatttgatgattgtctgataagataaagtttaacattacgtagagaagatagtaaaagttggcaatcttaaataataagtcgaggtgttattaattattttataattatatgtaagagcatctataatggtacaccatttcactaaattggtgtagaattttcatattattttacttcaatgacatactaaattatagacttaattggtgtataccaaattctacatcattaatggtattctacaccaatttagtgtacaactttttttttttattctaacccttatttaattttattttaaaatataatattacattttagtctttaaattaaaatttatcacaaaaataataattaattaaaaacactaacatatttgcaaataccaaaaaaaacaataaaaaaaaaaaataaatactaatactaataaaataaaaatgacataacactaagttataaaactaaaaacaataacattaagtaaaacaataatttaatagttaaattgatcacttgtggatcttatctttagagaatatcaaaatattggctatatggattttaaatattttgagaatcttaatattcttgatatacttgatattattggtgagctcttttttgcataattatttttcgttcattttaaaaatagtcgcgtatattagttaggatcaactatagagcttccttcaaaataagaaagatttttttaaaaaaattatttaatgtttaattgatttaataaatattattttactaaattattttgagattttaaaattttcactagaagtcatgatataattcttactcattatttcataaattaactatttttagttattaatgaaaataatataaaatatgagatattttaagtaaaatatatttatttagcagaatatttagtgtaaattattggagtcgttgcaccaagaagtaaaacattttacactacattggtgtgaattttataccaaattagtgtaaccattggagatgatctaataaattatttctaataaaaatcacttaagactagctcaagcgaccataaaaaatattaagaaatgtatgtgaggggtcatagaatctaggggtgttcatcaaactgcccaaaccgctcaaaccgcccgcaccgcaaaaaaaatgcggtt

SEQ ID NO: 37647 - DNA, 3070 bp, Cannabis sativa
ttttttttatttactgggccagtaatttttatggcttcgattatggtaagggctgctgaagttgtatttcaatttattcttcatttatgcttaaacagtatactggattcattaccaatagaatagaaagcaagaaaatgatgattaagtcaatttctgggttaaaatttaatttccacacacggatacgactgaattataaaacttcaactttaagggacaaacatcttcagtcttgcaaaagagttatttttgcaggacaaaccagtcccaaagtttatttattcaataattgcaacagaaacattttggaactgttttttctttctttttttttttaatcaataattggtcattaataataccatataaatgtagaaaattaaaaatagtagcgtatgcaggcacataatatttaatacgactaactaaaatactagttcaaatcatttagtgattgtccaacaataatacagccacacaacaaaatgcttggattaaatttccactagttcctcagccagaccaaacaaatcaacattaatgttgctaagtccaatgttttaggggatcggcctagaagttacaaacgggatatcaaaaggggaaccgagactaagccctcttcacccatgactggctggaacaaatccaactccccgtaacgctcaagcacacgcatcctacatccttcggcagccatcaaaccagttgagtaggcaccatgaacagacccaggatagtccatacttgtagcttccccagcaaagaataggttatctactgggacccttagcctctcatacaggtcatgagctttgcccacttcatcatagctataggatccaagtgaattaatgtctgtgccccaatgagaaacaagatagtgaatctgcataaataatataagaacaaataagttaaaaagaactaaaatattcttgtgaaaaaaaccgaaaagaagcctttcaaagaaactgaatagaagtataatgcttaccgggtcagaagcatcagggaggatcttcttgagttgtgtaaaagcaaaatttgcagctgcttcatcagacattttctcgatgtctttggcaagctgccccgcaggcatatacacaaggacgttatgattagtggccttgtggagatttagaaagtagctgcacccataagatgtctctgcaaccactcccaagaactcaacatttggccagaacaccttttcaaaatgtagaactatcttgttctcaatccccacaccaagatcagcaatggctgcttccttccagtctggcagctttggttcaaattttatgacatttgctttcagaacaccaagaggaatagcaatcacagcagcatctgccacaaaagtagtcccattttctacggttaccttcactccattgtaacgccttgctatttttgttaccctgaagacaggaatggtaaatgctgcttaaaccagaacacaaagtatgaaacaaaaatgctaactcaatggatctgaaaaattatacctgtggctcaagcggacatcaagacctttggcaagtgtgttaacaacaggaagatagcctctcaccatcagtccatgaccaccaggaagcaattcctcctgtgcatatgataaagaacatacaaagttagtgcataaaataaaaaaaagccgcttagtaaaaacattggtacattttgcaaaaacttgatccaaactgaacataaaaaagaaacaaaaaaaaaaacatagtctaacttctacgctatcaaaattaatctcccactcaaaccatttagtaatttacttttggtgaaagatgtatttgtgtttcttcatctctttgttgcgtaagtatgcaacaaaagtaacaccatattattaacaagcacagttcacaaaatatatttgccagctcaatgttaccacattctttagtttagtttgttttagaaccgaatcttgaaaagtattaagcatattctgcaaattcttctatcttgcaaacagtaacagcatgcatattctcttatctaaactgtagcgttagaatgagcttcaaagtttaaaactatttgtgctaggtttgagaagtactgaattaacctcaagttgggctagtcttaaggtaatatcccaccaaaacaaagaaaacaaaaatattgttttctttttttgcagcattttttttttacagttaatacaaaagaattgtcacagttacataaaataaaatctctaatccacaatttgctataaaattagagatcaaccataatttgaattactaattaatcagaggcttgcctgatcccaagatttaagtgaaattgtatcagcatctgcagcaaaccagccctccattctgcacaaataccattgaagtaccttatgggctaatccctccaacctgcatcaacaaaacaatgctagattttaagaaatcacaaacacattaataaatttctttgtagcatcaattgcagtttgctcactttaagtccggtctcctttcaaacacaattgagaaagcctgtcgaatagacaagtcttcggtgatttcttgtcttactttatctgtctgcattatgtaaaagtaacaaaatcaaaagatgcccaccaagtttcataaacaactccagagaccaaataataatgtacagtattccaattatattcccactagtaactattctaatgaccaagtagttgagacagattacatgcctcttttaaaatttcttcaaattcctcaccaactcttgtgaccaaatcttgtggaacttgatttccatccatatcaaagagtgcatagctgcaaaatatgaaaacgccttataagtcgataaatattcaactaagagtggttggcaacattacacaacagaaagaaactccagcagactagcaatgctggattagaaaaaataatccgaaaacattaaaagcttcaggctaaaaaataattgatctatacattgcaagagcttgtggatattaatatgcagtagaacatataaataagaataaccactttttcttcattacaataaaatataacaaaacacgtgacag

SEQ ID NO: 37648 - DNA, 4560 bp, Cannabis sativa
cttttacatatttcgtaataaaaaaaaccaactaggtttgttatttgagcagttagcttattaggctacataatcccacttgtatttttggacttacggaagtatcaattagagaaatttacactcaacataaatttttacaagtgtttaacttaaatgtgacaattttaattttggtcatttttatggtattttttatttttttagtttttatatagacttaggtttaccatatatttacaaaaagtttttaaaatcttataaactatttttgtagccgatgctttctctttctcgatctccaatcagctcaaccctagccgccacctccaaaagcgaccctgccaaagctccatcgccatcaacacctcactctctctttctcttcgtactcgacgacaaaggctttcgttctcttctctttcttctttctagtgagaactattgcttaagccagacgaccaacatccggccaccaacaccccataaaatgatgagtatactttaatatatatatttttaaaaattatttttaatatatatttttaaattctcactttattttgtattaatttcaatacttatcttaatattattttcactctttttttttttaaatcatgtatatttttttttaatttttctaataaaatttcatatacttttttattttaattttttatattataatgtttaaaatataatttatttttgttcgataaatatatttttttaaaaatatgaattgtaaaaaaaaaaataaaaaaaataatataattagagatatatattttcttgtaaaataaaatttatttataaaatttaaaaaagtacaaataaaactacctaatattatatcaacgacaagaagtgaagcaaatattgaaaaggacatacaaaagaaatgaataataaacgacaatatttgatacacattcatataaacgacaccatgtgaaacacattcttgaaaacgacaacaaatgcaataaacgacgaatacataataaaacagcattaaaatacgacaacgacggacattaaaaagccacgaccacaaatcagtgatagtaacactatgtttggttaaggggagagaaaaagagaggcatagagtccctccaaaaaagagggaaatggaagaaaaagataataaataaataaaatatattttcttcataaataatatatagagattatttcataaatacacaaaaacaataaaaaaaaatataaaaatatagttttacaaaattttaaatatttttacgattttttaatattatttatagaaaatacggtcattttatattgtattcttgttaatttgttgttatctgtatgttatttttgttttttttttgtgttattttcatgtagttttcttgttgttttcgtgttgtacttataaaaatcttaaaaatgtaaaaaaattctttaaacgtaaaaatataattttttttacaaaacataattcttatgtattaataatgataaactgtccatccttacaactttaattccaactaaacaaatgataacattaacaactattatctctatctttcttattacccattttctctaaactcttcattcatattttttttttcttctcaccaaacatagtctaagaatcttatgaccaaggccatcttgaattgtattaaaccttagaaaaaataaatttttttagtccttattataagaatagatgatatttttgaaaattattaaaatatatatatttttaaaataattttttttatttgggtccctgatgaccccaaactcgggcccaccttataaagcccacaacatcaaacacggtgagaaagaaaactttagactctagtttgtcttataaatacagatttttaccactaatctcttaagaaaaaacaaactgattctctctttctaaagcttatttattgtagcttcttaattcaaaataaactaccaaacatcccatctaactacatatcctttatatatttctttgtttcatttttttggacttttgtgtccccttgcttgagtaccatttaagatcatcatttattattacatataataaatgattatttattttttttctttattttgtttgataagtagttagttcaatcctattattttcaatttcattattgaagatttactttcaagggtagaaagaaacaataaaaatgacaaaagtggaagtttcattaataaaacaataaattaaggaaaaaatttagttggagtgagttacctcccataaataatagggagaaaattatataaatatatatatttttttttttgttaagaagaaaatatatagcttttaataacgttcatcaactcaaataatgggagtacacaactataaaacagttatatttagtgaaaattttaattacaaaaattaaatataattttagttacaataaaaaattacatgtgattaaaatatagtatttaaatacaaattgttattaaattatttttagtcacaacaagtattataactaaaaatatatttaattacaataacttataatttttgtaattaatacttttagtcacgaactttttaatcacaaaataataatttataattaattataactttttacttttaatcataaattttgactaaatataatttttttttttttgtaacgacaatctttttaacatattaattattaattttcaaattctttataactaaaaaaacacacacacattttgaatcaatattggtaaagctgtgatttttgtttgtacattggccaagaaagtcaagattttcagctaacttgagtcaaagactactagtgtagatctgaattaggagaactactttaaactttttctttgttttgttttcattttgacagatagcaaaattattattaggttcataatttcacataaattagataaaaaataaaataaaataaagaacatggacaaataaaaagagaatgcatattacattataagagaacaccttttttttattagtataataattaacactctccatatatatataattaaaaacaaccttttctttttctccaactacacaaaagattgtttttttactttcctgtttttttttaagaaaacaaaaactaatatttatatttaataaagagagtaacatttttaattagactttaatttgtctagacttagaagctgaaataatagtaagcataagaaagaagagtacagaaaagtaagagactgcaagagaagccgtaactcttttacaatacttatgaaaatggtcacaaatcggcgaccaacccgagtggctgttaccgtactcccccacgtagccgatcgctgtcgccgccgcacatcccgccaggactaacaaaagcatcacctataacattcacacacatacaaaaagttaataagagtatattgtgtccatattgaaaatatttaaaaatattgagtcatttataagaacacgagttacttaaaaagtaccaaatcatggagaaacaagaagaagtaattggttggattgaaaaaagtgcggcggagaaagacgacaaagacgaaagatatcgcggaaaatgcacaagcaatcccattagccaaggccaaaaacctaataataaaacgaaattgttagagcaagccgtgttaaaaaaaaaaatatgagttacttcactgatcaccaattacttattatttcttacttgagagcgggagagtagctatagcgagcggagaaggacatgccgatgatgagaatggtctgtttgctggtgaggatggtccatgtggcggccaatgtggtggcgaaagcgagaattctcaagcaaatttgggctccatggaaaaggtctttggtattttgaggtgggttttggtggagcttggcttggttggtctccattggaagatttttgagagaaagagagagagtgaggaaaagaaccaaaagagggtaactgatatagagagaaagagtgtgaaagttatgaagggcatttatagaagaagagaaaaatagttgggggaatcttttaaagacacatacgtacgtgactaccaaccaaagtaaaaacaatttattactgagattattaagtaatacaatacaaagcttttattatgtgtattaatatacatatatttatagatattagttgtttttaattgtatttttatggttttgtgatgttagatatgtgttatttcttgtatgagtacttgttaatagatatactattgaacttaacttgctttaactctaacaaaaatataatatttttcaacattttaaagtagtagcataatttctataaccaattgcaatttatatatatttaaaaaataaaacaaaattaagtcttaataatacaatttaagaaatttttgtataatagaccccccccaaaaaaaaatttagtctaattttttttatgatcgcgtttatttgtagctatttgagaccacttgtaaatttgaataatttacaatgccaaaaataaaatttaaatagttacttactatatgtatataaaaaaaaaaaaa

SEQ ID NO: 37649 - DNA, 2920 bp, Cannabis sativa
tgttccaactctgtatgtaagttttcttctcttttggatcccagttcgtgattgaatagagctgtttgttagaaagttatatctgaaatttgttacgggatttttgaaaatgaaaaattaaaggggaattgtgtaaaaatgtgtgtttcttctgctctgctttgtttttggcaagaaagaaacagcaagttttattgtaaaaataagcaatggaagtgtaaaatggtggagggttaggtacctctgtttggagggtaaggtactttctccatcatgtttacatattcttaagatggtatcagagccaaacagaattctaactctaacgagttacctatccaaaaaaagaaacaattaaaaaagatagccaccatcttactaagcattgctattaggcactagcactttctagaggtttcgtgttgtgattgattagtgtttattccttaaaagttattatattaaattatatagatccgctatttaattataccaataataatatgacaactaagaggctgctaggcaccagttctgcatttgtaaccacctcaaaacaaacaaagtacattctgttgttctgcaatgatctcggaacttgggatatttatatgatgagtggcacactaaagtctcaatatttatgttaagtatattggtacaccgatttctcactcattctttgatgagatttgtgatataaaccaggcattctgttcttagatgtgagttattgatgtgtggcaaaatgtgttcattctttgaaaagaaggaaaaatgaaaactttagtattatattctcagttattgatgaaactgatcactcatgtttgttccataggcgatggggcgagctgcaacagctctttcaaagctagcagatacagctcgtgaggaactccctagcacaatggcagcggttaggctctcgggcatggaaatcagtgatcttacattggaattaagtgatcttaggtaataatttaatctgatgttttaactgcttccctatgttactatacctaagctattgttagacttgaaacaaaatcactggctggctcatttgggcaattgtaataggacgagtcaatcaattaacgtatcgtgtaatttgtattttgttctgaaaccagtcaagaaatatctgatggagtcactaagtctactcaagcagtacaagcagcagaagctggaattcgacagattggggtgcttgctcggcaacagactatgtgtatgtttaaatccaaatacttgttcttttgttttgtgactaattactatggatgatttccaacctatttgttcatttgatgcagcgatgattcaagaaagagcgagcctgcctataatatctttacaaccagtggttgttggtgctgctaagaagacttctcgtgttgttggccgagctacaaaatccttaatgaatatgatctcgggagggaataactccgaggctcaagaagaagaagaagaagatgacagccgagttgctactacagattcataggacctttttgtggtcttttcgaaaactattagagctgaagattcttagaaactcatcttcatatccaactttgatttctgtttattatttaaaagtttaagttggagatgaaggcaattcatggtgtttgaatcataaattatgctctttgtagttgtacatatacatcataatgtaaagactagtaagttatgaaatgttgaaatttgttatatgactaataatatccaaaaaaaacccaaataaagttcatcaattatattaaaatatcaatattgtttcttctttctctaatctgtataatgaatagtaaagattgggtcttgtttgagtctcttatttgagtttatccataaattgtgctaatttattagcatgatgatcagcagtatttgatagatggtgggtacgaaaatcttcatagcaaaagggtttatagagagggagtggaggattggaaccatggattaatgtcgtttctggcttaataatagtgtcgtttgaaggattaataaacaatgatattgtcgttctatcaacccttgaatttatcactctatgctctgctccttttagctttccattgctaatcacctatacaaatatacacaacaaattttactctcaactcaaacaaataataattaaatatttgattaataataacaataataataatatatttatagagatggataaaaaagagaaggatatttatatgtacctgtaaaatatagccaatattgatgacaaatgcatgagaaataggctcaacataaacccaatttccatgatgattaggaagttgaagacctagaacatttccttgaagaagaatagtgataagacttgggtcacaatgcttaggtaagcccaatgtcaaacttggatctgggcaagctgggtaatgattgctcaataatattggactctcaataagctcaccactaaaatatccactcttcaatcccaacccttcacttaacacctccaatatcttcaaacctaacttcctcacttcaactgaaaatttcccaacaatttccctataaaaacaataaagtattacccttttattagatgaaaatttcaactttccctaacaggagtcatagatatatatacatatatatatatatttatatatatgcatcatgatggaccttaggctaagacaagttagttgtgcctaacccaaaaaaaaattctttttgaaaaacatataattttgctaatttttaaaaataccacatgtttttttaagcaggcccattaaagaaaattcttatggcccatcaaagaaagtatacccttttattaaaggggtaagatgaaaaatacctcttttattaatcaattaattaaatttacgtctaattttatatttatttgaaacatacctct

SEQ ID NO: 37650 - DNA, 1903 bp, Cannabis sativa
atattaatggtacctaatactattttaagatatatttattatttgtgcaattttaacctatttactttaataattattataaaaaaaaattaaccactcataataaagcactttacggtgatatagtgaacatgttataactaacaacaagcacactaattattaatagcaatgtagcattctataaataattaatattaaaaaaaagtaagattagatattaaattagaacagttgccatatagcattttatcatgacttatttatttttagaattagattattttggatagagaaaaataacagttggtgagggaaactgaaatgtcattggtcgttgaatatattagatatatatttgatatattaaggtgtctaaaaatacaaatgtggcgaagttagtttttatgttatttattaaattaaaatatataaatataaatttaatattaacttgtactaataataatatatcatcttttattactacttaaatatcccttaacatttctttatttttaagtgcaaattaagacgggtgaatcatacatacgtcatggacaaactaaataaataatatttgcttaagtatagttaatttggctaatcattgtggcatgtcaatttttaatattatatatataataaattaaaattaaaatacgtatataggtatatatgcactgacaacgttgtccctggaaaaagtggattaaacggtctctaggcaggggtatttttgtatttttatccgcttctgaagtaactagtgttctattaatcatcgccaacatgatcttaatttatatatataagctaattagaggaaggcaaacccttgagagcactataatatgaagcatggaaatgtttggccaccatatcaaatcctcattagtttaagtgcttttgatcagactgccaatattatgttttttaagtggctaattaatcagattataacttccgcatatattactaaagtggagcttatataattaatgaaacgactaatgcatatctataatatatatggtatttgtaatagaaaaatatttaaataaaaaaaagagagagagatcagaagaagaagaatgggagctttaaaacatgaccacacaagaacatgctagctatatagctaaattatatatagatcgactaaatatttttacacaacattaatatgagagaacctctttttgttgtaaaccacaaaaatgaccaaaatctacccaccaccaccattctctttaaacatattttaataataataataatatctatatatatatatatataatttacaaaattatagactgccctacgtgttctcttgttccattttttttttcatatattaaataatttaatggttattttttacgagggttgattttaataatttaagtgataattaacgatgaagttggttcttctgactaataatgacattaattattgcatggctgttatttaggtgattgttatgagaactgttggagttgccgataaagcaatatttcgcgtatgtcgtacaacttctgccgcagcgtcgcgtgttcggaccggagctgaccgttttcggttcgaaccaactgtaaatggtacaaaacgaaccgtaaccggttcgttacttcccggttttcgactctaagccggttcacttcgttccttagattttctaagtgcttttgtttacgcatccgtgacctcctcgccgattcccggttcgatatcatccgcctccgtttacgctcctccaccacggaaaccggccggtccggacattctaaagaacgtttgggatttgaccggttactgctcgggtcgtccgaaccggaccctgacccggaaccggacatgatgggttttggcgattggggcagagtatcccctgaac

SEQ ID NO: 37651 - DNA, 2411 bp, Cannabis sativa
ttttttttttttttataaaaacacaaaactaattttattaacctttaacttctgctactaaaaatagtaataaatttggaataactttcaaattaaaacgacaatcaagatataatataggagtaaattattgtataattatcataaaattagtgtaaatgagtgtactaattactgaagtttaaattttatgaataaaactattaatatttgaaattgtattttttaattaatatttttggataagaataactatgtaatgaagttttcttagaaaagaaatgggatgtatttataaataaaactttcttaaaaacatatataatatacatattttattttctttacaacaacaaaaaaattaatgtacataattaatgccagggctctctgattgataaaaaatatgttttgcctctctgtagaaaatacaaatttacctaaaaataatacttcttaaaaagtattaaaaattcataatgagaaaaataattaaaaaaattattcatcaccaccattaataccaaaaaagaagaattattaatggtgttttgagtcttttcactattaattaatataccaaaaatagattcttcacatctaccaatttatctctatatacatccatgtcgaccttaattaataaattattttagtgcattgtttccttttataattgtgaatataagggtcttaatctctagaaaaaaactaaattaagaaattaatgagtatatattcttcttataatttttgcttaattatataaataattctcttcttatcttcttggtaaacgtttatacatatcgatagatatcctatctctccatatttctataattaataatatgaataagatgatagaaaattgtggtacaaatataatttaatttatttccatttacattaattaatataagttaagaaaattagattaattacaacaaaattcaatcaaataaaattagctttctaattttacaactggaaaatgaaaaaaatgaaaatagtggttttgaacatggaaaataattaataaataaaatcacattaataatatatagtttacaatttttataattttttttactcactcaatgggggcattaatttatttatttttccttagtgaaaactgaatatactttactaaaaagggttcaaaaatggccatcccaattaggagtggacctcctcaaaatttcaaaagccaatgactcttatgaaatatatattatacgattcaataacaatcaaattattcttgtactaccactttaacaaacatataaaatacctagctatatggtaaaaaaataaaaaataaataaaaattatcgaggataatcttttataatgatcatagattaagtttttcatgtgactattaaataataaaatctagttattaattttttttttctttaatatctatcaaatttaatttctcaatacataacactaatatgatcatgagaaaatgatcatatcaccgaaatattagataataaaattcattataaacaattagttattattattatttatagaaacaccctatatatacgaatataatataaaaacactgattctatacattttttaaaaaatctttttaatccctacaactacaagtgtttgagattttttgcaaggctaaagaaatcaattaattatttttgacttattattattatttattaattatttgggtgatgaaaagtaattagggcacctagcctagccatagagtgatgaaactccaaaaaaaaaaaaaaacatttagtttgaagaaacaaagcagaagagagaagaacagagtatgttcaaaaccaaagaaaaatacagaaaaagttcaatctttattaatgaatgatgaagagtttatatacacattgaaaatacaaactattacaaaactaacaatcaagaagctaacaaacatagtaacaatattttaaactaacactaaccaacttaaacagttagttagttatcatagttatttttctttcattctttttactactccccttaaaaaaaatgttgaaatatattttgtgaacaattctaatacgtacagaatatatatggatattgtacatattacaatatagggatccaaattttacatatatgcatctctaaagatggattttcaaacggaaatttccatagtatattaatttttgtcatttttttataaaaatattgtcagtcggtattttttacttttttattgtgtttttttataagtttcatactgcaatatactgtgttaagttttcactggggttttactggtgttttttttgttattctactgttgttttgagttaatctgctttgtgttttactagtgtttttttgttattctactgttattttgagttaatctgctttgtgtt

SEQ ID NO: 37652 - DNA, 3216 bp, Cannabis sativa
ctctcttatttaaaatatagtattagattaaaatatatattttttttttttttgtaattttacataacaactagcggaccaatctaaatcacaacaaaaaatgttataatttatattgggactaaaaaatttgtggctaaaagtattagtcacaaatattataatttatcgtgattaaatgtatttttagtccgaacaagtgttgtgactaaaaactaaattagtgacaacttgtatttaaaagttatgttttagtcagaagtaattttttattgtaactaaaagtgacatttaatcacaaaaatttatgttatgactaaaatattatcactaaaaatatttctttttgtagtaatttaattataccgatattacactgaaaaaaaatactaaacaccaatatacattatagcaattctgtttaaagtaataataataaaagttagttctcttggaggatcaaaaaggctttaaaaattcctttattattccctttagttcttcctcaatggtactatgcaaataacggaaacgagaataaaatttgaggcccttttctaaacaaaataagatgcgcgcatcttactattatcatttcttgaaaaacaaattagtactctttctcgccaaaaacgttagaaattattttcttaattttataaacgaacatatgcacgatgaatattaatataattctaaagttataatgatgaaatcaaaaagaaaaaaaaaatgaaaacccgtgcatgattagtatacatataaatttataaaacaatcagcaagaacctccaatgatttgagctccaaataaaaaatcaaataatactcaaagaaagggcaaaaggatcaattttaaagaatataaaggccaaaaagaatactatggactatactattacaagtgtggatactttttttctttcttggttgtacgtgttttgtaagcgtaaggagtttagttgactaaaagcaaagtgtagatgctaaaataatcatgacgtacgtgcagagcataataatataaatatatatttattgttatatataatagacaaaggcactaaaaagctaaaaggtggccaccacattagcctttgttgcgctcattgatggaaaatacaaagctcacacataataaacacacacacattatcggatgagttggagaagcgttggacgactcttaaaatgcgtcaccaataatattgttatatgtacaccatacgatgtagacaagtcttattaatctgggaaccaatttcgtaaatttatcaaaatccaggaccaaaaagagccaaaagtaaaccctcaaaaagaaaagagagtaattatttttaaaggagaaaaagaaaaagtacagtagtcccaaaaacagagccttaattagtgtgacatattgaaaaagattcaaactttacacaaagctcactcatatacatactataccacagtgaaaaccaaacatggtcggctggccttaatggcaggaaccgaagaagaaaataacatcacccaaaggcctaaaccttatcccaaattctctctctctctcttcctctatcattgccaacttctacgctctataatcatcaactccccacggaatcaaatggccatcataccaaatcatttgtgggggccatatgtctatcccttctcgtttgacacgtgtcacccccttatgttgacacgtagcaggttggatatatctataatatttttgtttccttagtcatcccttgtgtataataatcataaagcatatatatacacacatgtatacatggaaaggtaggatggtgatatgatgacatgagaaccaccactattattagtattttctttttatttttatttttggttttatgtctcactaatttgctttgtaattgtgattttgaagtttgtttaattaatttcagatggttcattattgaattgtatgaaaagagacctaatataaacagtttttcattatcatataattatatatctattctatataaaatgtgtctatataacagaatttttagtttatgaaaaattattggataactatttttttaaataaaagaataacaaattattaacgtaaaggataagcattatgtagttagttaaacctaaatataattaatccacctaaagtattgcaattaataataaatttgttcatattatttatttttttatgaaaaattattttcaaatttacattaggtattattaattttaaaattatgatattaaaaaaaattaaaaactaaaataaaattaagatacgtacacgtagcatctatctagtacatatatacaacaatttctttaaacaaaataacaattttttttatatatacacatgcttataaatataaaataattaataaaaatatatatatttagaatgataaataatataatattatgtaaataaatataaaacatgaataataaattttaaaaaactttaaaatgaataataactcagaatatttattttatgttttagtgggtttttttaatttgattattcttcaaatacattgaaaaatctttattccaaaattaatgatgagagtgctttaattaaagttttaaaatttagaaaagaattttgagattgcacccaatcatgcatgactgatctatagtgaaagtttgaaggagtacacataaatttaattattgataattgtgatgtgaaattaatttcatattctccaatgtatcaaagtcaatgtctatcaacctaattgcggtccaacaaaaaataaaataaaatgatatcaacttaacttgctttttggtcatgttcagccactcgctgacaaaagctttggataaccctttttaataaaatcttttggcacaataattctcatacacttaaacgacaatagtattatacaagtaaaaaaataatactaaacaaataattataataataacaacaaattaagagagatctctcttcaaatttaacttgcttgttactcaattggcagtcaatttgaatttccagtcaaaaaaatagaaagaaaaaagaaaataatctttgaacttttggtcatgaaaaaaaaaaatgaaaagattgtatacaatcagtttcttgactctttatacatagcggttcaaccattctttgtttaccaagtcgtttttctattttctgatcacattttgttcaggtgactatttttttttttaaaaaaa

SEQ ID NO: 37653 - DNA, 2569 bp, Cannabis sativa
aaaaaaaaattgaattataatttgaattctatactaaaaactaaaaataattttagaaatagaagtaaagtaatgcggccacacacacctactcatgttcatattaatataattggaagaatttgtgcacgctgttcacactgtccaaactcacatgagctgacatgcatgctttcagtataatcatgagaaaagctagtcaaggaaattaccagtgaaacccaatacaattcagatagaaatagtctgcaaaaaaagtccaaaatttcctttctcaattatatatttatatattatatagagtgtgtatattattatattatacaagtctaaaatcttactgcaacaataataaagattgctcttgattccaaggagaatgtttgtgattgttatttgttttcctctctgcagccttggcttttgggtctgaaattggaagaacacatatttcaaagttaagttctggtgtttaggacattgctcctttttatatacatatagcaccagtttatttataacaaatttcacacaatattaaaaataatgtaccaacatgatattttataattaggtaacaatttttttatattatttaataaaataaaatacttactagatattgaaatatgtcactttgtgcttggcagcttgttaacccaaatgcaatacaataaaatctgaatctaaaccctaaaactagatggatgaaccaatcacacccccaaatacaacaatatatataaatgtaagtcttccctctattttttttcttcttcattttacaccaactaaaattaaaaactctcacagattagtttcaaacgcgaccaacataattaattaagacatttgaaaaacgaaacatgataattataaagactacgtactatattaactaattaataattatatataagtagaatatatttttgtaattattagatgactattttgcgttctagtccacgccttcttttggatctttcagaggaattggatcgttcaagaagagacttcaaagcattctgtaagaaatggacagactcaatgctgtgttctttatcagcagccacgattagaacgttacgaattctgccaccaagtgtggccatttcaactttgagtgtcttcaaatggagggactttagtatttcgattaggtcaggtatgagatctgaccggtcttcacaacataatgaagccttgaatataagctgcccttccccacctgctgtacccgaataatttccagaagaaagcactgtgatctcgtctgtttcagatgggaagctttccagttcggtcaactcagatgtttgctctttaagctctttcactcgttgaactacttttgctaggagagaagctttgtctgtctgagaaatatattttatttagaaaagtgtagatgcttttcttaaacataaacgaaactaaaaaccatatagagccctagtgaaactctaaaaggaaagagatacagccaattattattatcattgcacttttccttttgaagaaaaactacaggactactcttgcttttatggcttagtttgaatattcaaaagtttatgataagataaaaagttggtgtatgtagatggatccaagattttcagaatcttaactatgtaaaaaaatagttgaaagatcgtcgcgtaattatattaaacccagaattatattttcttagattacataagttaaagtcaatgagtagatttttctatttttcaacttttttttcttcagtcccatcaaattacagtcaacttaccaaaaaaaaaaaaacactaaactaaagttccaagaagtgaataaatcaaccctaaaagagaagccatgataatacatgtatatatatttaattaataccttggaattacaaggaagaaggcttctgagcttatcaagatgagagttaatcctctctctccttctcttctcagcctccttgtgatttttcaaagcgacaagagctctgtcgtgaggagaagtcgtattgctgtcgctgcaagttccggtcgaacccttagaatatgggtaataagaggatgagctacaaaagctttgcatcgacgagaactgatgattattatgatgttcgccggaaccaccgcccggtgccggaaagttataaggactgacgacgttgattaagccgttgtcggccagaaactggtagaggtccggattctccggctgcatggtggtggtgattagaggtatgggatttgggtgggttatagatatatagttaaaatttgttgatgtggtaattatgattttgaatggacctgttcttggcttagctttttcttttgactaagtgaaatgaaatggaagtgctttgaggggttttgctaattagctttcggtggtactttgtccatatggtgtatttatatatgtttattaaagagaaagagggaaaaaaaatgaaaaataaaaagagagaaatagaaaaagacccaagatccaataagtgtacaagcatgtaaagccaacccaagcttgttgtgagagagtgtatagagttctattcacctcgtaaaatattaaa

SEQ ID NO: 37654 - DNA, 7785 bp, Cannabis sativa
aattatgattggatatccgattctattggatcggttgggattagatcggttagaattggatcggtcggttggaattggattggatgactttctgcacacccctaccgcaaactgtaggtcaaggagtgattaccttcagctaggttcactctaggtttgcaagaaactggaaccactagtactgagatcgaccaaactactttcggtactgcaatcccatgttctacaaattctcaaaggtcaatcaatgatgataccaaactaaaaaatttgcaagctgcattggggcaaacacacaaccacaataatactctttactatgactagaaagatactcgagcagctataaatattacttttgaagaacaaagatgcaaattcgaagagtggagggatcgagatatgggaatcatgagagcccagagcaagcgacaattttgacaaccgttccaggtaggccgcttgatcagaagagcctatcaagtcattggccaacaaccagtaacaaacacttatattcccactgggccacaacacgagccagaagaatgtccagctgaactccctcaacaaacccaaattaatggaccgtccaatccaaggccacagggtcaaattgtgggccaaatggtagacgcgtgacttttaccaactcgttatttgggagagattgatcagcctaacactcgtcctcaaacagaggtaccgagccaaccccttgctcacaatggctaggcaagaaagcctccaggcaaattagtctttacccaactggctaccgtgcacgaccttaggaataatctgaattgtagaagaagattagatggaaatgacactcctcctaccatgcatccaaataatacaaattacgatgtacctgacccagttctaaaagatcctcatgtgacacaggtcggtcaacaggaaggtcaagttaatacattggtgcaagcatagatagatcaattaagaacctcgttcaatgcctggccagccaaaaactcacaaatctagaacttgaccggaccaggggatcaccgttctcactagaaatcaatgctcttgacctaccacccaatttcaaaatgccaaaatggaaaaaaaaaaaaaatacaagcaaggaagatcctttgtctcacagtaaatattttgaaatgaaaatggacttacaagcagtgagaggtgatgtacggtgcaaaattttcccagctaccttggcagaagctgcctaacagtgttacttcaagttagctccaggaaagtttaatatgtagaattctttcatgttatagtttcatgcacaactctcctcttttcgacagctccatctcacttagaagacatggtcgaagtgaagcaaataccaggggaagccttgagagcttacatcagtagattcatgactgacgctacaaaagtgaaatgattaattaaagaagggagactatccgtaatcctaggaggtattgagcctctaagagaattgttgaaatacataaaaagacataatatatggtcaatggcagaattcttggaccaggcagatggatttataaagcttgaagaagcagttcgacatgtggacacaattggaaaaagaataaccaacagacaccattgcaaccaatacatccgtctagccagactagaattcataaaatcataacaactcgaatcaaggtggtaaaaggccaaacaatggcaactgtcagggaaatggaaagaaaagcagtttcagtggcaactccgaacaagatcctcaagagaatgcctcaaagttaactgcttttactatcctaatagaggatacataagaaattttcacaataacccagtctatggtgtcgtattaaaaacctcctcccatgaagaaagatatgaacaagagggacaccaccaagttttgtcactttcatgcagactatggtcatgaaattaatgattgcaataatttgatgtgggaaatagagttcctcatcaggaaaaataacttgcacttgtagaaatatgtcaagagtcaagaccgaccaggaacaaagggccgcccaaccagataacacacaaaaccagttgatgcctccacaagtggatggacatcttcaagttattattggaggcccccacattgctggagactcgggcaaaactagagaaaaatatgctcggaccctacaacatgaacaaaaaaaatgaggttttggttgttggagaaagaaagcctaaacaaccacgcattcgggaactagttatatcttttagcaaaaatgactctaaccacgttatatatccgcacaacgatcctttggttgttgatgtccagattgcaaataaaatggtggcttgaactatggttgacaatgggtcctcttaaaatattttgctcaaaacaacctatgaaaagattgggcttcatccaaaagacttggtcccatgcacttagttgttgtacgacttctctgaccaaagcattactcactcggttagattcgcctaccgctcacattaggaaaagctccaataagcacaatggtgatggctcaattcttgagaattgatgtgccttctgccttaaatgtcatactaggccgaccaaccttatatgacctgaggtggtcacttcagtatttcacctatgtataaaatttccaataagaaatggactgggctgtctgaaaggaaaccaaagagctgcacgggaatgttataaccttgatgtatctatccaaggtcaaaaaggaagaaacctttgaccagagttcaggaagggagaaaacattgcccaataggaatctgcccaaggcggggacaaagatatggatctctgccttggcgaacctaatgcaaatgttagactagtggaagagctagacgaagttgaaattgatcccaccatactgactaggaagcttaaaaatttgcaaaggtttattgctaaaaataaaatcaactttgataaaatttctaagagcaaacctcgacattttttcttggttgcacaaagacatggtcgagatcaatccagttataatgtctcatgccctcaacattgatccagactttcatcccatctagcagaaaaggaaattgatggacaaagaatgtgcacaagcactaaaagaagatgtaaaaaggctccacataaatagatttattattgaagccttctactcagcctgggtagctaaccctgtactagtacccaagctgaaccagaaatgacaagtatgtatcgattttaccgaccttaacaaggcgtgccctaaggacttttttccacttccaagaatagatcaacttgtggatgcaacgaccgaccatgaaatcttaagctttatggatgcctatttggggataatgagataagaatacatccacctgaccaagagcacactattttttgagtaggttttggtctatactgctacaaagttatgccatttggcctcaagaatgctggagctacctaccaaaggttagtcaacaagatgttcaaggaccaaatcagacgtaatatggaagtatatgtggatgacatgctcatcaaatctaggaagtctggagggcacattgaggacctagatgaatacttcaaaatcctcaaaaaaatacaactcaaacctcaatcccttaaagtgttccttcgggtcagcttgggtaagtttcttggattcattgttaatgctcgaggaatagaagataattaagagaaaatttaagccctcctagatatgaagtttccaacaaaggtgaaagaagtgcaaagcctaactggtcgaatagccgcattaagcatgtttgtcttaaaaccaacaaacaagtgcgttcctttcttcaacatcctctgaggtaaaaagaagtttgagtggatagaggaatgtgagaatgcttttcaagaattaaaaaagcaacttgcagaacctcccaacctatcaaaacctctggatgaagaagaattaagggcctctaattttggtgaactggcattgcatcttccttgatgttcaaggcatggaaaactgtgttggggttgatccttgtcatgtcagaatggcaccatgcgagcacatcctaatttgtcatgagtatatccacaatctttttttttttcaccactagatgtaagtttctcacactttgatggtcttagtgggatctgaatcgcatatttggacttcttcaacatccttgggcagctaaattactctttctatccccactctggggtccaaatcatcttcaaaatccttccagatggcttcagctttcgcttgagtatccgttccaggagaaataattgcttccttctcggaccatgaacacagtctagatggaaatgttgtagcaactcctgaaactcttataatcacctcttactactccaacacactcattgtcacagagaagcttcatgcacacatgtcttatagaagttaccgccctaagtccaccaggattggccatcctagtatggtgttataagtcgtaggacaatctaccactgcaaaggtgcagtgtttgaaggtgaaaatattgttttctcctttgagcatgattgggagctagattttcccataggcattagagcatctccattaaatccttgcatctgaatgggacaaggtgataggtcagccttcgtgagcctaatcacttgaaatgcaaatttgaacagtatgttcactgagctcccattgtctaccaagactctaaaaactcttttgtttgcgatttgggcttcaatgactaaaggttcattatgggggaaatgtacatgtcttgcatcatctaccatgaacatgatgggttggttcatggtttgaggatgttgggttggtgactgcacgagtgcacacattttaccttctccggctagctccctcaagtatctcttctgggagttcctggtacttcccacaatatgtagtcctccagagtttgtggctacatgtccgtctactggtggcagagctagacctagaggatatgggtttcctagtcccggagctaatacagctactacaacttgagctggcagtggagggagtgccgagagtactgatctaggagcttaagggtgacctactccttgcagaggatttatgataccatgttgtcctggaacaatcaatggtccgtgagtcaccccctgtccaggataaataatgggaatccaggcccattgtctcaagtgtctggctcttgctagcattttaatctcatcttttaagtagccacattcattggttgagtgtcccacctctccgtgatactcacaccatttatttggatctcttttgtacttcccccatgggacatctttgggggctttctataatggaccatgttgtaggttgcccgctacacattctcttgagtatccaccaggctgcagtactatgtgtactttggttcatacttctttcttgacttctttgaagtttcacttcattttttaccctttcctcctctcttgttatgtgaatggttcatgttctattctagaacttctatttgtgcttttgattgtatgacagtgatactacatctagtttgtgccgcttcaaacctagaaaaatgggtttgcgtaggtgcctccacagatgcaaaaagtacatagactgttgaagtgtactatattctagagataggaaattgtgaggtgaatctagaagtagaagtaataggggtcggtgccggcgccggtgccggaaggactctagatgcttgttgataggtatccttcagattgataaagccttgtgctctttccatgaacttagacattctctcaacccttgttctttgcatctctccccatagtaaggagccaactgcaagtctagattgcaggaccacaagcttcatgtcattagtcaccttggttttagctgctacctctatcatttgatgaatgaagttcttcaggctttctcctgcctgttgtttgactgcttctagaaggcatactacaattccttccaagaatgaattgagacaagagccaatcttttccactaatctttagcagacttgatgagggttatggataagcacaaggacttggcatctttgcttactcttgccacctgcatcattttgttatacttggccaagtgggtcttcggatctgtgtgcccatcatacaactcaatctatagcatcttaaagttctctaggagtgaagcttttgtgattctccttacacggtgagggacccactttgctttcggaccaactttgtcagagcaacgatttactcctctagcctctctgtcactgtctgggaggcttcatttgcgaaccttgtcattaaatgatttctgagggcattccctcatggctttgccttttcactttttgctttttcttacttggcgtcaagacaccttcaaagatctacaatggaccaactatcataagaatatttttccttggtcccaccgtcttggttaacagaatcactggggcaatttttccttcccctaggctttggtactttcataccagtccctttttgtgcaacaaggcctttctgggtagaagggcatctgagcccgaaggtgtcagtggccttttatgcctgaaaaggcctattggctagattcatgtttttttgaggaggtacgggagctgaagggttttgaaggtcacctacttatgcttttcccttgtcctatataagagcagaggttctagcatcaaaagggttttccctgttatatcctccaacacattttactgagggttcatcatctgaatctccctcgtccagatcttcgaacttagcttggaggggagccatgattttctccattctttgagaaaaattctcttgataggccaaattctgattggtctcgagcaactctttagacatctgaaccactttggggtcctgctcatagtggtatccatctttgtaatattcttctttgacatattctccatcattgtcttcctcctcgttcttagcatctcggtcttcatcgatactgtcatgctgcttgtcagggtcagcctctcggttgtaagggttagatgtatcccctcatctcgcatccctcgactaagcgagctctaaagataaaagggttacatctgccttaagaacatcgaggccatatggaggaatcttcttagtaacagctgtttgagtaaaaaccatggttgcaacaacagtgtgggtttaaatctttcttcagctctcaatgaaagaaccaaaatgttcatcgagattttcaaaaactaaatatttaagagcttaagaaataataaaatgtagaaataaaggagatggagatttttatgtggttcaggttttaattaaccctagtccacaagtcattccattagcctcaaagggtgtgtttgatgtttttacagcgtttaagtaagaaaccttaactctgcattcttgtttctcttgaagaagaagaaagcttagaataatattagcagagctttgactatctagattgtgatcctccttttgtatgaaaatagaaagatatatataggctaaggacaggtgtggacatgcccatgacccacatagggtttctgcaaaaagttcactaatggagtaaatacatgcaaaaacgagctgactgttgagcctctaggaaggatttgttctcgtgcgttgaagtaggtggacaataggggaccattgtatgtagtgaatgcatatcgccaaaaggtttaaccttaaaagtatatgcctagaataaccgtctggcaaaaaggttttttaggtgcgcccactaccatgtcttggcacagggg

SEQ ID NO: 37655 - DNA, 6429 bp, Cannabis sativa
tgaatattgctttttatattataaattatttcgaatttcttaaaattttgtaaaatatcttaagtaacaataacgtacacgaatatgaaaaaaaaaactaaaaaaattcttatgaataccgaaattggtaaaaaatatgttggtgcattacttttaaaggtgtgcattgtagaattatataaaaatagagtattcatataacaaaaaaatagttttgaggtacattaataaagacaccaactaatatgaatccaaaacagaaaagaaaaattaagtcataaaactgtcaaatgggtcaaaattaatagtttgagactgttataattagaagtcaatttggtaaagtcttgaagaagaagaagaagaagaggtccatagaagccaccatactcccttaagtccctttcatgtccaactttcccattcaattttcaatttttcaaatttcaatgaaccaatcaaattcaattcaatcatgtgtgtacataacttactacatccaaaccaaataataatagtaataaacaaaaatcagagaagagttaaggctaggactattcattgagtcatggactactatactagtggggaaaaaagaaaaagagaaagaagctattattagaactaaaataaataggatattcacaaaaatctttatcttctatcataagaaagaaaaaagttattaataatcacataaatttagtggagtatggtaaaaataataggctaaaaatatatgacaaacttttattagaaaaaatgaaggtacaaaattttcattttcatgtctaattttgacaaaacatgttatatatatttgaaaatatttatacatctttttcttatataagattagaggtcatacaattggtttaaactatcataatatattattaagaataaaaaactatagtctattaacaaataaattacattatttataataaataaacattggttaaactttcttgttgttatattcttccctcattattttaatttatttttaacatatttgccaattgtagataagttgattaaattataagatgagtctatagtacacttttataactattttggtagaccccctatttattttaacatcaaaaagaaaattttaatctattttttttatggtcatgtatattatacttagttaagactacttataaaatttcaaaaaaatttaaacaattaccatgttgaaaataaagtttaaaaattttgttgcacgtaacaccaatatttcttatacacgtggtaattaattgtttgaaccttattttcaacactaaaagttattcaaaaaattttaaaaatttacagatagtcctaaatagctacaatgtagacaattatgtaaaataattatactaaaaaaaatttctaaatgccgaaacaagcatgggtctaccaaagcaccattttaaggggtgtactacaaaaatttcctaaactatatatcaataaatttttaattaaaacgcaaacaactgtgtttgaagttcataaaccctaaaaataatgcaaaatttctcgattactagagatgatgtaaaaagaactataaagtataatttatctaagtatcaaaataaaaagtccatactggcaaaagtgatgccttatagtctatgctcaactatagaaatttacatattgtcaaagtgtaagaaaattgcaaaatttcccccatgaaacaaagctctcattattacaaaaatgctattgaagaaagacacactgtacagaacaagcctaagatttcatttcaattttcactcatatccaaaccttcaatactaaaagtttcacaaagttttcaacacaacacaacttgaaagtgtaaaaatctaagctttagtcgaattcgagcacaactttacccggtatatgttttttatctttagcctcatgagcttctatcacttgtgtgatgggaaatgttttctccactggtattttcagcttcccgacttcagtaagccttcgaatctcgtttaacccttctgcgtccgctctcataaaagtccacgagtattctacataatcaaattcaaaacaagacatactcagccatcagttacataataaacatgcacccgaaaacttagagctagtctcgactacagaaggagaaagaaaccgaagcattttgaaagacgataaaactactcaaaagatacaactgaaaagatagcggagaatatatatcttgcaaacccggatttctgttgttataattttgttatctatatctgtaacttcaataatttcatacacaaaacaatagcattgttcagtccttaatcttttcaggtttgttacaaagctttgtaccccatgaaaatgggatcatcataaaaaaactttgatataaatgatgcaaattatctttcagaaattaacagaaaacaatctaacattcagatttttttatccaatttcataaattatcctcaaaaatatgtcttaaggacaacaaacaccataaatcttttagctagaaaaagatcattaacatctaaattctacggttcagcgccattattttaaactcagttttctctcccaattatgaagcaatgataggaaagttggttagcatagtggaaggtatggaaaattagtgagaagaattgtggggggtagggacctatactatctctttcggtgtattattcctttgactataaagccaatttagaccttaataattacttctctttgacttctttgagtttttgtttctgtcattatcttagttcccttcctctagcacatactgcataataaaacatgtttaaacggggggaggagaagatcggtttacctattccatgagtgtattgatatcgcaattgtttcttcagtagagttgatgatgcaagtggaagcccaataacaagtccatagctatcagtaagtgatgcagcctcaccctacacaagagaattgacataaagaacggcgaagttagaaaactttcacctaaatttcttccatgcaaaagataagaaaacaaacatatgaaaccgtacctgaagtgtcatgtagtatccacctctcttcaaaaaatttaccccaattctttccgtctctggaacgccaatggtgtccaagacagcgtcaaattttccctttattactgattcagggtcctgttaagtgttaactaaataccgttagctatagaaactaataagaaatcaattttagcaatatttgaatccaacatcacacctcagctgtatagtcaacagcttgctcagcaccagctgccattgctcggtctacactttgacttccacacgtagttgccacattgcaccccgaagctactgcaagctgaattgcagcaaatcctactgctcctccaccacccacaaccaatatcctttgcctgtggagtcaaatttaataaccaaatagtaagagaacatataaatgaggttattcaataacatataatcttactttccccctcttatcagcttagtataaacaattctatcacataggtattccatttcattacaagaggggtaaagaaaacctcaagtcggtaaaacaattgcacacgatgtatctagaatagttttcattacggtcatttcatagtttcctaaaacatgcataagggtatcgaagagaatacaaaacgaagtttgaaatcaggaaatgtatacaagatgacaaccaatgagaacattagaacatacccctcagttatcctagcagtactttttagagcacgccatgcagtcaatgcagcaaaaggtatggcacttgcttcctataagcatagaaaacataaatgataaatttctccactcagattcttataaaggtaacacacacacatacacactcacatatatgtatatgaacaagcaaagaaatgaggaaggagctccccacttagatgaaagtaaaaagaaagtgaatttgaaataaacttatgtaaactacccatcacgttgaataagaaacgaaatcctacaaagtagccaaatggttttataagctacgacagagcttcttgcagcctctacattccagaaatttttcttcagcttcattagcctcaaacacctttttaatatccccttacatctaaatcatacagtatatatatcgttaagtatccatctacttcggccgagaaccatatcaagtagtttcggcactacttatctccaaagcaactaaaaagtgtcgagactcctatgtcgagcttactttacaaggagtaagtactattcaagctcttaactagacgtcagcacttcaaaacttgataaaaattcggatgatcattgcatagaattatcccatcaaaagtacttttaataagttaacagatcacaaaagttcaatgaggcctcataagagaaatttctaactatattagctgaaatgaaacataaaataactatccaattcataatatgatagcatattatcagacaaggttataatatttaccacgtgtgtaacagaaactggtttgggagtaagttcgtcttcggaaaggattgcatagtcagtgtaagtacccctcacagcagttggatgcaaagcaccaaaaacttcttgtcctacattcagtgtcttgaccgaagctccaacagctgcaacttcgccactaatatcccgacccagtatgagaggtaaaagaggtccaaataatgaacgaccatagcctgatctcatctgcaaaagataaacatttacaaattttcattcttgataagttgaaaattgaaataaagttaataatcaagcacagcaagaaaaatctatagcacaatgtgaaagcattatgttaattaatacaataagaaaggaataatcacaattgctggttattaaaccaatccctcatctcaacaagattgattcaagtacttccacccaatttcgtttaattttactaacagacgtgtaatgtggtaattgtccatatcaatagttcgttagtaaaacggaattgcttaaagttcttaaatctaacaatctcaatagttcgaaaaatttctaatgaattaaaaagtttaggaggtacaatttggtacatgtccaagttcgggtggagaaatactaattatcaataacttaattcatcattgaatcaacctccatgaacaactaaattaccaacatacaaaattgataagtgaagcatcaaaacttcctaaataaagattaggcaatgttcaactctagagaaatgaggttcaagaattttcatttgaacccatttcttttaattacacaaaccaaaaatccaagattggaacaattcaaatgaaatgttaaaacaattatcaaagaaaaaaacctttctcagtcccaacaaatattctaccaaaccccataaacgaagtagagctactcctactaacaagtgactgaaaagactaagtttttatcaacaattttcccaagaaccaaacagaaacaatagaaagagaaagagaactgactcgggtatcgagcgggttaatggaaactgcacgagcacgaacaagaacctggtttgggttgagatcaggaacttctacattgggacggagctggaggacatcggggccgccgaagcgggggagaagaacggctctgcatgcggtgacgatggatctgcagtggtggcgagcggtggatgggtttcgggtcgggtcgggtatgacccgagaagtgaagaaccgcatttgtatttgcgtgttaaaacgtgtctgtgtttgggtcctcaaaagagagagaaatggagccaagtaagttaataagtgctacgttttcttttccatttaattatatttattttcatatattaatggattttgtgggcccaatattgcaaatttggtgggaaaattaatggaaaattgcaacgagatgtaaaaattgtgctatatttagtataaaaaataattttattataaatttacattaaattttaactttgtgttgtaatgtacaattgtaaaaatttaacgtaaaatttaatatctaattaatgatttattaaaaaaaataaaattttataattttataatcaattttattattattttaatatataagacaataaaaaattaatataaatgtttcataatttaatgtgataattaaatatactaataaaataataaaaatgacataaatataaatgaaaaagtagtgcatttattgtggtgtaaattttacatcatagcaaattttgtgccaattacatcactttttggcacaccattggagcacactttttgttaaatgagctatattttagctgttccccacttatttatacctccattggagatgctctaagtctccaaaaatttaagatttttacaaaaatattgaattttaaataaaagtttataattttattggcacacgatttttttttacaaaaat

SEQ ID NO: 37656 - DNA, 3810 bp, Cannabis sativa
aaaagatgtaaaatagaataaaatagccattattttaagttacaaattaactataaattttatttttactattattattttcaaaatggctgcccagaaatgcttcttccactagtaattcattcataaacacaagatgatctctttttaaatcaataccaaataataatagggatggagaattatattcttaacttaccaatcaatataaatgatttttattctccatcttgtttaagtaatatatcttatcctttttactgaaaataattttacatgtgcaggcaacattcctattttaagtgtttttttcttcttatatattgttaaataatttttaaaattatattaatactttatttaaataaattagtctattcttttattatcaaatttcttactatatatatattatttttttaatttttttctttaactttatagtttgaattttgaattgctccgtagttgcttcagtaatttttatgtggattgctatgtagattttgattgtgatttacgttattctattaattgctatgtaagttgttaattatgaattttcttaaaaatagaaaaaaaaattactttaaaatataaaaatgtaaaaaaaaaaaaaacctgaaaacctatgctaatggcaatgatagctaagactagggagtcaaaaatgatcatttgaaaaatacatggtcaatctgtatagtcacactccactacattattcctttaacatacatgaatgaatactattttaaatcaataataatttagacaaaataatgagcttattaatttatactatttttatcatattatgtattcttgcacccaaactattggataaatactttatataaatatacatattaaaaatgtaatttgtgtgttcaattttcttgattgagtgtttaagtgccatcttaattagtttttactctaattaaaataattagagcactagacaaaccatataaattaaaatattaatttagttttatttattttatttgaaatggttgtttaaccttatttatataaggaggaagaatattgttattggtcaccagtaatttcagcaccttttataggtagcgctttatgattgattaacgatattctttaaaagttattttcttaaattatatatatgggacccgatacattacaccaatagtaatataataccgaggaaggtgttaggcactaataatactttttagcaattcttaagtaggaaacatactattttttttcctttgaaactgcgaaacatactactttgtatgcatgattgtttatgaaaattttaaattatatatttaaaatttttatttttatttaataataattaggtaataaaaatgtattatattttaaagtaatatttttttgacaatatttttaatgatatgagtagttatactttaccaaacttttattttttattgtataaaattaaaaactatatatattgtaaagtccatacttcttggtcctttattttaaatttaataatttgttacaggttttgtatatttttttcttacaaataattccaataaacctacaccacacaatatgtatctccaaaatgaccttatgagttatggcttgccacacaaagagtgtgttttagtgccatctttaattaatgtccactctaattaatttgattagagtagaaaaaccatatcaaaagatatttttaatattatttattttatttgaaagggttatttttttacaacaatttgaaagggttatttagtgttatttaaataattggtgacgtttatttatataaaaaaaaaaaaagtagagtagctatttgacatcttgaaatttgtaattgtacctatttagtatttaaattcaaattcggttaatgttactaaatatcatgtaattaaataattaaatttaaatttaaaacttatacctcaacaaatttcaagcagcctgtggaaagaatcaataaacaaaaccagcacatgcaacatctacgtcgcattcaaactctttttctggtttaaagacaaagcaaaattggttagctctacctccaggtaaatcaaagctcaatacagatgcagccattaacaaatctaagagaattgttggcattggtgcgattttaagaaattctgctagttcagtagttgctgccttatccaaatctctaagtggctgctttaaactagaagaaatggaaacattaagtatggcaataagtctacagtggctgttatcacttaatttgacaacagattatattgaaaatgatgcactcctggtggttcaaggattaaaatcttctcatttattcaattctacttttcatgctattttgaatgatgtcaactctctagtgttcaatttttcacgagcacagatctaccgttttaagatctgctaatacttatgcccatgttatggctaaatttgcccttacagtggataatactgtttgttattggttggaagattttccacatccacttatgactgttatgtaatttttttaaaaaattaatataatagtcttttctaaagaaaaaataatttaaatgtgtattattaaaatagaatggactaaatttatattttaataaaaaatacaaaatattgaataactatttaccctatttaaaaaatatatattttaagaagctttcatgaatgtcaacctacttaataatatgctttgaaattatttgcaataaaaccattttgaaatttttgtatttggtttggaagcaacaaaatttcttactacttaccaaaaaaaaaaaatcattttgaacatgacaatttcactaataacttaattagtaaaataaagttagtgtattttctaattagacgaatagttttctcattagtttcttttaatgctctcctactcttaatggtctacatattattggtaatttatattaattttaaaatataaattatttacataatgtttctacagcaaatataattattgtctaaaacaattatttgccaataaaattatatatatacataaaaatgtttcttttttaaaaatatatatatttatacatgtataagagataaatcaaatgaaaactttagtgaaatgtattagtggattgcatttcctctacatgctatacatatatatggaaaatgtgataattttattataatgttatactaggatttaattttaaggtgggcttagttatacatttaatataatacaaaataataatttaaaagctaaatttaagtggaatgatgatttagcaatatcctcttactttagtagtcataaattcaaatctattttgaaccttatacttttttaatttttcttaatgaataaaatgtagacacacatagaaaaaaatgggcaagaccggggattcaaaacatgaaagcatcttaacaaatttgttctatttaactactatatatatgaaagcagcaattttatattaatatattgagtaaatagcggcataagtatctaaaattttaagtttgtaagcagcataaagccattatttatttttagtggttatattaacacaaagactgtactaatgaaattagacaaaaattacagttttacaaatattgggtacttatgctgctaaaaataaatattaagtttatggcacttacaaagcttaaattttaattacttatgtcactatttaccttaatatatttttaaatttcaaggtggactttaatgctctctaaacatccctaagtccgcctgtgcataatatactaatctataagaacgctattaaatgaatatttatgcta

SEQ ID NO: 37657 - DNA, 4549 bp, Cannabis sativa
  modified_base (2132)..(2138): a, c, t, g, unknown or other
gtaatgaatgttccttcctattatcgacattgtaagtaaaaggagaatcttccctcatgcatgaaggccctataaatagtgatctagcttcactagaaaaagggatcgaaagaattgctatagaaagagatctaagagaaatactcagagatttcattgtaagagcttagagagaaaacactgtgttctttgttctcgagttaatacaatctaaggggagtaggctattaccgtactaaaggggtcgaacctctttaaaatctggtgttttttatcacttattagtttttgctttatttttattatattcttaatcgcttcataattgactcactgtcattaactaaaagcgaggtcaacagatttagttaacgaatatgactgtgaaattttctatcatcctacgaaggccaatgtagttgcagatgctttaagcaaaaaagttcctaagcaggttttctgcacgattatgatctcacctcaatttgaagatgacatggtcaaatcaggtattgagtttggggttggaaaacttagtaatttaacactacaatcagacttgttggagaggactaaaagtgctcagttggtagatgtagaatcggtgaagatttgagaagaattcttagctagcatggctaaatattttacagtgttcggtaacagaatgttactttataaaactcaaaattgtgttccaagtagtattgtggttagaaaggagattcttgatgaagctcataccacttcttattcattacatcctgataccaccaagatgtactaagatttaaaaccttactattggtgttgcagtatgaaaaacgatgtggtggaatatgtgactagatgcttgactagtctgctgattaaggtggaacatcaaaggcttgcaaggttattgtagcctttgacactttccgagttgaagtaggaggatgtcattatagattttgtggttggattacccaaaaccacaggcatgcttaattctatataggtagttgtggatcaatttagcaagtcggcacactttctaccagtaaaaacaacatattcaatcgatcaatatgcagatctttatgtaaaagaaatagtacgacttcatcgggcttcgaagtccattatttcagatagggatctaaaattcacctctatgttctgggaaagtctttaacgagccatgggtacaaagctgaagttcagtacatctttccatcctcacacagataatcagtctgagaggacaattcagattttagaggatatattacgagcctgttaatgggttttgaaggctcctagagtaagtatttgccactaatagagtttttatacaacaatagttatcaaagtataatagggatgactccctatgagatattgtgtggtaagaaatgtagatctcaagttcattaggatgagaccagagaaaggaaatacccaggtctaggaataagttcaacggtccaattaggctatagagaagatcaaggccaaaatacttgcctctcagagcaggcagaaaagttatgcagatccaaaacgcagaaatatagaatttcaggtatgagatcatgtcttcctacgagtaccttcaatgaaaagggttaaatgtttcgggaaaaagggcaagttatgctctagatttatagggcctttttagattctcgagaatgttggatttgtagcctatcgtctagccttacctcaaacattatcagtagtacataacgtatttcatgtctctatgttaaggaaacacgtcttggatccaatcgatcttctgagttattaaatcctagagctccaaccaaatttgtcggatgaggagcaaccagtgtagatccttgacaaaaaggataaagtccttcagaataagaccataacattggtgaaagtactatagagaaatagtaaggtggaagaagccacatgggaattagagactaatataagggctcagtatccagagttattaaggttagatttcgaggacaaaatcattttcataaggggataattgtaatgccgcttagctttattatgggaattaatagattattaggacttattgtcagaaataggctttgaattattattttctcaattatggagatatatttgaattnnnnnnntattaattatgttatatatgaaattttatattttacatattttatgcccagtaacattggaatgcaacgctttggcctatagagtcactttgatatggtagtatcttagaattagtggggaaatatagttaaatatttgaaatgctaaagtttttggggttatgaattaggactattttaccgctaagtggttagataacttcatgcttaagtaagggtaaaattaatattttaccctagttatttattattcatttttgggtagattttaagttaatcctatgtttaatttattaattagataatagactgaatacgaggataatgctttagtacacttgatctttttttcacaaaatagaaagaaaaaaaaaatccaagtctctctttctctatctttgttcaaccacaacaaagatccaaggaaccctaaactcattcaccaatttagaccaaattcaaggagagttcagtaggaagctaagggttttcatagctaaaccaaggtaagatgtgtaccctttgttttgtttagttaaatactatgtttttacaaacaattttaggttttgagttgttgtttgagttttggttgtttgcgaatatcttctgttgttactttaacgttaattaagttattttgagaaggttttgtgggttttagtagcgtttaagcttgagtttattttttaagctcaagcttgaaccttcaatggtgaatttgtgttttgtggtttgatgatggtttttttctattggattatgttggttatagcttaaattgatgtttccagagctttgtaggttgtttgggttagttttgagggagaaatgagattttctgcaaatctgcagctaaaaacggcaaactgtttttagcagatagggacaaggaaattttttttgtggtgtttttcctaaagtcacatttttcagtttgttcttgatctttagagtattgccacacacgctatttatcatataaaaagttttagttttgagtttaagtccccgaaaagcaatttagcgtatcacttactagttttacataggttgtgacttaggggcatgtaaatcgtcttgcagcagtttccactaaagttgactggcacacctaaattcggacacccagtgtcactgcaatgagggagtttgtaaccctagtttttatgggatttacattagaaggaactgtgggtggattacccaaggtggcgatcgtgctttggggttttcaacacagaactcaaagggattttggacttttggatatgttgccatcaaattgtgtggttcagttgatgcagatcttcttgtcaaaaccatcgctagaggatcaaatttcattaaggatgaaatcatgttcaaattcactactaaaaacttgaattcccaaaaattttaaactatcgagtaaagaattctcgacggtttataaaactgttgcttatacgagcatctcagatacttggtagaataggcgacggtggaaaaatatcagtaataaatattaaccaatatttattgttaatgcagatttttgttaaccaaaattaaatagcctttcagtaataaatattctacagaaattaataattaataaaagaaataataacttcaaatatttttatgtgattttgtagttaaaatctacatactcttcgagtccttcttattacaatatttttagagtacagaatacaatatctaattttgaataataataattctctcttaaattttaccgtcccttttctcattgaatttttccctatttataggagtataggttgagagttattctttttggtataggtttaaatataattgttcatgaaacgtggacaatccccacatttcatttaaatcacatgtgagataatactaaataactacccaaccgttctttaattttatcctttgatggttatgctgacgtggaaggttacatcttctttgattcgagttatcttccttaaccatctttataagaaaaaatgctaagtgtttggaaggtatctatctcgttgtattctctttgtgacttttgtaatgcgaggtgatctccttgctatatgtaatgtgaggcagtttatgtagatacattcattttgctcagatggatgaatgtttctttcttgtttgtatattccgaggcatatctatatctcgttaatctcagatcaatagttgttattcttgtctcgctattgactataaagtcaaatgagttttgaatattatctatttaacctttaaataataacgagttatttattatgaatttaatgatatcgttgtatcatttagaattgattcgcattccttttgttggacacgtgtcaaattctaaagtgtatctgaattttggtataacaactataggccacagtttaaaaccgtcggctata

SEQ ID NO: 37658 - DNA, 2404 bp, Cannabis sativa
tgcaaatttcaaaaaagtttcaaccccatccacataatctttagcaattctatcacgaattgacatccaatttctatccatattctattctttaaaatttctctactgaaaaaaaaaatgtatataatatcaacaacatattcaattctagtctataaactcagcctataattatgcaaataattaaacgaattaactaagaatgagaactctaatatttgatttaaaataggcataccttctcaggtcagctactacaaactgtgctcacacttcagtaaatgatcacttcaattcaacactaaatgaaaaaattaaacataaaacaaaattataatcacattaaagtttatataaatttttgagaacatatattaattttaaaaataatataaaattaatttcaacaaattattaatttttttagaaagtattaaatcaattaaaattctttgtcacatatatattattactaattttgatccttaaagtataccattgctcgtattgttgctgggagcaaatttgacgaattcaaaatattatttggcactactattgtaacaggctttgctagaatttttagagaacaagttagaataattgaaaacaatgaatatcaatagatttatggttggctcaagatctgaggtaggtgaaatagcaaagattggattatttttaatatctgctcttatatatttgtagatccccaagtaactagtttattatatcattacttataattattgtatttcaaatctttttctcaaaagtcattagtcagaacagtgaagttaattttattggaaaacttctatataatttctctaagtgagtgatgtatcaagatattgcaatattacaaattgttaaagaaaacaatattatgaattgctcaacctcagccactattaaaaataggactctcatcagcaactatttttatagaaagtagtactatgtacacacttcctaaaattgaaaactatatagaaaagtattttagatacacaagtttaacttttttttgtattctaattatctcctaaaagaatgacaaaatcttacaagaaaaaaagagaaagaaataaagcaatggcataagacaacaagaaaagaaaaacttacaaaagatgagccaaaatctaattttggagaatgttgatgacccaagtctttatgtcccaaattttgtctaatgatagcagaattattctttgctgaaaaacagttaaagtatttagatcctttgatctcaaaaatcactaataagcatgaaatcaaacctcaaacataaaaagaaagtttaaatgaagtagattgaactaggttaatatatcattacttacaataattgtatttcaaatacttttttcaaaagtcattagtcaaaacagtgaagttaattttattgggaaacttccatataacttctctaacttctctaagtggtatatcaatatattgtaatattacacattgtattaaaacacaatactaaaagttgcttaacctaagccactattacaattgggtttatgtttgctatagaatggaactatgcttaatctctttaaaattttaaacaatagagatgcaaatttattttattgtatgcacacactaacaatctatccttatcaaacatattcttttttggttacttaatcgatgtttatataaaacaaatcatatacataatacaatatatatgagaacatcgtggaaattcaagttatatagtccaaatgtttataaacataaattctctattggtcttttttcttaaataaaaaaaaaaatcatttattttctaatatacttgcatgaactctgattttaaaatacatatcaactaatcaataacttaacaaatatatatgctacaacaatagattatttttagagtcttcagagtaacttgaaattgaataaccaacctctcgagctgccaaatacagattgaattgtattagcagagttcctaatccctaagaatctagctaattatgtgttgttacaactttagttttctattgaaaaaaaagattgcataaaattgtgttaatcatttgaactattatacatcacatgtaacagtaagaaagaacaataatgaaaataataataacataaataataatcaagtactttataatgaaaatcacgaattatttatgtcccaaattttgtctaatgatagccaaaaatcattacacaacaagaaaagaaaaacttacataagatagccaaaacctgattttggaggatgttgatgacccaagtatttatgtcccaaaatagcaaaattattctttgctgaaaaacacttaaagtattgagatcctttaatctcaaaaatcactaataagcataaaatcaaacctcaaacataaaaaaa

SEQ ID NO: 37659 - DNA, 2537 bp, Cannabis sativa
  modified_base (837)..(851): a, c, t, g, unknown or other
acatttcaacacaaattaacgcaccttgagtagaactgcattagctggagggattgcttgaaacatgtcaccctcgataaacttcaagttttgagcattaggcaaattggcaaccacatgtgatagttcaagcacagagcatttcaggtgaggaaatacttgattgagaatcttacatacttctcccgtgccgccgcctacatcgaccaatgaagttagtccctcgaaaacaggcttgacatcttcaataaccaacttcaacatcaattttgaatcatcagccattgcttcattgaaaaggtgaccgaatttagtattcttgctcgtgtactcccaaaagctcatctcatgagccgactcgaatagtgttgttgcttcatcttttcgaagccaatttccaagagaatgccatggagtcataaatgcttgatcaagctgtaaacaaacaatagtggacatgcttgggatcttgttattaccattattattgacaaatagtaatttagatgaagatgtcaaaccatatgcatctacttcttcttcttcttcttctttattttggctattaataacaactttcgtcgttgtgaagtagccaaagtgtactaatggacgcatgagacggcggaggatgtcagttttcgtcggaggaagccgaagggaagacaccaattggggcagaggaatgtgtggttggccatgattgttgattatgtctggtatgcctagctcaattgcacattttaaacacattgaacttatgtagcttagtgtatggttgtacaaatgggtttgagcttggaatagtaactcactactactattattattattatnnnnnnnnnnnnnnntattattattattattattacttccttcacctttaaacagagcagccataataatatgttacttttaagagaaaataaggaaagaaaacaaatctacacataatgatattataattctaaaggtatatataagggaggaagaaaactaaacaaattaaagatatttttcaaaattgctaacacattattactaaagaggcatttttgtgtaagattgttaatgtatagttaggttaggtatcgtttaaaggacaaggaaaataggttaggcaaggctatacgctacctaggacctccacaattgtctcgttaaattattaatatagtagaatttttatgtaagaatacagtacttgagaccaaacaatacaccctagacactaaaaatataaagaaaattactattagacgccattaatgcctagcaccttctaaacatgttgtcttgcagttggctagcaatactccctaaacattattatattaaaccatatggaacactactggtgccctttaacacttctcaaatataaaatataataacaataactttaaacaatcatattatgtcacaaaaaaaattattttcgagtaaatataatatttatacatatgttataaattagaataaatttattaattctacataaaaaaaaattataaattatatatctttattcaaatataattattcttatatatatagagatatattgtcttaatttgagacttgaaaaatgtatgcttaagatcaggccggctaggggttaaagtcgacgttgattcatcaattttaatttaacatctctaatttaaaatcgaatgtaaaactttaattttattaagcccctttatggcatatgaataaattttcaaatgtaagatacgaataaaattaaaaaaaatcaccttataacatcaacgtcaatttttatgtatgaattcattaaacaacctattttctagatgatcttttaaaaaaaggaggggattctaaaaaattttctagttattttgttctctatttctattttaaaaaatccgtagaaaaaatattttgtttctactgagttaaaaaaattgttgatgtctctagtaaaccaaagattgtttaataactattttgcttcaattattcctataacaacaaaaatagaaggtttagttacgattaaaaataaattttctcttttcatccatagattagttattcttatttataattggctcaaactggatttgattttttttataataatttaaaggttattcttaaatagaatacacttaaatagatgttctattgtattaagtattattttttttcttcactaaactaagagcactccttacagacgaaaaaataagtcagacacgatagcacgactcaaaatcggcacgaaagttagcgagtttgagttttccttaaacatgtttaatggagtttattggaccacattcaatatttttaggcctatccagattcgatccaattatatattggatattacattttattatcctgtctgattcaattaatttcagacatatgatcgattcaacacccaatggatgttggatttaattggttctatcaattgaatatatttcattaatatttattgaattagtttaatttatctaatatttttggcaaaaaaatttggatcggatcagatccatcca

SEQ ID NO: 37660 - DNA, 3558 bp, Cannabis sativa
tatatctagcaaccacattctgtttctttgcagaccaggagaccaagtttccaccaaagaacatggcataacctccagtgctttttctgtcatctatacacgatgcccaatcagcatcagaataaccttgaagagtaagagactcagctggtgtaatgtgcaaaccataggatattgagcctttgaggtatctcaataattttttgcaagcttcccattgaaaagtggttggagcatggataaattggctgagcttatttataatgaaggcaacatcaggcatggtcaaagtcaagtattgaaaagcaccaagggtgtttctgtacaaggtgatatcttgaaatggttcaccttctttgagtgagagtttgacagtggcactaaagggattaggacttggtttagctccctccatattaagtttgacctataaatctgtgatgtactttgtttgagataagtacatccaagaagaattttgacaaacttccacacctagaaagtaatgaacagagttgaggtctttaatagagaaagtgtaatttaaatctttaataagtttgttgatgagagttatatttggccctgtaataagaaaatcatcgacatacaccagcagaatgatgagagtttggcctgaaccatatgtaaaaagagaattgtcagatttggaagccatgaaccccttctgtaccaagggtggtctttcaacctttttgaattccaagctccttggagcttgctttagtccataaagagctttgtgtaactgacatacatgagtaggcttggaagcatcaacaaatccctcaggttgcaccataaacatagtttcctctaatgttctattcaagaatgcattgctgacatccatttgttcgaccatctaattgaaatagacagcaagggtgagtatctctcacagttgctggtttgacaacaggtgagaaagtttcctcatagtcaatactaggtgtctgtagatagccttttgccacaagtctagacttcaatttgtctaatgtcccatcagcattgagtttaactttgtgaatccacttatttccaatcacatccattcttggtaagtatggcaccaatgtccaagtaccagcctttttagagtagtgaactcatgttgcattgaattaagccattggggatgtttgagtgcagcaccagtggatttaggctcaaaggaataagggtagttgacaatgggtactttatgacctagtatgactttggtttcacaatgccattcagagacctagttctcatagtatgggtcctggtgacaccagtggtacttgtattgattggggaattgggaatatggattggttgttgctgttgaggttgagtggaggtggtaacaagtggaacaggctgaggtatataatcaagaggtggcacaagtggaatggtggatatgtttgtgactggtacaccagtgcttggtgcaagtatatatgtttgtggctggttatggagagaagaaagtgtaggtatgacagggacagatggggaaccagatgttgtgtgttggggaacatggggtataggctgagcgttgggaatttctagttttgctggaggttgatttctgtgtgtgacaggaatgagctcaggttgcagggccatgtttagtacaacaacaggtgtattagtgtacatgttgttaatagtgtgaaacgtagaagtatgatagaaaagagaatcatgtacttgttgagttattgctgcagtaggatatccaagaaagtgagattcatcaagggccacatgcctagtgatgaacattttgcggatgctcacaaatgtaccctttatgatgtgtagaatatcccaaaaacaagcattgctcagacctgagttctaatttgtgagtattgtaggctctaagatgagggaaaaagctgcatccaaatggtttaagtagtgtgagatcaggctttttggagaacatgcattcatagggactgacattgttgagaacaagtgttggtagcctgttaattgtaaacacagctaaagccatggcataccaccaatattccattccaaggccagcttgagctaatcgagttaaacctttttctgttatgtgtccgtgcttgcgttcaacccttccattttgctcacttctcctaggacaaggatgctgaaaatggatgtcgtggtcagataaaaatcgagcaaatggtctgtacccacctccccaattttcctgaacactcttaatgggtaagtcaaattatttctcaactaagctcttaaattttataaaaatgccaaaagcttggcttttcaaggtaaaaggaaaaatccagcaatatctactataatcatctaggaggtgaacatagtatttaaagccttcttttgatgttatgtgggatggaccccataaatctgtgtggattagagccaaaggttgaggggctctgctatgggaggtgggaaagggaagcttgtggcttttgccttgataacaggctttgcaaaactggaaatttttcagtgaaccagtgtgtggaatgtgtggcaaaagtttagctaaggtgttgtttactaggtgaccaagtttgcaatgccagttattaatatcattaggcttaaaaacattaaaagcttgacaaggaaactaagaaaaatgcgaaacagtgctacttttattaatttcttgattagtacaagaagtaacaagattattacaatgctctacatgagtattagacactattgtaagatgacactgaatggaggtattggattgatcaccaagctggtatagaccgcccttagctttgcccttaagtagtattgtccctgtgagtttgtacgtgactaaacaacaggatttgtgaaatttttttcatggaaggaacatgaaggacagaatttaagtgtaaagaatgagtgttgaaaagggaggggagagtagattgaccaaagcttgaaatgaccaacttcttaccattgcccacgaccatagtttcatttcccttgtaaggtgtagctgtgtcaagatgggctgtgtcattggccacatgattcgtggcaccagtgtcaacataccaagattcatcatcactaagctcaggaatcatagtggtaaggagtgcttgtggatcataaggaatatcatattcagttatatgagcttgaggagtgaaattaccatatttggggttgacccaatttttgtcaaatcgatagtggcaaatggcagcagtatgtcctgttcaaagacagacttgacagagcaatctacttccattgccacgaccataggaaagagttcgattagggtcattagtgtgtccacgatccacagcacggccataggaacgagaattcccatttcttgattgctgggatgcaagattggcttgcatctttaaagataagtcaacaatggagttgtgatgcttgagcctggtttcatggagagaagaagggcttgcatctattattacaatctaaacaatcaatgatcttttatagatggtttacattcagtagggacaaatttaccgttttacccttcaatgt

SEQ ID NO: 37661 - DNA, 5152 bp, Cannabis sativa
ataaataagttgacaagagcatatgtgcaaaagcacatacttcacaattccaacaggttgcatctacatgggtttggttcctctctaactcataattctggttgaagttaatgaatttgggcatagtaacttgctacctagtacacgatagagctcggtacaagccaagaatcttctgttggctgacaaatgaaaggaaacatactccaacttcgaacccccttggtcatagaaagcccctcaaaaatgtgagcaacccaatatttgaccagaattttattaattagtctggctttatgtcaaatgaaattatcatcttttctggcacagcttccagactgctgtaagtaaattcacctatctgaccaatgcaaacaattatgcctaacaatttgaaagttgcacctatccttctaatttctcttagacctctaactaacccaaaatcttaaattatataaactaatgtgtttccactaaacagattaactcctcctacctagtgtctacatacagagattacaaatcaggaaaaccctccattattaagcattcaaactcttatacactaccaagtgaaattgctttccagagataaacaattgatcaccttacacagccagacaggcaaaattagtaataacttgattggtcattaacacacctttataactgtgcactcaatcaaacacatatcaagtagctcatggtctaatttctcttttcattttggaaaagctctgatcaaagaaacatagtaagagaaatgaatttcctagattgaactagagccagaagaaaccaaagcaaaaaaaattggtctgtttagcaataatataagacctttttcagaacccaagtcaggaacccaccatcaccaaagaagaacaacattaaccacaacaattaccacccaaagccctcaatttgaatccaaaaggaccaaaacccagcaacaaaaacacaaaaaaagccactatcaaaatgtagctaaagttctcattttttccccataattacctaaacaaacccataattccgacaacaaaacaaagaaacccccagaaattgtaatcaaaactcaaaattaacgaaagaaaaaagacataaacactaaccaatttcgaccaagcacttcttcagcacggtacccagtaaccatctcaaaaacagtattaacataaataattggatggtcaacctcaagtgcatcagtaacaacaaaaccacaaggagccgtttgtagcagattctcaaccggaaaaggaatcggtccaggaccagctttaccaacatcaacatcgttaagcatgaattcctcctcatcatcatccgcactcagatcggaattgctatcccactccattatacttcaccctaaacccactttccttcaccccattaataaaagaaaacaactttgcttcaccagaacaatacaaaccctaaaaacaccgaaccaaccaaaaaacccccaaaaaggtctgaaattggagacgcgtaaggtcctccagaggtgcgaagatgcagaaatggaggtggaagaagaaggtagagagagaaagcgtagagaaacgtgtggatagcagtagtagtgtgtggcaattttggctgaggagagagaaagaggagagagagagagagtttgatttcagagatgagagaaagagaggcctttggtttggtttgttctttcttttttgggttgtccgaaccgggtttcctatgctggaaaaaaaatcttaaatacgggtcgggttttctaattcggattcttttaacgcaccgttttattcgttacttttggctttgtgcttacgctgagtctggccctttcctcattacccgtggcggttatgttaaccgttttctaaatatagtatgggaattttttttaaagggaattatattaggagaatttttataaatattttttttaatgtttatttataattttagggtttatagtttttatttataaaattttaaaattataaaaatgtattttgttcagtgaaaaaaaaaacagttataaaataacaaaaattaatcttgccacaactataaatcaaccggaaaaataaatttatgataactatatacaattataaattaactataaaataactaaaattcagtttattatttttattgaagaagtatttttataaattaaaaaattcaaaacgtagaaataaaaaattttccatattgaagtattttggtaatatttcaaaaaattttgttcaaatatgtaaatttttcttatatttacaaaaaaaaattgcgatttaactctcttaattattatttcacttgtaattaatctcccaagttaaaatttgctaacaaatttaagatgtcatctatttttcacagttaattgacaatatgaattgttttactgttgtaaacatgacacgtttatattaatatacataatattattatttaaaaattataaaaaattattttaaaatttataatattttttctttttataattttatttaattttaaaatgaattttgaaataataataatagtagtactgatataaacgtgttacgtgtacaaaattatacacacaagcaatctatggtggcagttaactaaatgacactttatatttgttaacaatttagtaattttttaagaatataggatgtttgaaacaaattaagaaaaactagttttaagttaggatataatttttttaattttttttatagaaaataaaaattattaaatgtgatgcaaacaaaattctcctttgataaaatatataaaggcatgtttttatttatataaaaaaataaaaaatttataatgcttaaaatataaataaaatattagatgcatgcatgttttattttacacaaattagttttaaattttacattaattcatttaacgttgtaacgtattttgaatttttcaaaaacagataggttctttttttatcaataactactttcattaattaaaacaaatagatttatatcatatttcccttcattttacataaaatttacaggtcttaaacaaactttaaaggaaacctatctttatgagatgatttctttttatttacaaagctcataagaataatatcggtgccttttaagtaaatacaatttactaattttattcataacacatctttcttcagagttaaagttcaaaaatatttagctaaggttgctttgttccattttgtgccttcccgaaatccaaattatttatatgatctcggtttacaaacaactctcaggatgctaaatgcatcttgttggtattgccttttcctcccataaaaattttctacaaattcgataaatttctttcgaaactttttgtgggaagacataatattcattagattcttatctctatcaaaatagagttgatcaagagactttggcctgccaaggaaagatatcaactttgtatgtatattacaaataattatgaaaaaactaagactaaagataggatgtatacatggccggccatgatggtgtgcaaggtgggctactgcacagggctcaaaaaaataaagggtctaaatattttttctttaatgcccaatattttttttaatgaacttaacttttaaaggggctaacaatttgtcattagtcacctccattccaattctcaaagtccatttttaattctattaatgattttaagctaaaaaataaaaatttattactgctatttattatttttttcaaaccttgaatattctttttttttttatcattttttttgttctattggaatcaataataatttttataaatagttggaattttttggtgttttttaaaatatataactgaataataatatttaaaaacattatttataaattgcatttttttaggggttcaaattttaaattagaacagggcctctaaaatgtttaagacggccctagatgtatattacaactacaatatatttggaatataacttcttaaagtaataaaataagaaacatgcatgttatactttaaaaattatatatcaattttttttaaaagatttatagttttttatttaatttttatgaatttgaattatatgtatacataaaatacttgttgtttttatactatttttgtataacaaatttatatatattatagtctatagtgttgacgtgttgttgtatattgctttacattttatgtatgttagttatgctttgtttttgctttgtttttataaagtttcgtaaaaatatataacaaaaatcaaatatagtctacaaaaacgtaaaaaacatataattttagacactttgtgtaatttttttatatatataaaattaatgattcactcaaaaaaataatattgtacattataaatttataattatattatagttacaataaatatgcattttgttccacacttaggtgacttttaactcaaaatggaaaataggaaagattgatggggacatcgtaagcacttaaaagctatatttattgaggagttatatttttattttatacataaagttataagtacacccttaaagacggttaaatttctgaactctcaattcacttacaattaacctttcaacctcaaattttgataataaccctccaaagtactattctattcgtatttttaaggtgctgtctgcacagtttcgtaaaattcttattttgcctatgtagtaatgacagatcacttaaaaattagctaacatgaacatatttaccaaaactcaaaaacttattcatattattcttttttttaaaaaaaaaaatataattacgataaaataaaaaacctaaaaatcacaatcttatttatttattatttaaataaaaatatatctatctctctccttcttcttcaatatacagatctaggtattccctccttcaccttcttactcttctatttctctatctctctttttctcagttttacacatttgtggtgtcggatcagagttgagggtgcatatctctctccatctcccaccccaacttagaccttggaacttggacctgaacccgacccagatcctaacccaaaagtcgatccgccttaaataaaaccaataaataataataaaaataaaatttacaaaatatattttttatttttatttcataaaata

SEQ ID NO: 37662 - DNA, 4749 bp, Cannabis sativa
gagctaatcatattgattcgtgaactaaaataaattaattaacgcctcaaccatgcacgtttaaaaatcctcgtctagtttaataatcttatttcttttcattttaatcatcttttaaatttatttccaaaaaaaattttaaacaaatatataaatatgtattttacgaataatttcttcaaaactatttgcgtgcatgtgcattttgttttttaattttataaaaaatggattattcataaaattgtttagtaaaaataataatgtatttaaataaaatagtgcaattaataagggtgttctctctgtctcaataaaataaactgggagaatgattatggtgaggcggagtgaaaagaatggagtgtccatggaaatgttagtgtagtcacgtgaatatatcatatatgtatattataatattaattaagcatgcatatatatcatgcaaatacaggtatatctcattattgcaattcaccggctgatgttgatcctaccagcggtcccccacctacgtttccactgcttcacgatatgccccgccctttaatttacatcatcattatatattgtaaccttaatttctacagctaccatttcctttaattaatgcattttttttaattaatagttaataattattaccatatatatgataagaaaaactgataaagaaaattctaactgtatgaaaaatatatgagaaaatagtaataaattcattttcacatattttataattaattaatataatatataaaaagttgtaaaattccattaattaattaccataaattataaaaaaaaaattcttgatttaaatataacaaaaaaaaaaaaaacatttggttttattaggagttgaattggctgtactcatctccttctctttcatagggcgcggcataatataagtttaaatcttattaaggaaaaataagacaaaccagctcatgaaacgaagatcaaagcgactttttaaaagtgtcgaaattgtaattggatagagagtaactatattacaactaatagtgtataaggaaataaaagttaaagtttctgttatgatatctatggtattattatatgtatatacacgtgggagattgcactgtttaattagaggacgcgattattaattatctgtcaactctcattcttcattatttattttcttggatgtattatatatcacatataaataaataatgggaataaataatatataaatatacattttttccatgtgttcctactttgcaaacaacaaaataaatagagtcaaatacaaataccttaataaaatccagaagaaaataagtgtactagactattcaaagcaaagttgttgcacacgatcatcaaacatatatatagactaaacttgcatgaaaaaattagaaaattattatatgatgacgacaaatgttacacgagcctatgtgacaatatcattattcatttgtccctaaaaaatatatgtgtctgatgtagtttgcaataagaattttacagttcataatttagtaaaacatatcatttagttagacgatacgttattttggttcgagaaagtactgtagctgtttccctcaaaaaaaaaagtactgtagctgattatgaattgttacatcattaattatatttaattttgatcactgcgaaaaaaaatagtactctatgtatatatattccctttcaataaaatgaaatagcgctataattactataataatattgttatttatcaatacacattacatacattatatcatttaatttaaaacacatgtacttctcaatatttatatatatatgaatataattgatattttaaaggatatataacttaattaaatgggtaatgatcactgatcaggttaagttaatagaacaaaaggtttattctttaattttaatgctacctagtacaattggtacacttttaataatgcagtagtacatgtcttcaatgtgccataaaagctataaaccggtggattaaatttgatagattatgtataaaggaaaatgttgtattaattgatgaaaacaattcgacaatatctaaaatctaaaggtactttaattacaattgtattgctgagctttaacaagtacgtataatagttgttatttctctttttccgaaaagttaagtactagtttcataattttgtagaactactacaacaaacaagctattaatatataatatagcatgaattaatatatagctagtgatcttattcatatcaatgtataatatagcatgaattaatatataatattcaaacactaataattaaaccttgctttttaaagcatcacaaaccacccactagcatttggatcatgtgaagaaaaaaagcaaaataatgtatatattctgtgtataaaaatatggccctagccttatatataggcttccatatatgtatatgatgagttactttgaagctactccaagaatatgtgatgttggccttgggtttgggtatataggagactaaatgaatttggtgaaatgatatgtaatggttccaactaaaccacccactacctagaataacctttcttaaccaatagtatatatattactattcctcgattataaattaatgtcattctcattcccttactgagatgtatacaccttacttattaattagaaattaagtcaaacttatttattcaataaattgaccgaattgatccaactattaatgtatatgtatattaattaagtggatcgatcatatcttattataggtcagattcagcacccagccaactttattttctatagctcatccttacatataacaaagtttaaacaaatcggttagctcagccttgtcattaccctctaataattaattaagtatatgatattgttcgaggttaattattagctttaaagtttatctgtagtattttagatcaatccacataaataattaatcacaggctcgtcatcaaataataataataataataaagtttttacaggaaattaatattattaattagattttacactttttgaaggtatctttttcttgtactttaaatcttaattatgagtttttttttcctgattcgatcagtacgactggaatggaaagtggccgttacatgtggcatgtggttaagctttggtcagctgactcaagtacacaatattcattttcagtcctatactatacgtacttcaccgtaataaaataacgaaatatacccaataatgttttagtgtaataagttttttttttttttttgaaactagtgtaataagtatttaatatttataaaattataattttatttattttatttattttcgttagtatatactttgaagaaaatttaaaagtaattaatactatatatttgtgtatagactcaataatctaaaatatgaattttatatgtatcatgtgtttaagataataacaaaatttgtaataataatagtgaaggaaaattaaagttttacaaacgtaagtacttatgccgcttacaaattcaaaagtttggatacttaattatgtcactatttatcttttatctaattaattcttttattttttacaggttttttatttgtctttttatatatatatatatatataaaacaataataaaaaaaaataactctctatttttatctaaaaaaaattaaatttgtaaaaatattaaaaaactgtaaattggtatttttgtaaactttttgtcattttttagtatttatgaaaatatccctaatttaaaacactagcatggatacatgacagaaatttgggcccaatgggctgtgtttttatatggggaaaatagctcaatcccatctaatccattgcttatggttagatggttcctgacttgtcaactgttgatgttgtgacatgaaggaaggaggaggagctttcattttttctttttcattcttatgaaatgaaaggctcagatatgtgattagatttaaaattaagcgactgggcatgtaattgttttagtaaatatttttgaaccaaagacaaacacatcaaaatgggtcaatgaaaccaaatttgggcctaaggttcccaaaaatgatggacgatcaaactatactactctattataaagatcatgtcaatgagttggcctgtacatatcgatttcaaatcaatctagtttgttgggtcagtgtggtgtggcacataacaaagtcttttaaagcaacccaatattttttcattcaaactcgttttcttttcctccattaaaataactaaatgaatcagtcttcggaaaccttaccaatttttggttggtgaaaaacttttgtgcattatgtagaaacatttgtttttattatatccaaaattatattattttctatggccactttttgtctaaaatttttcatttgatcatccaatcattaactttcttttttcgtgtctgacttgtgctacccttgtccttgagtattggtttggagattgcaaatatttcatatctaattttgttgcggtgctcttataatttttggaatttgtggtgtttgactgacaggaatgagaataaataagaaataaaataaaataaaatttaaaatatataaaaaaaaaaaaaattgattaaaaattattaaattttttatatctcataataaaatagtattttattctatttcaaaatactaagttatcgttctactaaaatagtaaaacatcattccattaaaataacatttta

SEQ ID NO: 37663 - DNA, 2208 bp, Cannabis sativa
tatctaacggcatttcttggtttaacagaatatactttaataataaaagaatattctgttaaatttaacggtgttagtaggtttgacgttacaaaaccctaactcatttacacccactcttcccttccattctcactcccaatcccaattccaatagagttttttgatcgatttaggatctggtttttggtcacttacctgatttttaatttgggtcatgggttttacctccacggtagttaccccaaatgaattctcttacctaaatcgatattgaaatgtcgttcaatatatttttctcactgaactatcttcatggaatgctttatcattggaatcgtcgatggtaaaattattttccatcgcctcttattatccagcgcctccctctgcccgacgaaccaacagatcatcgatgtatccacctccgaccagagatcgttgacacaaacagcccgacgaaccaaagcttcgtctcactttccatctctctctctctctctcgtgtctccctcttcccctttcgaccaaggccagatcgccatctttagcaaaacacaacacctcaaggttgtctatctccttcttgatctgttctgcctatatactgttggatatttgattggttgaaattcatatcaagctcctttgagcgatggtcgtagggatataaagttgttgttcatgctatcaagtctaggaaattcaatggttttactctctagatgttggacttattcagaaaagagggtaagttttttaattagtactttattatgggtgttttatttgtgtagatgaggactgttaagtctctgatttttgtttttagtgagaatatgattcaatatattgatgccatttattttgaaatcatctttatgttggtttaccccaaatacaggtactatatatgtatatgtattaatgttggtttatctatgatttggtaactaattaactaatacaatctaacaaaatcatcataactaattaattacttgtaacaattaacttgttttcttcaggacctggtaatttttgcttgattcatgttagccttgtgcctgttttgaatgtggttggtgaaaaggtaatttctcctctcttttttgcttgttttgttcttattcttttagttcacagtgttgataaaagttcattaatgcctttaattgttatgttcagaaaacaaagcctactcaacacaacgttagagggcttagatgccttggtttgaccacacctcctcacttgtcgaagcacaacgatttctctctttttccatgtctatattcatttgctttggtttctcatgttggctaaaccaggtttcttcttcatttcaggcacttgatgagaatgtcaagatgaagctatctcaattttgtcatgtcccagtaagtcaacaaaaaaaaaaaaaaagagaactttttaatattattgttcaaatcagttgaaatattaattaatactttgtatttatttgattttgttatagaaagataacatcatcattctgtatgacgtttcacacatttggcatattcctctgctcctaagtgttagtgggtttttttctttctttctaatttcttcttatgtaccatgtaccatgtgcaacttcaaatgattgttttattttgttctactcatgaattaggatcagaaggctcatgaagccatcttccaagttctgaaccttcaaaggtttgtttcaatgtttcagcatcatgtttttttgttaattttagcaataattgccttacactcacacaagaaatatattatgttggcttacaaattgggttgcagccactgatttagaggatgcaacaaggttactaattaaaacatgttcacttgtatttttgtttacattattactaatgttatgttcatcattcataaccagtcatcattcataaccagaatcctgatgcttataaagttgtatggaagttagtaaaagcatttttcttaaatgctgaaatcatctgatctgatctgatctcttcatttcactttttgattatgaatgaataatatcaggggtcaaaaacacacatgggtggaaccatgcgtgttgggtcaagaagaacatattttcaagttatggactgcaaatcatctaaactgtaagtgtttttttctataattccaaagcaattgcaaatgaggtacttgtgtcttcataatgaataatta

SEQ ID NO: 37664 - DNA, 4635 bp, Cannabis sativa
atttatgaaaaaagcccaaaaaaatattaatttttttttttcatcatgcattggaatgatatttctttttattttaaaatggaatagtcattctactaaaatagtagaaatgacattctattggagtgacattccaatactttaatatgcaaccaaataaaggaatagaatgaaaattgtttcttttttattccatttcattttattatcttcaagtaaatgtcaccttagtatttttatactctatgagctaaaatgactctatctttaaacattttacatcacattcagggctggccttaggtataggcgggttaggcccgcgcttagggcccactcattttaggggcccaaataaaaaacatatcttttaaaaatattatttatctttataataagggcacaattttttttatagcccattttaactcaaggtcagccctctccctgatcacattctctagaaaaataatagttaaaatgtgttttatcatagaataaatccctatcctcgtttgatcaaatttttgatggtttttaggaaattttgaaaacttattttgtgactgacaagtagcataaaaaaataaaataaaaaacatgtagggaattaaattaatgcgaaatatatatgacggattttgtccacaaatctacaaatacaatgcaaatgggacgatattccttgtcgttagatgagaagacaaagctactgtgagggaaagaagtagccaaaataaacagctggagataaacaaagtccttcaaagtattttcacacattgtgactttgaggcttttagttaaataaagtcatcatcatgaataaatgggttaaaaaaagaaagaaaggcaaatctaccgaatctattttactttaatttcattgtaccttaggattataattcagctttcttattcaattcaataatgaaagatatatatattggtgtcaattctattgtttaatcaatttcactaacaggttcattaaagtaaatatatatatatattttttttttttggaatttctttttgatgaaattgtaaaaaatgagttggtgaataaaatttttatttattttagtatgtttcaatactttaatttatatttttttttctttttctttctcttacactactttttttctctccttctttcccacttttttatttttctctcttctaaaattttaaaaataatttcagatcacgtcgtcactcaaaattaattttaaaaatgtaaaaaaataataaaaaaaatagaaaaacatcaaaaagctagaaactcaaattttactgacctgataagtcaataatagtaataacattaaaaatatatattaattgaacttggtatacatattaatacatatgacagcaaaacaaggatataataaagctttggttggaccacaccgaaacacaagcttgggttgggacattcaagccaagtggctttttattctgattatccactgggagtattactaatggggatgatgaaaataaaagacacttttcagcaagatagcaagctatgtagtaatcttcgtttggtgcacttttttaacctctctctttccattagtatatatttgaaactatataaagtgaaaagccgtgttatcaatttctattttggcctgactcccgcaacaaccgtgtcgtggatggtccgtgagtggactcgtgggcatccaaagatagaacaggttcattcttgtgtctatgccctgtctccagcagtgtgtactaacaaagcattaccttactcaccatataaggttcttaggtatcatgtaatgatccactttgcctgcccgtcccactgaatcagataatcggattatctgatcagatccgacactacttattcggatcgaattggattcggcttttctctcttttatttttctttattccaaaaatttttatatcaaaacttatataaaattcatttttttcttattgaacaccactggcaccatacgagctatagcatcaaccttgtctttgatactaatatcaaaaggaaaaactcaataaaaattaaaatgaaaacaagaaacctgaaacgagctgggtaatatcagtattcaaccgactagatcgtcttcgtaaaatcaatattgactattaatagttaacacccacctcaactcttacttcacacattgacaaattacaaattgcacgaatccaataagtacgaactcaataacactctcagtcaaaacataaaaaacatagcgaagtacctctgcgagtaggccttgccgttacactgagaagagagaaagaatcttatacctggctgcctgagaagaatggcctccggtgagaacgagaaccgactgattatggatgaatgagcggatcagggattgagatcgagaacgagaacgactcttgtagatatattgagttagatagattagggattccagtttcactttttgagtcttcgactcagattaattaggaatttgggatccaatcattttttttaatatgttgaaactgaaaaaaaaaaaaattggacgggacagggcaaggcagatcagatccagatatattaatttacggggaatttttagttatatacttaattataaaataattaacaaatatactatcaattatttaaatgatacaataagtggtatttatttaccgcatatataaacaaatatatggtgactaatttttttaattaatttttttattaatttcttttgcatctataactatttctatttttaataatttaaaaaaaaattaacaattatatcattaattattttgaataaaaaataatattattgcaatctacttgatcattttgatatgtgagaaacatatattttttttaccatcaccaaagaatatatttgaaatcaaaaataattatttagtttcttttataaattgttcaaaaaaataacaaaatttttaaactcaaacaaaattaaaaatataccatactaaaagtattttttttattgtgactaatttatccaaaaaaaattaattttatatttaaaagttactagatgctattaaaaaataaagtactatgatactaattgatttctttttaataagttttactttgagataatattatctcatttacatttttattacctaccaattaattacttttaaaattatattattgtttatctagaaattaattactttcaaaactataattttatttttaagttatatcatattattgaccatgtatttatattacttttttttatatgtatacatattatatagttattttacattatttccaaacatatttaaaattaataaattacgttaaagtataataaattatgatataacttattaccaactttactttaactttttgtttaattttatatttttaaaaatataaatgtaagatactatctagtttctatacaagtaattttaaaatatatcaaaagtgttctataaaataagtatatgaaactataatttagttacttttcattattaaataaaaaaatatgtttttagtaacttatataattaattagtatatttaattttgtttaaatttaatgtttgattttgttttttgtttttttaataaatataacttatataatgttcaagatattatttggtgtatttacaagttattttataactctgtcaaaataattttataaaaataagtttatttataatttaatcttgtaatatctaaagctaaaataagaaaaatactttttagtaacctattaagttgttgatacattaaattttgttttgtttaagtttaaaaattaattacttatttgttaaggaaaaataaaagaaactaaaatgttatatttgactctaattatcttctttagtgatgacgtcgcatattaaaataattatcttaaataacaaaaaaatataatgatctaactcttaaaaccaaacaattatttttgtagtaaataataattttttaaaaagagagaaataagtagatgaagttgaaaattattataaaattttttaaaaataaataaaataaaataaaagagataggttgatgtcatgtcattaaaagaaaaagtaataaaataaataaataaataaaaagaaaaataatatagaggaagtagatggatgtttaagtaaaaaaaaaaaaaagctagcttgtacctagcttgtacataccttgtacatacaatacatacaaaatgaaaaaaaaaaaaaaaaagaaagccacctacgtatatacttgccaaacaaattgcaaaactaaaggtatatttaacacttaaaatcattaaggttatgatatatttttcaaaatttcgtttgtagatgtaattttcataatgttgttcaaatatttatatataagtgctctttaattagttaccttaaatacataatcacatggttacactaattttagacatagaataattattaaatggtttaaattaattagaaactaacttaaaatatttaatatattacttgatctcattttgtttacttatatatatatactagataagagttacgtgacaagacacgtaaatattagttttattttaagttcttgtggtttttgtaattgtaaattatgttataaac

SEQ ID NO: 37665 - DNA, 5078 bp, Cannabis sativa
gtgaagaagaaaaggagaaatggtggttcttcgagcgacgatgagtcagaatttgattcagaagatgacacagcaaggtcttctgggactggaaggaatatgaggacaatggggagtagtgcttctttagggaaatatgatgtgaaaattacaaaacgaagagtaccattgaatacatgtgaaggggctgtcgatttttcacagcaggttgagctaattaggcatgaaatcagtcaaagaaaattggctgaggaagagggtaagtttgaggaagagtcgattcttagtcagaaaaggcaagtggtgttttttattctttctttgattgagagaagtgattactagagttgttctgttgttgggatgtgcttatattaataatatttagtgagtgtttgtttttgttttaccaggtttgatgagtttgatatatccccattgactgtcaaggcgctatcttcttctggttatgttcaaatgactagagtgcaggaggctaccctttcttttgttctagagggtaagactttatttcggtcacatgtttatgctaattcaagactaaacataggctagcagaggttctgattatgattttgccatgttataattggtgtaatttatggaaatgtttctttttctcttgttgtcaaacaacgtaaccacggttttccttctccacaagtgaggtttatttatctatatatatatagggtaacaagttgcctcttttcctttttctctcttgttgtcaaagaacaataagctgttttctttatgattttctttctgaatggaacagggaaagatgctttggtcaaggctaaaaccggtactgggaaaacggcagcctttttggtacttgtcatttccctttttcttcttttcatagtgtttattttttctttgtacaaatttgctttatctttagtagctttgctaaacacgaacagattcctgctattgaaacagttctgaaggctttgggtagtaattctattcaacgggtgcctccaattttagctctgattctttgccccacaagagaacttgcaagtcagatagctgcagaagccaatgtcttgctgaggtaccatagcggcataggtgtccaaacattagtaggaggtacacgatttaaagatgaccagaaacgccttgaatccagtccaagccaggttagcccttacttttgcagttgaaactatggtctaagtgttgcagacgatgttatgagaatgaacgtttattgtatgagtatttttccagatagtagttgcaactcctggccggttgctggatcacgttgagagcaaatctgggttgtctgtgcgattgatgggattaaagatgctaatacttgatgaagctggtcatttattagatctgggatttcggaaggacatagagaaaattgttgattgtttgccacgtcggaggcagtccttgctatttactgcaacaatacctaaagaggtttgatccttagtcgactcattttaaaaccaaatttaaaatgagatgttatatatcataatatcctctaaaaatgtcagatacaattatgaatatgcaggttcgccgaatatcacagcttgttttgaatcgggaacattcttttattgatactgttggtctaggttgtgttgaaactctttctcaggtaagaacagtgaccattatttagccagtcatgattgattaataaaatgaaatacatgtctgctatattccataagtgattacaacagttgttggttgtatctgaaccttataaaaggtgtgataatcccatcttatttcactaaatgcaggtcaaacaatgctatcttgtttcaccacttgaattgcattttcatatagtgcatcatcttttgaaggagcatatttcaaaatcacctgattataaggtttgtattgtgacttctcaattttctcttcagttgcagtgttgcatgtgccttgtggcctaacgttttaccctacaggtccttgttttctgtacgacttcaatggtaacgtcactagtgtatcttcttctccgtgaaatgaaattgaatgtgagggagatgcacaccagaaagcctcaacttgctcgaactcgtgtttctgaggagttcagggaatcaaaaagactgattcttgttacatctgatgtttcagctcgtgggatgaactatcctgatgttacactggtcattcaggtatttgaaaaatgttttttttttctttcttttctcccttggcaatttatggttgcacaataatttctacttctgtgatttccattgaattgataatggcgtgatttgtgcacgcttttataattttcaattaatttagtcagtattgatcttaccaggtgggtctaccaatgtctcgggaccaatatattcatcgtcttggaagaacaggaagggaagggaaagagggagaaggcatcttgttgcttgcaccatgggaggagtattttcttgatgaaataaaagatctacctctggaaaaatttacattatcacgattggacccaaatgcaaaacttaaggtcattaattctccctcttattgtctaattacattgttttactttcattctttatgcttgtaaatatttgttggattagttagtagtttatagttgagacataattaatgtctgtacctagattttttttttgacttagcctatttaaaagtttttccaataatgatgataataacattcaagaagagtatatttttctacatggtaaactgaaagattggaaaaaaaaaatctcaatttttatagctttttttttttttttgtaaattaggatttggtactgaggttcaatcttagaaaaccatattggagtggtcttctattctcatctctggcacaaggagtaggggcggaggtagaaggtatcatgaagggggccaaaagataaaaaaaaaaataaaaataaaggggggaccaaatacataattatttggaaaaataaaaatttaatataaaattacaatacaattttttccccaaaattttgggaggggccatggcttgctttggagcctatgtagcttcgtccttgacacagagatagctcaatctctgatcaacaaaaccccaatgtctgacctccatatcatgggcgattactgttcacacacgacactgctgacgtgcagctactattcacatttttttccgtcagcaactgtcttttttgagttttgtagatctgggcttgtgtttaacaagtccaatgagccctcaatcccttgtttttccattttgaccattgaaaatctaccatggttacttctccaagatgtttttatcaaagaggcgtgaatccattgatattgatcaacttgatcggttcacccttttgtagaaccttgtcaatgattgaacttaaagatataaactgtgtgccagccaagccttttttttttttgagtcaagtagaccaccttttctcttaggagctagaagcttagaagaaaaacggtaggctttccatttatttgtttatgcccttcgattgagtccttttaaaagacgcaacggatcccccaaggggcgctgccgatcttgagcgaaccgatgctccaagaccaagaggtttcatagctagggtcccttttgttacccaccttagttccaatggttacttggaactccttttttccgggggtgtatagctcatttggtagagcattgggcttttaacccatttttggatcactttttttggggttaatctaaccttctttcccatgtattttgccttataaccagctttcctagatagctttttagagcaatattattcgaaggccccacttctcttcccaagctcatggactctgttcatggaggtcaatcacatcgtacttcgggggaggaaaggagttgtgctttcagtgctctgaaatttcaaaagcctctactaaggttgttttctttcactttaaacaacctaatattcaccatccagctgctgaaaacaattttaaagggcatgctatgattgctacccaacttgaggcattccctttcactagtccttgtccaggtactagtttatatctgataatggtatggtacgaagtattttaattcaatcttaagtgattatcttatctctaatggcattgtccatcagagttcctgtatttgtactccctatcaaaatgggattgttgaaagaaaaaaacatttgttagaagttgctgtggctctcatgtttgtgatacttctgttaaagttttttaaggaaaagttgttttgtgacaacaacttttttaatcaatagaatgcctcctcgtgtcttacaatatcaaactccactttgttctcttaagatttattcctgtattcacatactctccaatattccattaaaaacgtttggttgcatagcctgtaatatgttttagaaaaggagaaacctgtagacaaaaagaagtgtcaatggctagttgggaaattgatctatttatcagttagcttggttagtcagtatatggacaaccctttagaagaacacttggaggcagtttacaggatattactgaatctaatgaagacagtaggaaaaggttgttgttcaggaaaaaaatgaagaaagaaggatagaagcttttacgatgcagattggacagttcaatttaggacagaagatcaacatctggccattgtcccaaagtatgaggaaaccttgttagttggagaagcaagaagcaacctgtttttgcaaagcaaagcagtcctgaagctgagtgagcttagagctcttgctcaaggagtatgtgaattgatcgagatcaaacgagttcttgaagaactacaacttcaaaggacaagtcctttgaagctatacagcgacaataaattagctattaatatagcacataatccagattatcatgatagaaccaaacatgtggaggtggactgtcatttcacaaaacaaaaaattaagaaaaagaactatgtgtagtttgtgtgccaagcaagcaacaagctgctgatttgctgacaaaaggattatcaaaagaaagctttgatgaacaagtatgcaagc

SEQ ID NO: 37666 - DNA, 3764 bp, Cannabis sativa
tttagaaaaatatataatatagtgaaaataataataaagaataaaaaaaaaaagaaaaaaaaggatatagtgacactttttgtgtgttgttgttactttttcactctgacaaatcctgactctaaatgcttacagtgacacgcagtgagtgactgtaaaagggttaagtgacacgcgtgaagcgtcactaaaaattatctttccagtcaccctcattagtgacgcgcagtgaagtgtcactaaatatttttagagtcactcaatgtgtgccactaaaactcatttttctagtagtgacaatttaaaattccatctctcagaccccaacacagatgcaccttctcataccccttatggccacttagcctcaagtgctttctcatatttgattacgatcatatatatactcttcttgcgtgtagaatattttaagttcattttcttagactaacttattaattattaattgctcaattttaattaaattgtcatagtcaaaagtaaacaacttataaaataataaatgaatgtgtgaacatatatcaatgtcatataattaaataggtttatctctttatataattggactaaaataactaattgacttttatttaatataatacaggagtttcaacaggtatactgattctaattgtgggaagttcatggatttattggggagcaaaaaagagaagactcatcaaattaaaatataaattctttcaacaaaatggtgggcttttattacagcaacaacttcaatctcatcaaatagagacagcccaaatttttacagctgatgaattagagaaggccacccttaattatgaccaaagtagggttattggccaaggaggttatggaacagtttacaaaggaatcttaacatgtaacaaaattgttgcaatcaagaagtccaaaatctctaacagtagccaaattgagcaattcattaatgaagtcattgtgctctctcaaattaatcatcgaaatgtggtcaaattaattggatgttgtttggagtcagaagttcctttgttggtttacgagtatattacaaatggtacactttctgatcacttgtttgacaagttaggtaaatattcatcgctttcatggaagatgcgtcttaatatagcaacagaaactgcaagtgcaattgcatattttcactcttcaatttctatggcaatcatacatagagatatcaagactgcaaatattttattagacgaaaattgcatagccaaggtttctgattttggagcttcgagactagttcctgttgatcaaactcaattaactacgttggtgcaaggtacactcggttatttagatccagagtattttcacactagccaattaaccgaaaagagtgatgtttatagttttggagtcgtgttagcagaattattaactggacaaaaagcactttctttcgaaaggccagaaggaggtataaatcttgcattacacttcatttcatcgatgaaagaagatcgattactccaaattttagacaagaatatgattatcgttgatgaagatattgaagcaattaaagtagttgctaatcttgcaaaatggtgtttaagagtaaggggtgaggaaagacctagcatgaaagaagttgcaagtgaactagaaggacttatacataaagagattcatccatggggacctaattccaataataatcaagaagatatgaatgtagaagagactaaatacttgcttgaatcttcatgccttcatgcccatattggctcaagcaacgactcaagtgttaggtttaagagcatgcttaatgagaacttacagtcatattgttctggaagataattaattaagaatgatttgttatactttattgtataaataaaattgtatatgtttaattgacattctttccttttccttttcaaaatttctaagattctctctaatttagtgttataatagtagtttagtgctatcgtatttaataaaatttgtttttaatagtatgttaaatattttgttaaatttgatggatgttaaatattacgtcaagtttcacacaagatatataagattaagtatatttagtctaatttttggtgtaaattagatacaaaagtcaatactaccgtcaatactaattaaaaatatacaaaataattaattttatatttattattttaatatcttattaatataaaatctttttcattaataaatagtattaatgagtgatatagtagtgattaaaaatataatatttattgtggactaaaatttagttcctactatcaccaattctaaatgactatgtcgagtggagacatgaaaatggttgaagacaagatggtctctttggatgctgttgtttgcttctcttttcttttgttactttagtttttttttttcttttagccttctgttgttgttttgttagatggttgttctgtgtgttgactgttttgtacgggtcattttttaagtaatgaattttgggtgctttggcaccctttcctttatcagaaaaaaaaaaaagtccgtgccaaatttaacacatattttacattattggagttaaattttaacataatattttaatttggatcaaatttaacacatattttacattattggagttaaattttaacataatattttaaaaatcacaatacactatatttatagttttctgtgatgttattgtgctaaatttatagcgcacatgtaaattaatgcaataattcttttaattgcagtattttgttattgattattaatgataaatttaatataatttttattttaacatttttcttacatgccaaaattagtataatatttacattttatattagtgatcatctaatttagaattgaattgaaaatgaaaattgtaatatcaaaatgagaatattttttacaaaaaatgtcatctcagaaaaaaaaaaaaatggaaaattcaaattcaaattcagagaatcaagaatcaaactttcataacctggaaggaaattaaaaagaaaaagaaaaaataagatccccaaatgaaaataagaaaaataagccttagcaatcttgttcaagctcacgtccacttgcaatggtgacaccagttaacccctgtatgcctatgtatctactgggtgctccagattttggctttggttaatgagttgggatggcatcttgctgctggttgtgaatcgatttggggaaggatctttttggccaaatattgtcgtggggattagttcttttggtctcttcagttacctaagtctccatcacatttatagatatgttgaattgaatttagaaatacaaaggcttcatcttaaaagtacctagctaattaagtaaaaaagatcttaaactgacatttaggggtgttcataaaatatccactccaatttaatttgtacgattcaatccaatcaacatatatttatatattacataaagaaattatatgtacaattaatattttaatgtaagaaataataattaaaaattttaatacatatgatacaaatatatttaaaaacttaatatattaaatgtatattatattataaagaatatttaatttaaaataaaattaaacatttctttctatatatacaatttttttctttatttattttaatttgttgctgaaaacataaaataacaatacattattttattttgttgttagttatgtagaaaacgatactttttaataaatattaaataattgatcaatattaaaaagtaaccaatct

SEQ ID NO: 37667 - DNA, 3183 bp, Cannabis sativa
ttttttttttttttttaaataacctcaaaaatttcaataatttgaaagaacaatgttgatagtatgagaattcacctctcaaaaattataaaatccaaaaacagaattagaaagtctccaattagcaatgtcatgggcagccatgtttgccttcctagatgttaagaaccaacttacagtgtgacggcttgtgctactgatgtagagaatcatttcttcaattattggattctagtatattcgttgtatgagagaaagtgtaccatcctttctgtataagccagttggcacatttctattgattataatattcttctgttttgctataaatgaaagggtcgagctcatagtaaaataagctgagatttatcaatttcattttgtttaaaaattaaaattggtatcagagccaagatcgtcatttacaatgttgacagaccaatctcaaactccaccacctgttactccgaccaacaaccagagacctagaaatcccattcatgcaactcctgcatcagctggagcaagaccctataccagccatggaaacaatccagccatcaattatacccaaccgttcaacactcttaagcaaccattttcactcaagttggatcggaataactacacattgtggaaaactatggtttctacaatcattagagggcatagacttgatggtttcatcaatggtagttgtgtgtgtccccctgagctcataacagttgagattgcaacaccaaaaggctaatctaaatttgagctacaccaaaatctagactatgagcagtggattgttagtgatcagctactcatgggttggatctatagctctacgactgaaaccatagccactgaggtagtgggatgtggctcatcaagagctctttggaatgctttggagaatctgtatggtgcacactcaagggccaagctagatgataccagaactcttatttagacaactaagaaaggtaacacctctatgtctgaatacttaaggcaaaagaaaatgtagtttgatagtttggctctagctggtgaccctaaccctgaaagtcatctaatctctaatgttacttctggtttgggtgttgagtacttacccatatttgttcaaattgaaagaactcatatgtcacgggaggaattgcaggatactttgctgagctttgacagcaaacttgagagattacaagtctcagggcacaccaaattgacagatcaaggaactaatggctctacctatggtccttctgctaatcttgctgcaaaaccaacaggacagtcacagggaagagacagaggtcagttctttccacatcaggaaaatctaggtggttatggtcataacaatggtagggaggtggttcaagaggcagaggaagaggaaggtttagcaactctaagccaacttgccaagtgtctgacaagtatggccactctgcagcctattgctacaataggtatgatgaagcttacatgggtcaagatccaaatgttcattagacttctcaaataggaggaggtcacactgtctttgttgcttcccttgaggtagtggatagtgatgtttagtatgcagattcaagtgctagcaaccacatcacttcagcagtaaacccaaaaaatagagtatggtggtaaggaaaaattaaacaataggtgatggtaatcaaatcaatatctcacttattggatctggctctttacagactgaatctgattttcctttggtgctaaatgcactgttacatgtacttaaaattgctaaaaatcttatcattgtgtctaaattaatccgtgacaataatgtcttttgttgaatttcactctaattgttgttttgtgaagaacaaagtaacaaggaaagtggtgctttaagggactcttagagatggattgtaccaactcaacactccagcagtcaagtcgaattcccatttcatttcaagtcatcaaaccagtagccctaagttgataggagttcctgttttacaaaaagaaaaagttattcatattcccagtaatgaatcaatactttccaaaaatgatgtgtggcataggagattaggccatccttcagctagaatcttaaaacatgttttaatctcatctaatgtacttgttttaagtaatgaagctttacatttctcatgtcaatttagaaagtctcatgctcttccatttaagatgtaaaattctagagcaactagagtcctagagctaatccacacagatctttggggaccatccccaattgcttccaatataaatttcattcattttcttaatgacttcagtaggtacacatggttgtatccactgaaaataagagatgaagcccttgatgctttcattcaatttaaaggtttagctaaaaactaatttaataggaagattaaatctcttaggacagattcaggtggtgaatttcaagactttgctagcattgtcaaaactaatgccattgactttcagcaaccttgtcctcataccttagctcaaaatggaagagctgagagaaaacacaggcacatagtagacatgggcctaactctcttggcacaattctgggttgatgcatttcagatagcagtctatcttatcaatagactgtcaactcctattttgcaactcaaatctccctttgagaccttattccttaacaaaccagactattccttgtttaaagtttttggtttagcttgcttcccttgtattagaccctaccaaagacacaaatttcagtttcattcactcaagtgtgaaaattgtgggtacaacacaactcataaaggatataagtgtcttagttccacagggagaatatacatttcaagaaatgtaacattcaatgaaactgagtttccttttaaacatgggtttctaaaaaactatgccccagaaaaacaagtaataatacataatgcagcttggcctaacttgccttttgtgcctttcactcgattcactcagaacaacaactctaattctattggtacagttcccccatttgattttcctacagccacggaagcatcatcttccatcaaacacaaagatctcctcactggtgaacaagaggtgagtgaccatgatcaccctttaacagaacaaatgcatgacactagtgttgggttttgtgccctaaataaaaccctttacaatctgattagttat

SEQ ID NO: 37668 - DNA, 4677 bp, Cannabis sativa
  modified_base (2984)..(2997): a, c, t, g, unknown or other
  modified_base (3230)..(3235): a, c, t, g, unknown or other
gacaaacaagtggatgcagaaagaagagtaacctgaaaaaactgtcatttcttcatccacatcacgttctgtctcagaagaatcagactctgattctgaagaacctgtttcagacgaacccgattcatcttccgtaaaaccagaaatgttcccttcagtcaaggaattgcgatgtaaggaagctccaatctgggaatctgacatctccacgtcactttgtgatattgctttattttccaaggattcactagagtctgctggatagtacacacatctactcctctttgctctgaaaacaactcccaaatgctcccttcctgaaatagaagtagaaacattagcactgtcaggttgcattgaatcggggacttctaattttgcactattcagcaaaacttggacaagaggtcgtcgcttgtcacgtctcttgaccaaacattcatcactcaactcctcatgtgaccttttccttgtgtctaaagaatgtttaccattcaagtgatttgcatccattttatgactgccactaggaagagcttgagcactatggtcaacaatgggtttccgggaaccatttaaagcagtagaaggtgaaagtttagtctttatagggacagtcctgagcccaaagtcctgcaagcccctcatccgaggtgtaacatcagaatgatcctcttccccactgaggtgatgatttccctctttggatttttgagaagacaaaagaccacctatagtctcattcttatgggacacatctactctcttagataactgatttgatttgggatttccaagttttacactatcaattccaagactttctgaagatgtaactaacccctttttgactgcaccagatggcttattgatcgtgcgatcagaagctatacctaactttcctggcttcttcgactgctgcttttcaagttcaagtgcatgaagaatagcatcttcccgacgcgcatacttctctcttttctttataggcatgccctgtgaggactctgccctttcaatacaatcatcaaactcgccacacctaaatgccttcacacgtttcgatttctctaaattgtaccaatccctgaaaagtatacacaacatagaatatcttacaaaaaaagaatcccataaaaaccaaaaaaaaaaacatttgagtcaagaaagagccataaatttatatctgccgactacatgtattacacatttcaaaatcccattatcagttattcttttgtaacgaggatatatacaaaaacccaatagccttcattatttgtttctaatctagattgtttctaaaatcatatcaatcactaactacccaagagggatagctcaaggtctgtggattgagtccatcctcggtacctacataacaattgctatgattttctagtcctagtttcaaaggaaagttgttctcatcttatgaagaaacttcatacgagatttgccgcaaaaaaacttctaatgaaaggacttgctatttgtttcaaatctagattatttctaaaatcatatatcaatcactaactacccaagaggggtagctcaacaaagtctgaggtttgagttcgttctaagtacctacataacaattgctatagattcttgttccccaagtattctaggattggcggggatcctagtttcaaagcaaagttacgaggctcatcacgaaaaaacttctaataaaatgaaaggacttgcaatttgtttctaatctattttgtttctaaaatcatataatcaatcaagaactactcccactatagttcttccaccaatttggattctaatattgtcaatgttttccaacaaagaaaatcaattctctacaactaaactcattataacccaataatttgtgttctaatattttctaaccaaacaaaacactcattacaaaatcatcaaatttgttaggtatcaaaaaaccaaaatcttaacaaagagagaatagaaacatacacactggcatcttccctgccaagaagcttaaccggagtccctgaacgaggcgatgtaagatgcgaagccgaaagctcatcaggcccaactatcttcccaggccaccacgaaccattcctcctccgcacccaaacgatcgatccaacactgaactcaacagtacccgaatccgtactccccataacaacaaaaacaaccaatctctctctctctctcactctctctatctctctaaaacctaaacgaaaaccaccaccggaaaaggcaacgacggcgactcaacctccggcgaagaacaagaaggaacggaggatccgaaaggggccgagtatggaggatccgattatacgaattcggattagggttagggtttccattcagaaaacttagaattgattttccattggagtctctctcttctcttcttcttcttatttttttttaattaattaattaatttttatttttatttattattattatttatgtacctgataaaactgttttttttctcccttcttctttgtttctctctcttaataataataataaaaaaaaatatgtaagcccagaaaaaagcttcacttcatatctttgagtttggtttgaatagggtgacgtggcgtgatattactagtgctgagctggaacaacgagtttgagtgagtttcaatctacacaacacattcttctccacgtgctatcttaatgggccctctgatattatggggcccaaaaagaatttccttttttaaataaattaaattttatgaaaaaaaatggaataattacaagcaaatgtaaaataattatatttttagaaaatatttttttacatttttacggttttttaaaaaataatacgaaaacaacataaaattaacaaaaaaattacataaaagtaacatcaaaataacaacaaaaaaataacatacaaataacaaaaaattaacaacaaattaacaaaattacaacataaaaagaccatattttctgtaaataaaatnnnnnnnnnnnnnnaaatatttaaaattccgtaaaatcgtatttttgtaatttttgtgttgtttttatgttttcataaaataattccaaaaaaattccttatttctaagcccaaaactgttcggcccagttaacatccttttccttttccattttcgtatattgaaattaaacaggcgggaagaagaagaactttgtttcattttcttttctgcttcatacacacagctctctctctctctctctcnnnnnntctctctctctctctctctccgactgtaagtctctccttgaattctctatctgtattttaatggcgttgatttctgattcagattcattgttgtttacgctgtttcaaggcatgaaactatggtgtttgtatttttaagttgtattgttcgtctttttttcctttttaaatgatcttattttcttaccaagtcataaattaaggccgagactgaaattcgctttcgtatgatcaagtaatttagttgaatattattacagatttttttatttttcttatctttccaaatcgaggcatatctaattatttgaagtaatgaattagggaattaagctctaaataagtaaatatttaatgtttgattaatttaacaagtgttaatttgcacttgttatttttaagcttttgtgtaatttaatttctgaattcgctatgcttttgttttcaattgcaggtggattttgatgtgattgtagtattaaaactgggtttgaatttggtaaacgatgggtgtggagaattaccatgtaattgaacttgtaggtgaaggatcatttgggaaggtatataaaggaagaagaaaattcactggccaggtataaacattatcttggtttccaagtcttggatttttttaatgtctctttgtttgtattttgctttgaaaaggtttatcttggtttttcagactgttgccatgaaatttattatgaaacatgggaaaagtgataaggatgttcataatctcagacaggaaatagaggtaatagactcactttaatttggtattgttgttgttacataggaattttcttgatggtttttgagtatttggtgtttgcattttttttcgaatgtcagattctacgaaagctgaagcatgaaaatatcattgaaatgcttgattcctttgaaagccctcaagagttttgtgttgtcaccgaatttgcacaggtaataatttcgtattctattagaccagacacttgtaggctgcaaacacagtggataagtatctgaatgataactttttctattacttacttaacagggtgaattatttgagattcttgaagatgacaagtgccttcccgaagagcaagttcaggcgattgcaaagcagttggtatttcatcactagaaatgttgattcatcttaattttattcaaagattttgttattaaaggcattgggtttattttttgttcaaaatgttcaagtaaagcttttctctgagagaaaacaaaactgttgaaatttgcaggtgagagcgttgcattacttacattccaaccgcataatccatcgtgacatgaagcctcaaaatattttaatcggaaaagggtctattgttaaggttcatcattcagaaataatctacattattgttttagtgacatttttttaatgaccaagacaagacaatattaccttgttcctg

SEQ ID NO: 37669 - DNA, 1660 bp, Cannabis sativa
gaggagatcgacattctcctccacagggttacgagagtaagcggacacactggaaccagaatcttctataacaaaagagccaactagcgggtttttcataattccggaccggctcagagaagtagaagaattctcagaaggctcatccgacaccactttagactcattctcatgctttttagtgtcccaagggaaatcacgaatgacacctggaaagttacggtgaattttatgcggccttgaacaaagagaggcagaggcttcgaactttcttttcttaaagggcgtagtcctctcatttacgtccgatgaagacgggacgccaatatctcctccaatcttgcgaatctcatacaagtctaacttcccaaagtgtttaagatcatgcaataaattttcttgggcttggaaaaattgagatagagccttgtcttcatcagaaagaatttttgctacacaagcatcctcaggagcggtagaaggaagcaaggtgaacggttgcccaggttgcccaacattctgccgttcaacttgaacaggcccacgaggagatgggttgtcactaacaaggttcgtgctcccccacttacccacgtgagctgaaggatttttacaaattaaagactgaggcccatcagatatattattcacaacaaattgatttggcccaccttttgcattactagaacaaaccagcccattcatagtcaaagccggcccaccagaccccggcccactacccagctccccgccttgagaacagttcaatgccacttcagcattttctttttcagaaagcccatcttttaaaaccattgacccatcctttgacccaccagtactcggcccagaaaccaacatatttaccccaacgacaccaagatttaaatcctttgacctgtccctttcttcaaccaccaaacaaggaaaatgaacaggtgccttttccaatctctgaaactcagtgtcacctccgttacccgaattagaagcttctctcacattgccagccggatgcttcttgggatgccactccatgcgcaggggtttttcgaggttgacagcaccacgagaagtcaccatcaacggacgccttggccgacgactggaaacccgattacccttcagatcttgaactccctcagccgcggtcgccggaagcagaggaaggctcacctcactcttccccagggtctccgataacaaaccacaagagccaaacgaattcggccctgagaagacatcaaggtacgatgaggataaagacagccacggaccatacatcggagactgagtaccttcgttattgaccaccataaccggagaagacaggttacatcccctccgttggtgacccaaacaaccacagaagtaacaaaagatgcctattttttcaaacttaacttgaacccatttctttacccctgaagccaaatcaaagaaacaccctgcaaacagaggtttcttgaagtcaatatccacttgcactttcaaaaaatttccccacagagctggtttatcctcctctagatcgacattcaccacctttccgactaaacctcccaacaggttgccattagtgactgaaaagtattcgtgggggaggttgtgctgttggatccaaacacgcaaaaacttgaacaccaccggcccatcagat

SEQ ID NO: 37670 - DNA, 2469 bp, Cannabis sativa
  modified_base (2430)..(2443): a, c, t, g, unknown or other
agttcctggtaaaataacttccaacagatctctatatattaaaatgattagattacaataactaaattactttttgaaattgtaaaacaaaaatatgttaaaattctttatcaatcataaaatatacaatatcaaaatttattttaacatataaatatattacatattattataagtgtataaacgtaaatctaaaaaatatatttgatgaagcaaaaagaagaataacctttttttttttttgaaatgaaatagctatttcattaaaatttagcattcagagtacaaaaggccttgtaaattaggaaaaatattttatacatgaatgctataaccagataagaatcgagaatgcctaacaacataacgggcaactcgattagttgatcgtttaataaaatgcaaagaaacatttgggagaatagaaagtagaagtttacaatcattaacaaccaacccaaaaacagaggacatacgatgagaggtacgaatgacctgaactgcaatgagcatgctgtcggtttcaatctccactttatcccaactcttatttttgagccaactaagagcctccttaacccctataacctaaatagcggaagagtacctaattttttggtaatgatctttcaagaatacaagacttaggatttctctaattttctctcttgatgggaaaatataagaatagagtagctcttttcttggggactactaccaatatatatatatttaagcgtttatatattacaatccataacctggggctcgaacccatgaccaccaacacacacccaccttcctatggccacttgacctagcctcaagtgatgaccaccactaccaatatatagcctaataggctataatttctagtatttttaattcaacccctcaataagttagaaaatatcactttaaggtatctacgctttagcccatgatactttatatacctgatgactcaagaatactaaaatgattacttgatcaaaaattagatagcagtacacacttatatatatgagcctatattaattattttaatccaataatcttacacttgtgctacatatattttcttatagtgtgtaacactataagcttttaaatgttactatcataattatagatatttcaaaacaatctcgtctattgattataccaacataggattaaagcggcttttgccacatttagcgtggcttaacccttcaatggtcacatacatcaatataactaaatgacataaatcaatcatggatgcgtaacatgaaaattacatgcacatgtgatcttagcatacctatctccaattagttctccttaattgggaacaattctttattctttttaagcttatacttaaaccctaatagaaagaaaatattcaaagtattgaaaaaataagttcatactttatctgcagaattaaaccataaatttatgttagctcactaaactaacacaatcttaaataacaccacatccatatctgattcgtatttgaaaatgtgaagtttgtccctatgtgttctatagataccttattactttgaacctcattttaataacaattagcgcaaagtagtgtatctttcatgccaaaagtgttgaaaactttattgaattcaagaatattccatgaataatatcatatcttgaattcttaatacaaaatgagtatatcattaatgacaaacattgtttcaccaatagataagactaggatcatatatgcttatacccactgaacatgtgaaatatacacaatcatcaaaaaaatttatctcaaatcaaatggaaatacttaataaaaattgtgctatcactaacgagaaccttatttgagtctatacatgaattgtcctaattaacacactatattctttgaatctttggacacaaagttttcttggttgcaccacagaacatttttcattaatatcaccattgagaaatgaccctttaataatccatttgatataactcaagactataatgagctgtcagtatcgtgcttgtcctgaaatagtctttcaattaaataaaaagataatatatttaaaataaatgttttctttatgagtatattctttagttacaagacacaatgtgcatctctccacattacaacttgcatccctcttgattatagatatttacttatattcaattggttttggaccatctagcaataagattaaaacacaaactttattgtctctcatcaatttatacttcttatctatgtcatcaatcgagtattgagagttaaaacctttatgacattataaaagtagattggatcatcttctatcattctattatttctctcatggatttttttagtggcactagtctttgaggttgttgagtttgattatctgaaacatttatcttataaaatattttatgttgcatggttcnnnnnnnnnnnnnnatgattatatttaatgtataaattct

SEQ ID NO: 37671 - DNA, 5258 bp, Cannabis sativa
taatgaaaacaataacaaagtaaataaaatgaaagaaacacaagaaatacgaggttcgaacaaatgtagtgtctgtcacctgtctactcctcggccagaatagcctcaagggcacccattcgcaccgggtaccccttggggcccaaacccaaatgtcaaagttgcactctttatacccttgtaaataagggttcatatcccatatgagactctttccacttcacacacactatgacacttacatatttttcttaaaatattcataaactttccaacaggaactttatatgagctgatcaatagagttacaacaatattgtacaaattgttacacacaaactcgagaagttgcatcgaatgcaagttctccctatttgcaatcttcgtaaactctctttcgcaaccacattctcaatctctctcggatactaattgtcataacagacagttagttatgtctgttgacccctaaccgtatacttagttcgcttttaaagcgaactaaataattgacattcagatacaatactaattttaaggagatactacatcattgttaacatttcgatgtcttatttcataatcattactatgaatgtcataaggcgatgcaaagtggtctaagttttcgggatttatttcataagtcggcctctctccctctccttcttcttcaaatctctgatacgggtgattcttaatgcgagatcctgtagagcttccttctgtgctagttgtggcaaagtcatcaccagttcgaattgactcggtcatcaaagattctgatgatgaagttgctgcatcactaacaaggagtggagttgtagattgtgaatgcttggctttaactcttctctgccaccccattagtgattttctcacactatcggttattacagtctttttgaaccgcgaacccatctgagttatgataacatagagcgggaatgtcacgaagctgcaccagaactgcgatatcaccctgcgaaaatgcaatgaaaactattgtaagaagaaacttaaacagcaatggagaacaagaaaatgagaaatgtatgtttgtttttatacccgaatgacaagcgaaccacaataaattttcggttgtccatgaaacaagaaggctctctaatttcccactaaaagaaaaaaaccaaaccaaaagaaaaagggtattgtaaatgatgttgttaattactaatagaagaaaattatagcaaaacttttcgggttttgtttttcttacaagggaccaaatgaaagtagccatttcaaatgcattctgcataaggacatgaagaagattagttgcgaaatagtgtttcgaaaatactaaagtgaatgatagtgagttacttctactaacctgaaatgatattagttgtatacagtgcaaaagaagcttaggccttttaaaccaaaataactcatcccttagcttaaactggtgattttccatgtatggacaccgatccatgatttcgacagctaactttaccaccactcggtgaagtttagtaccgatgagcaagatcaactacaagattacatttcgggaaaaacaagaaaagaaaaagaaagaaacattttgcagggttaagtatacatataaatgtaagataagtgaaagtttctacttttgctcggtttggctaagcctcaacttttacttaaaagaaaaatggaaagagagatggaaggaaatgacttacaattgcaggaaagaaagaaagccaaaaataaatattgcttcctgaatcaagtaacacagtttatgctattataactcaaaaaactaaatgtaacaaattataaagatgggaaataagttactagttaccatgaaaatctagaaagatgcagaaaatggtgtagatccatagaggaatactgcaaaagagggaattcaattatatctttggctgaaaaaacaaagaaagggaagggaaatgaaattacctgatgccaacaatgtcgcgaaattcttcctccatgctcctaagcatataattatgaaaatcgtatgataaaggaagttgatggttctgcaatgaggattaagaataatcaagcaatcaacactagcaatggaaaaaagataagttatgaagttccagcaatgaaacatacagtgatgaagcctaatcgcaaagccatgtaatcagatcggttaatagagctccagaactggcgactgaaacaaagctgcaacattgaataaacacaacagctcttgagcctgttcttcactaatatgcttgtctttttcgtgtttgggatagcttgaatatctaattaaaaatgtacaaattcttaagtaaaatcagagaaagagtggacatgagaataccagccaaaccagaatcttgtgttggctccatggatgagatgtatgatgatcaatgaaagtagacattcttttcatttttgcaccttttggccgagcttctggagcatctgagttcagtaatcgatcaatcaatcttacactgaagaccctataacaagctttattacggtggaagttgatcctcctaaagattaactaaacaaactaacttattctttactcggaaagttagttgaacagttagacggttatgttctgtaaaggtacgtgcttctcctgtgaaagagtctgaaggcttcatcgccttcttcccactcgagctcacagacctctctgagtcaattccaaatgattgaagctagagtaagggatagtccacctcatcgccccgaagagcaaggggctttcctatatgtcaggcggggaatcctcattgtgtactacctagccgatcaacagagtatatctagtgtctcttaatgcaactaggaagggtttcgtttataacttgagaacacaagagctagtgtgagttctttgagattaagcactttggtgtactcgggtaaatgggagtgagctgagattgttctttcatagaagattgtacaagttcagattattcatagtggatttgttcattactttcatgttttacttttgttatagcttattggtcactaaccattgttgttaaatgaatcttggtgttcttaaattcaagaattacaattgacaaaaacaaaactcggctttaactagagaaaagtgtgtacctactatggtgtgagtagctagagatttggcttcattttcccacactctccagctataaatctgcattataaacttaattctcaattaaaaacacacaatgcaagcattattacatggtatgaacttgaagaagacgcgaatatcttaatctcaaccttaagcatggctaaagcaatggccgcaaagctatataaaacatgtgtaatgccaagaacaaacatcgaacgatgaagctgttcgagactttcgtatgaagcaaacgattcatgaccctagtaacaaccaacaaaaaacaacaaaccagttattgacaagtttaagatttcttaatttctaataaatgattttcatgattatataaaggattaatattattttgcaaaagttattaattggatcctctattttgttaaatgacataatgaaccttgtatttttcataatagtacaaagaggcctgctttcattaggactttgccccgggcggggaagaactaaaaaaagaaagatctaagtcgaagtaagtcaaattcactaatcttggggcgtagttcagactgatttcttcctgctttagtctaagctcaattttcaacaattttcttttaatataactaatttaaaggcaattcctagcatgaaaaagtaaaaaatccaatcttttgcaaaatacatttcaaaatagtatttactcttgtataaactaacaaagcaaaacataataactcaaaattgaaaagatttacctcagaacaaaaatgatgagttgaaaaatgcttcttgtaaacagacttattattcacaaaatcagaacttgaagagagatcatcagcaccatctttaactacataaatttcttccaatccacaaggatagaatctgctgctcaaaactgatgttttcacacaaatctttgccacaataacaatccaatgacccattaacagtgataaaagcccaaatagcattaactctgcttgaaaatcaacaccaaattattattattattagcaaatattcaaagtaagaaaaaatgctaaaaggtgtgtcatactgctatttgttgtaattaacttttaggaaatattgctaaacaataaacataacccattttaagagataattctaaccttctttgatcttttccaatgctgcaaaaagggattttctcttggtcctatcaagccactgtttccagaaaaaaacatcatcaaaaaatcagattgctttcttaaagaaaagaaaaagaaagagaaagagattgttgttattacatttccaaaccggtttaaagaaatttggaagaagaacccaaaagagactaaaacagcaactacagaagcaaaagcccatgatggggtttcagccaaagacctttctgccaaaagagaatgttcattctccattttcaagctcagatcagacaagaaatttcctgagctaattctggttctgggattttcaaatttcagaaaacccacatgagaaaaaacaacatacaatcaaaaagtttagaaatttattaatttggaacaatgcagagcttgttgggggaccagattgaagaagaataaaaatgggttttttattttggtgtgcttagaattgaatggaattgaatacttatttaccattatgattcttcaccatcagaagaaaagaagaacattaatggaacatgcatggtgatgggatgtcaagaacaaggagttatgagctacaaaatgggtcccttaattgaattgatttgatttcattgcatggtttggttggaacttgtaaaactatatatattatatatgaataaacgtgcttgtctcaaatatatgaaatgaaatggtcaaaatcaaaacttttttatttttaagatgaataatctaaataccgaacttgcccttcatcaattgacacaatgtaagtgtattgtcacacttaatatgggctttttaggaagtttattgtgaaaatattcttcatgaaaaaaagagacaacatgacaaacaaacaatgacacgagtactatataaatgaatggatttcatttgattaaataatatgagtgtgataggttttaattattcttaaatatattattactatgatttcagaaaatataatattattggctaat

SEQ ID NO: 37672 - DNA, 4306 bp, Cannabis sativa
  modified_base (3495)..(3505): a, c, t, g, unknown or other
agcagaacagaagagatggtgagaagaactagggagttgattatgtaaggagtgaacttatgtgagtttagaaagaatgagaagaaagcattgaaggccaattgggatgctaatatgattgagtaagttgacactggaaggtacatcagaccaaccgagtatagataacaaattgctgctatgattaggccgaaaaccaagtaaaatgaggcaacaattagcatagatggcttttttgattgaatgggaggagtattagtattagtagtagtgttttgattgttttcggttttaatcttcttttttcggaagagatagtaaggaagaagaattggaaagcctactagctgaacaagtgatcccatccatttactctttccacctttctcataatacagtctccccaataaagttgctgttgcctggccagagagaagaaggaatgaataaatcccaattcgaatccaaagtccaagttttctggtttgaggactagttgattggttggattcatttgcatagctatgagaatctccttcattagcttcctcagctggttaagatgacaagatacacaacatcatatatatcagtaagtacttctttagtaagaatgttttactgttttcctatcaatcaatacatgacttcatttatgaacttttgagtgtgtttagattagttcaaaatctctagtaatcattgtatactgtcattttgcatgatgatatcacttagttaagttgtattacacacacacacacacatatgtatataagccaaacaaacaagacttacccctaatgctgagttgaacttgagtttcttgaacttcttccatgtcaatagatgaacaaacttcacaaataatggttggagaagagagatagagccatattctcaactgtattaggtagtactttatatatatggatgggattgagtgagaatgagagagttatttcttaattgtattaggtaattctgttgatattgatggccttaaatattgtgaaaatatgtgatgtggaaataatgtccatatagaatcatgcaaggtttagccaaaaataatgatcacccattttgttttctagctatttaatatgattgagtagccattttaaatgatagctggagaaatcattaatatatatatttatgtattagttttcaagcattacttaacttttgtctaattctcactaagttgaatttgggttggaccccatgctacttactattagaggaataatgagattgagttccttcacaagtaaaaattatgttgacatattggaaagaaaaaaaaaaaggatgaagcattagtactattgtactttactcatcacgaattagttttgagataaaacttcatacttcttactatacacatcaccatattttcactcaaacaattaagttctttatatttaaattttgaattttgtcatatggccctcttaaaagccgatcgagacaaccatgttcgcgggatttatcatccttatctgtgacctacatcccattcaaatgtcattcttctatccctacctaatatgggtgagggagactgtagaaagagagaatccatttgaagtgaagagttggacaacatgacaaaagccaaaactacaagataattagttgaaataaagacaacataatatatattatattaaggttgtaacaaaaaataaaatttgaaataagaaacatgtgattttcattcacacactcctttgaatgagatttcgtataaaatatttatctttcacactaaaataattttatttaagtagaagctaattgtcttattaaagatatacaaaatgttaaaaacaaaatgactaatataagaccaagctattttaaaattttaaattgaaaaacaatttgagaccacccaagtaatttgggaaaattatataaacttcaataggcttactaaaatagatgttagaatgattatatgtagatgtaatctaagaaaagaagctaaactaaacctttctctatgtttggtagtgaaccattattttggcggccatttcttattgtcaaaattgagctgaggaaaacacagccataactgggacaatagttgaacctagaacacttatatgacattagactattagagaagagggaagagacttctagtattaaactcactactccaatgaagaaaacttgccatgtttaaactcattgccatgtcatgacatgaaactttcccaagttcaaactcattcatctcttccctcaaagtcgacaactcattgcttgtaaaatttcccacaagaattgcaatggttgccacaagtgattgaaacactataacatccctgatcactgagaaactctccttcttaagaaacttttctcatgaaaaacaaacaataccctgcagaggcacccacagtgcaaacaagcccaattgcatactttagaagactcttgagaaccgggttctaatatgagcagaacagaagagatggtaaggagtgaacttctgtgagttgagaaagaaggagaaaggccaattgggatgtacctatgataacaatctgctgctgtgatttggccaagaaccaagtaaatttaggtgataagtaaggtagatggtttttctgattggacataatgagtgatgggtagtactattagtagtgttgttattggttttgtattgttattagtagtgttttgattggaaagctagctagctgaactagtgtagtcttccatttgcttttttccacctctttcatagtaataaaatttctactgcctagccacagagaccaaggaatgaataaatcccaattcgaatccaaactgtaagttttctggtttgagtaccagttgagtggttggattcatttgcaaagccatgagaatctccttcattagcttcctcagctggtgaagatacatatactttactttagtaagtacttctttagtaattaatatatgaacaattagcatttttgcctcttaaactttttacattattaagttgtgccgctatacggctcggtaataatatccctcgaaatataatttttacagtaatgtagtccttcactccttctatcatattccattcaattatattgtgaaacaagtgatgtggtaaatgatagttaataaatggatactaattaaatatatttcactcgttctactttaatgattcaaaaactaaaaataacaatataaactgttataaaaagaaaaagtcttttattctattattcattaacgtaaaaaagtgagaatggtatttaatttagataaatttatcaactaccatccaccacttcactcattttacaataaaattgaataaaatgtaatggtagaactgcattactttaaaggttatattttgaagggtattattaacaagctgtgtactataagaggtacatcttggtagtgtaaaaagttaggaaacaaaaatgctaattaatatatatatatatnnnnnnnnnnntatatatatatacacacacatatttatgaaatcaattcaattgagtttgtagtacaaaaccaaacaggtcacttacccctgatgctgagtttcacttgttgagcttctcccatgtcaaaagatgaacaaacttttacaaacaatggttggattggaacatggagagaaagaagccttaattgtattcaggtactaggcactgttatagatgtagactgcattaaatattgcattacaaataagaaatatcttatgggatcatgctagagctggcaaaaaacaattataaccacattttgttgtcttggtatttaataacgattgactattcaatgattgatgatggtagttgaagatttgcattaacatattaatttattctctaaaacatatgaaaagtcattcataaaaattaataaaaaagtaatccacttagattatattttttttttcatatacgtaagttattatatcatatatctttctaataatgcatcatttgcaagtcaaacattctcttttagcttaatagtgttttgtacataaatgatatgcactatgaattttgattggaccaacctgcaaagttcattacattagttgatatgttgaggagaatagaggtgattatatgagcataaatgaaacattaaggcctcgtttagtaagggtcgtattgtattaaataataaataatattatgtttggataaaacaatgtattgtattaattattacgaccaaaatttttaatacaatgtatgttgtattatttaatatatagtccgtattagcttgtatt

SEQ ID NO: 37673 - DNA, 2656 bp, Cannabis sativa
  modified_base (2609)..(2630): a, c, t, g, unknown or other
atattataaacatcttaattaaagtttcgatcgataattaattagtattgatgctataataattattagcttcacaacaaattagtaattagacatggatattctttactcctagctagatcttgccaaaattatatttgtacttcgttgccctatttttctggttacggtgggtgttttcttaagttggcgacgatcaaaagtatgattaatttagatactgaattttcttggacgagtaatttggcagcaagctagcctggttaaaataatttaatttctttgtgtttaaatatttaatattacatatgcaaatatcattttcattcaatgtttaatatctcttcaagctaaacttaaacttatgtacgtatatatatactgacatttgagtatttttgtatatatgtagagtaatttgtggtataaatatttaagtttaacttttaattataaataaatacttaaatttaattttttgtggcaataattatacctaagttatatttttagaactttgtaagcacttgaccgttaaatgtcaagttattattcacatatcattttcttattggcatatttaaattaatttttttttaaaaaaaataaaaatcatgttctggaccaatcagagattgtaacgttgcaatttacttaacataaacaaccaaatacccaggagcggacccacataaaggcgaggtgggacagtcgtctctgaaaaaaaaataaggaaaaaatatatatgcattattttagttagttataacatctatttttaaataaaagtgatatttatataatataagttttggtatagtagtaaagatattttcgccactgtaggtacttataaaatttcagaaatataaatttaagtattattatcgtacaaaatttaacttagatatttatttacaacagaacaaattaaagttaaacttaagtatttataccctaaattacttttatatatatacatgtgaaattgatgaaggagctactaccgttgtgcgcatcatacatgtagtgtaaagaaacagatccaacggttgtcaaaagagaaaggtgtggtggtgacaacatatgagggcatccataatcatccctctcacaatttaatgcaagctttagccccaattctcaaccagctccaattcctttccactactatataaatatatacatatataagcaataaatatagttttaataaagtaaagtacgtacttgaaaacaaagtgcatgcacacatgatattcgattacatgtgtatattaattaattcttatataaaagaaacataaaagacatacatatatagccttgattggcagcttaataaggatatgtattatacaactatatatactcttcaatatcttctaatttttgatgcatttctaatttagaagatggtgatgtgtgagggtctttgaggatcttgtggctataaatttattgatgaagatactcttccttcatgttattatccatatgaaacttgagggttggatttagggacaaggtgactatgatgtgaaaatgtatatatagttcgggaagtaacatgtttttataatcaatgttatgtatttgggaagtacaatattgatgtgtatggtaagaattaataatggggtttcattttgaaaaatttatagtaatgagtatagcaacacatgtttttataaagagtattgttatttaatattttaaggtttgaatagaggtgcttatataggtgcttgttagttagggaccaaatgaaatcataaaataatagataagaaagaatgctcgaatatttatgtgtgtatatatatttttgaattgattaatttaagtaaaaagtaatttgtgggtctagcaagcatcaaagtagagtgtttttattggaatcgtcttaattaagtgatctacatcataactattatattgatgtgacacgttataattaattaataatttttgataatatttattaaattaaattaaataggaactaatattaaaatgtaacaataatatatcacctctagtaatgcttgacactgatcttaaagcatgactgatcttgagagtagacaagttaggcttgcgcctcatgccttcaaatgcttagattctaaaattatgaagaaaaaaatattaatatatagataaaatattaaaaaataaagtaataatacaaatagtgcttagttgtggtaaggatagttatttttaggtaagaggttaatggatcaatcctaacctttatttttttagttttttagaaatatataatgtgtaactatgaagaattgaatttaaaattcttagttttaaatttttttaccattacaccaaagtattagaagtattgttttgataataatgaaatagtaatgatatgtgcacatataatttacacacttatgtgggaagtcacttttaaggtgggaccattttaaataaaaataattagttaaaattacttgtcacataagtgtgtataaagtttgtatgtgaattgtatgtgcagatatcattactcttaattaaagaccttaaattttaattttatcttaaaaatcatatactttagtaggggtgttcatccgatnnnnnnnnnnnnnnnnnnnnnnaacaacatccaatccgcactaagtgc

SEQ ID NO: 37674 - DNA, 3160 bp, Cannabis sativa
  modified_base (27)..(40): a, c, t, g, unknown or other
aggatgttaatgaaacatacatggtannnnnnnnnnnnnntggtaaaatatatccaacaggattacagaaatgtgtttgcttcggatgatgaagaatgggtctttcctatgaaagaaggtcatctcccttgtgctttgtctgggtatttataggccaacatcgttggggtgaaatccgaccgttggatcggtaggtggcatttttcccatatggtatttaaaggtgtcagatcgtacgagcagacctcggacacatgtcgcttcagggcttctctatttgactttcctcgtccctagtcattggatcctttggtcaggtacagaaggacacacatgctctgtacaatagcatgtcgtgggagacaacctctaacattgagctcgagatagcctggccaccaggtccatagtctgacacgtttaggtgaggctttgcgggctgaaggcatggccctgtttagtgtttctcagaatgctatggcccttcaaagaagatccatactctttttcagagtagatggctttagttcctagaacggggggagacttcgactcacgtataccctccgtgtagttagcagtcggggaactcctctttacagaggctcttcccccaaagttggtgccttttacttcccgaagcaccaattgaggaagtgggccagctgatgacttcttaactttccttgattaaaaatccacgtgtcatgatgacaaaaatgcggataacacgtggcatcccacttgctaaattaaacacttaacagtactagtagtgacgaaagtaatagaatgtaacataagatatttaatttgtcaaaaaaaaaaaaaacaaatgatatttaagtctataaattaaaaatatatggtatttatgccacaaaattttcaattatttaattatatatattttttttttgacatagtaatgaagatcactattagaatatacgaagctgacatccgccatcgaacaaggataaatctttatctaattgaagggtatgttttgccaaaccataagctggagaaataaaatttaatttaggagaattttattaaaagtaaaatttaaactaattttattgagtaatattatggtatgtttagaagtaagtgtgtaattattaggctttgcacaaagtgtatttatatataaattagtaattacatatgaatttttattattaaagttattcttgattttaaatgtgacatgtgtcaccatctaagaagagttaaaagcgtagatttcttgcttagaactttcctagcgagtccatgtctgaataacaaaatatgtgttatagatggatcgaagggttccacacggttataaaatgcttcaggaaactgcataaaccttaccatgtaaggccacactaatcattcccaaaagattggattcttggaaggagcctttactgaaagggattccatctaacatattttagaaaggtttagatgacccgcatatgtacagaggaaaactctattgtagcttgttccttttgtcctacaggaataataaatttcccaaaagtagtataaacttagaaattcatacacgcactactctaagacaagacaaatgcacagtctttagactcacaggtgatacaactagaacttgctgtatcactattacaagataagatagggcaacaaagattactctccaagttgggtcaccgaccttcggttagggaaaatagtcaaattttatagatgtaatttcttcaattagtgaggttaattggggattaaccctgtcattgaggctgattagtgtagcccatcaacttggtagcctataaataagactacccaccaatgtaaaataatccaagattttggatctcaagctgtccaaatcctatcataatgtaagtgactgatcatggagtaaggtcttttgaaggcctaaattgtgattttttttgtgtattttctttcatcactgcattctctcttcattttatactatagtctaagttgcctgaaaatttggtaaaacttttaatgcttacattgaatgcttgaagtgaaagctactatcatctatttcaaccaaacatggtaggcacatacaaccctgcacgatcctttggcccataaaacctacctattgattgagatttttggcaaccactaagtaaatgtcgataaggacgattaaggaaaataaagataggatttttatgtggtttcaatgttaataaactgtagtccacaagtcactttacttaatgattgcaatgttatcttgatcagagaatattcaagttacaatattagaactcacttcttgtgtgtgagtccaaaagtcccttttcctcttgtgtttctaggtatttataggaaaaaaagggcaataggaggtaaaaagatgtgtgaactattagtctctaggtgctacctatcctctgtggtaagagtttagtgagacaaaatttatcacatatgatgctgatgtgatagtgcatagccgtcactttttctctgcctaggtgaattgatcatcaaaatcagtatcgctttgtgatgatactcatcctgcgtcgttgtggtcatgtacaataatctgctttagaatttgtgttaggctcatgatgatctcccgaaagacctgtaattcaagggcttggcacaacccaaaaagctgaaagctttctctattattttccttggcaacagtaggtccacttctgaatgtcccctcacttgtagagtttggaagtggagtaaatcgataagggatgttgatctgtctatgaatgggtccctctctgccacatgaggcttcatatgcatgccacatattttggtaaaaaattggtctaacatttacccacaagttcgaggtcaaagggttatgatgtgggacttatattattgactcttcaattcttcccaaagaatatgaagtataacatccttattgtgtgtcaggcccctagccgctcaaatcgatagaggagttggccagtctaatcagcatgccttttcaccttggatttaatgatgtcgattggttttcatggcattaatccttataaggccataaatccagggtttcaggtggatactcgagcacccaaatatccctttataaatgtgcttgtttacgatttcccccagatgtcagatttaaggtgtg

SEQ ID NO: 37675 - DNA, 2362 bp, Cannabis sativa
cccgccgttaacggacacaaaaccgctattgatctgaatcttgttccgattgagaaagtttccgaggaaaacgacggcggctgcggcggtaatagtaataataataataagccggtttctaagccgcttactataactgatttatctcctgcgccgatgcacggctcgcagcttcgcgtggcttatcaaggtgttcccggtgcttattctgaagccgctgctggtaaagcttatccgaactgtgaagccataccttgtgaccaattcgaggtagcttttcaagctgttgagctttggatagccgatcgagccgttcttcctattgaaaattctttaggcggttcgattcatcgaaattacgatcttctccttcgtcaccgtctacatatcgtcggagaagttcaacttccggttcaccactgtcttctcgctctacctggagttcgtaaagagtacttaacgcgcgtgatctcacatccccaagcactcgctcaatgcgaactcactctcaccaaactcggtctcaacgtagcgcgtgaagcagtcgacgatacagccggagcagcagaatacgtcgcagcacataatctaagagacacagccgcgattgcaagcgcacgcgctgccgatctatacggaatgaacatcttagcagatggaatccaagacgattcgagtaacgttactcgattcgttatgctcgctagggaaccaataattccgagaaccgatcgtcctttcaagacgagcatagtcttcgctcacgataagggaacttcagtccttttcaaggttctttcggctttcgctttcagaaacataagtctgacgaagatcgaatcgaggccgcaccgtaaccgtccgattaggttggtggatgatgctaacgtcggtaccgctaagcatttcgagtacatgttctatgtggatttcgaagcttcaatggcggacgttagggctcagaatgcattggctgaggttcaggagttcacctcatttttgagggtattgggaagttatccaatggacatgacgccttggtgcccgtcacggggagattagcaaaacccatcttttttttattttatttattttctatttttaataaaaaaggagtaaaaaaaaattgttattattattattattattattttgtacaccaaaggaaaatttaaattaaatttttctttactcattctctttcttttttttttttatttaattttgagaatttttaatttatattgtggtctatgaagaatctttctttttattttttttttctgctaattaagctgaaaaaaaaaaaaatattggaaggaaggtgtttgttgcttttgggggtaaatatgatataaaaaaatatttagttgacaatgtttataagaaatttatttgttgttgcgtgtatgaatatgaaaaacaaatattgcaatttttaaatttatttatatctttatataattggtataatgattttacttcatagacttaattaattaagcttaggctagttataaaaaaaaaggtaaaaaattgttattattattattttgtacaccaaggaaattttaaatttaatttttctttactcattctcattatttttctttttttcttttttatttaattttgcaaatttttaattcatgttgttttcctttttcttttgaggtaaaatatgatataaagaaaatatttagtataagaaatttatttgttgttgcgtgtaagaatatgaaaaacaatattgcaattctcttttgttgttgttgttaagttatttatttatcaatataattagaataatggttcatggacttaattgattaaatcttaggctaattatattatgtcttggtaatttagttgggaaattaattttgcctaaattggttttctttctttttctcaaatgtcaactatgtatgtactttgatattatttggtaatgggtttctctcatattagacattatgtctaaagattgttattattattgtttaaaataagtccaatttgaagtgatggggcacaataattctcttcaaaaaaaagaaaaaagaaagttagatggtattagttttaatcatgatgaggattagtattgatattacctctaataatatatgattatataaattattgtttatgcaatatatagaaatggtataaaaaaagctaatgttatatattgaggaagattccatttttatggttttgcaaagataagtagacttagtctagtggattgtattaggtgagttttccttatgattaaagctattaataaaaagatataaaaaaaattcatggtcaccaccactactaataacttttttttttttttttgcgttggctt

SEQ ID NO: 37676 - DNA, 3227 bp, Cannabis sativa
ttttggttttacaatcacatttgtttccttgcaatcacttcatatgaatattatgagttttgtttctattaaataaaaattgtcatcacagactaatttattgttctataaaaatttgttgcttttttttttcctctttccttcatggtatttgtaaacaaattaagcatgttgttgatcttttgttatgcaatttaaatttcctcatactgacgtaaagggggttaggcgccctttgatgcttcttcagtggataatatgagaaggcttgtggaacattctggtgctccaggtcacatatatcccttagctttactgtgccatgatatcatgccccctccactccaggtatgatgacttctgtaggctggtttctcgtcaaattctaatttttctcatctgtttcgcaactttctatttttcaggtagagaaagaaattggagaaaaaagaattatctccttccatggggttggagtgtcagtggcaccggccatcagtttttctgagattgctgtatctcatgaacgttctgaggaggttggttatactagtcttatacatcctgggattatttgtaatcctccttatacctatgcacttttttcgtgaggcaactgtggataactccttttaatcattcaaatgcgcatcataaatctggtggagtagatttcatgtcaataggattaagggtacgcctgttttggaggagtgaaaacatatgaataggaataaagatagaataaaaattaaaatgtttttttttcttttgcattttgtactagaatagtctttcttcctatttcaaaatggaatagtcattccactaaaatagtaaaaaagtgattccattggaaatttggaatgatattaccaaactttaaaatgcaaccaaacaaataaattgaatgaaaattgagtctttgccattccatttcattatctccaaccaaaggccatttattattatgatttgtttttcttttaactgagaaggtcttaatgaggatatactgaaggattcattagttgatatataagtcagtaatcctctttcttaacaatagggcgtacagtatcttgtccatagtccattgtatcctgctatcttgtttctgcatacaagtactttgctagaactgccgggttactggaactggaacttggtatctatttagtctcttcatgaactttatgccattcatcttatctttcatcattttgtctgtgctttgtagaaggctaaagagacatacaaggaggcattttatggttctatagctgagcaatacaatgtgctcaaatcagctatacatggaaaacaaggactaaaatcatcttctcccaacgtctctttgtctcaaccttggacttagtcaatgtctttctacacagtctattaaattgcttctaatgatcaggtattcccctaattcttaaaagctcaatgattctttaaaagattgtcatttgattagacatggtagcatctactattacaccaggttcatatctcacaatctattttcagtaaatgcctttgaaatgtgccctttctaatatgggtatctcataaatttctttcagacttggtgttttttgacatactcagctcctttatcaaaagccaatgggcttgtcctttacaagtatgataggagattagtagctctgttactttatactccacaggctaatctttttctccaccatcacatggatattcctgtgtagatgctaaaacaaaagctgacttgagttcttttgaaactcaggctgcgttggaagctaagccttagctttaggaatcgtttattgtacagctggagagagcaagaaatgtaaatttcttgtaatatgttactcaatttttaagtgggtatcttgcattatgttattatttcatttattgataatgtgataataaagttgggactagagatctgatcaacatagaatagaattttagtgtctttagcttggtttctactgcttcaaagtacttttattgttgaacaggaagcacttgttctgctgccacttatttattttttcaagggataataactttatattatgaatttattatgtttttattttatcaatgtgttagtctatttgagatctatagataatttctaacagttgcatgttgtctatttaattttgttgtttgtaatatgagctttgaaagttcttgtgctataactgaaattcaggataaactgttaagtctaggaagctgcattcttggaaaatataatgatctttcatagttttattagttttctaagttgtcatattaccctctggaaagccccttgaagtaattcagacttaattggaaatttaactttttaaacaaggaggcggcacaaaacatctgatatttacacatgaccaaactataaaaaggtcattataatgtgcatataatatagtttcattgtatctgattttggtgatttttgagaggagattccctaaggggaatgaatggagtaataaaatgctaccactttgtaaattgttgcaaaattatttcactcttcgatctcatttttgccctcttactaaaataaaacacatgacaactgatacctttttattaagagaaatggttaagggtactttaaggtgttacaaggtagtaaataattattattgcaatttaatattgacttaagatgagaaatgaccttaaataataaatacattgattagttaagtaaatatctttttttctttaaaaagtttagcaaaatagctaaatgtagtaaattaattaataaaaattatattataataaaattaagttatataaatttattaatattacataatattatattgttaaatatataaaatagtaattaatatattgtaattttgaaaattaatatactgtagtaataaaattatataccacaaaaaaattataataaaattaaattagtatatcaatacacataaggcatatattagattaaaaagttaatttttaatattaactaaaaattaaaaaaaaaataaagatttaatctgggtcttacatgtgtacacctagtcacaactaacagagtagtagtaacagagagagctagaatataacgtttggttttaaatccgcaaaaaaagatatagtatttaagtgtattgttgaccgagattttcggcaaccaattaaataatatataggaaaggctgtaggaagtttaatgcatg

SEQ ID NO: 37677 - DNA, 1804 bp, Cannabis sativa
aggtaattggtagctgggttaatgttcttgattcgtgtgaaagagggcattggcaacctcaactccttctatttgaagctggtactagaaattttgcagaacccgtcgcatgtgtaagtgcatctgtttgaagtccttcaagtcccgacactgatttcttaggtggtaatacttgcaactcgtttccagttttaggttgagatgtttcagtagaaaatctagagtggtgtaaagtttctgataatgggataaggccaaacaaatttgttggagcaactgatccccagggaataatcatgtctcaaagaagagccttttaagcatttgacacagttctagcagcacggcaagcagcagctattattaaaagcatgcataatatgggggtgagggttgcttgaatttgaattatcttttatttcttggacatttacaataagatgtttctttttacccttctttttatagagggcttagtagtagaaggttgtgtggctttgaagaaacatatgttagccacttgcttaatggcagcattttttgccggttactggttggtctaagcatatacatcatttagcttgtaacagcagtaggggaatatagtttttagattgacaaatatttgtttagctgttttgaattccccgcaaaattttggaagaggttttgtacagatcacagtatcatccatggattgttgagtcttcaactgtaggatatacagtgacttttttcttcaatgtttattttttttcttctccttttgatgatgccaatccccttaagctaaccaattgttatgctactgaaaatttgtttctaatgtcgtaaattctcttctcaaattgatctcattctcatgcattgctaatttatatgacatgtaattgtatgcaggtaacttacaattttcttttgtgctctattcattttatttcatccattgttttgtttcttatttaattattagaaactaatggaataagtaactgaaggatcacagttgcgcatagcctttgttttactgcttcattctatcaatgaaatttatctcgaagaaaaaaaagagaaagaaaaagaaagacagctgatgaacaaggtgtttaatattagctgccattagtgctagtgttttttttttttgggtactacctatgccacataaatgccatttgagctgttgttatttagctctttctatttattcacactgtagttttctttaacatacatgtcttgaaattttaacaattagggtgcatttgttgagtgtaattaagggtaacatagtgtttttttttttttttttttgggttaacattgcaatttaaatttaaatctactgcacaaatataagaattttctttctattatcatttttttaactaattcaaatatcttaaaaaatattttcctcttattgttttcttttaaaacaataaaatagaaaaaaaatgtatatgttacttgaagaatcactaataaaaataaaaaagtatatgatatttgtaaaaatgaaaagtatcaaaaaaaattaaaaatattgtagttaaattaaaattataattaataataaattttgaatattattatattttttttttaataaatagtatatcaattaaatattttttttaataaataatgatattattgaataaaattaaaaaaaaataataattatacaactaaaaatatacataatcaaaataaaaaataagaatataacttaaaatatgcttgtaatattaacttagtaaccatatgtatgtaatcatttggtaagaagaaataaagtatt

SEQ ID NO: 37678 - DNA, 3174 bp, Cannabis sativa
atattttttctatatatataaaatgaaacaaaatcaacatgttaaatgtagtattaattatatggtaagtctgttacaagtatctagatttacatttatttaccatgaaaattgatagatttattactctaaagaagtaagaacttaaatcgttgtaattgtagacttatcttatcgacaagattaatatatagatttactagattttattatgagaatcttattgactttttgggtaagtatattttatttttatcgttttctcatttgatttttttgattaattatcctcattactttactattaaggactttttagctagacatgtgagaacatagagaagatttttattactcctaagcattaattcgtttatttgtgatttataaagttaatattttgttgaattcatcgtattaattgtaaaatattgtaagctggattttgagaagactaatagctctatggagttagattcgtctttagtttagtcatttttatattaaattattttgtaatctttttatattgtgcattttaattattattgtttgtaaatgttgttgttaaaattttggctaaatttactctctctaacaacattgatattaatatagtttgtatatttttcttgtatcaaaaatattattatagttacagtcaatatcttttagctctcatttctgtagagttttacgcattttgatagtattatttgagtatttttttttttaaaaaaaaaaagtaaaatgttataaatattgtggaaaattaaactttttatgactagcattacaaaataatttgatgttttttttataagttattatcttatattagaattccaaaagtacggatagaatcgaacattgttttaaaaaaaatatatatcaaaataaaattataaatttataaataattataaaaatatattttgcaaaataatccaattttttcatttacaaccaaattattagtaattggttagagctacatagtatttagaaccaaatattttttttcaaacattttagttttaattttgtaatttttattttatttttcattaaaaatttattcaatgacctcttgaaataattttttttgcactttggccctccatacaagtatttttacccccgtccccctttgtcacttatttgcaatgtctcttctcttgtctgcatttgtataaactaattaaccacataattattatatttatgcatatataatatataactaattattagtgatgagaaataatttaatgagataagtttgaaaatgcatggtggagtgtaaattaagtatatttatatataatatatgtatgtataatattagaaaaaacatagataccctgtacctacttgccaatataatttatttatacaacattctttttgtttttagtataaattaatttattgttatttttctcaatcatatatatccatatgcatatgcatattctcatataaatccaaaatatttattatgtatatatataaaataaacccaccggcgatttattaaataaactcgcttctgatcaatgcaatcacctccactacattcattttcatttaatatttatatattataaaattatatttatctactaatatatttcttttgtatatatgtcttttgttcaatttaagtatgtattccatttcatttttataaattattggatgattgaaaatttacggggtgtttatataatctgtaatttataattttaaattttaagataaaattatttaagatcagattaaatgaatttaatgtgaataatttgatcaatctagaccgttttaaattttctggtcacaattttaaaaattttggtaacagtttaaatcaaaccaattcatataattattatatatactttttttttggataaaattttaatatataggagcaactttagatagaatattgatattgagtttatattgttataataataattttttattattatttatgtattataaacttattaaaagtaaaaaaaaaaaatcgaaaaaataaataattattgttaaaaaaattaatacaattatgaaatatggtttggttttaaatttttaaaaaactataatattagtttagtttaaaaaaattaaaaattccaaccaaaccaattggtaaacaccctattattccaagttccaagcctctcatcatgtgcaaggtttgaataataacgttattttatctgaaaaatagtgtgtatgtgtacattattgttattaaataaataataatataagaaacaatgggaaagagactcgtgttttgtggtatatataatatagtttaagtgcatataaaattttaattgtgagactatacttgtcaaatatattacattaaaaaatattgaaaagaagaattgcattgtaaaccaagtatatgtttaattaatgctatacgtaaatgattatataacaataatttcgacatgatatagattattgtattttttatttaaaattgctattgagccgaaatagttggggataaaatgtgtaccacctaatttttttttatttaagaaaaaagttatcaaattccttttaaagaaaaatttattaaaaaacattgaattaattttattttttattgttatgacttatgaagtgttttacatttcggccaaacaactctgtttttcactacaaaattcctctatatttatatttttataaatatttggtagcaaagcaaccagaattcattataataaaagtaaatgtattaagagtattaagaattgttttgaatataaatgttttacttattttattaatatgaaatatttcgtaagtgcacttgaaaataagattataaggctcgagattagacgaaagtagataatatcatactaatttcaatgttaaagtaaaagtagcggtctaacaaagtaaaaaaacaatgcctaacaatatatactttaaattgtactaattgatgtaatttttcttttaaaaaataaatcaaaactacctagttatactactatcacctaacttttatatacatatatgatttaaaaatatacccaccttctcaaattataatttgaaaaaaaaaaaaatgggtgtctctatccttaattcttaatgataagtaaacatatcacgaatatatttaat

SEQ ID NO: 37679 - DNA, 1787 bp, Cannabis sativa
taatcaatagtaccgtttgttataagggaaacaataacccatttcgtgagatttacttactactttattcaagtaagaattgataaaaaagaaaaaaataacactttttaataattaagtaaaattcatttcatattaaatgttatgttttttcctccaaaaaaaatatatatattatgaactaatccgtagtactttattaccattctcgccgtttacataattaataataatgacctctaaatccttattaattattaaagtacaagagaaactatatagctagacatcatttcaaagttggcatgatatatttatgaatatatatatatatatatatggacaatctgaatatattatcatagtaccattatttgtgccaattaatgctttcaaatcgatcactcacgagattgaagctcaaccatttttgtttgttacatatctagatctatctaaccgatataaatcttatgcaaattataatgtgctttgggttaattttgttttttcttttaagctgcgtgataccttgaaaattgttcagccaagtagaatttatagtttaattattcagttggaaaagaaaatgtgttagaaagacgaagctgcaggttaatcaaattggtcagagcgatattgaccatatttcattacatcaagaagctattttaagttgatcgggacagaatcttatgttagcaccgaagtagagatgaattgattaaggcagtacattattctgtccttacatttgtggtaattctttaataatggcaaaaaaaaaaaaaaaatgcccatccggcgatttattgctattagggatgcatatattttttttcatgggaatggcccgacccgtttttaatagggcggcaatttttcgtctaaatacaggatgggacggggacgagattatctttcgttttgaatgttaaacggggcacggacggggttcacattccctaccttaacgaggattcgtttagtattttattttacatttttaataatacttttataatttataatttatatttgcatttgttaagtatgttaatatctttttatgatttttaagtttgattttagataacaattagtttattcaataataattaatgtgtaatattttaatttttatgtattttaatatttttatatatttaacatttattataaactttattttttttattagaggatttctcaccccgtctccgccccgataaaaaatatgctaggatggagattaaaattcttaatgaaaatgggattggaggagtactctctactaattcttcgccccgtgtacatttttaattgctatttatgtatatatatatatatttatatatacaatgttacgtaccaaggcacgtatgcttagtttattttaagttatatatatatatttttttaaaatattatatgtaaatttatatttaatatatataaatttagattgataattgtacaaagcatgatagttattttaaaaaaaatattttaagtgaaatattttataaaattttaaaaaataaaaattaaactgaaactgttagtatagtaagcaataatagtgtaagtataaaattgtgaacaaaataatgtgaaaaatgttgatattcttttgacaagttgtttagttttatttatttttaagatatttgacaagtttgaaaaatattaacaattaaattaagtgaaaatagatataaaactaagaatttaggtggcgtttggttggagataatgaaataaaatggaatggaaaagaaacaatt

SEQ ID NO: 37680 - DNA, 2413 bp, Cannabis sativa
  modified_base (1755)..(1759): a, c, t, g, unknown or other
attattacattaagaaaaaaaaaacatattaaaactgttatatatatatacacatttttttacaagaaaataattaaataatatatatgttacaaaattacaaacaaaaagtattaattatctctacactaatttatttttctttttaagttgtggactatgccttccatgatattgaaatggctcatcatgcgatcttttagttattgttataattttaaaaaaattttaatgttctttgtttatgaaatatgggttataagtcttttgaaaattaattctcactacttagtactaacaaatttgaatggaaaattttatatttgcatggatcttcatacactacaggaaaaaaataagtttctggaggaacgacatttgtcgtttctcaatcgtttcaataagctttttggaacgcctaataatttatcctagaaagtacgtattaggaacgattttaatatcgttcctaacattaaaataaataaattagcataccttgtaaatgagcatttcgactagtaatatctcaatttcataggcttcatgcattcttttgtttttttgggccttttgtaattcttctttcaatgttcttattgcatattcttcttttcctctcatttctaactttgacatggcctcctttttcatcaaaattaaacatatatacacaaattaaactgacctcctaattatgtatctaataaaatcaaagtaacactaatctaatacgtataatttcttaaaaaaattctataatatgtatcatatataccaggcaatattctagtactacatatattttcatataaattttcctttactcaccgctagttcgcgaaaattgggcctttcttccgaaatcttaagtttaaactcgcaatcagctaaccctagcttatttacatcggctcgagcttcgtggtaatcaaccaatctctttaaggcgagttcaccaccatggaggagtgcgagcgatgttgatctcttaaaaatcggtttctttttggctttccaagaggttagggcagcgaaagccaccgcaccaaagatcacaaatggtgttgtcttagctaccaccatggctgcactttttatcttttgtatgtaattagaagaattgtcagccattataatttgtgattgttgtgaatagagaggaggaaaaggttttggtattaatttgtgatttgttaaagtattttcgttaggatgatataattatatatataaatagggttttttttctctttcttttgttgggaatccattaaaaaataaaaataaatttaataatttataatattgtggtcgaaattttggagatgaaggaaggtatatagctcattattgtgaacaataatatattacctaaaaatgaaggaaggtacatatgtaaacagatttgagagacttgggaaacaaaattgagtttattccatcaaacatgtatatatattctcttgaagactttgtatttggagtaaagaaatttctcaatgctaaacttttgcacgaatctactatatatgcatgtcatgtacgtgtataaggaaatttcgatatacttatactttgataagatggatagtatattttaactacttcattcctaataaagtaaactttgatgggacactttatacttatagactagttagggtggtattaaggaatagtttcacaaaaatagagacgaaacagaataacgtccgatcttgtttttagattgagtggaaaagggatataggnnnnntgttatgttcctctgtgcatctctatgatgggtaatctccataaaaaagaggcaactttcgtgtagtttgtaattggaggtaactgttaagatattttctcaaaaattattgggctaactcaacttaataaaaccggtttgctataggagaggattgtcttgatcttattaggtcgaacttgagagactttaataaaaggagaccctataattagactggcccctcatcgaagagtttagttagctggaatgtttataattttgtttcaaccgttacaagaaatgtcacttttatcagcacagttcgctactgcgtggtaaaagtaacttttaccagcgcatttcgcaaactgaactggcaagaaggtcaaagttttaccagcacacatttgtagtgactaaaatctaacttttaccagtgcatttaggcgctgggaaaatttatttttgccagcacttttcattttgtgctggcaaatgttctaataccaacgttaatttgtcaatcctttttgccaacacgtcagaagtaaatttcattttaccagcgcaatatcaaacttttgccagcacatttttgtactggcaaaagtaatatttctcgtagtgaactaactaaacctatgcaaaatatatatcacttttaaacacgcg

SEQ ID NO: 37681 - DNA, 2590 bp, Cannabis sativa
acagagaggcattcgatgaggaaaaggaacccgatggaatggtcctttccggatggaaccaagctccttcagaagagaacaatggcggcgacaagtcaccggacaacaacgagaaagaaactgttctgtcaaagaaaagaaaactttcggaggatggcctccaaagcgaagaaactactagagccaataagaaactcgaagtcattgacgaagacgacgaccttgtcatgcttgatgatggggactttggcaccttcaaaaaacgtcaaagctagtgatagtaattgtagtcgatggtggagtgtagatcctaattttgtactattagggggagtgaaaaaaaaaacactgattcttttggtgatcatagaattgttctttcgaatagggccttattttgtagtcttttttttttctttaatggagttaggaaaaaagattaattagttgtccttgctggtgttgttcacacccccttttgtggttattattatcactgtaatcaaaatgtgtattcttcctagctcaattaacatagagagagagaaagtgaaagagagagagagagagaaagagaggaactttagtgcaaatgtttaaatttatataacttaacttttggaaatgtgatccaatgaccctattaattaaatactctaattttgagcattggaagaaaagctcttgtcttctattgtttcattttattcttctttacatttttgttcttaatttgttaaaagggttgacacagacaataaacaataagaatacaaaaccttttcattaagaaaatatagtagttgtaaatacaacaaaactccacttcaaaacaataattaaactgcagaaaattgaaacccctcatatgtttctaatgttatacatatctcctctactatatctatatttacataatctccagaaatatatcacaaccaacaagagggttttattattattaagtcaaaatcattactaccacttctttttttctttcctcttaacaaaaaaaggccttagactccaacatgacaagggggtgaacattggttattagtaggaagagttcgacaaaatgaaggataattatttggtggaagaggtaatatgatatgatgatgatcattagttgaggttgctaatttggttctttgatcagaatacttcttcctcttcttggcatctggaatgtgttctggctttttaaggtcttctaagcattgaacatctgccatgcatgtaaatgaccttgattttcctgaatagtaccttgacaatcctctcttgctactcatcatcatcaatacaaacacaaacacaaacacaaacaaaacattattatcattattgttataaatatatgcatgtacatatattacggtatacttacagataaggtacaaattctgatcattatgattagaatttgtaccccatctgtaggtattattagcacgtatactttatagtatatttactaatagaatataaattttgatcatttatcaaggatgatcataaatttgtattggtaagtgtactttatcgtaattttaaattttacgatcatcacagtacaaacaaaacattattattagaaattacctatcgatgcatatacaaattctaatcattcattagaatttgtactcgatcatcaataggaatactctaatcaaattttttgaaacatatacaattaataaataaatatatagtcttacttcattgggagatttgttctgagtgcacccatgtcaaatgtattcatgatcattttgttgtcagcttctgccatgttttttttttcttctagagagagttatatatatatgagtgcttttcctttttgttatgatgaagatgatgaatgtgtatatatatatatatatatatgatgtgtatataattatagatggggtagaaatgaaagttggagttgaggatgatgaatagtttttagtggtaaggtaaccatcaaatataaattagaagataagagcataccacacacgtcatatatatcaagtttttgtttggatgttggaccattaaaagtggattcccttttaaggctcttaaaaactccccatatatttatttatattccccaattaatactaacatatataataaattatacattttttttctttaaaaaattaaaaaaattaaaaatttggggtgtaaggatatacatgccaacctcatcaccacaattttttaaaataataataatcaaaataaacttaccaccacaaatataaatttatgggtaaatctacaatgcaccatttaaaaggttgtttcaataaatttttaatttgttttgatacaggaaaattttttagttttttattttttttatttttatttttattatatgatcgtgtaaattacagttatttaaaactatttataaatttttaaaaaatttggagtagttcacaataccgaaaattaagatttatattttgttatacacacgactgtttttttgtatgagtgacaagtaactgtttaatttttttttttcaacactgtaaattattcaaaattttttaaaaatttataattagttttaaat

SEQ ID NO: 37682 - DNA, 7126 bp, Cannabis sativa
ttttatctttaaattttatacacttagttttttaattttttagcaaaattcttttttttttttttaaaaatttaaggcatcggttaaatatcgaagatggatgtgtaagtttgtaaaaaagtttaagtaaaattttgattaaagaagaatgtagactatcataaagtgatatggataaaattaacagaataattaaaaaaaaaaggtaaacatgataaattttgaaagagagggtataaattaaagatatcaatttaaaaaaattatgtagtataatttttttaaaaatattactgttaaatactaactaaataattactatataaatttgtatatataaaaaaataaaattataaattaaatattaataataattgaattaatatttaatggtgatatcttaaaactttagaattttatcaaaaaattaataaataggctaagtataaaaaatcaaaacggtttcactataaatacctcttactattattattatcatcttattttattttgtattatttaaaaataaataaataaaatttgatgcttatgtgtgctgtccaaacgactcttgtccgttgccgtcgcagagctgagctggcattttatggacaattttaccctttcttctaataattttgttactaatcacctttaactgccacgtggactttgaattctccaccacgtttcctgtcggtgagattatgaatcttttttaatatatttttttttatctctggaatttcatggttcacaaaataatatattaatatatttattaattttaaaaataacaaaaataataataaataaaaaatagaatgaataataatatttggagggtagtagggcccatggagagaaacgcgtcagcccataatcgacggacggcgggtttgttgaggggaccgcgttgggcccattctctgacctttgttgcggcccatatgtactttccatatagtcttttacttttttaccctttgatgtctcttcctagcaacttattggtaagtaaatagtattcatttctattaattactcgttcttgtggttaggtaaataatattcataaaaggcaggcatacacctcttgagctttgagagaggaagtttccattaacttgtttctgaattattattagaatcctcttattcatcctgactatcccgaccattccaattcatgtggtaaacataggttagtcgataaatttacaaatagatataccaaccaacctgcatttgacacgcgaatcaagtaatcagaatactcttgacaaatagatgatgtcctcgttatactttttaagttaatgtaaattatgtgttagacttaagaggaggatgaggatatattggacaatatccactcataaaagttggtatattttagtaaaatataatttgaaagtatttttaattaataaatacaaaaaagaagtattcctcaacttattcaagaatataaatactaacaactaagttatactagtccaaagaaatcaattttaaatgacattagttctcaatatatattaatataagtctctttctattgttttgacaacaaataatttctaaaattaaacttcaaagcattgttaatgttgattgatcgatttcgagttccttttgacccctttcaatttcaatatatgaattcatcttcatgcacatgcattcaaaattttcggttagtgaaaaacgtttttgttgaaaaatcaaatataatacatttcaattttcttttaaagtcaaatgagatctcaagtttaaaaaatatatgatacaaaattatgaaaaatatattttgtttgtatatataataataattatgaaagagagatgggctatttccatgcatgcaaaatcataataaatatacggaaatgcaatacctatacgtacaaatatatatgagtcatatactttgtgtaacatatatttacataaatggttttgtttaattaaaaattaaaatgacttgtgacaaagtattactaatactattatttattaagcaaatcaaagcattattgtttttgttggcaaaattcgaaccaccaattatacataattaatattataatgttacatatataaatgtgtgtgtatatatatttatatataaaatatacgtacactcaacacaaacacacatgaaatcttatcaaaccaaatagtaaaattattggaaatttttaaaagtaatattaacaatgtagtggtgggagtggggtgataataatgatcgaaaggactaataggaagaaaacaaaagaaaaataattgcaaaaataattgtttacgtggatggctaacaaaatttcaataaatagtttgtctattttgtttgtttgattgattgaaatatatacgtcactatatattattgcaaatattattattagttgagtcttctcttgagtattaatatatttctatatgtaaatatttgtattgtacttgcataacacaatttatagcacaagattaatttagacacatgcatgggctcctcctagtcctacatataaatctacttgttcaaattactaacctaataaaaatctaacttacctataccttagttattaaaatacatctttccattattattattagctaacacctaagctaacgaatattaaaaaactgcatgaattattgagtagcactaaaataccacttgaaacatcgcaacatacattactacaaaagacactttgatatccgttcaagtttcgtttattttaaaaaattgacactataaagtaccctaattttaggtattagtttaaaactaatattcgaataacctaatgtagtgtcatttagtacaccaacactaaaacctaaaccgagatttaagagttataaaaaacacctatattatcttggtttataaccgaaacttaaagctcattttgtactccaacactagcttcataagatagcatattgatatttttgttgtctgtggaagaatttgacaagtttcgtgtttcgtaagagaaaatactagataagttgtgcaatcctacattgcttaggaaatgtcaagtgtgatgattctgagcttgtgtaggtatggggttatacaattgaaaagaacttaaatagattaattggtactatacttgtatcaacaatgtgcacattgttttctggtagcccattacaaaaaaaaactccttaaaagattagtaatagactttgttagtgtgtgagttacaccatttagagaatacgaaatagcataataagagccaccacatactgcaactaaaaatttacataatagactaacaatttgaaaaaaaaatataaaaatacattaacatgattttttatttttatttttatgcttttaagttctttatttacataaatctatcttcaataaaaacattaaactgttttatagctgttttatatttatattatagttatcatgagatactttttagttgttttatagtttatttatagtttttgtgaagttgatttctcgttgagttttaattgctttcttactttttgttagacaaatgtatttttgtaatttaaaactttacaagtgtacttccataaataaaaaatttagattataaaattgtaaataaaacatagagaaatttttttttgaaaattttcctaaataaattacatcctcaataattagtggaagaacaatatagattattaactcaattacacacaaagctaaatattattttggacttcgtgtttgtaaaaattattaattagactatttgttttgttaaatagcaaaaataaaccttgtattttttaaaatgatacaaaaagagccctaaattgatttttttgtcaaaataaacttaataataatctaatttatgataaaactagttatattttcttttgttcgtgctaggaattatcttcaaattggttattttaaaaaagaattataaaaaattgagcttagattcctatttgtatcattttagaaaatacatgattcattttatcatttaacaaaataaatgactcaatttataacttttggcaaaaatagtatttacccacaactagggatgtactttgtatacgacctaactcaaacaatctactcaaaccaaatcgaggtaacacgacaaaaaatacaaactgaaaaactaaataaaaatataaccggcccaatctttatattagggagattaaaattaatactaatatactcattaacttaaactaactcgaccaactcaattaaaagtattttttatattaatatttatatttataaaaaataaaaaaaattacactactatatttatgttatgatatatttgtgttattattagaattttcttttaattgagctagttgaataaaatgtgaacagaacaaacggagcataggatacatagaatcgaatggtaaaccccaattgattagcccaaaaaagagctaataactcagccacatcaacaccgacttctctccacgtcacagtacccgattccttcaaccccagccacgcctcgcccactctgctccggtgggttccaagctccaccaccaaccccttcaagctcttcattcagtccagtatatgatcagaggtgatttatggtccatataatgcctgttttgtttgcttatgtttttccattccatgtgccttgatgattgccctgcaactgtttgataaaatgattcaaagaaaccacacacttatttaaataaagaaaaaaaagttcaaactagctagtgatgaagtttgctgactttttattaatttgtattatatatcttgcaatttgttttgtttgatttaattctgagcattttggtttgaattgtgacaaaatgaactagtaatgttagaatgaagatttgattgagttaacaaaaatcaatagcttcttgatcttgatttgattaagatttgatccaattttgacagttaatgggccaatacttgtgagttgcaatgtttcacagacgagttcaaagcatttcatacctgtttgagctagtaacccaaaaaaactctttacaaaaactgactgctagtggtgaaatcgagcactcttatgttcggttctcaactgggtctactcttactgaggtgccccgaaagcttaagaggaacgagagaaagccattagttaaaacttttaatgaactcaaacgcgaggctagattgaagagaaaagaaagagatgatgtgaacgagataagcctacatcctcctcataacgggttgttagttaagggtttaatcccggttgctcacaaagttttggctgctagatccgagctagtgtcatgtgtttcgagggtagccagtagcattgctatatattcatgcaggtatgaaactatacttcatttttctatgtgtagttagagatgcatagtccatattttcagttgggtcgggtttgagtttggcattggatattccaacatttcaatcttttggataggttgtgtgaagaggttcatgttggccatccaccccataaaattagaacatgtgatgttcccggtagcttaacaaacaaagtgcatacttggacaagagggggtgtagaacatgtattgcccgtcgttgaatcttttcatttgtatgaccgaataggaagagccgtttcacataacgaacggcttgaagtggataggatccctgcaattgttgaattgtgcattcaagctggggtggacatacccgagtaccctacaaggagaagaacctgccctgtttatagtgttgcaggtagaattatggatttcgagaagaagtttcctaaagaagaatctttaggagaagatatctatgcatatgggttctgggaaaagaaatcctcaacacatcataacaagtctatagagttcaattctgacaacttaaatggtatgctttcctctaaattttgcttatgtatcggtttttaattgtcaactgatgttgttgtgattttgcagccattgctactcaaggaatgaaggcgtgggagacaatgcggtatgaaggatcgaaactcatggagaagtatgttgctcaaacttgtggatactgttcagaggttcaagttggtcctaaaggtcatcgagtgagggattgtcaagctttcaagcaccaaatgagggacgggcaacacgcatggcaggaggcaacgatcgatgacatagttcctcccgtgtatgtctggcatgttaaggacttcgaaagagaagagccgttagaacatagtttgagtaggtactatggtaaattaccagcggtggttgagctgtttgcgcgtgttggtgcacgtgtgggcgagcagtactcgtctttgatgagggaagatgttgcagtaccagaattagatgaaataaagttggttgtttaagcctaggctgcctttgctggtggaacatagtttgaagtttgattaagtgtagttgcttgtcatgtaagtaagtgtttttggtcaaaattttgtaaccttttcttcaattaatttattaaattttacaatctcataaataataataaataaaatgtgtaactaaattcaacacgatttaagaagacaaccatgacttaattgcatcacaattaacttctaaatgcttactcaaaggtccaatttttccatttggattgaaaattgttatagaaatgtttaatataggaaaataaataatgtcaattggtgttcaaaatttaaaattatgaaatatatgataatttgcaaattatacaaagtactaatgggtagtcctttttcttattattggaatttatattaatagataaatcggaaatagtttattatctattgtttatcaagcaaaattaataataataggctaactaaatcgtctacaataatgaagaatttttttttaattgcatttttaactaaatgattcataaaccgccaactctaaagtgtcaaaataatgcgaaaaatattaaattttcatttcgaatgaacatgtgacatatcacatctattaagggtaagtaagccaaaaatcttctaacaaaaagtaggtaaaaacattccaattgaactaaaataaaggagaataacatgacaaaccatattcaaaattgaaaatcgaagaatca

SEQ ID NO: 37683 - DNA, 5292 bp, Cannabis sativa
ccgttgttgttaatccatgacaaattggaattggagtattgatcagaagaattgatattattattagaagggggaccaaagcttagacttgaagaaggatagagagtgtggtggtgatgagggtagtttggggattgtgttgttgtggttgaaaatttattgagaagaggagaggaattggaggaagtgaggtcaagagtgatagttgggtgagaagatgagtaagaggagtaggaggttgttgaggaggagtttggtaagtagaaagtggtttgtttgttgttaataaggttccattttgagctgtccaaagttgtaaagcggtggagctcggcggtggaggaggtggtggccgaagatgggtggttgccggagttggaggaggttgttgaaccggagaggagcattgaagcagcggcggaggtggtggaagccatcgctgtggccgagacaggaagtgggtggttgtgtgttccctcgtaggtggtgattaagatggacatgtcgtccgcacatctttgtacctgaaatttaatgcaaatatatttgttatatatgtatacaaatatacaaatatatggacactattcattatataatttaagtttaaaatatatgtgacatcattaattaattaatgcaaattggaattgacttggggttaattagacaataattattgtcaattattcagattgagaaaagttgaatatttgagtggaaatatatataattaagctttattattttataattactttgagaaatattaggaaaatagtacgtagttgactattataatgtgatcagaactttatgtaaaactatattttcttgtttatacactaaataataaactattatatatatacacctgttttctcactggacatgaaggcgcaacagtgcaacgatagtatgctctagggcaagggttgcctttcgcaatcttttgaccatatttcctccattgacatccatcgttcatctgctcatttacaacacacacacatatgcatattaaatgacttaattaataattacatgcactagtggtattgacatggatattgaataatatgaatacatatatactaaccgtaggggtatcacatcgaactcttacgcaaacccttgttttcttagcagggttttgctgtgaaacctcatcttctgtaacacttctcttcacggctgttgtcttcaaaaccttgctaggcggccaagtttcgccggcttcttccttgttgatcatcaattgctcgtcaaagctgctcgccgcgctagggtttgacaccgcgggttctcctcctgtaccagctgaggactttgatccttgctgatcatgatgatgatatttattgtactccaatccaagagaaaggccttcttcatcatcactagcaataactttggaaatatttttatttttctcttctttgaccatattattatttattttggtaagattattattagaaaagcttccaagacttagggagataagatcactttcttcaatttcagcttcgagattattctcatgattgttattatcagtagatttcttcttcttattagctgcttcttgatcaagcttgttgaattgcatttgaagagtttggtagtccttcattatttgactcaagtatattttcaacctttgattttcttctttaatttctcccaattcagctttgctagattcaagctgatcatcctacaaaaaatcaaaatattaatcgttagaataataatttaaatatttaattatacttgacttttacataggtatatttatatacaaatttatatattgaattttgtgatcagtatatagttgtatattgatattgtactgttttccttctcactttaaatatttaaattatgtaactttaattatttaaaaatttgcgtaaatagtacatatatatacatgaattatatatgttatatgtgaattttagaaaaatagttttgcatactgtaatttttacaaaaacataaccataatgaccagacataaagatttttcttttataatattttatactagcttgttttaattaatttcgttaaattggaaatttacaattaatattccattcattttaaatgaaaaactatataaagacaaaaatatactagaaaaaaaggaaaacatgttaatgtaattaacctgttctttattttgtattattgaagttataggagcagccattgagttgggttcaatcgaagtagaggacctttctacgtgatctgtcgtcgtccgcggtacctatttgaccattcatatgtacgtatacgttatacacaatgtacatatatacttgattgaaaaattaagaactaattaatttgtaataattataagaaagtcaagcaataatattaaaaagtatctaacagaaaaagaatcttatcatcattatatgtagtctatatatcgtttatatttatactagcggccatgtgcaagaaattaattaggatctatcttacatgtactaagtcttcccggcccttatatataaatatacaaattatgaatctatgatcatataaggataactaataattaatttagtaccgcctaattttgactgctaataatattaatgtaatataatatcattaagctcaaagcattgtaattgtgatatttgatgtaattaatcatgaatatatgtactatgtaatattatttatcaatcatttttgtttcttaatattattattaattatgttcaataaataatggttaagcttctcgatcgaacatatatatcattatttggttattagcaaatatttaccgagtttaataataactatataattaatatatacctagctttaattttcatgcggcataatatattacacatattatttattataatgagaaaattaagaatattatatcaaaatgttttgttttcttcttcttgttaataagctaataataatttctagattacagttgagtttattaattaggaatactgagatttaatttaattaattaccttttgttgcttctcagagctaagatcttgtttaggtgaacgttgtgtgtcatcattcccatccaatggtctttcatttcttcctatctgcaccattaaatgaataatcaattgtctatatatacactcgtatactcttgaagagcgataaaaaaaaattagatttttgtgtaagattatatatatatatgtatgtctgtataaattaatatcagtaaaggttagaaacaatcagtaatacacacaagatcccaagttgaccatcaatcaaaggcaaaaaagatgaaattaatttgttcaggtttaaaatatatccatatatatatgccaggaatataatatattgggtataatcgcctatagcttagagagcaaataaactacatacataagtacatatatactctctttttcattagacatattaattaattaatatttaattattatatacatgcgatggtgataataatgaaatcatgtagatatcattttctagcttgtatatattgatttatttttttccttattcataaatgaaaattaaagatcaaaaaggaagttttaacaagctatagataggctatatgtactaatatatatatatatatatatattcatatagtactagttatatataagcctatggaaatcctagctagaagatctaaattaaattaatcttcaagggtaagagtaaaagaaaaagtgggatgtctcaagaaatataatattacatatatatatatatatgtgtgtgtaaatttatatctagatgtgtatatataccttggaagcatgatattgaagattttgatcaccatgagattcaactctattgatctcttgtttgacgacaaaagctcctccagcagctgattttgctgaaagcggttccatttttgtaaaacctttgctcttttccttctttgaggtttacatctctcctttattccttcttatatagacacaagcatacactctttgaccaatcatccttcctcattatatttcaaacaacgaaaaaactcacacccttcccaatcaattataatggataaaaataaatcaaccaaccactttattatacagattaaaactatatatattccactaaaaaaaaaaccaatatattatattattaattaatgtaacagtctaacattatccacttgcacttaaaaagaagaaaacaaaacaaaatattatatatatttatatctgggattaaaaaatgaaagtaagaagaagaagaattcaacttcaacgcttgagataatagatatttatgaatttcgcaagtgagaaaaaaaaatataataaagaaagaaagaaagaaatgagatatagccgcaaaactcggtacccacgaattcttgctaccctctttgaaatttcgtacaatattgcaaaagtcagacatggtagggtagttttctttttcctagtacaagaactaaaatagatattgaggtcaaccttacgtttaagccttaaccatttcatttattattttttttcatgcacttgtctataaccctagctactaattgtcatttttaattatggccaatgcaaaattcatattattattattatcatttgacattggaggaaagaattcatcattagccaatatatagtagaggacgtcgttcttattattattgcttcataatttcccacatatatacatatattttgttatttattctgtaggaaacaaatataagttagaaattacattaaacaaaatataatccgcaaaaacaatcattggcaccacatgttctttcggtacgccttacgcgggggaatcaaataccattactcttatgtacaactctagaacataaattatcactatactagaaaaagagaattcgcgacgaacttaaaaatattttttttgaattcctcgccaaagaaattaagcaattatttaaaattatcgaaaaaattagggtattctcgatgattttaaattatcgggatatataggcgacaatttttaagtgagaaacgtgttttttttttaaagggaaattgctgacagttttaaatcgtcgacaattccttgcttaaaattaatggatttcagatctaaaattctattttactgcatcttaaattttaaaaatttcctttcccccacaaaaatcaccagaattaggggtggaagcatccgctggtaataacatcaaaattggccggtattggtgactaccggcggtgtcccaccaatattaatccgccg

SEQ ID NO: 37684 - DNA, 3098 bp, Cannabis sativa
atcaaccaaatccttttttcttattttaaatccagtttactgttattaactttacatccatctcatctctaccaatacagttgacgcataatttgacgcccaagttaaggggacaacagagcaaataaaaatacaaatcttcaaaatttctgtgttgaagttgcaagaaaatggtgagctgcatcatactattatctcagctccataaagtgacagctttccagcagtcaagagtaactcactccttcaccctttaccacttctcctatgcgataagccttgtatgctccattggcagtttcctcgagaattctgtgggatgcttctggagtcacaactaaaaccatcccaatgcccatgttgaaagttcgcctcatctcgccatcttctactcttcccgccttgtgcaagaaatttgaagtaaaaatacataagttaattttaagactttcagaaataatgtgaacagcataaaccatgggaattgctagttgttttttctttctttttgtcacttaagcctccacaaagagacagacacaaaatcaatatatctgcttacctcttggatccatttgaaaacagcaggaatctcccaagaatccatgtcaataacagcaccaaggcctttcggaaacactcgtggtatgttgtcagtaaacccaccacctgtgacatgtgctatcccctttacacctcctttgctaatcaaatcaagtacctgttttatttattaaaaaggaaattgacggtaaaaacagggtagaaagtattgtagaaacgtataaaaacagaggacagtgtgaaggggaggtgaacctaaacctgcttaacgtatatcacagttggtgccatcaaagcttcgcctaatgttacaccttccccaggaagtttgtccttcaaagacaatccactatgagccagaaccctatgttcacatacaaccagaaatttcatcacataaatgggaatgtgaattacgtatctgacaacattggaaacctcgcagtataagttccttaaaaattgccaaccttcttacaagagagaaaccgttggaatgaactccgctagaaggcaagccgatgagtacgtctccagccacaatgctttttccatctataactgaatctttgtttacaataccaaccgcaaaaccactaagatcatactcaccattagcgtagaaatctggcatctctgcagtctgaaaaacaaataaattaactcagaccagctaaagagactagcactactttttgtgcatgaacagaaatactgaaactactatggtaactaaagtttgaattttcagagcaagtgaaataaacataacgctatttcactatcgcttaatgtcagtagtattagtaacaatatttccttgtcaaacaaataagaaagtacaatttgtttgaaacaaagaaactgtcatgaaaatcatttaaattacctctccacctagaagagcacagtctgattgttggcaaccatcaacaatgccttttataacctttaacaaaattaaaatcaaagtattaggattcttatccgtaagtagtaaccaaacaagctatgacgaaatttggtatttaccttttcagcaagatcaacatcaaggcgacttgtagcaaagtaatcaagaaaaaataacggcttcgccccagaagtaacaatgtcattaacactcattgcaacctgaagttaaagcgaattagcaaaaaccaactagcaatgagcagtgacataaggatgttaaagtgactcatttcaaaatttaccagatcaatcccaatggtatcatgtataccagtttcaaatgcaagcttaagtttagttcccacaccatcagtaccagcaacgagatacttatcacctgtttataaaccaacccacagaactaaaattagagaacagtctaaattagaggattacaaaagagaaccgaagttgcagtcgattcagaattaaatatatatatatatatacatataaaaagaagactaaaatcaatttatatatataaagagcttcgtgcgaaaagtcatcaaaacaataagtttaatgagaagttaccaaaacccagtaaaaaccataccaagaggatagagaccgccgaagcctccaatcccaggagccatcttagcgattctccgaacaagttccgacccagcatcgatatcaacaccagcgtccttatatgtaagaccaacaccagtatcaccactctcactcttcgacatagaaattatgcctcctctgctcttcaaagcttcacctgccgtaactcttttaacttccattgaaggattcgacaacttattgaagaaagacacagacggcaatcggcatacgaaacgccggttccggtcgattctctgagaagacggtccattcgaagcagccaaggacctagaaagctctgtagttgagttcaagcttgtggtggccatggctatggctatggaccaagagcgataaagtgagagtttagccgagaatgacgggaaagctgtagcaaagaaggcgggaatagacacaaagctagggcttaacacactgtcactcactcaaccttcttttcattatccatttgggccttgtattgggccagcctatttcttaaagagaaaattacacacttgttggcttttatgtgtgaaatctccctccaaaatccaaatctcaaaactttaccagataagttgagaaatattttttatttatttatgaattaattaatttattatattttattaaaatgtatctatttttataaattagttgtgcaatataccatcactatctacctaattttatcacatataagtgagtatatcttaattaaaataaaaacaaaagtaaaaattaaaaaaaaaaaaataaagtgaatatacaaaatttaatccatttggaggattaaaaagataaattaaatatatcaaatactaaaattatttttaaaaagataataaatatttatactaaaaataagattatggtaattttatctttccaacttgagttactgtcttctccttctatcctaaactcttcctttatcttactttccatctatcctaatctctcaccttctt

SEQ ID NO: 37685 - DNA, 3078 bp, Cannabis sativa
agtgagtcgcgttcttcgagatttaaataaatttaaaatttaccttgatatgaaatatcttaaggcaagttgaagcaagccctagcagagcactccaaactactataggcgtgtagactagaagttgagaggagaatagagtaatgtcaatggaagtgaatgatgaactcttgtatttatagcaagatctcacctattcctaatgcaactaggaaattatgaaaaaaattatcattttatgaaaattttcaaaagttgccaaatcacagagaatctcagctgaaggcaaaaaacaaaggtcatgtgccaaaaagtgatgccaaaatggtggttatgcatgaaacaagcatagtttgtgttagaaacacatcatgacacatatatcacactaacttaggggcaaatatttaccataaaatttgacttcaggacatggacaactcttttgacacgtggcgagaaggaaacaaccctgggccctagccaccgggactaatggtggtccacttaggcattggaagtgtatttgtgccctggttgacactagtgggtgcccaagtaggcactatgatccagcaaacacatttctagttgtcatcctttggaaaagttgaagtaaataggtcctagcgaccctaaaacgatgaaccatgaagctgaggatgtcacgtggataacccaaggctcaacttgggtccaacatcagtgttggttgcctaggttgacatcttgtgcgccatctcgcatttgttttagttcccatcaacttcttaatggtaatctgcttagccattgtcctaagatcccctagacaagttttagactttagagatgagtctacatgaaatgacacatgggcacctaaaagctctaatgggtgcccaggttgacatatagatgatttaggcacacacgtggctagggtttaggtttttaggtacatacttggacttggattcctcaaatccatcaaggaacattgcaaggacatgatatttcatcaacaacatagaaaacgagcccatacataactatgggcgctacggttgacattttaacttgggcaccaattttgttttactaagtaatgcccatgcaaatttgacgaaactaaaatccatggatcacttttcaacaaaaagaagattgaggatcaacgaaacaaattttgaagatgttaaaccccacctgggcgcctagtgcatgccctaaggccatagtgggtacccaggttaacgtatctcaaccaggggcactccaagacttcttttctaagaagttgtttgcgcatttcccttatttttatccatgatgaagataaatgtgcttttgagaagcaaacaaatccatctaggccccaattggaaagacgagtgtccaggttgacatcaccccagtcactaggcgcccaagttgacatagccaccccgttggtggttctgttgatctgattgcgattccgtctcgaacattcttcttacttttctccaaaaacaaaatcggaacactttcacaattcaatatctcatgtacatatgtcacgcgtaagtccaccgacacccatgtgcactagtgatcaccagggcgtcacctagtcatcactactggatcatcgggaatcacccatgcctattaagtaaaagttcaaagagaactttcccaatgtcaaagaatgaactaaggatagatatcacattattcatgcatctcaaaatgttcctaaagcccacgaaaccaaattttgtgcgcccaagttaacgtttatgtcaacctagggacccaaaagtcacactaatttcgcagtcacttttctatagtgcacacagctcactaaaatgtccataactttctcatattttttttcaaataatgtggtcaatttaaatctattttcaaggtggatctaaatgtgtctcacaccccacgacaattctaaacttttggaccttaaaattgattcgagagctagtgtaggatttcctagtaaattttgtgccaatttttctattattttattgtaattagacctcattcattataaaaagagagttttcctaactcatttttcacacttcactttctctctacaagattagagtttctctttctttactctttaaaaattgtgaagtaaaaagttaaacttagttattttttcttgaattctcttaagctctatatattttaatttaataaataacatcaaaaatagtatatatatatatatatatgtatgaagttgaacaattgaaatgccaaataatggtctctaataatatatttttgtctttagtttttgccggttgtgaatgagtcttgctccgttggtcattggagagtacacaatagtacacaacaactcatctatttattatcatgaaaatagtgagacttgtgagaggattttactattagaaaagaaagccctatcctcatcaagccaccacacccaaaaatatttgaggataaattttattaatgtatttatatgaggctcaaaactcatgtgacgttctattaatttattatagcaccaatatatcgaactatataataatatatatagtatatctatatatgaattatgtctactctagtatcttccacaaggtgaagatggtgtaatataattcccacacacaaaaatgtttagctctgttattccgtctcatgaactccgtcggttgtaaggtgcttaacacgttcacacgtagttgtcaattagttgccaatttaacaattttttttctttttttttttttaaaaaaaagcttttaaatatatatgtatttatatactctaatgtttggaatgataatatacctgttgatagattaattccaaagtataataataataataataataaatatatttattaattatatatcaattaaagtaataataaatatttaaaatttaatatttataataattttttacatatatttatgtgtaagtattattgaaaaagttatattaaattaattaaaactataaaaaaatatatataatttaataattaactcattaataaattgtaatagaaaatataaaaaaaaaatggcgtacaacatt

SEQ ID NO: 37686 - DNA, 3450 bp, Cannabis sativa
aaatgctgttatctgaaaaagataacatgttgaaatctttctagtaaaactgttatattggaaagctagagaaaggaagccacaggggagggctcctcccctgcattggaaaagtttgtggaaggggtttaatttgctacatattgctatttaatttaagaatcctttgctcttttccatttcagaggttggccttccggttgttgagcaatggatctatttcctcaaagattaatgagggtatgcaagcaaagattgcaaaatgctcggagtctatgtggaagttaacatactatgccactgtcgaagcatgcattctcaaaatttcctataatgaaccatggtttcgagatacaaatgagttctttaaaggctggccagatcaggagttaaagtaagtaatttgtgttctgggacttactattattatgttgggtgtattcgtgcctgaactctaattttaatattagcatgctaaacacttgcttaaatattctttccttgttttagtttttcattcaactaagtgatgacataggacaagagctcatcttgtctgctattacatgtaagaaaatggatcaaattcatgctcctgcttatgtagatggatcctacactttgaaattaagtttgtttagtttaattacaggagtaatatgccatactgaattatttattataaaatgtattttttgatcatttagctggcgatatggcctatgactcagttttgattattttaacttttagtataatttctcttaacgtttaagtctgctaattttcttgtttcaattttgagattatttacacttttagcttgttttctttcttccaatattctattataaatctcttaacgtttaagtctggaatgcatttttgtttcatcgtattaacatcaagttgtcttgaaaatggcatatcaagaatttttctttttggtgctgagtctatttgattagagaattctcacattcttaaagggtttaatttggcacttatagcaataaaaaactctaacgttgaccccttttcctttccttttcaggcttccattaaagctattctatatgtgtcaatgtggattctacatgtacagcatagctgcccttcttgcgtgggagactcgaaggaaggatttttcagtaatgatgtctcatcatgtaataaccgttatcctgatcgggttctcatactttacaaggtactaaaagatcatttattatgctagttccactagttgaaagatatggcatagcatattcaattctaattttgatatttatttgtcttccatttttttactgcatttgcttctacctttttcctgaacttttatgttgcacaaatctaacatgtacttccaaagttaaaaaatgaactagggacatgttttgagatgcatacttgcttattatttattcattcctaaaagaacttgcaaattacattgaacattagcggaaaagctttacactgtcttatcttgcccttattagttctgatattcattacttagcatactctgattttatcattttttcttaaattaaaaatgacgtggttattgaagtagagaatgaaattttactttgggtcctttctctataaatattaaatgctttcagttctcttagaaactattaacggctggcaatactttgaatatactaagcaaaaaagctggtgtttgtatatgttatcttaacatatatcatttttacgagttagcaactattaacagtttcgagctcccgttgatacaaagcaaaagcctgtattcatgttctatcttcagccctgcttggctatttgcttatagtagcacctgagctgatttttgcaatgatgtgttactatattagttttatggatatatgggagggaggcataaaacttattaactatcattgaacatttattgggatatatgcgttaatatgctgttatagggattgagatatatgtttttggtggcaagatgtgcaaaattctgtcatttttgaaacctagcactggctgtctctatactagttgctatattttgtatgaaatcaattgttagtttcaatgattttaatggaattgtagattgactattactgagattgggtaaaataaaaccaatgattgagaatatatgtacatgtaaagctggtcattcagttctacaattaatattatattgctgatgtgcgtgtagattgtaatttatatttagctgatttaagctttccaagattaaactagagtcaccatactaagcctgtttattcagaaaagaggtaatgaattatccaatcacaggttttttcggataggatcaattatcctagctctgcatgatgcaagtgacgtgtttatggaagccgcaaaggttttcaagtattcagaaaaggagctgggagcaagtgtgttcttcggatgttttgctgtttcgtggctcatactgcggcttatatatttccccttttggatcataagatcgtcaaggttggccttgtaatgaaaaaagcgcattagttatgtaaatttcccttggctgatctttctcatgcttgattttgttccagctacgacctctgcaagtacttgagactgtcagaggcgtttcaccgattcatgtactacgttttcaatactatgttacttatgctacttgtcttccacatatactggtgggtcctcatatgtgcgatgatccaaagacagctgaaaaatagaggaaaagttggagaagatattagatctggtaagaaatgtaaatgatggatcatcatgttgttgtttttttttaactcttaacttaagaattttcgcttttgttttatatctacagattcagaagacgatgattaaatgaaagattttgtaccggtggtttgggtttcgggtttcggcccttccttggcaactgttttttgatgaaagatcttgtactaaagaaagtggttgtttcctgtagggaaggaagggctttcattcacttttgttctttttttttccaaatgattcttgagctagttagtgctgagatgaccagagataaaaacttttcagtgtataaataataggcaattcttgtataatttgtttggctagatattatttttgttcaagaattactggtcaaattcaaatataatggaattaattctttatatgaatgtaaacatatttagatttacataatcagattagatgatatttttttgagtttgatggattttcttgtattatttttatttatttatacaatttttttttgaataaaaatcataagatctattaattaataaattcgtttaaaacaataaaatacgtttcggaggaatagttttccaattgaaacacacgacctgtagagaaataagtctcttgctaagcgatgagtcaacttatttgcatatcattttacaaaacacaaattgtgaaggcataaaa

SEQ ID NO: 37687 - DNA, 2519 bp, Cannabis sativa
agcgatgtgggattgcccagcttacctgatgttttcccttatagatcacggaactactggctgtcacagactcagtgagcctctcaaaaggagaggagagttgatttggctcattcaatatgtgatgtgtatcaagctgacaccttttcgataacctcgatagtcttgtctactagaggaaaggtgccttcacacctgccaactggccatgtgggcaccagcaatcagggtaaaaccctaaacgtgcaaaatcatgctaccatacatgatattaatgccactgctcagtgaggagttggtattgatgttttgacaaggggagcaaaacctcaacgagagtccaaaaggccttagatcagaagtgagagaccccttaatgtccttcctagggaagtgaaccctcaaatagagtctaaaagaactgagacatggaatagcgaacccctatggaccatccacctctacttgagaggtcctatcaatgtcacgtttttcagaatccaacaaccattagtactaccagtgatcaaatacctctacgcgaggtgtgtgtagagcttaactccgaggttgaacagctgaagaaagccattgctcagttgcaacatcaccttcacgagtcttttgagcaacaacaaaaagagttttaaagttgcatctgggagcaatggaccaacgtagaaactcaacaagttgctcgatagtaaaggagggcaaaccttgtttgtacgatacgtaaaacatatcttactagcaatatagctcttcctcgaatctcatttactggaataaacaaaattaaagttccttcacgtccaccagctgggcacgtggggacaagggctcagggtgaaaactgtgagcggccaaaataatgatgtcactgcaaaaaataatgccaatgctctacaagaaactagcgataagacccttgccaggggaaaatgagcccctgtagacccttcacctcctatggaaaggtcccatgtgagcatacctctcaatgaccctctgatagctcatcctctcaagaggcaaagagaggatgactttgatgattgcgatgggtctagtactggcagtagtcggtacaattctaagaatcatcgagacccatgtgtgcctaaagcttccattccacctcatggatatggaggcaatgaatactaaccacctgcttagacatcgcaatcggttgaaggcaatgaagaccaaccacttgctcaggcagagcaattagttgaagacgatgtagttcctccgtcgaagcaactaatggagatcccctaaaaggtcacacaagcaaagttagatagcttacacaaattggtgagataccttgctgacttgagaggttttgtagacaagagtctcaatagagttagactgtttccactctcaagaagggtcatgacatagatttcaccaggaaacagaaatatgtgaaatgactgaatgccacaatcagtcgggacttgaaaattaccacttcacatgacactttgtacaagaagtggtaaagctagccttaattgctgaggatgctgagcaacatgtaacaaaagagcagactgtaaaggatgtcgttacggcatcgaaccctcctgctagtggtaatattagtaaggggaccaacaatggtaatcctgatcacaaatggaaggctaaagctttcgtaacatcaggggtaatagaaagttttgaggaaatagaggtggtcgtcaggaccgcggatcttccttccgatcttatcctgagtgtcctaaatgcaagaaacaccattagggtgaatgtcgggccaaggcatgttttcagtgtgccatggtgggtcagttcatcagaggttgtcctcaggccaagaaagaggagcctaagaagaatactactcagaactcgagacgactttttaccatgactcaggctgacgctgatgctagtccgtcagtggtgacaggtcagttgtctataaatagttattcttatactgtattgtttgactcaggagctactcactcgtatgtgtcgagtagagtaattgaaagtttccataaaccatgtgatatttatgcttcggggtttggtaccctgctacctttaggagaccttatagtatccactaggtggattcggtccttgtccttctggattgacggttgtgaattaactgccgatctaatagaattacaactgtctgattttgatataatcatgggaatggattttctatctaagtatggggcaacgatcgactgcaagcagaagatggtggtgtttgagcccgatagtgctaacccaatagtgtttgtgggtaaagtttagggggcacgtataccaagaataacacttttaaaagctaaggacctaatgagcagaggttgtctgggattcatagtaactatagtggataccagccaacgtgtgacatctggacctgaaaatacaagattggtgtgcgagttccttgacatctttctagaagatttaccgagagtgccacctacccgggagattgaatttgt

SEQ ID NO: 37688 - DNA, 3905 bp, Cannabis sativa
tgcatgggattatttatcccacctaactggattagttatccagacttctaacctgcccaaacactggattggacaaattagcctgtctaatccaatccagtactgcgtacaaaacgggcccatagtatatattacaaaattacgtaagacctataattaaaataatagagtaattcttataataaataaaaaataattgttatataatatgatcactcgtcagtatatatatacaataataatatttctacaattatgtagtaccaaatagttagaattaataacccaaaaaatactaagatagtacttatagcatccatcatattcctcatctctaactggtcatgtttatataaatgatatagaccattcgttaataattagatacatatccaatttttaaagaagagttaattaattattaaggtaggactaagctattcttgtcgttcatcagtaacgatttttccacatccacaagtatccaactaagttcctagaagagaaatataggaggtgagcttataaagctcagtaaaaacaactatcatcgaatgaccagtttaataaaaatccatgcatggttagctttttgaaaataaaacatctcatcatcatatataaacaaaatagagagacaataattaatcacaagagacaagatatccgtacatatcacgctgtctattaaactctaactctcaatatcaatcataaaaaataacatcctaaagcgggtatatcacacaaaataggcagttcattatttaatttttctgcctaaaaagagagatcactaaatatattaagtccttaaaatggtgacactatttaaatcactcaattaaaaaaaaaataaataaataaaagagagttttgttacctcacaatagtgaccttgtaacctcctatacacaattctttctttggaaatattggtcaaaacaattattcatacaataaaatttcaaactacatagtttacatccaacaactacaataaaagaaagccaagcaattgttcaaacatgtttgttagtcaaaaaattgaaaataaataagggagacaaataatgtttaatattgaaaaaaacttatattagactaaattgaatgcttctagaaatttacaagaggactaaatacaaatatagataaatgttattaaattagattatgagaaagaattagaagtagtagttgttgttgttgttagatagataattagatactttgcttaagtataagtaccctgtaaaaaaaattaaaattaaagaaagcgttatagtataaataattataaaatattagtagatcacctcctctgcttcaaaaatggattcatccacaaagcctacctttaatccctaatcctctttctgtctaacttatcaaaccctagattcaatttcccaaatagcacttccttcgtagatagaagtagaaagtattatttaattaattgtttatgtttatttatatgtgaattcggactatgaaaccagctgaatcaaaaggctcgggctcagatcactgagtgtgggagaaatctggtgaaataaggaggagagtgggaaaaagtttggtttagttttttgggttttgtggttgtgtgaggtatgcatagatctggagtaacgatggcttggaatgtgtttaagttctgtacagctcttcgtggtctgggctcgatcatgatccttttggttcttggggtcgtgggtgttacctattacgctgtcgttttgactaattatggaccagctctctacgatggtggtcttgattctctcattgcttttattgtcttgatcttgttccattccttggtaattttccaaaatatcctgacttttttgtgctttgattatttgattctatgttttactgtttgtttaattcattgtttctaaattttattatttcgtccatgttaaatcatgtttttttttatttctggaatctgagttggtttcttttcaatgagattcaactgccatacggcttttgtttctttttgtctgtaaacgttgatttttttttttatatattttacttttcatgcaatttgcttgaatccaaaagatttttctttctgggaaatttttaaatttgggattgaaagaagcaacataattccagaactatggtgaaatttagtgcctgcttttgatagagaggattatagaaagtgagtctcagtggtaatgaatgcttaaagtggaatgttcctgtaatgtgcagttggtgatgcttttatggagttatttttctgttgttttgactgatccgggtagtgttccgcctaactggagacctgctgttgatgaagaaataggggaggctgaccccttgaatggctctgagttcactagtttgcagactgacccatctaatcaaagggttcggtactgccgaaagtgcaaccagcttaaaccgcctcgttgccatcattgctctgtttgtgagtagttatagttttgtgtagttttagtattcatttggtttttgtagcatcataaaagcttgcttattttcaatagaaaataatttttctttcactggcactgacattatgattcaggtgggcggtgcgtgctgaaaatggaccaccattgtgtatgggttgttaactgcgtaggggcattaaattacaagtacttccttcttttcttggtgagttgtgtttctggtatagctgtaaaaactctctatggtgacaattatacattctcttttaagtattctatacaaactcgttgttctgctctgttgttgctgtttttattgtttctttttgcctcttcacattgaagaaacaccacttgaccacttgaatttgtacatgaatctgctttgatttgttgtttttacgaagatgttagcttgtttcccagaagtgtttaaatagctctactttctagggatcagagaagatttatgaaccactctaatggagttacgcatgatcatttatgtactgtccttagtgataaaattccactctaatagatttaagcggaatataaaaaaattatgatgactgaatttgagccatggcagctagagacttttcctgtgtggaagttgattgttgttacttgttagtgtcactaatatgaaatatgtataaattcaagtggttttattctcaaacttgttcgtggactaagctggaaatgtatatttctctgtgattatatgtaacccctgaacttttcaagtttagttttctcatgctttttatttatgtattttgattttacattatatgactcttttgagaggttctatttttttccttctcctcaacacctcttcatgtaccactgtccaaatggcgactgactaattttgtttttaaacttgtttgatcatcatgcagttctacacatttttggagacaagtctagtgacgttatcgttgctgccacattttattgcgtttttcagtgacggagaaattgctggaacgccaggaacccttgcaactacatttcttgcctttggtaagatttgactgggtattctttctcattttatttcttctcctttatctctataattatttttggtcttactttacagttttgaatctggcgtttgctttaagtgtcatggggtttctgatcatgcatatatccttggtatcagcaaataccacaactattgaggtatgaacacttgcttatttcaatttgtttattacatgttctctattcttgacatattgaaaaccaaattggagaaaaaaaattgaagggacacatatctagtaataattaaccatatgcctagattgagttgcaaattaggaaccatttcctaagtggatgtctagagaaataatttctttgtgcagacaaaggtgctgatatacctttggttatttattgtttgtgtga

SEQ ID NO: 37689 - DNA, 5698 bp, Cannabis sativa
taaaataaattccaacagtaacaccttgagggcttgtggggtcgaatacaggcgagactgttgggttagatcggttcgtgccggtgagttcagttgctatcctccagtgagactcacaagcgaaacatctgaggggccaatggtagactagcacaagtggctcgactggaataggcgcttggagcctcgagcacatcagggctggagcaataatcccactgcgagactatttcaaggacttcataaaccgcctcggtcttgccccattctaaccaaatcccatttcatatagaatcctcacaagtttgagggttttatacaaaatcttgaattgggagtgccccactcccttggaaataaagtatctttattgactagcctttggtaggtagcccaactattcttaagtccaaatggcataactttataacaatacatgtcaacatctgttcggaagctggtatgttctttgtcgggtggttgcattcttatttgattataccccaagtagacatctatgaaacttaggttctcatgacctgctatatcatccacaagttggttgatccttgggagtggaaaactgtccttctgacaagccttgctgaggttagtaaaattaatgcatacccaccactttttgttcagcaatgggcaccggtacagggttggctacctaggatgggtagaaagcctcgattatgaatctatttgctcggagcctttttacttattcttttaatgcatgtgcatgttctttatccaaccttcttattttctactgtatggagcacaaattgggatcgatgttgagggcatatgaaatgacagttgggtcaatcccgaccatgtcttcatgcgaccaggaaaaaatgtcaagatttgctcttacaaattttatcaaagttgattttattttaagcaatgaagctttgccaattttgagtttcctggtcgacatagcaagatcaattttaacttcttctagcttttcgaccaacccaacatttatacttggttccctaatccatgtcttcatccctgccttgggcggatccctatttaacaatacttttacctttctctgaactatggctagatgtatcttcctttttggccttagttaaggcaaggttgtagcattcccgtgcagttttttgattgcccttgagacaacctactctatttcttgttaaaatttcacgcataggtggtaaattgaggttaccgcttttgactcatataaggttggtcagctcaacataacattaaatgtagaaggtacatcaattaccaaaaactgttccatgattgtattggcatttagagctttccctacagtgagtggaaggtgagtgtgtcccaaaggagctatactttggccagagaaaccatttacgagctgtgtgcaaataaccaagtctttgagttgaagccctatattttcatatgtagttttgaaaagaatgtttgaagaagctccattttcgatcattgtttaagaaactatcttatttttgatttgtacttcaatgaccaaggggttgttgtggggatagatgacatggtcagagtcttcttcactaaatgagatgactagttcttctatatatgtggttgttttggttttcattcttccacgaccaacatttcatctttctgctcatactgttgggttcgagaatacctttctctagctttgtttgagtctcctgcaatatgagggcccccaataatcacttgtaaattatttgcgatgggtgggggcataaactggttctaattattgtctggctaggcgaccctttggtcctggtcgacctttatgtaccttcgtaagtgctggttattcttcccgataaggaattctatttcttgattttgattattgcactcgttggtatcatggtcgtagtccccatgaaagcgatagtacttagtagtgcctctcttgcttacatctttcttcattggtggggtctcttatatggcaccatagactgagttgctgtaaaaatggtttctatttcttcagtaaggattgtaaaggcagtaaactttgagctttctctcaaggatgttgttgcttatagttgaattttcctttctttccattaccttgattactgtcgttgttcagtcttttaccattttgacctgaattgatgttattgtgatgagagttttgagtctggacagatatattggcaatagtggtgtgacattggttggtctttttcatcactggaaaagactagtggtctggatgttgcacgaagatcggagaggaaggccatgacagagcccattttggcttgcgaggctggagcgttcaggccagagtgcaatcgttcaagttgagaagaatagagagatagttgggcgaaagagagagaaagtgttagagaaagtgatgaaaccctaaagctaaagcctttatatgtcttaaaagttaaaaaaaaaattaatgatgataatggttgaaaattaaaaaccgcgtgaataagtgtccttcaaaagtgtaagggccatatttggcaaaacactaaataaccgtggtggaaaggttattatataatgtccatccaaaagtgtcccttgttccaaaacaaaagggtgttaaaaggttataagcaagtatgacatgcaggtggacttaacctgcttgctgtgtgggaagggaaatgaatctatagagcacttattctttaaatgtgaatatagcagcaggtgtctcgcagaatggaagaagaggttgcagtggggaacgaaagcaatagagttgcagaagctgctgcaatatatcagcaaacttaaggaaatatcagcaacaaggagaagcatgatgattactatgctggctgccttggtgtatcagatctgggggcacgaaatgatgtgttgtggaataaaaaacaattaatggcaagtcaaagtaattgtcaacagagcacaacaggagagtaagagaagaatagcaggggtatggccaagcaagacaaaggaagtggacaagcaatgggtgatgaaattgtaatttttgtaaagtcctagttttatagcacatagcagtcagtttttgtacagaaaacatgagatgtaactgatagttttgagcaatagaaagtatccttattcatcaaattttttttggataaaatgtctcttttcttgtagtgtaaataaagctgtcattgcatgtgtgctctcgattgtatggtacgacaattaacctattagctacattaggtgtctatttttaacatgatataagacagtttacaaaaacattctcatgcatgtcgtctaagtacagttttgtatcctatatattcttttggcgagaggtgtgactggttaagggtgccggcactatgacagggacagtacttactcggtcaaaatggcaattatgtgccatggtcccttcaatttgatgaggggggtttttgactcgtctcaattggtgaagtggtggaatggtatgtagaatgtgggagttcctccaaatgtaaaggtttttatatggcgcctatttctctatgccatccctgtagttaaatacttggaaagttatagttcccatgtgttcaagatgtgatgaggagtccgagaccctagagcatgccttatttttttgtcccgctcttaatttgattttggagaatataggatttctatcgtctattcgtagatatgctaatggcctgataccagatattcttactgctctattttttgcattttttcgagatgagtttggattgatgatgatgttgttgtggtggatatggtatgataagaattctattttggttggtaagacacaatcaagagtgacacttattcccgaacaagctcagtaggccttatgagattttcgagaacaccaagggctcgatataaatacgacaattaccgctagtgttggtcaagccacgccatggtggtgtcctctgccgacgggtcacttatctttgacaatcgacgcttcattgaagtcaggtagaggctttgtgggattggacggtgtgatacgggatggtaagggggtggtttgggtgctagtcgtgggattggctagagattttggtgtgaatgtggcagagttactaccgattagattgatgttgtgtattgctcgatcgacaattttgtttttctatctccaatcttggaagtgatcgacagtagtcgtaggctggatcaatagtcctcactctaataacacttgtgagccaataattttttgagttatttatttattagcagctgttgatagtagttcttgcaatgttattatgcgctctgcagatagtgttctcatgcactagttacttctgttactaattctttagaatactatccactttttattagttctcatttaactgttaattcagtttaatgaaatccatactttctttcaataaaaaaatgtaacacgtaattaggaactttttacattagttatttattaaatggaaccaacaacagtataatgacacctaaattatgttgggcaattcatcaaataaaaacatctttatttgctcatatttattgatcacgagatctcttaaaatacgaaacattatgtatatgtataaacttacataaattaattatataaaatcttttattctcgtaacaaccataacaatgtcccacttattagaaggtatatataaacattgcttaattattgatatgaataacaaacccatatgtatttttgtatatagatgatgatggcgcatgcagctggaattaaattattagtttattacttttgaaacaactgccttgtgaatctgaagaccacctttccattttccactccaaacttcatagagcccaaaatagagtttcttatcagcatcagtaacattatccggaacttcgattacaaattcctctgaaggaaatggtgtgccttgtccactgttagtagtgttttggtcctttagcactatcttcgaccatttgtacttgcctcgtttaccaatcttagccattaagtaaacttgacaaccattccagccgaatgcatccgacttaagagaaagaaagaattgtatcttatactttttaccagtctctaggcttgcagttgacccagttacttctagccaagacacctgtatgagctctgctgtaggatttctggaaaaaaagaatagattaattatatttcaattaatttttattggaaaattttaagaaagaagtgcatcctagttatttaaagagtatattactattagacatgagtggtgtccaacacttttcataaatggcgtcttttgattggtcagcgatattggctcaaagttattttttttaagttatacgagacccgatacttaattaaaccaatagcagtatgacactaaggagggtgttagcactactaatgccttttagcaattctcttatttaaactatcttacaaatttacaatttttcgtgaaataaactatttgaattctatcttctattttctatatggctaattaattagagtttcttacaaaattataaaatttgttaaataactataataaacattatcacatgaaaaaatataattatgtctatattgtaagcatatcaaaatactaagaagatgcatccgtatatctatttatagaggtagacctagaaccattattaattacataatcattatctattt

SEQ ID NO: 37690 - DNA, 9124 bp, Cannabis sativa
acaaaaaatcagttcagggtcttatttgtactattttaaaaaatacagagtctattttatcatttaacaaaatgaaagatctaatttctaacttttacaaaataaaatagtatttacccaaaaaaaatttaaggacacaataataaatatgtcatagttcaatgataaaaatcttaaatagttttttttttttttttttctaagcggtcctccaacaagttttttttatttactctttaaacaagtggtcctcttcacgttcttatgataagatggtagaacattaggcttgtcatgcactctttttagtgaatttttatttattttattaaaaggaaaaaaaaaaaaaaaaattggtccaatacctatcccacactcactatccctgtttgtcacttggcatgcgcacattagcataacccgctcatttaaggatattttgcacctttctccgatgagtgcgcacgttagcttcactatcaacaaataatcaaaattaaacctcagaaattaatcaagttatttggccggtttaaagccgacaattcaccggaaaaaggaaaaggaaaaagaaaataaattaaataaaataaaaggaaaagaaaagaaaagcgttacttttatgaaaatccccaaactaccctcccatctattctctccgaaactcattcaaatccgaaattttggttttggatcagccttcttgcgtctgtttctatctctctctcacacattccttgtctgagtggtttgggtttcgcccttctcatcagagttggtctactcgtttatggagttacagaggcgccaagatcagtatctgccggagaagaaaggtcagaagcggaaactggaggacgaaattgaagaagacgaccctgacatctctgtgccgtccggagacgtcaagcaagctttactttccgatgtcggtgtccaggttaatatccttaactccgccttctcttggagcgaagccgatcgcgctgccgctaagcgggctactcatgccctcgccgagctcgctaagaacggtaattttcgaatatcagcatggaaaactaatcctccgatctcgccgtatttcgcggtttttatttggaattttttcgctcaattttaatatttgtttttttttttatacatgaaattatgtatgtgtgtttaattttgattgatacgcggttgcagaggaagtagtgaacgtgattgttgaaggtggagcagttccggctctagtaaagcaccttcaagcgcctccgtcgctcgagagtgatcgtggttcgaagccatacgagcatgaggtcgagaaaggatgtgcttttgcattaggacttcttgcagtgaaggtagctttgctttaccgagtttaagttcatccaattatagtttaattttaaattttaatattatgaattccaaattaaggaatacaattttataatttgatttcatcttctataggagtagttcattcttgtcacaaattgtgtagcttaattgtaagtgaactgtgctgtgctgtttctgtttctagtttcatgttttttaagggaagaaagctgttttccatatatgatgaacaccttaaaactgatgacatttcatggccataatcagatattttgtatgcatcaattatgctactttgaatgctattaatttggttgtttttgggggtaaaaacgcagtttgaagcgttatgggggtaggaatttgtctcaaggattacatatgatattcatgtaattgctgaacattcttcttcgtgttatgtgatgacagccagagcatcaacaactcattgttgacaccggtgctttgtctcatcttgtggatctattaaagaggtataagagtggttcgatatctcgggctgtgaatagtgttattcgtagggctgctgatgccatcaccaaccttgctcacgagaatagtagcatcaaaacacgtgtcaggtttgttcatttgtctagcatttgacctttaattctaattttagcacctttgtatttttatgagaatcggatttgatttacaggattgaaggtggaattccaccattggttgagttgcttgattttactgatactaaggtgcaaagggcagctgctggtgcactgagaacactggctttcaaaaatgatgaaaataagaatcaggtagtaggaagtcctttcaattttgattttataaggttgacctggatgtgaaataatttgtaattccatgaacttgcagattgttgaatgtaatgctcttccaacactcattttaatgcttcggtctgaggatgctgctatacattatgaagcggtatgttttgtttaatggactttctactatgccacctcttaggtgctttgcattcatgttaattgtaccaccaactaattttcatgagttccaggttggtgtgatcggaaatttggtacattcttctccaaatataaagaaagaagttcttctagcaggagctcttcaaccggttattgggttactcaggtacgttttggtgatctttcacttactcaattcagccatcattttaagtattcctcccttgtcttgtactatcctacttatgatatatgatatcaatgatcttttttttttcacaaatactaaaggctatatgttgtatggcagttcttgctgttcagagagccaaagagaagcagctttgttacttggtcagtttgctgctactgattcagattgcaaggtggttaaatcttcctgttctacaatctattcaaagtttatttcccatttattaccgcaacagcaaagacaaataaatactagaatttgcatttcggtcactaatgcagtttttattctgaaactaaataatggatgattgggtctcatccctgattattcttttcaatcctcttgatgctttcgtttgcactttttggctcctttggtttcttaatatttgtgctgaactagtaagactttttgcaggttcacattgtacagaggggtgcagtcccgcctctcattgagatgcttcaatcaccggatgtacaactgagggaaatgtcagcttttgcattgggaagactggcacaggtttctctctttcttatttactatgatccattttgtgaaaagtactagtcaggcataaacaatctaatataattactctctcttttttttttgacaaaaataatacaagtactttatcacaatatttaaagagggagaactgaaatcttgagagaaaagggatcaattttggtgacataagatatactaatttttggtttagacaagttaagtaaatatacattgtataaaagttatatttggttctacatacaaattttctcttacctaaccatgcaatatttaagggaaaagaaactatagcaatttgtatgtaggactgctttaggtgattgccactgcagtattcgcccttggaggcatacttacatttggtatgtgaaattcttaacttcaggatgcgcacaaccaggccggtattgctcacaatgggggtatagtgccattactcaagcttcttgattccaaaattgggtctctacaacataatgctgcatttgctctatatggtcttgctgataatgaggtgtgtgactatacgaacttatgaaccatgaatgcagtccttcagtcagtaaaagattgatgtttaaatgccatttttgatataactttgtactcagcttattcattctctccaataggataatgtatccgattttattagggtgggaggtgtgcagaagctgcaggatggagaatttattgttcaagtatgtgattgtcttgattttatcgttgctatccatatacctttattttccatttttatttgataccttttaagtgaacatttatattttttgaacttttaatttattactgcaggcgacaaaggattgcgtagcaaagacattaaagagattagaggagaagattcatggaagagtgagtagtgtcgtgtagttcctaacaaatcactcttttctattatgtgtcgtcatagattaacttttatgaactcagatgtatattctcttaactcctccatgcaggttttaagccatctcttgtatctgatgcgtgttggggaaaaggcagtgcaaagacgtgttgctttggcccttgcccacctttgttctccagatgatcagagaaatatattcattgacagcaatggtaactcattttcttatttttccttgtattataacactcttagattgcaaacgttatgatgtaattatgaatatattaacgtaaatgcaggattggaattacttattggaattcttggttctacaagcctcaaacagcaaaatgatggggctgtggctctgtacaagttggcgaacaaagccttgactctttctcctgtagatgcggcccccccatcacctactccacaggcaaaacttctttttatcaattgtttgacctgcattaaagttaatttcagttttgtaatcaattttgacttgcacttaaggagtgggtggtagagtaagggtgcacctggcataatctttctgggattacatgtacctttgaagaatattatcagttttctggaagtgaatgatattagtcttgatttcattcatagggtacatgcaaataataaaatgatgttttcctttacataattgtaaaggcatactttgcattttgattcttattttgcataatatgacacaaatttattgcaggtctatttgggggagcagtatgtcaacagtcctacattgtctgatgttacatttctggttgaaggtacaagtctctggcataattaattccgtattactatttgtgaacaagtatcaaattattgtgattccattttctaactttcttaaatttacttctactgcaggtagacgattctatgcgcatagaatttgccttcttgcctcttcagatgcattccgtgcaatgtttgatggtggttaccgagtgagtacttgttaaatgattatttcatctttttaggcacagttgttaggagtggcctggttgtggaatttgcgccttagttttgtggttaagttttttttatgtataatggttttttaaaagatatggccagccataaccttgtggctgtttgcaaggaaagttgacaacttatcatggaggaatgaatggtttatggttgatgacatgatatcattgttgttaatttatcttcatataatcacaggaaaaggatgcaagagatatagagattccaaatattagatgggaggtctttgagttgatgatgaggttaagtaaaacttatgctttcccattttctacaaaatcttgtgttgaaagcgtcagtgatttattggatcaattgtgtacaggttcgtttacaccggatcaatagagatcaccgtagatattgctcaagatcttttaagagctgctgatcagtatctcttagaagggcttaagcgactttgtgagtacacgattgcacaggtgagctaacaatgtttagttcttggcattctaattaactgcttatgcatggttgtctaattaattctatttattttcatttcttaattttaggatatatccttggaaaatgtttcaagcatgtacgaactttcagaagccttcaacgctgcttctttgaggcacacttgcattttgtttatccttcagcaatttgaaaagttgagtgctaggcctgggtatgtgctctctatcttattgtctttcagatatttctttttattcagttagaaagtttgaaatatacaagggcagtatgcagtcattttgatgatattgtttccttaaaagctcccatctttacattttgattattttaaatgaaattctcattgcccaataaaacgaaacttccgttttttcatgatcgcctattttattgaactaaaaaaagggaagttaagatgaaaatgtaagcttaggaaaatattttcttcgttattttcctttttacaccatcttctttttcctcaccataacccattaaccaaattcttgcttaattgtttagtgcaataaataggtctcacacttgttattgttatgctagtctgctgttaatgctgccatgagtttctgaagtttctaatatactggaaaaattgcaggcacactcatctagttcagcgaatattacctgagatccgcatttactttgctaaagcacttactaagcctaacctacataatcagaggccgtagatttcccatctcgttattttgatctctaacaaaatacgttgtacagaaagcagtagatgttcttgttgtcatcattgtcattatgatcgttttcgttgttgtttttgggccattagaaggttctaattatttgttgattgtagctttgcttataatccaattccaaaggcgagagagttgagtgttcttgcttgtctaatttttttttaacggacttgtcttgtctgtgttagtgtctggactctgtaacggactggacttgtagtggcactcttcttggtctttgttctctagtgaatttgacaaagtacatgttgttaaaagtccctacccacatctaaattagttggatgcaaggatgccaaataattagtatttttgtcctgaacatactaacaagttgtgtcctcagtatatgattttattaataatattactcgaaatataatttattttattaataatattactcgaaatataatttttacgtgtctaattatattttatttaattttattgtgaaatgagtgatatggtaaatggtaggcaaattaaatgtacattttttaattttaatgattaggaaactaaaattaaattttttaaaagaaattttaattcacctagttttttttttttactcgtccacaggaattataaattaatataaaaaagagaatattttattctattattcattaatgtaaacaaaagtaaaaaaattaatttgtatcaatcaatcaactactatttattattttactcgttacatgattaaattgaataaaatgtgatggaaatggaattgtaaaaagttatattttgaatgatattattaataagtcatactataaggtacaatatagtaatgcaaaaagttcaaaattcaaatggaaaaaaatattaattattctttgctttaattataaataattagaagttttatacaaacagacgtgtagatggatccaaatataaggaaaaaaaagtttaataataatttaggataaactaagccacttatctcatatgaacattagaacacaatttttcaattgctattaggtacctaaaaaggagaaacactatgttgatgtattgtattgtaattggccagtagttctccatattatatattaaatcaaattgtgtgggacctgatattaaaatgtaccaataacggtacacaacctcttgtagtacttggtaccttatggtcgtttgagtttgcttcaaaccgagagaacatgtgatacagatatggtgtgtaaactgtcgtcgggtcacaaaagtatgaagttgtatgggggaaggaggggtttttttttaaaaaaataatgaaatttataaatacctggaagggcaaattattaattactatagatggacgattactgtcatttcttagaattttccattgagaatctttctagtatcttattgatgtaagttgcttaagaaagtgttaatgttctcttttttctatctttatagatacgaaggccaaaaacttagttaacttctcccaaatctttttattcaataatgcttttattgttgttgttttttttgctttcttgctccttgttgttttggttgtttttgctttagtggtagagctggattagtgaatgtctttctgttgtggcctatcttttgcaatgtccacactttatttgtgcctttggctctccttttgatcttattcttcttcttctaggtctctctgcatgctttttcgtgtctagtggtagttatatcatttccaagctcttaggcagtgtccattcacttttatttggtaatgagtttgctattgtgtcacatgttgctttcatttcgtctgttttgtagtattccgcaacatagtcataaactcgcaatcctcgtttcgagaatacagctattgcatgagcacataggattttatcttgctagaaccggttacattcacatgttttgcatgtccagtaaattgacaaggaatttccctttctcgagcacattcacttggtggagtattagtttataactggttattttatactgttattgaatatctctaatatatattgtctgtatgtatatttatgtttagtgtgttacctcatattttcttgtttgaataaagttttctctgagtattttttctgtcactattgaaacttttgtgaatgttccatgtgcttcattaccttttgtccaaacccattttgtaccaaatttggaagactctctatcattgtagtgatgggcagtcttcttatagcaagaattgttgaatttatcaactcagctatgttggatgtcatcattgtgtaccttctggtcgggcagtggcatctactccaatattttgtatcctattctttccagataaagggtcttaattctgtctattttgtccaagttcttgaacatgttaaacctttcaaatgatttcatgttgtatgttttttcggctttaacaaagtttattgtaagatcttccccgtgtactataaaattgaccttaatgttgttaaacaagtagaatatgcatgctccatggaatatgtttgggtagacttttgctactgttttctttatgtttttgtgccggtctaagatgattgttatgcatgcgagtcaatatttgtcaaatattagtttatgtctattttaaccagtttttttgttattatttttgaaaccggttatttatgttaagtaagtctaacaataataggaaaactcttacactaaagatgatgtattagctgtaaatttttctttgaaccagtttcttacattctatttctccgaatgtttctcttagcttgttgaaaaaccactcccatgatgaatcattctccgagtcttctattccaaatgccaatatgaatatgtggtt

SEQ ID NO: 37691 - DNA, 4154 bp, Cannabis sativa
acaaggccaaacaagccaaattgtttttaaaaacaattttatgtttttataaacaaaaaaaagttttttagttatgatgccaaacatgcactaagcttctggggtttgttttctgggttaattttaggttgtttgaagatttttggttggtttttaagggctggttgagttgttgagaaagtttgagtttaagaactcaaacttggctcaacaatggtagactttgtaatttatgctatatttgcttttaccacttggaatatgtttgttgaggtttaaataggtgttctggagcttggtatgaacattggggttgatttgggttagaaatgagaattattgttttttccaacagaaaatggcataccatttatgaagaaacaatcgaccatttttactgtcagggacccaaaaaatggtcatatatttttttagcagttttccatagtctcatttttttcgtgtttcctcaatatttagggtattgtcatgttttttttattgatagagcaacttctagttttgagtttaggttcccaaaaaagtttcagcaagttgtttacccgttttgcgtgattgtgacatagggccttcgttcagcgcgtaatttccatttaggttgactgacacacttaaatttggaaacgatgtaaaattagtataagatgtgtatatgtatatgtatgttatgttcatattgtactatgtgagttatatactactaacactagtacggttgcagtacagagagcattagtacagtatatgatgttaaggggtatgacacagcgttaccaacactagtacgggacaagtacagagtgcatgtggtacaacactcagttgtactcgaggtgcgattcaatcctaccaacactagtacaggacgagtacttagtgcatgtggtacagagtttgtaattttgttaagaacgttcttgattcatctgaagtcttgtaaataggtgtatgaccgcctagatataagttaataatatgttatatgttttatgcttttcttactaagtttgtggactcacaaaaattatttacatgtgtaggtaaagaaaaggcaaaagttgagcaccaatgagtccagagtgacacttttgtacaacatattttgtatagacattgttcggtcttgggatgacttgggctttcaatttaaagtcacagagtgacacttttgtacaacatattttgaataatgttgtaaattttaggatggaatcccgacttttatgtatgcttatatatatatacaagtttgaagtttaattaaaagtttaaattaagaacgatttttaagaaaatcctttgattagcaaaggcatgcacaacaattagaaaatcattgtagcagtcctaatcaagtagcatgttacatctatttcctagattttaatgtctccagtagtaacttcagtatcctccctaggaggtttagcttggtccgccccagccatgaaaaatagtcgaggaatgtgagggtcagctaccgaagttttcctcaatgtctgtttggttttcaccatcactccatgtctaggcagcagttttaactcagaagtatgcctcgcaatagtaacatcgatttctactaatgcagtgtgtttttctgtaggctcggttctatcctctagcagtgtgttaataacaccatctctaacttgtaaagaagcaggtagataatgccttcagcctctgttcaattcctaaataaacatgacgtatccttctctgcttatccggtcagggtagtatgttggaccgtggccttcgaagactctgaggagtcactactgatttcccaatagtcaaaactcgaggtagataaacttccaccagatgaagatgagtctgcacagattctaggatgggaccaatgaagaagatggagaaggtcactattgatttagtggttacctcccagtaccagggttcatctacaaaagaagaatgacaaaaagatgagaaccggccaaaggtacaaatttttagagggaaaaacacatatggtgtgccgaccatgttgattcaaaagaaacaaaggaggaaatttcattcaaataatgaaattcacaaatcaagaagtttaaggaatggcaaaaatagcaaagagaaattagaaatttggaagcctgaaagtcatgtgcgtatattaacatcaacaattaaaagccctaatatctcatagcctcagatgatccaaaaacggtttcgagaacccaaatttttttacagaataattcaaagcagtcatgcatgaaattaaaagaagtagaatggtgaaagaaaacttactcaatgtttgtagattctttaaagatgctcctagatggcttcggtggtgtgatattccagcaataactccttaaagatttgagagaaaaggaaaaaggaaatatgtctctaattatgtgagaattaaaatggctaaaaaaagtgtcaaggaaacttaaatctctttttataagtatttggaggggtaatttagtaattcaaaatttgaattttgggtatacccccaaaaaaggtcagttaatactcattataaaagtacaaacatcacgcatgcggtacctggcaactgtcactgcatgtcttgaggtccactttacaagacgtcattaaattccccaaacatcgaggagaaaattgatcagtcacatcaaatcaagagtaatgtaaaggccacacacatgtcacccatccaatcagcttagtaaccgaataagtccacatgtgacctggaagttcctgtgtggacttgggaagcaaatgttatctcaatttctgcacaaggtgatgtgacatccactagcgtgacacgtggaaaagattctatggcttaaacgggtagctccccttgagatgtgtcatccagagtgatttattactagtaaatattcaatctacagaaggagctaagaatgtccagacagagcacgctataccatccgaccagcatccatcatgcattctgctcgcatacatccgaccagagaatgtgagttaaatatctttagaggtatgtttcatgaatcctcgagcgtgcaagtcatgatcgtatcctaaattttgagggatagattcgcattaacaagaaataagagaaaacatgtctagtttcctatttaattttatttgtttaaggaaagtaaacaagttttccattttaatacttattagttttgggaaaacaatttgatgtaactctttcatataaatagtggaactattttactattcagggacatgaaattagagggagaaactagaatcgtagattcaagagagaaatactcaaaaatcattgtaagagcttttgagaaagatcaagaacttcttgccatttgcaaattgtgtgtactatttaggaagatatttaaattcaaaaaatgtttctattttttattttttttttcataagaatcttaagtgcattattacatatgttattagttacaacgacttggttattttctttttcaataatttcaaaagtccattttagaattgattttgacgtgcactgtaatttatttgcaatgattcctgacttggttgaacatatcaaactatctaagcagtgaaaaggaaaacttgtaggctacaatatttacatttttggcaagaaaagaagggtattctacgattaaaacgtagatgtgattcatttctaaaaaaaaagaaacctacacagctctttttattagttgtctccagctaattttaagcaaaataagtagagtttattatcttttttttaacaatgaaatgatagcctacaaaaataatggaaaaaaattcattcaattataaaataaagggaaaaaaggacaacaacaacaacgataaaagaaaaaacaaatttgaaagcttagtcgagtcgagacctgtcgatgatgaaaccaccacctcacgcctggaaaaaaaattagagagagaaaaaggttgagcgagagagagagagagagagagagagaaagagaaagagatcaaacaagagagagagaaagagattgaatgagagagagagattaccatggtaaaattttgtttggggcactgtcgatcagacagaggtcgtgttcaggctagtggttgtgcggttgggtcgtgcttcttggctgggcgtcgacatggag

SEQ ID NO: 37692 - DNA, 5591 bp, Cannabis sativa
aacaatctcaatagttaagggaaatttttaacgacaaaaaaagttcagggagcacgattaagtacatgtcaaagttcagggggaaaaattactgattagcctaattattattgtttttaaaatatcaatattaaaaggttatacagttatagagcatcatcaagcatgtggaaccgcgaattgtgtaaacattctggttagctttttctttctcttgtcggtcagactctactaaccctttctttgagtttggttgggggtctgatcaggagggccttttttgattgagtgagaaatttttcggtggtgtttggctagtctaactaggattattaaatttacagagtctgttattatgtaagagatgttaatgcttaactgtcattaacggtttccgttacttctttttccttttctttgggttgtgtgagataggtggttaggttagttagttcctatttttcttctgtctctggtttagcctcttgtatatattgtcccctatttttattcttagatcattcaattcaataatacaaaatctctttttcaattctacattatggtatcagagcagggaaagatatactttccctgatcgatcctattaactccggtctccttctccggtgctgacgtcgtgttcttgtctccttctctgacattctgctcatcgtgttcgtatccctgttctctgtgtttcattcatgtcgaatgaaactttgtccatagctcaaatggaaagtgaagatcccaactcaaaatctgttgatagtccttctgcttctactggacatgggaatcaagatctgcaattcatcaatcaaaagaacccgcttgaagatccttcaaatccgtattacttacaccatggcgacaatccaggtaacgtccttgtctctcgacttctcactggacaagataactatgcttcttagagtagagctatgcaactttccatatctgtcaaaaataaacttgggttcttggatggaactattcctaaaccaatgatctcagatcatactctgtataatgcttgggtgaggaataataatattgtcatttcttggatattgaattctgtatccaaagaaatttcgtctagtatcctatatgatgaatctgttgccaatatatggaatgatttaaaggttcgttttcaccaaagaaatggtccacagatttataatcttagaaagaacctaatgaatttgagacaggaaggacaaactatcagtatatacttcactaaattgaaaaccatttgggaagaattggccaattataggccaaattgcacttgcaatggttgcacttgtggtggagtaaaaaagatgcaagaacaccaccacatggagtacataatgtccttcctcatgggactttcagatagtttttcttgagttcatggaagtatcctttcaatggatcctctcccagatgttaatcgtgtcttccatctagttactcaagaagaaaatcagaggtccaatctcactgcaggaaacgatccaaacactagtcatgcctttgcttttcaaggagacaaaggaaacaagactgataatcaaaaccagaaaaaccaagcttccaagaaaggaagacccttctgcactcattgtaacattcatgggcataccattgaaagatgttacaaaattcacagataccctcctaatttcaagtcaaacaaacaaaaggaaggcatggcaaaccagttttataccagtgaagaaagtaaaggaaaaatagaggaagctcatactcttttgcctcaactaagtgccaatcaatatcaacaactccttaaccttcttgccagtcaacaaaccaacgtgagtacaccttatcctagtactttgataggtaatttaggtataattcttacctatgcttcatctaagttctttgacacatcttggataatcgattctggtgctaccagacacatctgtaacaatcctaaaatatttcaaagcatcacttgcgtgtctacaactaagttaatcttacctaataatgaagctcttatggtaaatcaaggtggtactgttgctatttctaaacatctaattctcgaaaatgttttatatgtttttggtttcaaattcaacataatttcagttagttgtttaactcaaactaatgctattaaagtcaagttctatactgataatttttgcattcaggaaaagcaatccaagaatgtgattggaagaggtaaagaatggaatggtctgtatgttctggaagatactcagattgatgcctgcaacactactattattgctgatatgtggcattgtcgtttggggcatccttcccataaacgacttgctttactttgtaataagattcactgtagtgttgacaatgttcataaacaaactccttgttatatttgccccttgaccaaacaaaagaaaattcatttttctaaacatactggttttgctaaatccaagttttatttaatccattgtgatacatggggaccttaccatattccttcacataccaatcacaaatattttctcactcttgttgatgataagataagatttacttggatttttttaatgaaacagaaatcggatgtcatgcaaatcattcctaaattcttggcttatgttcaaacccaattcaaatgtgtgtttaaatgtttctggtctgataatgcacctgagttaatctttaaagatctcttttcaaaatttggtatcttgcatgaattcacttgtgctgaaactcctgaacaaaatgctatagcagagagaaagcatcaacaccttctaaatgttgctcgggctctatattttcaagccaaaatgcctattcatttttggacagaatgcacactcactgctgcttacctcataaaccatatcctacccctaatcttgaaaataagaacccctatgaaatcatttttgataacttacctaagtatgatcatctaaggaacttcggctatcttgcttttgcaagcacactcaatgcacacagaaacaagttcacaccaaggactagagcttgtgttttcattggatatcctcaaggcataaaagggtacaagttaaatgatattaatattaaagaaattttcatttctagaaatgtcatttttcatgaaaaaaatatatccttttcatcgtttaaatattacaaaaaattacattgaccctttttctaacatggttcttccttctcctaatatatctaacactaatgttgatgattttcctgatattgttaatgatagttcctgcactaatgactcttctcaagattgtggtattaatcaggactttgctgctgatgatgaacatacataacaagaacaagacgttgagaatgaaaatccttcaattcagccaaaagaaatacctctagtccccaggcgcaccagcataatcaccaaaaagcctgcatatttgcgtgattatgagtgctattctgtactccaagacaaaaattctacacctcatatacttgaaaaaattttgtcatatgaaaaactatcttacactcataaagcttttatctctgtcataacagccctctttgaacctgcaacttacaaccaagcttctcaattgcgaatatggaatcaaaccatgcaacaggagttatttgctctgctaaaaaacaagacttggacttatgttcgtttgcccccaaacaagaaggctataggatgtcgttaggtgtacaaaatcaagctatatagtgacagttttttagaaagacacaaagctcgtcttgttgctcaagggtatactcaacaagaaggtttagatttcttcgacactttttctccagttgcaaaaatggttactttcaagctattattagccatttccaccatcaagaaatggcatactttgcaacttgacgtaaataacgccttcctcaacggagacctcaatgaagaagtctatatgcaacttcccaaaggacttgttcttcccccagaaattgctacagattctaacatggtgtgcaaactgaacaaatcaatatatggcctcaaacaatcatcaagacaatggtacaaaaaattgtctgatgctctaattcaagaaggttttgtccaatctcaagctgactacactctatttactagaggttcacaagacgatttcattgctattttggtttacgtggatgacataattctcacgggtccaaatctgtctctcctaaacgaactatgatctatcttgaatgataaattttctctcaaagcactcggcaccctcaaatattttctcggatttgagatagctcgtgcacaagaaggcttggtgttgtttcaaagaaaatacaatttacaactcttggaagacaatggtttcataggcagtaaacctgccaaaacccctatggacccaagaatcaaattggatgatcaacaaggagaaccacttgaagacccctcaacatatcggcaacttgtaggtaaattgctatatctcactctatcgagacctgacatcacgtttgctgttaatttactcagccagttcatgtcatctcctcgaacacctcatctacaagcagcacaccatcttctacgatacttgaaaggaagtccaggttaaggtctaatatactctgctgcatcatccctcaatctttgaggttattccgactttgactgggcctcctgccccattactcgtcgatcaaccacaggattttgcatctttgtcggagactgtttgatttcctggcgcactaagaaacaacccactgtttcttgaagctctgctgaagcagaatatcgagctcttgcggcaataggcaatgaacttacctggctgcaatacttacttcaagaccttcaaattccccaagatcaacctgccttcatatactgtgataatcagtccgctatccacatagaaaacaaccaaacttttcatgagagaacaaaacatattgaactggactatcactttatccgtgacaaaataaccaagtccaagctacgtctcagccccataaacagtaatcaacaacttgcagatgtcttcacgaagcctcttgcttccactattctcaactctcacataggtaaaatggctgtatacgatgtataccgtccatcttgaggggggatattaaatttacagagtctgttatgatgtaagagctgtttaatgcttaactgtcattaacgatttcgattacttctttttccttttcgttgggttgtgtcagataggtggttaggttagttagttcctatttttctactgtctctggcttagcctcttgtatatattgtcccctgtttttgttctgtgatcattcaattcaataatacaaaatctcttttcaattccgcattaaaaattcttctttgtcttagatgagttgtctctgatctggtttggtggttctggattgtggtctgatttggtggtctcttcctcgatcttgttgaatctgatccatgcgaattggctgtacaatggtctctgggtgggttcttccattcatggtcgcgtatttcccagtcagtcctaatctataatctaacatcctaaacatgaatttcctaaaataataaaataaacaca

SEQ ID NO: 37693 - DNA, 2255 bp, Cannabis sativa
ggttcgagtattcagtcactttggttgaatgggcaaatgagtactaataagcttaatggaactattgatgttttacaaggcatggctaatttaaacgatgtttggcttcatgggaatcatttcactggtcctataccagacctttctaatttgacacagttaacagctttgagtttgagagataatcaatttacaggtattgttcctttgactttgataaatcataagagccttaaagttgttaactttacaaataatttgcttcaaggaccaactcctaagtttcctagtggggttactgttgatttgagagctgggagtaatagtttctgtactgatgttcctggtggttcttgtgatcctcaagttaatactatcctctcaatcttggaaccatttggttaccctgcaatttttgctcagagttggactggtaatgatccttgtcataattggaaaggggttacatgtgtggaaggaaatattactgttgttaattttcataatatgggtcttactggtacaatttcaccagacttttctaagcttgtatctttgaaaaaacttatactgtcagataatcatttgggtggtactataccaaatgagttgactactctttccaatcttgaacaattggatttgtctaataatcaactttttggtaaagtaccaagctttaaacaaaatgtgattctgagcattaatgggaatcctgatattgggaaggatcaaagcagtgtccctccttctgggaaaactccaggtggttcatctgaatcgccagatgggtctggagggaatggcggttcgggaagtggtggtaagaaatccaatactggggtggttgttggagctgtagttggaggtgttggtgggttggctgttgttggggctgtggcgttttgtttagtgtctagaaagcctaagcattctggtagagtacaaagcccgaacacattagtattacatccccgacactctggagatgatgacactgttaagattgctgttacaaacgccggggctaatggcagtgggagccaaatctatagtccgtcgagcagtggatgccatgatgttcatattgttgagactggaagtatgatcatttcaattcaagtcttgagaaatgtgaccaacaatttcagtgaagataatagacttggacagggtggatttggaactgtttacaagggagaattacacgacgggacaaagatcgcagtgaagaggatgaaccctggtgtagtggctgataaaggtttgactgagtttaagtctgaaattgctgttcttactaaggttcgacatcgccatttggttgctcttctcggttattgtttggatggaaatgagaggcttcttgtttatgaatacatgcctcaaggaactcttagtaggtacattttcaatcgcgaggaggaagatttgaaaccgctcgattggaagagaagactaaccattgccttggatgtggccagaggtgttgagtatctacatggtttagcccaccagagttttattcacagagatcttaaaccgtccaacattcttcttggagatgatcttcgggcgaaagttgcagactttggacttgttcgtctagccccagagggaaaagcatcattcgagacaagacttgctggaacttttggttaccttgctcctgaatatgctggtatgtgtttctaaatgcttttggttttgaactaaaaattacatttttttaacatgatgttagcttaagattaacataaacttaagaacagaacacccaacttgttagcagcaattcctttgattttcttgtctttaattaagttgttctgttctgaagttgacatcttaaactaaagtcaacccatcaatgagaaagtgaaatttgaaaatgatttatgctagtgagtttaaagaggaattgtctcaaaattttgtgaatgtgatttatgatagtgactttttatgtaatgaacagtgactggaaagattactacaaaggtggacgtatatagctttggagtgatcctaatggagctaatcacgggacgaagagcgatcgatgaaagccaacctgaagaaagcctgcatcttgtcacttggtttcgcagaatgcatatgaacaaggatatgtttcagaagctcatcgaccctgcaatagatcagcaagacgaaattgttgatagtgttagaaccgttgcagagctagccatccactgcaccgcaagagagccttaccagaggcctgatatggg

SEQ ID NO: 37694 - DNA, 2211 bp, Cannabis sativa
taattaaatttgaatatatacatcaatagctgtgctttgtagttctaattacgtaacacactatcccgacataaggcggtatacttactagttactgtcattgtgttaatatagtgttggcattgagagtgtggtggatgagaagaatggcaagttttccagcggtcttggtgatgcctcgtgctctgtttgtgagatggcagttgtgtggatgcaaaaccagttaatgcaaaatcagacacaagagcgcatactgaactatgtcgatgaggtgaagtgaattctatgatcactctttcaatgttttgttataaacatcacttgtggctgactcaaattttgttttactatcccagctctgtgacagaatgccaagtgctaatggagaatcagctgttgactgtggacgcctgtcttccatgcccaaaatttcttttaccattggtggtaaagtctttgacctgctaccagaacaggtatggcagcttctcctcctgttatggtgaaatatgtttcccattcattattagagaagtggatgtatttaggagagtttcaaacttactttaatatggttatgtttcatttcaactgtattttgtttctacttctaacttgttagttgtactaacttgtttgaattaaatatgaacttttgttttgttttttccctggatggtataaatcagtacatactgaaggtgggtgagggtgctcaagctcagtgcatcagcggcttcaccggtttggatgttcctcctcctcgtggacctctttggtattgttatatttctcatcactgaataatccccatgttaaagtttggtggttaatttgtttttatgattctcatttcattttttttgacccgatgtaggattttgggagatatcttcatgggtcggtatcacaccgtctttgattatggcaaattaagagttgggtttgcagaggcagcataagaaatcctttttttttttccaatgaataataacctttgtttagtatcccttgtgtacctctgaaaacatgattgatgaggttgatgggtggagtgtttaagatgtttggtctttggatgaatatagtgcctgtaaatatgtatgtttggagtttggttgtctctttttatcaatacatatttaaaagatggagtttgaatggaggtaccttaagctgtgcattatattctactctattatgaattctctctctctctctcacacacacacacacacatcacctgtaaaaggtagacatttcctatcaaacccaaaagattgcttgataatgaagatgcattgatttgtcttcaattcttattacagacactcataccaatttcaactttttaattagctcaatgaataatagccagtcttgtcttatgtattgacacgattaaacaatgtatactcaataatatattcgaggcaatatatatatgatttggattattgagtggatgaatagaattaataaatgatggtatcaaataatgatgttatccggaagtggttacgtgaaaagactattcgatgcttaagatatacagtgttctcattatcacaacaatacaatcaatttttttgttataagaaaaaacaaaaaaaaatgttttttattcaatttatggagattctataacttatcaaattacatattataaattggtgttctgacttctgatttatttctaagttaagcaatacagatattcttttagtataataacatggattcaaatcccttctccaaatattaatgacataaattggtgcctaattgactgattttgatgaattaatatctaaattaatttatttaacataaattgagttcaacagtatagaatcaatttgatgagttttttttttcttttttccagcaaagtccaccagatgattggatactggatactttttttattttatttttcaattttacgtacaagttaaaacaagcttctacttttttttttctgacatttggaatggggattctaagaatacctttttaaattacaatttaaataattacaaaaatacagatgagcataaacgtaaatacataagttatttttctgtaatttttttttttacaaatttgcaaacaaattaaaaaaatataactaaagtttacaaatttgtaaccaaatgtaaaagtttataactatatgttacactttataaaccattttttataactgaa

SEQ ID NO: 37695 - DNA, 4103 bp, Cannabis sativa
atatatagatacatatgtatatataaattaaaataacccaatatacatatataataactaaattgtgtacgaactaattaaacttgttttaaattaattttattattataattaacttctagaatatatatatatatatattgttttaacaaatttaatatataattacaccaaagtagtatttatatataaatataattacaaaatttttatcatgggttataattagtagctacttataggtgtaatataattttcacaaattactgcacacatgaataaagtggtcacacacacacacacaacacaagtttctattttttattttttttataaatttaatcatactaaatatatattcttatataatcaccgacctatatattaatgattttatttgatcatattatgtatacgtctatatatatatttatattggtatagagagcaaaggaattaattaaaatgaagatttttcgtcaaatattatcttattattttttttaattaacttaaaaaagacacaatgcgagttttatgtatgctttgtcgatctacattatatataaaaagaaaataatactatatatttcaagcactattattatttttattaattgcaatggtttttatatacatgcatttaattattaattaaagaagaaatatagaatatatttcaaaaatgatattgtaggttcatttaccgaacaccaagattccataatctattataataaccatcaagatatgtatgaaatatattctattatatatatttgttgcgagaccaaattttaatatccatataagtggaataagaattttctacgtacatccacaaaatgatgtttttattattgtgtatataatattctatttaattttaattaatttattaagaccaacctatattatatcatatgcatgccatgactactagtaagattatatataatgataaaattattatagggtttttatcataacatacatacaccgaatatgatgttatacgttataataataagccggaaatacaaatataaaaatatcatttctcatatatatataattataacatcaatatgtaaatatgttttgttaataatggacgtgacaaagtctatcatgattcttcttctagactaattaatatggtataatagtgtttacatcatccactaattgatggaaattttatattgcttattccatcaaaaaaaaattattacttatatatataaataaataagagatgataatattaagttttctattattagctagatagattctaggaacaaccactaattattccttctctcattttgtttattatattgcttaagaaaaagatcctttttggtatatggagattttcctttgcgtttatgggattatatatatttgtatccacatgccacgtatttttataattattaggtaaaatagatatataaataaatacatatcataatctaatccttattcctagttacaccttagccacaaaggcaccaccccatatatataaatcataaaaaaaagctttgcctttcagtctctctcttgttctagaccgttgtctttaggtctatctcaatagtcaaaactattggtcctttgacttcaaatatatatataagaatgaaaatgagctcatgatctagacatcacgggtattaattttggacccattttgaattttgttataattaattattctgtggttttatatacaagaatatgatatatatatatagtaggtaattatatatggtctctaagttaagaaaaactataactttgtatttgttttgttgagtgtaatgtggttaaatatatggcctttttggaaacatatgaaaatgttgaagcaaaccatgtacatttatttatctatggccttttctttatataaatataatacaaataatacatatacgatgataaccaaataaaattctctgtttttgtttttggctttttgctaccaaaaacatccatgtaaaaccctagattagagaagaagatgtatatatatatatatatatatgagtatgaatgggtccatataccaaacccaagcccccgctgactttttttctttattttcaagtttcaggaagattgacaagtgagaacacttaaccgtagattgcggcaaataaatataataataattattattattattattatatatatattaaaatacgcgtgattttatataaatatttagttaaattatttatttatttaaggtagtgagtgagttagaatattggtggcactgcacatgatgagtcaaagtcaacaaacaattttattagcctaaataaaaaaataaataaaattgtggaaagctaaaaacgcgtatttaagagaaatggacaaaaaggggttttggattgggagagaaagagaggacaaatcagcctaggcttgcgtgcacgtctctacttttttttaatttttactcaaaagataaaaagccaaaaacttattagggtttttgaggttctgctttttggggcatcatagcatgattgcatgggaatgggaggtaataacaatagatatatacctctttctctctctagtttcataaatatttttaagaatcatgaatcttttggacaacaatgtgaatttcattttgtacttgctcacaattactcttccttaaatactttgcttaacttattaccattcatcatggtctttctttagttaaattattacttctttacttatagatagatagaattataaaataaatataaattttttacttatttttattgtttagataattattatatgaatttttttttttgataaaaagtattttttaaaatatttagttatcattaaaaaaatatctttcataagtaaattaggaatgatataaaatattttaatttttaaaaaaaaaacttctcaaaaaaatacttttgggagaacctacaaatcttagtttcttccgaaaacttttaaattaaaaaatgaattttaatttttaatccaaacacccttagaattttttttttaattttaaaaattaataaagaacttacagaaactaagccaaacagagccattcttctaaaaattactttttagtaactagctacattgtcaaaattgaaaagtgtcactattatattgataaaatcatttaaattacaaaaaaaaaaacatacatatgggttagaataaaatctattgcgaaatccagaccacttgtggcttctatgatttgcaacatatacaaggaggaggcagtttgaattgagatgtattgtcaatgtttatgcagtaacttataacttgtattaatatgtatacatatatatatgtacaaaaaaatgtatgtacttgaactcaatatccatagaatagcatatcatataacttaatttaaccaaacatgataccaacttgttaatcacaagcttataattagccaaaaaagccaagttgtgattcatgggccatctcgttagcttgaatatatatatatatatatatatatacacatatatatatagaatatatatgagaaaaaattataaagaatgtcagaatgaatatggggccaatggttgttgctaaattataaggtctgaggttgatcaggatgactacaaaataaaatgccaaggaagatcattatcatttaccaatttatcattaaataaatgggggaccctattatatatccctatctcaatctgaacaagaggtcaactaatataacccttgaaataataagacctctcttcacctatatttgtttgggtacatatatggactcttgaccaggaccatgacctttaaatatcaatcctcataagaacaacaagaagaaaaatatctcattagttgttatggtggatcacaacacctatctatataacaaaagtagtcccaaaataaagaaactttatttaaaaaggtttttaataattccccaatatataaatggctgcaaaatttagtgtcattctctaaaacaatttgagactaacaacttttagatcaaaaaagtgtttgagattgaagcttaattttatccacttgtgaatagttttttt

SEQ ID NO: 37696 - DNA, 4585 bp, Cannabis sativa
  modified_base (4537)..(4540): a, c, t, g, unknown or other
agatagttagggtgttacaatgactatcgaaagagatgtagtgagatgaggagatgatttttcttttgatgttgcttgagagaaaggaaaaacattttcatcaaagagtacatctcagaaatgtagagcctaccatctttagctaaccatttatatcatttgtgtgatgagctgtatccaagaaatacacaaggcatagacctctattggagtttcaaacaattttattgcttaaaatttagatagcaaagacacccaaaatccctaagcatattataatctagttttgaatgatagagaacttcaagtgaagacttgaattgaagctgtggggttggcatcttgttgcttaagaacactacagttctgtaagcttcatctcagtacttgagaggtaaagaggcttgaacaagtaaggcaagacaactctcaataatgtgcctgtgcttacactcagcaactcgattttgttcatgggtatatgaggacaagataccctaggaatgattccacattcttgaagaagtgtggtgaaggcttgatattcactccaatcatactgaatttgcttgatcttgaaacctagctcaagttcaacctgattttttaagcttataaaggtgggaagagcttcattttcggttcttaacatgtagatccaagtatgcctcgagtaggcattgataaagctgatgtagtacttgtatccacttgaagaggtaattggagcagctccccataggttagagtgtagaagctacaaaggagtataaaaaacagtttatgaaataggaaaatggagtttatgatgtttaccaaggcaacatgcacacatagattagaacaaccactttcaattttattgctaactttgatattacaattgtttaaggcattatggacaatcttaccaaaaggatgtctaagcctattgtgccataaggaatacaaaagattcattacacgaatcttagtaggattatacttatgtaaagacacattagtacgaattggagtgactggagtggttgatgtgagctgaaactttgaggagggaaattgagcaacttgaagagagtaaaatttgtagagacattgatcaagcttcccaaccagcaaggtcttccaagtatcttgctacttaacacaacaatggaaggggtgaagctcaagaagcacattattttctgtgaaaattgagaaacactaattacgtaagttcttagtaatggaaggaacatgaagaaggttttgcaaaaaccaaatgatgattagtgttagaagagtgaataaaggtgtgatcgatattcttgatttttaaacatgtaccatcttccatttgaatatgttgatcaccattgtattcatttgagtatgttaggttttgagcattgggtgtgagatggtgtgttgttctagagtctgggtactaagcagaccacaagggtttcaggtgatcattttacgattgaggcatctcttcatggttggcactacctgtaaaggttttaaaggtttttgaacctaaaaaagacttgttgaagtgatagtaccaagctttaacagtatgtcccagcttatgacatagttaacattaaggattttggccccatatcctgagtattggccacggctatgagggggaccacctctaaatcctattttttgaccacgacatggagcaactccatacgattgtgtttgatttgtaaaaggaacaaagcaaagggtagtgattagcagagtacggtctagggcatgcagcaggaccactcgatgaagaagcacctctgaccatagaaggagagtaattaacaaagtaatgaggaatatgtggtgaagcaaaggtacctctacaaccagtgaagggcttcatgtgagcatgattttcctctggtttgttaatgtaaaattcttctaagcctttgtccaatcaaacctcctatgccaagagaagagctcttatcttagccactgaatactcattcaaccttgtgttaacagaggcaatgaagacatcatagtccctggaaagaccattgaagatggcttcaatgcgatcctatgaggacatttctatgcccgatcgaagccaaggtgtcaataattttattaatcttgagaagataatcttcaagagtcctttacattcgagtgtttcgaagaagagttatgtactggccaatttttactctattcaagactgtgaagtgttctttgagtatggtccaaatctgagttgtcgtttcgcaccagaccattttgatgagaatcttttttcacatggaggagggaagccaataaatattcacattgtcctatttttaccaatcctcatattcatgaatgattctattagttgcacgatcttcagttgagaggaattgtggtggaatgagtgctggatcaagaaatcgctagagtcttcttcctttaatgatggtgaaaacttagtgtctccaagagagatagttgtgttcatcaagtcttaccaagagtgaatgagaaaaggaaacatgagaagttttaggaaaaatactgatgtttgaggttgggatgactgattgagaagaacctccattgctgccaccaaaggaagaagccattgatgtttagatagagaaagataaaagctctgataccatattgaataatagaatctaaaattctggaaaaaattctattctcattaactattgtaaagctatataagaatttttatacaagcttaagcaagctgagaaatatagaattgaaaataacagaatggccaaggagccaactagccctgacaaactaagaatcaattacaacagatgactaactaaaaccttatcccttgacaacaagtacattcccatactcatcatgggccaccatgtcgagctcataaataccaccaactgcatcaagagcaacgacaaggttcattttgcactttaccaagatagatggggaaccccgaggctaaactagctccactctcgtgataacatcaataattattcttgcctgattagctatttagaaagatgttaattaaataatctcctgcccaatcaaccaaaagcaagcttatgattaatatttcttattacttaggcttaaaagatattaatgtagtttaattttttttaagaatttaacaaagaaaagtacaatacaaataaacataaattttttacttctctagcaacactttagaggcttagataagtcaacaacaaacaaagtgagaatatattatttaaatataataaatagatatattttggagtttagacctaaggaatcgtattattatgcaattaggaaagaaagaatggaatataaatatgttgcacatcaatttactttgatacgaattaaagcaaaaacaaagattttttgtttgttagtgattcatgctacaagctaaatttcttattagtacctaattaataaaaaaggttgtatataatgtaatataatataataaaataatatcattatttctatgactaaaaatcccctatgctctaattttctttattttaattaaattaatagcgtcatcactgatcaagtaattaattaattaaatataataatgtaggaatatacttaatatatagtaaatgaaaagaattcactcactctagaaacccatgcatgatatgagaatcattctgatcatatctttagatttcgatgttaaaaatatatatataaaaaaaaagttacaaaaacttcaactttcaattgatttgtcttttgagtatttgataattgtgcatctttattacacataaagtagctaggaaattaaactaaagaaaaagtaaaatcagttgatattaataataatttaaacccattttgtgaccattaccaaccaaataataatattgtatttgtatattataagagaaaatttaagatggtggcactatgcctaattatatatgtactaaaaataataattatatatgcatgtaatataatgtatttgtattgtattttggctgttagttagatcatgggtagttgttctaattattttaattatacataaatgtgtatagataattaattaattaattagataataaagtttaattagtttgattcgaacacattgcctcttcgaaacctacagggacaagagtgacctcaaccccttaaacttggatcagacacatattaatcaatgcccccttataacccttaataataatatgtttcctatttgttatacactgtactgttttttttttttttttaaatggatactatactgttatgtaagcttgtttattattattaattattatttcatttggtacaaattcattcacatttatttaagtaatttttttttctttttcgaataagtagttaaaaggcatatattctggtgaggtctaactattgcatggaaaattgggaggtaagctggagagatctattggatggattaaaagcaaattatgtatatatgcagttgtcatctgcataaaaagtgcatgcgtataaaaggaatatatatatatatatnnnnatatatatatatatatatgtctgtgtttttttcaataagaaacac

SEQ ID NO: 37697 - DNA, 5804 bp, Cannabis sativa
gttattaagctataaattattaaagttatctttcaagtttattaatttaaaatacgggcgttacaattcccttttgaaaaataagtatatttcccataatttgagtaaatccattgatcctagtaatttattactaaataataagaattttgacacacatcgtgtatcaaataatgggaagttttcttttagaatagtgcatggggatgctgaggttgatggagggtctactggtgttgggtataatggtttggtgaagccttctgtaaattttagtggctgtagtggctcgggtgggattgctacacagtctatgaatgttcacgtagaagccatgaaagtcatgcatgagggtacgtccattttgtctcaacattcaataaaataaaaataaaaataaggtttccttcatgacacggtaggggccctagaggtgaaattgaagagtcctacgaaagttttcaaacatggtctcaaggagatttatgggtctcatatttcaagttcagataatcttcatgaagttttggtgacttcggttcattttgattgtgtgatggaggaacttgttagtgtgatgatgtcctcgcttttccctactgtggttgtgaagaatgtcgtgattggttttgaaatgatagtccttggcaaacatggccactaagcattatggattatttatcttggaacattcagggtcttgggaatgacatgtgaaataattttcttctgacattgttttccttctcgaagcttttgttacccattcaaccttagagcttattggtgtacgtttggatttcgttaggaaattaatggtggaaaacagttggtcatagtggagatttatgtttattttggtataataatgttgagatggtgttgaagggctactctcgtagttatattgatgttatggtgtggtctcatggggtgttgtggtggcagtgtgtcgagttttttggataacctgatgttagctttcatcatcaaatctagtgtttgatggaacaattagctgatgggttttatggtccttggatgggtggcgaggatttgaatgaaattcttttctctcatgagagaagagtgatggggatgatcggtctcctggccttatggatgggtttcctaaagctctttctaaaattagtcttgttgatatgggttttgaaggggctcgtaaaagtgtaataaacacaatgatggtacttttttgcaatagcaacttgtacaatagtgtgtaatactgaatggtactcgttgttccctaattattttgtttctcatttgaagctttatggttcataccataggccattgttgaaccatttgttacttgattttgaggctcgtaaacaacctcgagtgttggtttgttttcactttgaggtggcttgggccgatgaaggcaagtgtcttgagttggtgtcaaacgcttaaatggcagattatggtggtgattttttttagattcaaaataatattgataatgttactcatgtgttgaaacaatggaatgggaaagttttcaagcgaactcggggtgccattaaaaaaaaggaggtcgagttggtgtctcttgatctcggtttgaattcccaaacatggcatatgtataagaaactgaaaaagatcttgacactttgttgtataaagatgagaaatactggctttgagagcaaaaaatttatggatgcagttggatgataagaattttgtttttttccatcaaagtgatacttatcaaaagaagaagaatctgattttgggtatcattgatagtagcatgctttgggtggaggagcctcgtggtataacaaatgtgttttagtaatattttggtgtcttgtacacttcacatatgccttcattggaaaccatggatcatgtgttgtctacgaccccttctcgggttgcacatgacttgaataatattttgatgaggcccttcttggaagcttatgtgcgtgttgccctgttctaaataaatcctaataagatctcgagaaaagatggtatgggggtagacttttattagaagttttgggatgttgttaatgatgatgagtgtcaggtgtgtttgggtttcattgacaggtccgggtcagctgcttttatcaacgtgacgattatcactttgattcctaagtaaaaaaaaaaactaagttagctagttaatttaaggcttattagtctgtgtaaggtgatttacaagattgtggctaagatggttactaataagtttcatgaagtattggatgatatcatttcaaaggagagagtgccttcattcctagtcgtcttattactgataatgccatgattggctctgcgtgcttgaatgttattaaatgtcataaaaacggtaaggaaggtttccttgcttacaaggctgatatagcaaagacttatgatcgggttgattggaattttagtcgagacatgatggtgaggcttgggtttcattaaaggtggattggtatgattatgagacaatattatcatatgttgtgattgttaatgtgaacatcattggtaatataatccctacccctgggcttagacaaagggatcctctctccccatttctttttcttatttgtgttgagggtcactcctccattatcaagcgcaagattggtcaaaatactattgcggggctggtttgtgggaggcgtagtctaatgatttctcattagttgtttgccaaagataccttcctcttccttgaagcaactcaggagagttgtattcgattttgggagattcttttactttatgaagatgcttcaagtcagctagtgaatcttgatgaatcaacggtgtgtttctctcctcgtttcttagggatctgtgtattgctttggctagtgattcgggtgtttctctagttgtcacgacaagtatctagctcttccttgctttgcgagtaaaagtaagaggagctctttcaatccattaaggacaagatttggaacaatctctttggttggaagtcaaatcatttctcttttggggtcgtgaggtccttttaaagtcggtagttcaagtcattctcacctatgccatgggattgttttaaattcatgtggttattgtaaaggagattcatcatatgtgtgccagattttggttgggggtgacccagataaaaaaaagaagcactagtatacttggcctcgtctctgctggtataaatctgaaggtggtatgggctttcgtgatatgtttatgtttaattaatctctattagctaagcaagcgacttagttgcatgattttcctaactctttggggactaaggttatgaaaggattttattatcttaatggtaatgtgatagaggtggggagactaacaggactttgtttctttggaaaagtattttgtgggggacgtgatctttggaaagagaggatacggtggctcgtggataatggaaagtctattcataatcagactgatgcttggatttctaaaaatcatgtgggacgagcttattcattccatggtggtcctgagttacaacttgtgagtgatcttaagtttatgtttgaccattggaatgtaccgttagttaaggagctctttgacaacattaaatctaagactattttatctatttctgtctcaaaatttagtagtcaagatcgattgatttagaataatacaaaaactggtatgtatacagttatgagtgggtatcagagcttcgttttgaagttgggatgggggcacattttgccctcatctgggccttcatgctggtggaattacttatggtccctcaccatcccacccaaggtaaagaattttattgtaaattgagccttgattttgtgtctagctatgctaatcttacacgatatggtatgaggacttttgatgtttgccctttatgttttcaagataatgaaaccataatccaagctctttagtcttgctattctcttaaaattaactattcaaaaatattgggttgttaatgggttagataagttgaaagatgcttcttgtttttatgatatggaagaatttattgtgttgtatggatgttctttcaaagaaaatatggaagaatttcttgtgttgtgttgaaggatttggtacccgcgaaacacttttgttcatgataataatttgctctcagatggtttggttagtcaatgggctttgagttttctgtagcgttatcaagatgctcaaaccaccttggtccgattgctcaagtgaagaccacgatggctgcgggtggtctttctagttctccgtctgagaacttgggaatgagtgattttaatctatttgtggacgcgagcatcaatgaggaacagatgaatgttggtcttggtgtgacggtggtacgttgtgaggggaaggtcttgtgttcttcggcatctcctacaacaatctctttctctccacatgtggtggaggcaacaatccttttaccctgtgtcgacgattggggtgcaattcccccaccattttttctgattatctccgtcttgttcaagctatcaataggaaatacatgtgttagactgaatttagtattatagctcaatatattttttcatgtttggcattctttctcttttatttctcttgttcattgtaaaatagctcaaaatgttatggctcattcgcttgtttgtttgactttatctcttgactcgccttgagtttggtggcctgatttaccgttctgtctctaatcctagactattattgtaatgatttttagatattttggctttgtgtattttaatagaattttcttttttttttaaaaaaagatttagtgaattgatttaataattttgctcttttctcaacaaagaaaatctaggtttgtttgatgttatatatttgcattttaattgtatataagatctatttcgtaataagtcctaattattgttattttatttcaattgtttgaaattgacatataataactagaaccaataattaagaactcaatctattaatcagaataataatgttttttttttgtttgaaatagaataataattagatttaatgttacgtgcaagaataaattaactaaatttagatttgattggatgatcacatctagctattgagtactatcaataatcttatttaattagtttaatattttattaaaaaaattaaatgatatataatttaattatttgaataagtatacaccaccacatcaacatttaacaatatatatatatatacacgggcgattatagacatagcttaatagttcatattttttcttacaaaaagcaagtcctaagttcgaatcttccactcctaatattatataaaaaaacaatatatatttacgtttgcaaccatgttgatggtaaattaaaagggaaaacaaactacttaaaaaactactcatgtaggtgtaattaaactcaaaattgctcttatgtgaaaatagcttaatactctatagatctatttgaaagtcactatataattacaagatattctagtaattatactttattttaaaaaataattagttcttagatgtgaagtatatttttatcaaatagttactaattatacaaaaaataataatattatttaataactaatatttaaaatagaacattttagtaattacacccaatagtgtaattaagacctcttaaattgtctcaattattgttcaattattagatgggtagataaaaatactatattgtataattaccttacctcaaatttttagaacatgcaacttaaatatttttggtgtaaaaatttaattttaatatttatatata

SEQ ID NO: 37698 - DNA, 3654 bp, Cannabis sativa
aaatggattccgactctcagcagcttggtcctgggaggcagcgttatcaacctggacaagttgggactcaaggacagactcaatggacactacaagaaaaaacactttcgccggtgagttttgtaaagtaaacgtatctcgctggtataattttgtcggcaacattttgcgttggtaaatgatgccggtaataattcgtcggcataacaatttttgcccgcgagttaagatgatgcactagcaaaaatatttatattggcaaatttagttgccgtcataagtttatcgtcaacaatttgttattgacttaggggtccttggtgatgttttgccagcaaaatatggcgcgggctaaactttagcactaaattggcgtctaatctgcaagaagaatataacaaatgatacatattattttcaagatgaacctggatcgtaatgtctttatttaaacgtaattaatgaaattaaaatatataattaatctagacgagagttacgtgcttaaaacaatctcaacaccagtataaatatataaatcaatactaagaagtgctaggccgttcaacggtggagtacccattagtacctagaattcttattaaagatattagtgagaagcataatgacgagctttgttaattattactcctaatttttgaattagtactccaaagtcttaatatatattatatatgtatatacattttcaaaacgtgtttaattcgcatatattggccggttgtctcctttttttgtgaatagttggtctccatatttttttttttaaataattaaacattttttttttgcttaaccaaataattaaacacttaattataacgaaaaagatcttattgttgtgtgaagttaattgaaaatttgtcttaattataactataccagcattgctatttaataatttaaggtgtcaaatactacattgatgtagaatattataattaattagtgattttttttatattatttattaaattaatatatgtgagagcccatattaagatgtattaatagtgtttgatatttcttgtagtgttaacatgatatataatgtgatttagattcgaaacatgttaaaagttgtgacaaattttgttcaaaatatatataacaatgattaaattttatactataataaatattattgtttttatttaatttttttactattcattaatataattaatttcttatatttttatttatatatttaatataattcttataacctttaatcaaaatttaatatttttattatattattataaattttaaataaatataaaatttattttatccatatggactctaattataaaatttataacaaatttaatattcacttgttttttaaaccaaatatattgcccttggtcgcagatgatccacttcctacgggtcgtaccactgttacaaaagaaaaaaaaaaaaaaagtcaagtccacctcattaaatctccttgatagggtgtttgggagtgagaatgtaaaattaaattaaatttgaatgaagaattaattaaataagtcttactttttaaattaaaacgattctaatattaattttttcaaataataaatgttctggtagtgtttagttagaaaaaataaaaatagaataaaaatgattttttaatatttttttttgaagaatatattttaatactttaaaataaaataaaaatgaaaatagaataaaagttttttttttttttttttcatttcacgcaactctaagataaaagtggtaaataaatagtgatatttctctcctatttaaatctccttcatcttgtggaaaaacaaacacaaaatcaaataaccaatcttactcagaaaaaaaatagagagaaaaagaaaaatgacaatggagaacagaaacagcaacaatggagaaaacttcaaactagtggatcctctaagttcgtccgtaccaatcccaagtccgaccgtttcactgtcaagcgattccaccatgtcgagttctggtgtggcgacgctaccaacactgctcgtcgcttctcccgagcactcggcatgcctatggtcgccaagtccgacctctccaccggaaacttcactcatgcctcctacctcctccgatccggcgaagttcaattcctcttcactgctccctactcaccctccatcgcaaccgactcaacctcttccgcttccatacccactttcgaccgctccactttcctatccttctccgcggctcatggtctcgctgttcgagctgtagcagtcgaggttgaggacgccgagtttgccttctcgaccagcgtggctcatggagccacgccttcctctcctcctataactctcggagatggcattgtcatctccgaggtatgtctctatggagacgtagtttttcgctacatcagttacaaagcacatacaggagcccgatcactcgggctttttacctggctttgtaactgtgagcacggaatctaacaaactgttagattttgggattcggggaatagaccacgcagctggcaacgtccccgaattgcaaccagctttcttgtacgtgaagaaattcacgggtttccacaagttcgcggagttcacaaccgaggaggtggggacaagcgatagcgggttcaactcggcggtgctggcgaacaacaacgagtctgtgctaatcccgataaacgagccggtgtatggaacgaaatggaggagtcaaattcagacatttcttgagcacaacgaagggcctggggttcagcacttggctctgattagcgaagacatatttcgaacgcttaaggagataaagaagcaaagtgggaaaggtgggtttgagttgatgggtgcaccaccgcccacttattataagaatctcaggaaacgagttggggatgtgttgagtgagactcagattaacaagtgtgaggagtttggggttttggtggacagagatcatgagggtacccttttacagattctcaccaaaccacttggagataggtacgtaattattattaatttgggctatataataagtcttacaattgattaagcgtaaaagcacatgttacacgtaaccatgcaaacaactaattaatctcctaattcaaaattctgatggaaaaattttctaagttctaattctatttgcaaatcttagttttacatgaattctttgttacatgtcaatttggaatatttatattggtttaaataatttaaatataatccaattaataaaaaataaagagtttagtgggtaattagtgttttattattaaattaaaataatatatataaaccaatactactaaaattgcataaattaagagtgagatactgttacaactggttcattttaatatggtgttatatatattttaatttaataaataataagaaaattactaaataattataagacatcacattggacatttaaagtggtaaatagcaatatatagtagatcttcttagtatagagtttagctcttgattgcgagttggccatagataattaaaagtatatattattatatatatatatgataaaaagtattgatatattataatttgtttggaattattaattaatgtgtggatgcatgcattgcaggctattgtggacaatgtcccacatggaata

SEQ ID NO: 37699 - DNA, 1845 bp, Cannabis sativa
  modified_base (1175)..(1176): a, c, t, g, unknown or other
  modified_base (1480)..(1480): a, c, t, g, unknown or other
ttccaaacgagccctaaatgtacatatatatactttgaaagagagagagggagggagaccgacaaagcggtggtgggtggtggtccgacgttgcggaggaaggaagacaagagacaagagagggaggattcggtggtgggagggtttcgtgggtggatgcaggaaagagagagagtgtttcgtgggtttcgagagagagaaagataaaggtttcgttcgtggtaactagttattattttttcatcgtataatatgcatttttgaacgcttaagagtctttctaacaatttaaaatctctccaaatcatcccattaatattatatatgtccaattttttattggtaacatccaatgaatttatagtgtggtcattcatgttgaaatcaaggttgtatgatacacttagttgaaatcacttgttatgattagaatggagatatatttgttattaaatactaagctgggcatacgaggctttataaattcttaaaagtatttttcaagttttcctaactaagtgtctatgtaaagagagaaaatgtattttagacaaatctcattgaccttgtttaagcgtttcagagattttcttctcttctttctactcatatatattattgagttgtaatctctttttcttattcccatgtaatattgttttaatatttttgtatgtattttgtgtagttgtaatcctcctattccttcaaagtataatgagaaaattttcaacaattcattatatttataacattatttttgtaaaaatttttatttttttgttgagtaatttacagtattgataacattatttttgattacatctatacatgtttaaaaaaattacttcaaatctatcttttacattttaaatatttatttaaatttttttgaaaaataattaacagaaataagtacatgttgtagttataataaaataaaaaaacaaataaaaatcattttatatctttgaacacaaaatttaatgaaaaataaatttctaacaaaaagttataattaactcaattagtaatatttctagagctcacttttcccccatactacgagtgaaagagaaaatataaaaactaaacagggcaagcgagactttatgaaaatctaataatagataagcgcgacacgattttgtcccgtgatgtacttttacggaatnnattccgtgatgtacgacaaccgttagatgagggagttatttgatacgagctgcggttgatctaggggtaattagagtaaaaaaatggtaacgtaccctgagatccatctaatgtaccctgagacccatctaatgtacaacggaatacattccgtgaaagtacatcacgtgacaaaatcgtgtcccatagataagtattgctatttagcatgtgtgcttaatattcagcgccagggtcgtggaaggatttgggtccgagtctgatcgaagtctaaaatattaattaaaaaaaactgtttaaaaanatattgaaagtgactttttttatttttaaaattttgattcccaattaaaaaaattaaaaagtgaaaacaattttatagaacatgtttttaaaaaatactttcacttttttaattttaaaaactaaaaactcattaaaaaagtgttaccaaactcacaaaatattgtaatctattgtaacccttaacatttataatagagcattactaaagtgcgcgccctaacactaaattaattttacattctataagaaacttaaaatttataagactccgacaaaaattataaaactcaatattaaaatacgcactcatatttacagtagggaaatttgattttttatgcttacatttggttaaaaaaaatt

SEQ ID NO: 37700 - DNA, 2367 bp, Cannabis sativa
tgagaggcctggggaaaatagattatacaatgtgagaaacaaagtgtgggaacggcataaataagtaggtaaatagaagaaggccagaaataatctattagaaacaaagatccattaatattagttctagtttcacagcttacctggagcattatccatacgatgagtggaagcttatcttgtccttgatacttaggattttcccgtaaggttggcaataaactagttaggacatcaggtttccttcgtaataccattgctacaaccacaaatattgcaacctgacaatccagcaaaattcatttcatattagactacgagaatttgaaatgaattgtttttagaaaaaactagcattagtctaagaactttaaagtcggtgatatgaaaatttaaaatgttagcttaggcactattttttggggaccaaactatttgtgttcttttttcggcacatgtgcctacaacagtctgttatagtgtctgtgactgacaaacctttccaagaatctaactttcggaatcaataatcttgaatcatttaacataacaagcataagagagatagagattaacaaataaagaaaataataagcattccagaattgagcaaatacctgagattttgatgaaacatgttgagcagcctttttagagcctttcgcaccagcttgatggcttgtaaagtcagcaagaaggctctctaaagaccacagcacaaaagatccaagtgcctcgagggagtgctggttgatgaaatcaactgatgtcttataaacaacttcagatatatgagaaagagggacctgtagaaaagaatagacataggttaggtaactgaggtcctgcaaattaacaatgctgtaaaagaaaaagagtaaaatcaactgagtaagcaaacaaagaattcaggaaattcctacagttggcacagacaaaagccaaagaaattgctattcggatagaattacaaaattcagcaaagaataagaactgttttatcagcccatgtggagataggagaaaataatgttgcactattaatgataatatagaaaagaatctaagaccacccaagttttcaacaagtaaaaagaattgggaaagggcaaagtgtttcctatcactaggcaccagatacatttttcccaaagttgatattccatttagggacagtaaaagcttgcaaagttaattcttttgaggacaaatggttataagaaaataaaacaaacaccaatacctatctcattaattcaatggtattgactgtttcttctgcttattctttttaagcaccctttgaagggtaatgcaatttcatgattaataaataaacatatatcatagcttaacgatcagataatatcattcacattctatggatgaaaactaatcaaagatcccaactttgtttccattcaattgcccaatacaacccaaaatatatatatattaatagtatattaatcaatgtacggatgcatgcagataaaatggggattttaaccaatgtcacaacgaacaatctgatcccatcgaataaaagtgaaaattcaacaaatatttacaaaagagaaaagaaactcaaactcacatcggcaatcttagccacagttgactccctgaacaatttcatccagggaaattgcgccgagctcacactcgagaatgctcgcccaaaataatcagcgaaccgaatcagcctaatctcctgttgagactcatacgatgcctatccataaaccaaaaaacatcaaaaaagagaaattgagattgaattccgccacgaaccaaaagaattcagtagatcagataccaaattacaaaaatctcaccgaaatttcaacaagaaaagccgaaaggtgatccggatcgatcttagccgcggcttcagccacagtaaccttaggtttcttaggcttcttaggcttcacaactttcttaacctcctcaaccttcgcattctccgccgagtcttcatcatcactatcgtacgcgtccgcatcatcagaacgagtcttcgatctaacaggaacagtaacatcagcaccattggccaacatctgagcttcagcaattctccttcgcctatcctctgaattcttctccagtgaacggaatacgttatcggctccgggaacggaaccattggaggaagcggcgagtttattgggatgcgaatcggaagaagcagcagagggtttgttcttcctctgacgccttggaacaaccttctcccagccatggttgttgttggaggtggtgttggtatgagcattaatggcgatctcttggtcctcgactgggatcgaatcgaaagctacgtgcttttcttccatagctattttccttaattttaatttt

SEQ ID NO: 37701 - DNA, 2910 bp, Cannabis sativa
  modified_base (2855)..(2885): a, c, t, g, unknown or other
tttttttttttttttatgaataagtactttgtattcctcaatctcaacaattacaacatattatagacaatacatccatattgcaaatttatacatgtatatgcattaatcctgacccccctatacaacatatatatctataatctcataaaccaatctctatccttggtgttagttttacaaggcatagcactaaggatcctatgtttacaatcacattgaattcgaaaagtagtttgatcaatcatccatagtttaagattccacaagatatcatttcgaacacgccatatatgatacaccacaactgcaattatagcaaataatatgccttggcagttgttgctgaatcttttggctcgagaaatgcttcgcaacagtggctgcagttgagtgcttttgacatcccaattcaaccaatgcttgatcttctccaaacatttcctgctataggcacattcaaagaataaatgatcaatgttctcattagcattcccacataacaaacatgtcatatccatattcactattatcttttcaagtctattctttgtttggagccttctccacattataagccacgtgataaatttgtgttttgggatgatcattctcttccaaacacatttggtccaagtgactttatcccctgctcaaataatagttcatacccaagtttgattatgtatttttttagagataaagttgtcaagactcaatttgagcttgattttttttttttacaaccaccaaccttttccaataccagctagaatcagcaggacattcatagtcccaccgattttggttcttcaaataaacattgttgatccattttacaaacaagttatctttctttttcgcaatcgcccaaacatacttccccatggctgcaatattctaatccattagtcttctaaattcgaggccacacgtagctttagacgagcacaagttttcccaagcaataagcccaagattgtggaatttgaggctcctttccacaaaaaggctcgacaaatagccttaactccttctagtagcatctctggaaggatcattatttgtgcccaatatgaatgaattgcaatcaacactaaattaatcaatgacactcttcccatataggacaagtttcttgaaatctatattttgatcctgcttgtcattttctcaagtataatatcacattcagctatggatatctttttagaacatatgggaatgccaagacattaaaaaaggcaagttgctttgagaaaaacttgaaactttaagtactctctgtactattgcatatggcatgttggtacagtaaattgttgtcttctctttgtttgactggagacctgaggatgaggagaagagcttaagacctttaagcataagaagaatagagatgtaatctccattacagaacaataatagatcatcagcaaaacacatatgatttaatttcagcattgagcatctatcatgatacttatacccatctagattccccacttgcaccataatttgggataagtattccatccctagcacaaacaataggggagacatgggatcaccctatcgtagacctctcttggaattaaaaaaaccatttagagatccattaagaagcaggaaaaattttagagtcctaacacaagtcattttaagttgggaaaatttttgtgggaatccaaaagcccccagcatctcttcaatgaaatcccactttattgtatcatatgcctttctcaagtcaatcttgatcatgcaactcggtttgcaatttttccttccatacagtctaataatatcctaacagaccataatgttgtgtgcaatgtatctactatgtacaaagccaccttaattctctgtaattagatcaatgagaatcaaccgaagccttaagttaataattttagaagcaattttatagataacattatatcatgaaataggtcaaaaattagtgacattaccaggacaaattgtcttcgaaatgagagtaattgtggtagcattgattttcttgagaattttccctgagtttagaaatgacaatacaaccttttctaatcagtgtcgaccatgtcccaattgtctttataggaagagctgccaaatccatcaaggcccggggcttttgttccgagaatagcaaaaagtgcttctttgatttcttggacagtatactcagcctgcaagatgtgtaaatgtgtttctgagatttttggaccaagatccatcacatgttggctgactttcatcttgtgttccatctttgatcccaataggttaatgtagtattctaggaaagcttgttgtaccccttctagtgtatcacaccagttacctttagcatcttcaatggagagaactgtattttgtagtcttctttcacttaaatatgcatgaaagatagccttattttcatctccattcttagcccaactaattttttccttttaagctaagaaggaagaataggcagcatgcattttggagtaacaagcacaagcctcctgttctttcctcattaattttgcattaagagggtttttctgtagcttctcttgtgcttcaaccatattccccttagcttccatctcagccttatgtatgtcattgaagccatctctttgttttcagaattagcattaatctcttcaatttacccacaagcttatacatgtgcgtaccttctatttcctccatccagttattgtgaatttttacattatacttatcaacatctttccacatactataatatctaaaaggtttttttgccatgagcaatatcttgatgaatagataccaagatagggctatggtcaaaactgttggaaattattttnnnnnnnnnnnnnnnnnnnnnnnnnnnnnnnttattaacatcctaaataagaactt

SEQ ID NO: 37702 - DNA, 3845 bp, Cannabis sativa
tctatcttttctacttttcttctttagactaagagtaaacggtaaaaatagtataattaactcctttggttcaaaaaaagaaaaagaaaaaaaatcaataaaagatacggacagacctaccttcctcattgaattcctactggtcgtcgaacctcagtgaaatcagcatcgaaggtgtgtttaaggaaagattagttgtgtctattcttcattcttgggtagcaataatgtaaatttgaatttatatgcatttattaaattgaaattattttcctaaatttaagttaacttatattgatagaataagttaatattttataaaactcaattttatcattcccattttaaacacataaccctacatcttcctctcttatcgagactcttgctctctaaactcactttaaggactcaaacccacaactcaccacccacaacattggtcctttctctccacgaccactacaaccacaaacccaatggccacggtagactcaacgacatctccatcaaccacgacttcactatcgacaatattgtcaaaggaataaattgtatgattaatatttattatctatgagtagatgttagatttaaggtcgaaaatggtcacatatgagttttaggttaaaaaactaatttttttgccaggcctgatagtggtctgatggtggtcctatgccttcctgttgttaaaataaataatggttaaagacgaaagtccgatggtaacccgatgatatgatggtggtccgatgataatccgatgccttcttgacgagcttaataaatggagcttaacatctataaatgtagaaaactaaaaaaaaaaagctttaaaatgtataaataaaaaacttctatttatcattgcaataataataataataatcataatacaaaactttgtaataatgcggagcattacttgtttttgttagaacttttcaattagtcataaaaattcattaagaaaaatcatttttaggtactaaaacttctaataaatatctcaaaagatggcaaatgtgatatttaaaaaaatgaatcactttgagtagttacaagtttccaataatgagacgaaattaacccaattctataaataagatgacaaaaaagaattaaatccaagcttcttacttttgtcatctagcctattttgatttattttcatggaaactactcaaggagattcacgatttgtgtaaagattcgcctatctcatctttgagacatatccaagaaaggaaagattgggagttttaggttttcagattttgatattatcatcattatagtaagtagaaattacactcaatatggccttttaaaagtgtattataaatatatagtagttttagatttgaccattttttatgacatattttaatttttaaactttatggtattttctataccatattttttatatatttactaaatatatatagcaaaaggaaggtatggttagatacttctcctcctccgttcggctcaaccttagctgccaaccccaaaagcagttccggccaaagctccaccgtggtctacacctcactctctctttctcttcgtactcaacaacaaagagcatcattcccttcttgaagagctaatgaaggtgatctctataatgttatgcatttttctttttgatatcttatctattgtcgatgtcatacaatagagtgaagtctttaattggcattctccataggtctttatcttctatacgtatacttaagcctttcaacagtatcttattagatctatacttaggtagaaagttggaaattcataagttctagcatgcttttaatcttgcccttcataaatgtaagtactgcttgttggggtgtttataaaaatcgaaaaatcgaaaccgaccatcaaaccgaccagactgtaaccgaattatcggttccatgtcatcactgaatttgacggttggttttggttacggtttttttgatatggcggtcggtttcggtttttgaaataaaaaaatagttaaatcaaaaaattgccaaaaactacaataaactgccaaaaccgtccaaaaccactaaaccgaaaaacactagaaagtaaaaactgtcaaaaaccatatggtcgattttatacagttataatttctaaacggtaggttacagtttttgtaaaataaaaaccataaccgaccggtcggttataaaattgtaaaaatcgactgtaaccgacccattttcacccctaactgcttgatttctaaacagtttctacaagatcactggttaaatccatattttctttaagattgtttattgtaactgtccatcatatatcatttcttgtcaggtttctgttaggtatggttattcatcaatgttcagtgaattttatttactgtttagatgttgttttacttgttgcatggtttatatatctatcatctaccatgattcatgtttctaactcattccattaattttgtctgtaacttgtctagatgacaatcataccatgcattgctcaagggcatggatggctaaggcctgcaatcagtgtagttgagctttctcagtgtatcattcaagttatgttgaactttttatattacatttacatccagctgcagttgatatcgctttcaaacttgactttttcatacttattcatttacttgtaagttgaatagctatgcaattttttttaactattttatacaataaatgttatgcaggttgttcctctcagtgcaaggaaatctgagtgaaaaaattgcacaattcctgcagctgccacatttaagtgagtctgtcataaaattatatttttgggatcctttctaagtgtactttttcagctatattgttgtctctaaagttttaactaggaacttgccagaatattatattatcattaggccctaatcttctaattaaatttagccaaaatcagattagagatttgattctcttattatatttatgtgttagattttaaggcgtattggttcttttgtgattggtattttttgtagttgtaatcgttttctgggacaacctttatacttctaagattgtcatcttcgagttttcgaacgggcaaccgcaacggcaacctttatacttccaagattgtcatcttagagttttttagaagagtatttttgtttgtgttgtatgcaaatgtcttattagaacgagcgaccttttaaattgcctaggttgtaacacatatgataattgatatacccttcctcttttactaattcagccatgtttcatatgaaaaaattatattattggtactgttatttgtcataattctttttctggatttgatttagaatcataatttatgaaagtttaaacaagcttgaaaaatatttgtttcttctcattgaaaatggttttgcaaaattataatgatcttgaatgttgacttgcttagtcgttatatatagctggaaatattttgtttcttctcattttaaattttttgaactataaaaatttgattggtattcttttttccttttataaatcaaggaaactaaacatgtcttctatctctaggagagtcctaccgatgactgagataagtttctctatcaatgatcatttttttttttgaattatctatgatggttgtaataagtttatgaattaaaattttctgccaccaaaattgatagcataaatataatagaatatttataatagaaaattgtgtatatataatatttatattgaaaggttggttgtgttagacatttatatgtataaactgaaatatatatgtttatgtataaaatgcagaattaaatcaaacatatatacactatgaataaggatcga

SEQ ID NO: 37703 - DNA, 1505 bp, Cannabis sativa
gagagagagagagagagagagagagagagaggaagaagaaacccgttttgtgtcttattaagaaatttttactggtacattaattcgttgcacaaataaaagtgttcattacacaaaataataaaagtcctaaaaaataaagcccactgtttcactatttgtgtcgctaaaagtttttcctcttactgaaaagccaaatgaaaaattttccacctactttttttttggcttttgcaggcacatatatatatatttgcgctaataaaaagtcatctaccacgccaaagaatattcgcactcgagaattccccgccaaaatatttgatcttttacccgtgcatatttacaccggtaaagaagtaatttaccccaacaaagaatattcgtactcgagagaatatcccccaccaaagtatttgctttttaccggcacaaatttccgctggttaagataaacaattcctaaaaattttttgcaccaaaaggcagttaaatttcaaagttttactggcttgaattgcgtcggcacaggttgcttttacataataatataaacaatatatgacaccttttgatactggtattttaagttgtcccatatcatttctcaaatattttgttccaatgcccatcgggttggagttcttggaatttgtcttttgctgttctggatttgtatcagtcttttagtaattgctctttgatttaaattagtcgttgttttaattcctatggattagctaagagagctaggatatgtagccaaattgctatatatgtttatccaaggggagggagggaacaccccctattgttcccaattttcctttttagttttgaatgaaatttacccctttcaaaaaaaatattttccatcagcactcaactattgcgcggtctaatctcttcgtttacacgttattatatatagttaatttgatattatatcatgtctcaaaaaatatgtattaattatacattagtatatatgtacatacaatatacgatacactaagtgtcgtttggtaacatttttattttttaattttttaatcataaaataaaagtaaaatttttgtttttaaattttgttttttaaaaacaaaattgcgttctgtaaccacttttgtttttcaattttaaaaattaaaaacaaaagtgtgttctgtaaagttcattattttcattttttgatttaatttaagtcaggtctaggtctaaagtcagaggctaagttcaacgccagagccgtggggggaggatttgagttcaggtctcgtcggagtctaaaatattaattaaaaaaaactgttaatttaaaaaaatattgaaagtaacttgtttttgtttttaaaattttgattcttaattaaaaaattaaaaagtaaaaacagttttataaaacaattttttaaaaaatattttcactttttcaattttaaaaatagaaaactaattaaaaaagtgataccaaacgtcatcttaaccaacaactacaatattat

SEQ ID NO: 37704 - DNA, 4080 bp, Cannabis sativa
ggagctatgctgaagctcaggttacccatatgattaaatttttatacttgcatatttcatatcatatcataacataacatagtatatatttgactagatgtgtatatttcatatcataacatagtattcactaaatgctatgtttggtgtgattaaagaaaaaatagtattcattagatgtgtggttttgcttttgtgtttatggaatagtgatttgagttgcatgttgattttccttttcttgagagacaaatcagatttgttcttctcgagggaataaacaatattataaatttaaatactttatctatttatttggcaactcatgtccttttcacttgcaggcaacatatttgtcacctgatgagattaaggttcaacaactggttaatgttttgaaagaaaagaaaattggtgtggttgcacatttctacatggacccagaagtccaaggtgtcctaacagctgcacagaagcagtggcctcacatccatatatctgattcattagtcatggcggattccgctgtgaagatggcccaatcaggatgcaaattcatcacagttttgggtgtggacttcatgtctgaaaatgtgcgtgcaattcttgatcaggctggtttttctgaggtgggtcttctttgttaatcatgtcctgtcatttaagattggcatagtattataaactaaaccctgtacatcactcttataccaaaaagatagcttgttactctggtggtatagtatctttgacattttgattttcatggagaccaggggattagttttgatgaatgagttttggctttgattatgaactagtattagtggtttcttttgattaaagaggactagataagcctgcatggtttattgcagggtcaactatttgttggtattggtaaccacatactaattattagttttgtttcttttactatgtttaaaaccaggttggtgtatacaggatgtcaaatgagcgtattagttgttctttggcagatgctgcctctggtccttcctatatgagctatcttgaatcagcttccaaggcttctccttcattgcatgttgtctacataaacacttcactcgagacaaaagcttttgctcatgagcttgtgccaacaataacatgcacttcttcaaatgttgtgcaaaccattttacaggttcatttcggcctactataatgttcccatccatgtttcatgtttcacacaactcatcttaactttactttctttactgtgtttccttctcaggctttcacgcaagtaccagatttacaagtatggtacgggcctgattcatacatgggtgcaaacattgctgaattgttcttgcagatgaccaagatgactgatgaagaaattgctgagatacatccacaacataatcgggattcgatcaaatcattgttacctcgcctgcactattaccaggtattatttgtttttgttccggctgatggttcttggcatttccaatacctagctcatctgaatttgttacacaagaagtgttcttttgtatgagtgcatgcaccttttttgtcataaaataagagaagaaacacctttcatttcaggccctacttttacattttctgatcatgggcttataaccacttttgttgtaccctattaggatggaacatgcatagtgcatcacctttttggacatgaagttgtggagaagataaatgagatgtattcggatgcatttttaactgcccattttgaggttcctggggaaatgttttctttgacaatggaagcaaagaaaagaggaatgggggtagttggttctactcaaaatatattggatttcataaaacaaagggttcaagaggctttggatagaaatgtcagtgaccatctccaatttgtgttgggaacagaatcaggaatggtgacctcaattgttgcagcagttcgcagcttgttaaattcatctcaaaatggagctaaagtaaaagttgagattgtgtttccagtttcatctgactcaatgacaagcacatcgtcaaattcatcctcagaccccgaatccattaaagctggcgaggtcatactacctgttatacctggagtcgctagtggggagggatgctccattcatggtggctgtgcatcctgtccatacatgaaggttagcacataatttcttgtcttttatggcaatggcatttgatgaattgatggtatggttaatgttatgttctgtcgagatcatcgtgtcttgattagttgagttcatttctgatgagttgttctatgatctcccagatgaattctctcagttccctcttcaaagtttgcaaccatcttcctgatgaatcaaacatcctagcctcatatgaggccgagcgatttaaatgccaaactccaaatggaaaagagatagcagatgttggttgtgaaccaattttgcatatgagacaattccaggttactttcttgcaacctttagcatattgttgttaagacctcttgtaagttttaggctcaactgatcttctattctcgttttacaggcatcgaaaaaacttccagagaagctgattaatcacatcctccaatcacaaggcagtgggagataatttttatttggttgagttggaggaaggtagctcaaaaactgaaagacacatacaattatgctatggtcaaaggcctcctattgaaagcacattctgaatctggaagaggctgtaatctcataagacgttggcttatcaacacctaccgtactgactatatgtacttcagatttgtaagaatttaatggaacaaaaggaaattaaaatgtttaatttcacatccatatagaaaattttctattaaattaaacattcaaacattgctttagttaaggactacaatttgccccatgttaacgcacaatttgtgtttaatggactcaacactcattttctccccctttaaaaacagttcaattttcttaatgttagcactccgtggtgtgcacacaccatatatgaatctaattttttggcacttttgaactaagatttttggataacagtgtacttgaacatattccaaacaaattaaactattttcaattttgatgatttccaattttgtaaatggaagatttgtgtaataagtagtcatcaatggtagatcaatcgaatgctacagggaatttaatctaatttgccatgatttgtttaattttgatgaaaaaaagaatgaaaataagaaagtttgagtctatgaatttggttatgtgcaaataaactataaccaaagtaattctatctaaagttttataaccattaactaaatatttctcaaatcctgaaggtaaggctagtaaagtaaaacacttgaatagtaaacaaagaaacgaaaaagctaaacacatatttatagaacaaggttttaaattttgatacagattaaccaaaaattgataaataaataatgagtcctactctgtatatggaaaaagaaacagtccttgagtctaaactaaaagtggcttaaaaccaatcaaacctcatcctcgtggagaagcatattggggattcccttggtgaccgggaaccggcgaccagtctcggggcagatgagggcgccttcttcgaggtgaagttggaggagggcgtggtgaaaacgacgaaggaagtcgtcggagtcgagcatagaaggatcaacctcgttggggagctcagtgtagccgattgagcgagcggcctcgactagggctttccagtcaattttggagaacatggatttgagaaaatcggggtttagttcaacctctttctcgaccactttcaccatttcgatccggagagggaagccattggtgacccccttgatgttagaggagagcatgttatgagtaaggagtctcatattgtacaactactctctcttccaaacttcagagactgattttttcttgttttctttttttttttcctcttaacagttcagactgatttcaacacagcaaaaaaaaagccctaaccctaattataacgtggtttaaaataagtgtattccacgtcagctgtatcaatatatataaatatataaatata

SEQ ID NO: 37705 - DNA, 3339 bp, Cannabis sativa
atttgaaacttgaaaatatttggattatattgtatttatggtgagattcttttcaaatatttctaggctgagttgagagcaagtgtgtttgaggcaattgaagaagaagatcgtgttgtcgagaaggaagatggtgtgcctcctgctttacttgggagctgtaatgatcgtgctaaacaacttcacgcgtcaccttcaggttcctttccatctctttcataaattggttggtaaggagcttttgtttagtgggctgtcatttcagctctgttggtggggttatccacttgattggtccatggagttgttgaaatgggttcaaccgtataggttaaaattcgcttttgaataatatatctggataacaaaacagaatcggagtgaggtgcttgttgtgaggttatgggttctcgtgaccattttttgctgattaaatgtctttttcatttgctaatggctgactaaacatccttagttcacttaagctacttcctaattgatataatttttacctatgagatggtaaacgttgtctgtagaaattatgacgtgcctagcattttagcttgtgtggtttcaggtgttgtgaaatttgtaatctcatatttaatttatcttcgatttccaaattgcagggaggttgctgactgcgttgatatgtgaatacttagaatgggcacaactaaatcacacgatgaaagtttaccttcccgagtgtaatttggtaatcaagtaaaatccttttatgcattgcaagatcattgaagagatttttgaattgttctgttctgtatcctttactaataaatggtgatttattttacaacttgcagcaaaaagatttctggaaaaccgaattgaaagaatttagtagcaagaatgggtatgatcttaacagaaacggtgatagtggtcctttgcttttggatgtgcttgaaggattcttgaaatttgaggtttgacattaactctctatacagaagtattgtagatctatatttgtgtatattcaagttttataaggaagttagtgttagagaacttaactttgctttagaattagttttaaaggcctattgttttatattgatttagtcatctaggaaacaatatatgattggtcttatgtttctcaaaccaaagtatgtgtcacaacagtaagcttctagttcacaacttatataagatcatacttattctgcctaaatcattgttgtagaattttctcaacctgtcgtagaatgagaatgatacacatgattgagagggatgaaacactcaagcagaggttatatgagagtaaaccaagcacggaaaatttagttgagttatataactttgtgtagcacaatttggtgggcaatttttatacatagtcgcagggaatgttaaaactaactagagatgaaaatttctgtgctaacgtggatcagagtataatgattttctgggaattttatgaaggcaaaatattcaagtgcattgtatttattacttaaagccaaatatactttgtggggggaggctttcatgattaaagttagacatagagcattttatgtgtacaacactgtatacggtatatgatgacatgtaataaattagctatcaccatggtgtcactatggaatttaagctggattggccaatgagtagtgatgcatgaagtattttcatatagaagttaaaataacattctgatcttgaaaatttgagtaaatatatggactcttttttgcacatctgtagcttactgacaaatgatgccttgccttatattctgactatcatctctgattcaaaaatgttcatacagaatttgtctcaagcaaggggtactggaagaaagctaaccacttcagaaacagagtctgtatccagtctagactctcgaagtagtcgaagaccttcttcttcatctgttgccgggggcctccctccactaggaaggtgttgtgccaaccattgtttttctttatttcttatgtttctttacattttctttttgaaatcaattctctttatggtattcaattttccttttccacttgtaactgagatgttttagtttggtgatatttccacactaggtctcttcctgcttcccaggcatctggtaagtaaaaaacttatgttagcttaacgtttggttacgtgtatggttgccattgtttttctgatgccttctagcattcagataggagaggtgggtcttccatgtcaagttacaggaaagatgagtataattggagatatgacagtgatgagcttccagaggaagtaattcgagcttcatctgccctggaaaaccttcagctagatagaaaagctcgaaatctaactacgtcttggcggtaggttttaaacttgatttgtcatccgtactgttacggggaccaatttttgtgaaatgttgattcccttttcatagaattctgtcatggttgaaaccgattctgggtacggattaggtttcggtttattaactgcatcttcaagattattgtaataataaggcattgttattggtttcaggcatgcaggagatggaattaatgaggatgatagcaggtctgaccatatgtagccgagtgattataaccttgtattgtggcgcttgtatttttctgtattgttattgcccccatcataaatgatgatttaatgaggataggcatgttatgtaagtttccgacatgatttagtgctttgtttgagttgagtgtcttagttattttttttttcctcttaatttttcttacccatatgaaatttacaatggtaattttttcatgttcaaaattttagtaccattgcgcctggtttgaatttcatgaaatctagtttaggttgggataggtttttggttaaaacctctgaaactcaagcctctctgggccttcttcaatgttccctagcgaaacatccaattttttttattcttttaatagaaattaaaagccaattcacgatgatatatataaatatatatatatatacaatgggtgtttgctgataaataagtatgtggcagaagctgtgtacgtgttttttttttttcttgagaaaatagaaattttataatttgctacatggacaaagctcaataccgaacttaattgagcaattactcattccagtcgagatcccaagatgggccattacttagttgccaaacaagattcccttgtaatggtaatagacaaagaattctcacggataatatttactattccagaaaaagaaaattctatatttaaggatagataagatagaggtagcaaaaaaattcggatattctccgacccgaaaaaagcaggccacttatctggtttatgt

SEQ ID NO: 37706 - DNA, 3125 bp, Cannabis sativa
aatagttcatggggcatttttaacgaccttaaaagttcaggagcatgagtaaaaatcctaattaatcaaaattgtatgcagtcgttaacaattaaaccaaagaaagaggtcatcgtaaattgactgtgaatatcctcaactactactaagcaatttgtctcaagaaccatcattgacaaacttttttccttaatctaactaagggtctctcgaattctcataatcttagccaactcaaatgtcatgttaccatactgacacacagtacaagcttcaataaggcgacccagatgaacacgtgtcaccataccaactttgaattgagttgtcttaacaaacaatacaacattaacatgatggctaatttatttttgtaatttgattttaaaatgtgagactttttttcattgggtatttatttattttgtggtttaaatttatattacttttttttagggtgtaattttttttttctttttatattgagaaataggagattcaaacttctgaaattatttcaagatatgcctatgatcaccaaatacaaaataatgatagtgcggatcattagttttatgttttaggttagaaagttatttttattaagaagatttgatatatagaatcaaatataagtttttaacgaactttagcttaattattttagaaaccgggccaatcatatttttatatcatttgatcttattgtagcctagtctttggtaggtgggttgttcatcaaatagtttatattgtataatgtatataaatcatctgcaccgtataatattgcacaaaaaaatatggtttaaaattttttacagtataattgttgcgattttaaattttaaaattgggattcaaattctactacagtattacaaagttacccaaagaatagggtgttctgtagattagaaaatgagttattttgatagatcgacaagttaacatgggagatttaagtttattgagggtgcttgttgaacacgtgggggatcgtgtggctaggctttgtcgggtcagaaggacaggagtacttgcacctgtggcccatgcacttatgggttatggctattgtgcactgtttttgggcctaaatcctataagactgatcctttggcccacttccgttgctacgtcgccacgtgttcgttgcatgcaatgcaagtttcatgttcatgacgttgacaattcacaatcacaaccttctctctcctaattattaaaagtttcctccaaacgtggccttaatagcgataacagaaattgacagccttttattcccaaattatccttccataactttaatttagccatttatgagagctttatgatatgggtattatagtcatagtacgaagaagtatgcggagtagctggtgagggtgacttatcattcatggtgtacggcttttgagaaagaagaatagacaaaaatagtgctgtggactgtcctaattttgctccgtttgggctctttagtggacggcctggatttgtatcccttagccttgacgaatccctgtccgttgattttaaggtcatcatatattgtcataatgagcacatatacaaaatattattgaagaccatttctaagtgaaagaataccatatggcaaaagtagttagattagccatttcaaaaataaataaataaacacatcatagttaatagttatctgattaataagggttggtaacaatttttgaatttcttttgttttttgtaatttgaaaaaaaaatattttttaaaaatatgttttatatttttttttaattttttaattgagaattaaaattttcaaaataaaaaaaaaatcatactcagactcggacctcgtccctgatcccaaatccaaacctcgacctcaaaccctgtccgtccctagacctcagccccaaccccaaacccacccaggaccctgaccctggcctctgactctagaccttagacctgacgtaaataaaatcaacaaatgaaaataaaaatgaaatttacataacacatttttattttctatttttaaaattaaaaaacagaaatagttataaaacgcgtttttatttttcaatttttttttttacatgcatggttaacatttggtagtgttatttgtgttttcgagcaatagatacgtgacataattaaagaagaagatttgtcaacctcctggatcagcagagttaactatcaaagttcctcgcaaaggtctcttggtaatctgaggagttttatggatacttgatgcgctcaagtagtgtttctgggacacagcagagccatactcatccccaactctgagaagtcctagagcacgattcaagtaagtggcttccgggtgaagacctatgaactggtcatggatcattaccgctacctcaaggtaaatggccatgttagcttcgtataaaaatcgacctacagacggttacacttttttcggacacaggatcagatcttgtcccccatgtcaagccatagtagtgcgcatatgcacctatggacatgccttttgcccaacttgtctatgggtactctacagaggaaaaacctttgagcaacacatatcttttccaagtggtatatattaaccactgcccctgcacatcgcacgatcaaaggttctacaacaccgaacgatcaaatttacaactgtacgaaatcctagctaggtaaagggaatgcccttacccacatgtaagtctattaatacccttattttctatgtacaaggggtgaacaattttcatacttatcgaacctttgctaaaatccctattaactttttcttcatcaagagaaacaaaaggactaaaggagtgtagagctagaatttatattgtaaacatttgtataacttaaacactcacctgtcagtccaatacaacatactcgtgaactaggaattattaatacacgaaccacataaaaactacctatcttttatttattactttatttcttttttaagttctattttactcgtttctgaaaatctcaaaaaacaaataacaatattgagtaatataaatcccacatatcacgcatgaactatgagtgattgagtaatttgtagaaaactcatacctaccaaatcttcaccttaaaatatatatat

SEQ ID NO: 37707 - DNA, 2274 bp, Cannabis sativa
aaaaaaaaaaaaaacttaaaatgagattttttactttttttgaaaaacttaaaaagattaaaatgaaaatggtgtaaagctttgatagtaaatttggtgtagcagaaagagaaaaacaagaatggaagaagcaagtagaaatcgagcggaggcggaaagattgcttggaatatcggaaaaacttttgcagaaccgagatctgaacggctccagagagttcgctgttttggcccaagaaaccgagccactcctcgacggctccgatcagatcttggccatcgtcgacgtcctcctcgcctcccagaagcgcatcatcaacaacaccaaacacgattggtacgccattctccagctcgattcccgatctgacgaccacgatctcatcaagaagcagtatcgacgccttgccctcctcctccatcctgacaaaaacagctactctttcgccgatcactccttcaaactcgtcgcccaagcctgggccgtcttgtccgatcccgccaagaaaaccctatacgataatgacctaagccttttctgctcttcgcagcagagcaaattgcccgttcggaggaccaactcgacaccgttcacacccgtctccgccgccgccgggagctcgacggagccttctttgcggcaccagagtctactgaggcttcggagcttctggacattgtgtccatactgctacgctttgtatgagtaccctagggtttatgaggattgttgtttgaagtgccagaaatgccagagagcgtttcacgccgctccgctggtcgatcccctaccgccgatggtccccggtcaggaagcgtactattgttgcttagcttttttcccacttggcttcgtcgctgccaagggtaattcggagaatggtggaatgaaggagccagctgcatttcccaattggatgccgcccatgttccaggcatcggggccgccacctccaccgccatcgcagccgcagacaaggaggactgccgcggcacaagtggaccaggttccgaagaagaggggaaggggacgacctcgtttatcttgaatctctcttagaaaagccgattccggaacaagtttggtcagtgataacataatttatctctagtgctttgagataaatttatcctattccatgagggaaaaaaaattgacttgtgcgatatttcaatgttgtagcttgttattaaaaaaaaaaaatgttgtagctgttgtttgttcatgtatttaataatttgatgcgtcactattatgattttattgtgccatttcggttttgaggtttgagtcatccatttctagtgtaacacgtttgaactatgaagttcaaatgggttgcaatctaatcattagaaacagtagattagttgaatgactgtataaaatttccagtatcttgaacttcatcacctatgaggtaaaactttctatcactaaaacacaaaagacaccaatggattaaatgcttggggagttgggaccttgagtttatgagtatcgtgaatatttaaatgcttgctactcttagaaaccgaagcaatcatacattttgattgtgttctttctgatctgcgttttcttcttatgacagcagattgcataaattaaatttgttgagaaggtactttaatcctcatattgattttttttatattaatgttgttgtagatactcttactcataccagttcgagccttttacatgtgttcactattagaaaaacaaatgtatgaattgtctagactccatgtacatcaagaattagcatttcagtattgatacatgctacattgttatttatcttcaattcttgtcgaaaatattatgcctgggtttattcatgacacaaagaaggagaatctgtaagtctcaactcaattactgcttgttgagagtgctttttgagttaggaacataagattgaattgagtatattttagttgattaaagaaaagaaaaggtgcacaatagattttacaaaacttcatcttaaaacagtttattacagcttcctttccagtgaagggaaccagatagaaaaacaaaccagattgccatacatattctgatatattattagctacattagcattctactgaaaggaacgtacgccactccccactactccaggtagcactgctgcattcctatgctcttactactgagcttcaggcatcagcaaatctgcacaaaagtaataataaagcgatatccagatgaataacttcaatcatgcaagagattaaaaacaacgaaacaaaaaaatctaa

SEQ ID NO: 37708 - DNA, 3071 bp, Cannabis sativa
caatgtttcatgtaataaaaaccattggcattctcgccttggacacccttctgtattggttaccaataaaatcaataaaatgttccatttacctaatcattcttctcatcttcattgtcaaacttgtcattatgcaaaacaaaaaaagcttccatttatttctcaaaataatatggctgccaacatttttgatctaatccacatggatatttggggaccttttccccttaattccattgaaggatatagatatttttttgacaattgtagatgataaatcaaggtatacttggacatatatgctcaaagcaaaatctgatgcaccatcaatgattcataactttttttctctaatcaatacacaatttcaaaccagcatcaaagctgtgagatcagataatgctaaggaattaaccttaacaaatttcttcaacaccaaaggtgttattcaatatcattcctgtgttggtaggcctcaacaaaactctgttgttgaacgcaaacaccaacacattttaaatattgctcgggctctagcatttcaatccaatatccctctaatatattggagctatatggtacgcactgctacctatctaataaatcgaacaccatccatgttacttaaaggagttacttcatatgaaatccttcacaccaaatcaccaaagtatgatcatcttcgaaactttggttgcctatcatatgcttccaacatcaatcatgaccataaattttcccctcgatccaaagcttgcatatttattgggtaccccgaaaatatgaaagcttacaccttacttgacatacacaccaatcggatattccattgtcgagatgttatcttccatgaacacatatatcctttccataacaatagtccaaataatgatatcactcggttcttttcttcacaaaacagttccaatattgcacctgacattgcaacatttcacccagcagaaaaccatgttgttccagccaccaacaaagctgttccagcaaaaaatcatgcggctccagcaacaaacaatgctgctcctacagacaaagctgcaactgaaattgaacaacccatcacagcacctgattttccaattgcaacaccacctgctgttactacagaaaataaccctgctccaattgtaatttcaccaactgctcaaaacaattccagccacacctacaccactaaatctggcagacatatcaacaaacctactcatctcaaggattacatgtgtgacacatcaacacacacatcaacagctcatcccattgccaataacttgtcttacaaaagattttcaaaaaaattcattgctgcaatccttgctgcagaacagatcattgaacctacctcttacagccaagcaataaaatataaagtctggaacaatgccatgggaactgaaattaaagccttggaagataacaaaacatggatcattgtccctctcccacctggtcaacacacaataagcaacaaatgggtctatcgaatcaaatacaacccagatggctctgttgaaagatgcaaagctagattagttgctaaaggatacacacaacaacctgggatagattactttgatacctatgcccccgttgccaaatttaacacactaaaactcctattttctctagctgccatgaacaattggcacttacatcacatggatgtaaataatgcctttctccatggagatttacatgaggatgtgtacatgacactacctcaaggatacactccacaaggtgtaatcccaaaaaatgcagtatgcaaattacaaaaaagcctatatggtttaaaacaagcataaagacaatggtatgcaaaactaagcaaccatttaataaaacaaggttttcatcactcacaatctgatcattctctcttcattcaacacaaatcagacactttccttgctctccttgtctacgttgatgacataatagttgccaccaacaacttaaatgaactatctaggttcaaaacctctcttgatgcccacttcaaattaaaagacctagacagtcttcgattttttttaggtttggaaatagctaggtgtgaaaagggtatctctgtttctcaaagacctttcacacttcaactactccaagaaactggtcaattaggcaccaaacctgcctcaacacctatggagcccaacctaaaactcagcaaagacacaggtactctccccacaaacccaacccaatatcgaagtctaataggcaaactcatttacctcacaatcacaagaccagatattaattacgctgtcaacaaacttagccaatacatacaacaaccaagacagccacaccttgatgcagcctgcagaattctgcagtacctcaaaacctcccctggtcaaggattattctaccatgctacagctccatccaaactcacacttcaagcatttgctgatgccgattggggtgcctgcccagatactagaagatcaatctctggctactgtgtgttcttaggccactctcttatttcatggaaatcaaaaaaacagcaaactgtttctcgttcttctgcagaggcagaatatcgggccatggcaaatgcaacatgtgagttaacttggctcatagcacttctaaaagattttcagatacctgtctcacttcctgcgtttttatactgcgacaacagtgctgctctgcatatctctgaaaaccccgtgtttcatgaacgcacaaaacacgtggaaatcgactgccacattgttcgagagaagctcaccaccggcatcctcaagctcaaccatgtaccctccaagatgaacctggctgacatcttcaccaaaccaacttttcccactgtctttcatgatcttgtatccaagttaggtgtaaaaaatttatacactccaacttgaagggggctgttagaattagttagtttgttagttagttaggttcagttataagtcggttgtactgttagttgagcatatatatatatatgcctctctcttctctctgtattaataaattcacattcaataaagaaaaacctttcttttctctgttttcctctcctaata

SEQ ID NO: 37709 - DNA, 2763 bp, Cannabis sativa
agaataagaagagaatatggttcggctatgctataggaaagaatgctcaaaattttactgaaggtgattttttcatcaactttaagtgtgagccattaattagcaccgagaaaggtacactagccacacacctcattatcttttctatccactcctcatcatatccaaaaccctttcatcattgtaacaaggaaacaccactcaactcgattgtacgcctttgacatatccagctttagagccatttcccttccattcctgaatctcctcgttttcatgcaatgtaggctttcaaacccaatgatatcattgtcttggatcaacctaccccccacaaaggcactttgctcttccgaaatagcttggtaaaggctattcttcatgcgccccgctagacatttagccaccatcttataaaccacgttgcataaactaataggccaaaaatttgacattcgggtaggcttgtcaagcttcgggataagacaaagtagagtatcgttaatatcatgaaccggcctcccatcatttagaacccccaaacaaaccttggacacttcatcaccaatcatcggctaataattcctataaaagagacccgacattgcatcacttccaggtgctttttgggggtgaatatcttgcattgcacgatagacgtcttccttggtaaaaggagctttgaggtacccatttgtttagcgagatattttattcgaaattatttgttggaatgcctccaactcttcccgggccgctagatttgcttcaaaaagctgctggaggtaatcacatgctactggacccaccattttattcccataaacccggttttcactgctatccagtatacccaagatagagtttttcctctttcgagtgtttgccttcctatgagagtatttggtatttcgatctccttctttcagccaaagtgcgcgacttcgttgcttccaaaacttctcttctttatctaaaaggatattgtttttccgctgaagttctcttaagtgatgccagtcatctgtgttcatactccttgagagggtggctattttatcttcgaattccataagccgcatattcatctcattcttcttgaccttgttccatctttggagagcatccccacacttagctagtttaagcttcaactcccttgccctggtactactccttccctctccccaaatctccgttacaatcttcgagcatatttcttctttagcccatgcactctcgaaatgaaaccgagaatgccatctagcccctgactcatttccacggtttccatacaaacactgaaggaggagggggcagtgatccgaattgacacgttcaagatgagttactttggcattaggaaatacatgaaaccactttgaattcccgcaaactctatctaatatttcaaagataagattgttttgccttccattacaccaaatgtagcagctgccctcataatcaacttccttgttttggttgacctcccaacttttccttgcttctcaatatctcattgaaatcacccccaatcacccaaggacccgagtacatccttcctatccttgtgaggagtttccaagattcacttctttgattaggatccggatcgccatagaatcctgtaaattgccacccttgatcctcctctttcctaatgaaagaatcaatatggaaggaggagaaagaaatgatattgcaattcaccgcattggaccaaagtaagataagtcctccacttttaccatgagcttccaccacaaagcaaccaacaaaacccaaagacacccgtaacacctcagctctcgacttcctcaactgggactctgaaatgaataccaactcaggagtccactgagccaccagggatttcaaggtacggaccgtccaagggttccccatcccttgaacgttccacaaaagtgttttcatggctgtaggcgaccctgccctgtagagtgcgcctcttcctcattgagtccaattttcgaatccccttcctgagaaactccaatcgacataccatctattttacttttcctattctttccgtccttcttcactgccatctttcgtctttgtgcctttgggattgtctgctgacttgggccaaagacaaaagatggacctccttctatcccgtcagtctccttttggaacgtgattggaacatcgaaaagcttctgagtccaaatagcatcatatgaggggctaacggttttttggagtttgcctaaccccatcacttgcccatcctccaccattcttctttttcctctgttatgctcttcattaatacccgagtctcccaaaatcacattcgcatcatgcttttgtggtgccaatttggtttcactcctcttgcttgcttccactatgccactcaccttatcccttaccaaaggtttttcagcagagcaagtcttccccttctccattttctctataagcggattaaaagaattcgagatcctcagtccctggcttggtagaatggcactcggctgttccttatcacccttctataattcctttcttaaacccctcattccttcatgaaagccatccattgtctcattatccacttttaaccataacccttcagcctttgctctttcccctgctacccctgtaatttctttgaaatccaaggagcaatcttttttattatgtccgattcgcccgcatcgaaagcacatgaaaggaagttcatcgtatttgtatgccacccacacctttgatcccccacacggaagc

SEQ ID NO: 37710 - DNA, 2401 bp, Cannabis sativa
  modified_base (26)..(29): a, c, t, g, unknown or other
  modified_base (2348)..(2354): a, c, t, g, unknown or other
gtatttttgtaattttttttcctttnnnntatttttctgtttttttccctaatctttatttatttatttatttatttatttatttttactattatttttgctgaataagtactttgctattattattgggtaattttataaattttcaaatagtaaaagatagactaaaaaattctttaaaaaaccaatacataagtagtgtatgagatttaaccttttagtaagagtttaatcgagttataatatatttttactaatactacatatttttttttaggaaattacactctatactcttttatattgtcctcttttatttttaccctctcttttaaagtctatcatttttatcttttttttttaaatattatactaattttgctcatgtcacttcaaaatactctccatgtgattctcttatgtcaaagtattttgggtacaatacatataaaaataggtatattttaattaaatataaaattaaaagtaaatttgattaattgattaatgaaagtggtatttttcaacttcccctatttttttttttaaaaaacttttgttttaccttttattttactacgtgtctctctagggagactcttattcattcttattgtataaaaatgtgtaaaattatatgatgtaatgtgacatttttttttattaaaaatacatttttttctctctcttagagcatgaccggtgctaattatattcaaagtagctaaaatggtcttattttttatttttgaccaattaaatttaagaaaaatatgtataaaaaattgggctacggtgttgtcagtagctacctttttcaaatatttacgtaattaagccttccacctcaccaagttcaccccaccacactgacaagctattcttcaaattatgattttcactcaaagattttccctgattatgactttcacctaaatatttttcctagttgaagaacaaatgttacaaatctaaatattatccagtatattccaatacatttcaaattttcagttttttattttattttttttatataacatatcgaaataaatatattctactattaatgtaatccattattataaaaaattatgtatcattatcaaaatattataaatattttaactaaacaaaaactgcttaatttatagcatgttgaacactcaaaattactcatccaatccatgcgggactaagaaaaagagaataaaaagactaatgtttaattattttgcaaaactaaaatgtcatgcatgtaagtaacaacttaaatactttggagttattgaccacactttctgatatctttatattaggtaactaatttgtatttcgcgcatttgttcttttatagttattctaattttttaggttgttaattttggtgtcaaaattattaacataatataaaattaaaaaaattagaggtaaagtcgtatttgctagacatgtaattgaaaaagatgaagaatgtatttgtacatgatctcattttttaatttttatgcaatgctataatttttttctttttctttataaaggctttaagagtatatgagaggaagttaagagtaagaggttaaatatgttttgaaaagtaagaaataaaccattattaaagtacttttttcaaaatatttaaaaaaattcttgaaagtttaatagcgctactattatctgtactctacgtaaagtaaaaaaatatttttgcaaattgtgaactactattttatctttactccagcttaatttctcaactttatatatatatatatatatatatatataataatttaagcattttatttagaccatatacaatacatttctatataagttgaacaccatttttaatgtagattatttgtattagagtctaatactttatgacataatttataaataatatcatctttaaaacaaagaactctataaacattaagataaagaaaaaaaaattaaaaatacaaaagaaacattagaatgaagtaattatttaaatttaatcttttctaatatgtttttctaatacatatataaatagatctgtgtagtaataattcaattagtcaaaaaatatttagaagcaatgaaattttttttatataagtatataaataatacagtatttattattatagattatacataacattgacaattattagatttctaaaaaaaacttctacttaagcaagagcgtatagattagatgaattttattttttttttttagaataaaatacaaattttgggcaaattaaaataacaaaagaaagtatttatttatagtgtatgtgtaattaggggtgttcacaaaatatccaatccaatccaatccgcannnnnnnatccaatccaatccgcaaaatgtgaatatccgcacttgtgcggattg

SEQ ID NO: 37711 - DNA, 3208 bp, Cannabis sativa
  modified_base (2986)..(2996): a, c, t, g, unknown or other
aaaaaaaagagagagaggaaggaaaggaggggggaggtgggtttatacttccatgtttttcattaaatgagcctaactatagtcttgtattcttaagtgattgttttagtgcaggcctaacttatcatttctgttgcagtcgagcaacaggtgacaccacttctgccatctcttattttgaagagagtgttgagtttctatctaagctaccaagaaatgatctagaggtaattcataagagccttattatgtgaagttgacattttacatctcatccaaatttcttacttaatgcaattcatttttgcattattttgtagataacacacacactttctgtttcactcaacaaaattggagatcttaaatattatgaaggagatctggaagctacaagaacttactattttcggtctttaaatgttcgacgtgatgctgtcaaggacaatccaaatgttccttctctggtaatcagtttcttctgccttgtagtttatgttatcatacttatcactaactttgtttggtttgtgttaaaaattaagctttcatcatttttgcagttttctagtttggtatactacagtgtataaatattaccattgagcatcatttgagtcaatttggttatctgcctgaaatttatgatatgtcgtttgttaatagatgaaaattggcgttggatttgcaaaatttaaataaaaaatcttgtgttcagatatgtacaactcatcgtaaattatgatcatgaaatgaccagcctatttgtcagatttaccgaaagtccacccaagagggatagctcaaatgatcaggcatgtggttaactcccacatggtctgaggttcgagtccctcctggggtatctacacctatagaactcagtggaaatctttcaaaatcatgtaaaagctctctgcttaacttgtgtgttccttccttttcattttcatcaaacattcactatgttctgcaaaaaaaagaaaaatatattgtaggggtaggcgggaattctattttctgaaaagaagatttactgaaagtctggcaaaactaattaaacagaaaagtttttggataatatatctatgtgaaatgcatatctgtctcaaagtcttttgatggtgaatgtgaaatctttttaaagttctacgtcactttctttcttcccctcttccacaaggccatgctctaatatattaagctcggaatgcttcttggggctatctcgtgtggttagtgttttgagtgtgtttgtgtgggggagggttcaagtctattgtacacgaacattttcttttacttccaagatttgtttgttgttaactctggcattgtgttgttgcactctcccttccccataattacagattctggaccttgctgtttcacttgcaaaagtcgcagatgtggataggagtttagggaaggaggatgttgccatcaatggatttcaagaagccatacaattggtggaaccattgaaattgaaacccgaagaaactggtcttcagaaacgggtaaagttccttcctttcttgtctgaattttatcttggtagtgttttcaatgctgaaaattaatacaaatacttgtttggataccagcttgattcagtgctagaattccttaaaagtcaaattgtggaaaaagaagctgaggcaactctctaattgagctgtgcgtcaacagaaagagagagaataaatacagcatagacaacctgaggaagatggagtagtttcaaagtggaagcttgaataaaccgctggtgttattgtgtattattatggttgagaaactttttctgctattatctagtaattgtatctcatctcaagtatctgtatataaaagcttatctgctactgaactgaacatgaacagagtaagtgcacaagcatcaaccttgctcctggatagactggatttgtgttactcctttccttcccatttgtctttgccttatataccctgtcactaaactccttgttttactactcaagtcaaagagaaaagaaaagtcttgttcgattagtcaagaccatgttagaaatctatttaatggggtctgttattttgccgtatatgatattgtaattgtaattgtacttatataatatatgtttggtattgtctgatatgtatcagagtactaaaaccaccagagtcacaaacattacattagctccaacgctgcgtattttgctggcagtggcgtggcccttagagaagaagatatactaggaagtagatatttatttatatatttttgtaataaaaatttaaaattaatttttttatctccacagtccacacgcccctaaacctttctcagtaagaaaaaataaaaatgatttataccaaaagaatcgattgtttttgttttggggagaataataaaaatttccatctaataatgttgttagcggcgaagctccaaaagagtgttcaaagtttttttttttagaaaaaaattggataatgaattttttttttaatgaaaattaagcatacctatatcgagttaaattcataaaatatggaattaattaaaatcggagaatttccccaatctaccatcttgaaccacactcgaaccactaacgacccaaactaattttactacattttattttttagaagtgacgttaaaaattaatttattcaaatattcataaaaatatttagttatttactattttattattacactttcaatttttgtcataaacaatagacgaagtgtaacaatgctcctaaaacaatttcaaataaaatcactgtgaaaagcgaaaaccgaaggcattattggtaatgggtagtcatagaatcgacttcaataggaactcatatgaacaagttgactggttttcccgacaaaagctaaggcttacgaccttcttcacctacaaaatctaacccacctcacactctcacactctcacactgctttcactttcatccacaaaccctaacttctctnnnnnnnnnnnccctaaattctctctctgccgccacttctctacctctgtgagtttctctttctttttcatttattttatatgatttggttttaaattttagaaatgtagcaccaagtttagatacttgtgagtgaaaatgaaattccggctattactctctgaccagataggaaattcaacaaatgttttcgtaccttctatgattgatttttttttttttt

SEQ ID NO: 37712 - DNA, 3940 bp, Cannabis sativa
aatttgattatttgcactctttcctttgattgacacttacaggggtatcatggtgatacatcagcaactttcttttgtggtgaagttgaagaggaggccagaaacttagtccgggtagctgtctcttcttcaatattttcaaccttagactttatactagcataatattaatcactttttctacttgaacagatgaatgctccatgatattaaaaatcttcaaagtaaataatcaactctaaactttaggattaaaaataagatgagtcttggacttcgtcttgatgaggttttgattttaatgaataataccttaattgttttgttttattttaagtttggtcggacgaaatgttgtaggtaacaaaagaatgtctagataaagcaatatcaatttgtgcaccaggagtggaattcaagaaaattggcaaaacaatacagtaaggcatatactaaacacttcttaattccagttcacattgtgcctttttaatgcaaaataaagtcaccattttgcacgttcagttctgtattaatagttaatgtgcttcttcattaagtgatcatgcagataaatatcgctatggtgttgttcggcagtttgttggtcatggggttggccgcgtttttcatgctgatccagttgttctccatttcagtaataatgcttaccattgccataatttcttgttcggataaagtttgtgtttttgctgtagttttgttccccttttaggttgtttaaataaaacagcagtatcttttatcttttatatgacaaataaataatagtcacaaaagattgaattacagggaatttataaacaaaattccatttgactggaaaagttggtaatatttactgctttaaggaattttcttctatattgtaagcctatgatactctttctattggctggtgaaatatacctgatccactaaataaggtgagggaaactctctcctaacaagccaattttcttaggttgagttaagcctaataactttctcaatatgatattactaagaacaagttgtccttgtgctattcttatataggttatcattaacaaggtggtccctctctttattttcatgcatgtgtataagctttttcagttgtctaatatatatagatatatagggatgtatttacaatggtgatttcgatatttgtctagaaaggatttggtagtttgccaataattttgtgattctctcatctacgttatgtatatttgttggatatcactacttggtttgatgtaacacctctgtgtgattacttgtagggaacaatgataaagggcgcatggtgttgaatcaaactttcaccattggtaagaattaaactctttaactgtctatggtaattgtatgctttgctctgttattgttattctatgctttcatgtaaataaccaatacgttcaccttgtggtaaaattctgtagaaccgatgctaacaatgggtagcgtgaacgccgtaatgtgggatgacgattggacagttgtaacggaagatggaagcttgtcagctcagtttgaacacaccctactaataacagagaatggagctgagatattgacccaggcttaggaaaaaattgttgttgatttttctgtattctgggaaattggtctccagagctgattggatttgttgcctctaacaaagacttaatatttgcaatattggttgaggtactgtaacatttactagttttatcattggtgttagaaactgtatatcaattgtatggtgttataatatataacagaaacacttggttcttttacaagtgcacaaagatcaagtctaccttttgccacaacaagaaggaatggtttcttgattagaattttgtctctgtttttttcttctgtttttggaaaattgactggttgcggaagaaaatcagagtctaaggtatgacgaattttttccaaaaagtaactttgttttatatctgaaatgtatatttagctatgaaggatattactatttcacaacacgagccaaacatacatttaaaaggacgaatagcaaggatttaatatttctgataatacatacaatccaaattgcataaagatctaagaagaaagagaagaaaacatacttgaagttcatgccacatggactagcggatactgtccaaaataagcaagacaacttgaaaattgtcatagcaaatgcccttaaaatttgacatgatatgagtttattctaaaagtagcaccaccaacacaagacttttgatgatatgcttggggagaaaccttcagtagcttgttgaggatctaatatggtgaaagtagcattaatggaaaataagaatctattgggaattcataacataatagcgttgacgaactcaaatcaataactacaagtgattcaacctccaatgacacctctttcctgctttgctcatgactctctacaccgatgactatgattttatcttcaaataaattcatcactgaggatgggtgggtattgcttcagtcacaaaatcaatatcatcacttgtcaactaagcatctaatgtacctaaattttcagttaaaaccactttcaatgggtcttgctcttcaattataggcccaatctctttcgtgtattcaactaatggtgcttctacattattcaaacaactcacttaactttcgttatttgagttattgtccttaaaatactcctaatcatgtacccttaaattatcacatagagatcttactatgtctgtcaagtgattaattttttctgcaagtgatagtgtattctcctctttctcaaatggttgggttggggtgagtttgggcaataaggagggtattggtgactccaaccctaaagtgagggatcctaatgccattgataatcaaaatctgtcatgtcattcaacaaatttattatatcatcattgcttcttattgacaaagacttaagagttatccttgctccataatctactaaaatttttgtttcatcatccaatccattataaaagaacagattaagatacccacttgagaaattgtgataacttctctctaccaatgcattaaatctccccaagcagcatagaatggctcattgtattgttgagaaaaactttgaagctaatgttgatgtagcatttattatgtacctcgcaagaaaaactcatataatacaaacattattaaaattaaactaatagaaaccaaattagaataacatttaattgatttaatattaactaaaacagtccctgacaacgacgctaaaaaattgttatgaattttctagcacgcaagtatacatatcatttacaagtaatagactcacaaaagtaaggttgatcccacaaggactgtagttaattaccaaacaatttaatttctaattctatttggtgataaaaataagaaaagatgttgaaaatctattgaaaaagaaaacaaataagttaataagtgcagtttaacaatgattaaaactcagggtgattaatttcaactaaatctactttacaaatggtttataataattcaattcctaaattctaactttcatgtgatagggaatttactaaagaaatttatgttcgggctaggatatatatgtatgcaaattttctactctcaataaatttaaacacataggagacattaagcataaaaatcttaaatgctacgcaaatcatataggtactctcgtcctatatcaaaatttgtgtctatttcactatagcataatcaatgctcaattctcaaatttcgtattgatattataaatagttaattgatggtcaggtaattaaaatagattaagtacgaataaaatagatgtacatagaaaattggagaagaattaaatcacattaacttaaaataaagtgttaaacaatcttcattaataaccctaattgaaagtctaactactcatatt

SEQ ID NO: 37713 - DNA, 2113 bp, Cannabis sativa
taaataaaaataaaaagtcaccatgaatttctcataaaccaataatttcaattatatagacacactttatatagaatagatatatattgagatgaaactctatatatatatatacatcttaccccatgaattttttttacaattattttaatttctcatcctagtttcttgtaaggaaaaagtacttatactatttgagatggattacaatatgtggtgtgtcaaattttcatccatatatctagagatcatatcaatatcttttaaacagtgttaaaaattaatttatatacatcaaaaagttttaaataatatttgcatgattatttttggctaataactatattgatgatatatccatttttttactttcttcatcatttttgttttttttttttcaatgttaactcagatttttattaacgataaataaattcttaaaaaataaaaattaaatattaatacttgataaatataaatatattgaatacaaaagaattaacgtagttttgtagttaaatttaaatattttacaaatcattcttatttttgaatctttctgggaaaatgttttgattacacaggaaataaatattttctcagttccacaaggtctcttgtaacgccctaactaattaggcatgtcagtgtgattttaaacgcactgtgcagcttgttgctaatcaacgaaattaatgaaaaatgtgattaattaaaattttgcttatttaattagaaacataaagtaatacatttataaaatctcgggatcccgtttacaaaagtttgctattcatatacagaagttttatcgcccagcgactatacagcaaaagccctgatcaaccaagaatcctttgatattagttgtttttttactgggctttatagactcacccctatatattttttccattgtaggaacttagtttgatgctagtggatgaggatggtaccgttgagaaagaaagttgttattagtttagtcttattctacttatcaaactttctaatgaaactaattttatatttaagcttgaatagatggtctggatgacttaaattagctatgtactagttagaaatgagaaatgatggatgctagatattattttagtattttattaacttattaaatctatctattcggtgaccacataattgtggggatattattgttcttttatatcgatgagtgatcctgattttgttactaatatttttttatcgatagaggagttaattcattatttttaaataagtattttgtgatatcgttaccatgacaagccatcagaccaccaccatcgcctgcaaaaaaaaaaaatcaaagataaagagagagatggagaacccaaacaagaatgagagacatattgaaggagaacgagaaagactaaggacttaaagtggggcttccatttcgtgcgacggcggcagcagctagtggactcagggcttcaagtaacagcaactgcttggtggagttgggctattggtctacgccgaagaagatgagaacgagctaagagaaagagagagaggcgttgagtgtaacggggtttgagtgcggtggagataatatataggtggggtttttttaaaatggactaaagcccaagtaaattaccgttagttttacactgacgtaaaatttgcatcgatgcataattgacgcaaaaacctattcaaccgacgctaaatagtgtgtcttagcaaaattgacgcaaaattcgagccctcaattttttttttaaaaaaaaacatctttagcaacggtttttgttttagtgtcaaagtagcatccgacgcaaataaattattatttgtgtcgattaacaaccaaagcaaaaaagagagggttaatttttgcgtcgttcaataagtttgactaaacacgttgatcgatgtaaaaattcctttttgtagtagtgatcacaccatattcaaatgtgactttactatttttcatagattaagcatgtggtcatgtgtctagaacatccactatcaaatagtaatgactacgagtatcatgaaaagtaaaatcagaaaggtatttagattcatggaaggcaaaagagggttgctagcagagagagagagagagaga

SEQ ID NO: 37714 - DNA, 6952 bp, Cannabis sativa
  modified_base (4739)..(4750): a, c, t, g, unknown or other
  modified_base (6233)..(6237): a, c, t, g, unknown or other
gttaaaaaatagtaacgtatcctgagatccattttttttttttttgaaaataaagtagctttattcaaacaaatcttccaaaactatgaaagaataacaagtaggtaaagaattcccactaagaacacgatcaacctcataaagagaagcccgtgctaaagcatgcgcaagactacctaagttaagcaatagaatgggacaatatttggctacaagacgtaaaaaaacaatgctaaaaaaaggcaaccttgaacttttatttttttttaagtttttatttatttattattttatttttttttataattttaaaccgtgaaaatcatgaaaattattccaaaaaaaaaaaaaaaaaaaaaatagttgtaaaatttttaaagctgcggcctagaagggaaagtcacggccttgcacgaatcttcggtgttgggattcgtttcgaaggttgcggccttcccagccaagttgcagccttgtgttgcctgctgctataaaaaagtgcttcgcgaaccaaaaacctaaaacccacattttctcttctcctccgatttcaatagccccaaacacccataattcatctccatggtcatcataatcaatttccttcatcaatcttcctactacatcaaattctcatcatctcttcatcattattcttaataaaccatatcacatttcttaattttaattcaaatgttcaaaagagaagcttcatccatggtgatttcttaaatttcttcaagcaagaggagatccaagggttaggatctctattgggggtaagttttcaatctctttgattgtggattttggatatttaagtttcaattattggtttttgttgaaattttgagatcggaagatgatgaatagtgaaatctttttaatagtgaagaactatctagtggattattatattgttgagttggattgtgtgtttgtgcttaattttgaattcttggatcattgaaaagtaagggaaagtgctgtctaatttttcttaaaatttctttgaaattatggcgcaaagaaggggtggttctcgttcttaaaggtaaccaccgtaacaacctcaacctaattctgccactaacaaatttatgaataaggtagtctctaattatttttagagagtttgtgggaggtttgttattcttgagcggtgttttgaatttagggaggaaccttttgaagatgattccatggaagttgttcgggtagaaattatcaggaggcactagaaaaaatttgttgttctcaaaccctctcagcctaacttatccctaatgtatgagttttatgcaaattttactcaaagagatgccaactatatgatcaaggtattgatgttacaatctctgttgcagctttcaatgttgtgtatgacattcctcacattcttcttacccctgataatgatgttactaaattatttaataatggggagctcacttggcaaaaagtagttgatgttgtggcccatgagggagctgagtggaacatggcaggagatgagattaaatgtttgtgaaagtgtcagttgaatccaatagcaaaagcttgggctcattttgttagtgctcacatttaccccaacactcacatgcctaatattggaaaagatagacttttgattgtctatcttattatgaaggggatcccacttaatattgaccagaaagtgttcgagagttagcgtgacattttgaatttatgcacaataagtgggttgggacatccttccatgattcttgatttatgtcaaatatgaggttcctcaatatagattggataccataggacaaattcgggtactattttgcatttttctgtgaagaaatattctgcccccattccacatcctttgcctcctggctaattcgggggctattttgcatttttctgtgaagaaatattctgcccccattccacatcctttgcctcctagccaattcgatggctattttgcatttttctgtgaagaaatattctgtccccattccacatcctttgcctcctggccagcgtcgtaagaaggtcaagcgacctgtggtggatgaagatgatgaggaagaagctttgaatatggaagtggagcatgatgagcaagcatgaggcagttctcaggcagcccctatgcctgctgggagtggtggtcatgatccttatatatggtatctcattgcctaaaaccagtatatgattaaggcccagcaaggcatgaataataatttcaacaactttatggccttatgacatgaggatgagaggattcaggtagatcaattgaatgagttggtgcagaggctagtggtgagcccaaatgtggagaaatttttcacatgtctgacgcaatacacaccatactagtggccaccgccaccgccagccattttttgtgtatatcgtattgttttacctgtgaaaagaaaattgctaataactgtgtgcttggttaactatttttgagtttaatttaaaaagttctgacaggacatttttaatatgtttcacaaatacaatattttagactttacaatatatgcttgactagggttggcggcataatagtttaaatttgatagaacttgtattgtttggcttttgaggcaaaattcttgatgacttatgctttaaaaaatgatttaggcaatttttttgaaacgtttgtacctttcaagctaacctattttgtgattatctgtagtttaactctttttgagtcttagaccgatttttttaatacacactttttgagctaataaaataattttgacccatttattatttttttcttatcctaactataccatgagttttcaaataagtttgggggaaaattataatgtgggtattgtgttttgagaaagcttaaaaataatgagagataatgtttttaatatgttgcaatccttgtcatcaaaatttaagatctaaaaaaaagtgaataaaaaaataatagtgtggattgtaacaatataaatatctctagtgtatggcagtaagtacgggaatgggatagttctgtaataaaagtgaggtgcttggaatttaaaaagcttatggtatagtcactactacaaaattggcttttcccaacggtttataactgtcttttatactatttcccaacggctcctaaaactattggctatgtgggtgtcataaaaatgcggaacattaagcctcacattataaccttttaatttcaaatcatttcttgttgacattagtggagaaagttaaatgatgcaaacatattgaaaatttgggttgtagttttgtttggtatgagttgagcatatatggcggagtttaaattattgtgatcatttgtgagttatattatttatttcccgttgaactttaaagttgaactttggggcgggtgaactaaaaatctggttaaagattacagttaagattttagagaagagtcaatgtagtgtatatgacaatggtggtttacttgtgtatgttgttttcttattcgttagttaaacttggtctttactcgagggtaagtaaaggttaagtttgggcgaatttgttagatttatttttatgcacttttatagtctaatttaggatgtgttttagtgtttttattatttaattgtagatttattcttagttttaatttttattgttttttaggaaaaatatttggagatcttcaattttggtgttctgcaagcctttttgagcaaaaatgagaaaatataatgaagaaagaaaactttttttagcttggattaattttctatttcttaaaatggctcaaaatgaaatttttagctcttaaattcacgaccaaaagtcaataatagtcaaatttataattaaggtggaaaatcaaagaaaaaaaaaaagaaacatggcctacaaggccgcagcttggtaagcaaggtcgcgaccttacctttgttcactgtaaaaaaatggaaattggaatcaaagaattagcgaagatcgaaaaaaggagaacctggcttataaggtcgcggccttggtgttttttggggcaactcaaaatttgtgctgtaaaaagggagttgatgactagttttcgacaccattcaaaaattgagatgaattctaagtgtagaaagagagtaaggagcagaaggcaccggtgaaggactccaacaatgttctatctcttcaactctatcttttatatctttaattagatttcttttgttttagaatgtcttttagtagctaagttctcttagggattattatgtgaaccacttgagcttattttatggattgatgtgattatataatttctttttttttctttattcaattccatacaatctgttttaattttgtaactattgactgatcacccttaattgttatttatgaatttaaatcaaaatttgaaaagtaagatttaaatatgttatgattattatggatgcaaattgatttaggacgaaaatacctaggttgttgtataattttataagttgatatgcttaatgctatatttgttattaaacttaccatagaatgtgtacataaattgatccaatctaatgacaaccgaccgatccaattataactgatcaccaaacattggatatctaattgtgatcagattggattggatgttatttttgaatatctaattggatcggatcagatgttggatgggcgtctagaaatccaatacaactaacatctaatcgaactaattagtatttttatttagtttggatgagtannnnnnnnnnnnattgttatacgtaaaatatatatgcatatataacaattaacattaaaattttagtcttttactcttggatcggatggatccaatcaaatccaatacatactagagctaaaatattggatggatccgatctgatctaaaaaatactaggtctaaaatatttgataaacccaaattaaactaataaatatataagaaatacatccaacggatagaaccgatccaatccaacatctaatggatgttggatagattggatgactaaaattaattggatcgaatcgaatggtaaaacctaacatccaatatataattgaatcaaatatggataggcctaaaaacattggatgtggtccaataaacacccctaatcatctcatataacctatttattccattcaaacgagtgccctttttcattatataaggtcacgtaaccagttgcatcaccaaccaagaccagtctcctcgctagcctgcgtgggcgagggtgttcaagcattggatgcgcttcgattcaaatgatcttcctacctaaaatcttgtccttggcacggtttcttgttgctagttggaacttcttgatgtctcctttgtatgtcactgtcctagtaccaacatccacatggtcacacttagggaaaacccagccgtaaaaatcaagtgaaacatcgttacctacatacatctcacctaggttctcatagtacaccattttctcatcagggattttgattttttcctgaaaatatacaatacaaaatcaagattagaaaattctcttacacaaatgtattggatagcataagattacacatcagtattgatcattcgtttccatcatcacctaataagatactcccttatcccattacaactattggtgcataaaaatgtcagcaaaagccataagcataatctaagtgcaaattaattaacaacacaaaattctaagttctaacttggtctctatagtgaaaacaaaaaaacccaacactagcacgatagaagaatcataggctgtaatacctgaaaggcaatggcgtattcataatcacggcaccgatggacttagcgactctggaattagcaccatcggctccaatcacagcatcaacctctaatgtcttcttatcgcctgttccaccggcccttccatcatattctgtgaaatgtagaacttactttcttccatgaagaaggagctagaagatgcctcgaggtagttatggtatttgtgtttctaattattctataacaaagtctaaataattgtacctttaaatatgatgctctattaagggattgtggttttccaagtttcaatagttggagaatttagagacaataggtcgaaggcatgttcatccttctcgaaggaattccccaacaattacaaaggtaaaacatggttacgaagcagatggaaaagaaatctggtgtttgtgaaggtaaggggtttttgaatgagagagagagagagagnnnnngagagagagagagaaagaaaaaaaaaagattaattaatgggaggaggttagaaataattgataatttagttaaataattattatttaattcaagaatattattaaaaaataattttataaataatctaatacattctaagtattaaatatttatatacactcatcaaattattaccattagattaaatatctatggctgtaaaaatatatctactaaaacaacaaaactaaagtgtttactataaacatgtcctaaatataatattgacttgagtaaacaataatattatttttttgttctatttttttaatatcatttcctactttttttttttcaaatgtactacaaaattaattttcatataaaaataatcgaatataaaaatattttaaataaatatgtatcgcattaattttataaaaatattagatagaattatttcataaatacataaaaataacaaaaattacaaaaatgcaattgttcagaattttaacattttatttattgaaaatgcgatcttttgatattttcatgttattttatgttgtatttttattaatttattgttaatttttgttatttgtatattatttttatgttgtttgcatgttatttttatgtaatttttttttattattttcatgttatttttataagacaacgtaaaaatattaatatatatatatatatgaacgtaaaagtgtaattttt

SEQ ID NO: 37715 - DNA, 2836 bp, Cannabis sativa
gagcctctgaaatctgagtagatagcttcctaaagtgtgatatgttccacttcctcaaatggtcttttgtaactttgagttttcggtacatgtttaccattgggttatcatgagagtgaatcgtccaagccttcttgacaacccagtagactctcggatcgcgttcccacatcaattcgtatttaaattgcggtttggtgcagtgcctcccaccacaactatccaacagaatagggctgtgatccgaacttgacgccgttagatggctcacaatggcattaggccaggcaagtcgccaatcaacagacgccaaagccctgtcaagtctggctctctttaagcaggtgcccctggtggaactggaacctttcttgaaccaagtaaatttagtcccaaggaagccaagatcaatgagccctgatctctgcaccgtccttctaaggttaaacgagtatctagcgatattacacccctggagtaattcgggcagtcactatcagttaacgtcccatttagatctcccatcatcacaaccggaatttggcaattgcagacataatctcccaaatcgttccagaaaacttcttttttggcatagacaggagggccataaattcccatgaagatccaaggtttgcccgggggatctgaagatatacacgcagtgattctaaacttgtccgcactttcaattttgcagtcaacacctttcatccaacacatcgcaaggcctccagcggtacctattggaggaacagagcaaaattcttcaaaatgaattcttgacagaatagtttttaatttctcttcctgtaatctaacttccaatagcaccaatagttggagattcgacttccggattaaatccttcagttgtcgaactgtcgctgcattctcgagaccgcgacagttccaagcaatttctttcatggcgacttgggagacttttgcgagcaagtctccgcagccccaaaacgaaaaacctggtttgaattgagtctcctatctccatttggttctttcacttcaattatacaggaagagcttggtttcgaattacaatcaacaatgacaaagtgattgtttaggtctacctttaaatcgaaagtattattatcccagctcgttacgatggatgcgtgtctcttctttgaggcaatggatgctttgcttttgaaggattgggctttaggtccgagaatgccttccgattttcagggtctgcctctatgtttagattcagccttagaaccctgattgcctgaatccagaatagtcttccctgagtctttaatggccagtcttcctcttttccttctcgggatagagctgtttgaggaaccttgaaaataagagcgattcgcgagggggggtcgagggagtctcctttgggccgttcttcagtatagcaggctgggcttgcaattcgaacttaggaggcaaaagagtgtgggtattagggctattcattgggcccaatacaagagtattcaaagtattagggtcaaagaaaaaaccctcgatggcttttcattttttaggcccaaagtctgtctctaaggacctaaaatcctcaattcccaagatagggttgaaaagagagggttccctcatgtatttgtcaacagtgccaaggcccgtaagagttttgaagcccaatgtccataaatcatttgagggccacggtataggctgggcctgagtgtgggtatcagggctattcattgggcccaataactttaactcatcttttttttttttatcaatatcatcaaagaatcttcattaattctctctccatctctatctcactattatagccatgtatgcatgacatgttgctttattagtttgataaacttagttatgtttttgttggataaaacattataacgaagccaataatacttttcttaaatttatgaccaattttgaatataaatatgttattgtgtataaccgattcatttatttgatttttattcaacttttcaaaataatcatctatatatatataaacgatttatatatataaaggagagaaatagagcggtgacatgacactctataatctctccaaaactatttttctcttctctcttgattctctactaagtgatattctactattattttaataaattttcctatttttttcgtttcttcaattttttagagcatacattcttcatctttctcactctctaatcttatatgtttttttttaatattttttcttttgttgttttgaatattataatgagcatagcaatgacatcaatagacaacatcaaaatatcgactttttattggtatatattttcttttcatattttataatatatttttttagattactaattattgtcaatatgatttatttattcttaatttctcactcatcaaaatatttcttgataatttggagacatacctactttttatttatatcgacaactttactatcgttataacttcaaattatttataatttatttattagcctcgattttctattagtattttttctctatatttttaatatattttttggtagattattaattaatgtcaatataatctatttattcttaatctctcactcatcaaaatatttctcgataatttagagacataccgactttttttttatgtcgacaacttcaatattatcataatttcgaattattcatgatttattcattagtctcaattttctaatgcaatatataattatttattgttatgattaattaattaattatatttaaaaacttcaacacataaaaaccaataattgtttgactagattcatgtatggtttagtattttaatg

SEQ ID NO: 37716 - DNA, 3444 bp, Cannabis sativa
tatataatatataaatatttctctctcaaagcccttgaagcttattcgttgtgtcaggacatattggccctatagccaatatgaactgttttcctcatggaataagaggaggtaaagaaacaaaaatatgtttatacatgtataaggctgcgtgtgaaatgagatatatgggtattgtcccgcaaagcagttcttattgatgaggaaagtaatccatggagataaatattgtgtggactacataagatgacgtatattatcttggtgtatagatatatattatatataaatatttcttgataagccttaaattttgttcacactttttttttttgttaattttaatatcttaattagttttcaaactaagactccacactatattttttttttgtaaaatcttaaaccctcaatttattttgtcatcctttaagtttttcttttgttattttttcatcaatgttggcttagtcaaggctcgttcatgcctaatcccaatgtacaaaccttcgatccccccctagttctataatctgcccgtcttccctagtctcttagagcccctcctcctgggcctaggaacagacgtggctgcacctgtcaagttacacgatctttttgtttgcccgctttgggtaacaaaaggcaccttgtctatgataataacaatatttgtgtagacacacgtcctaaggatgtaataagcatcgatggtcaatctcgtttgatacaggacttgacttgaaaacaactggcccccctcaacccgggactggatctataggcgttggaactacttgaaggactctctcccctttggcagaagtaggtaatcgggtcccctaagaactattgtagggacttcagtagcttcctttatctatggggctactaatgcagcgagagactctgtggggcctggtcatttctatgtcccctcaggtaggcaatctagaggcaaaagatcacccaatgactcattcaatctaaatagagtgaggcctagtgtcggagttgtgtaactatgatcaggtagaaattagccttagttaaaagaggctgactactatcgatgggagggaactggcttgctaccgtttgactgacttgctttcctccctagatggctttcttgcttgaaatgacttcccaaaggaaaggattgacttagcgcttgaaactcctagctcttgtgacatgctatcttgcccctcttcattcccaagtagagggtcagtttgtggatcgttgtctcacgtactaatacctacagatgtctgtagtaggctggccgccctacctaaaccaattatcatatcgttccctaggccccattgttggaaaggctcagctttaaaactgtacatggagcttctacgatattcagaaccgaaaaaaagatgaaattttttatcttgttagccaatgtaagaccttcatccagtagtaaaaagttgtcccttggagctgctcccatttttataggtatgaagaagcaggagtgcaccacatggaggagaaccctactcgactttgtatgccaagtcactagaccagcaataggcctgcctgtgtcttcaggcaagaaagaaagaggagaaagatagggtttccatcaattagtcaagaaaagctaaccaaagtgaaggtattcattcaagcagtaatggcataccgataaaaaagatctcttgggcaaatttgctgcttactgctcatgacaatatatgacctatactatagtcaagtcatccgcgtactcttttgatttcaaaaaagaaaactacaagcaactagatgattagatgttagataatctgaatatagcctactacagcccttgttctattggtttggtggttgctaccaagacgatttctttatgcccatcaaaagacctcgagacgctaatccacgaaaaataatatgagaaattagaaagaactcatatatgaaatgagggcaccccgtgtagttgaccgaaatttgtatgtctaagttttgcatacgggagactctttaacataagcacaaaatcacttagagacttatagacctccatgggacctgaggtgtctttggggagataagggtgaacggctgcatatagctcatttggctttagcagctccatgcgcaagacttttaaagaagtagtgcagagtcgggttaatgattgcgcagaataacttctcctaatgacatataaaatgtggtagaggaggttagctcagggatggaagctaagcgcagagagcaaagcgttataagggcgagctacaataaacacaaaggaaaaagctctttctacttctccttataatcttgtgttcgaagcccatcctgcccctttgttatcgaaaggaggatcatccgtatatgttatttttgacagttggagagatcatcgtcaacgaggactcataacaaaaatgacaagacaacaaaatggccaaactttccaggcgaaataacctttgttggaagaagggctactggtatgacatcaatcactcttacctagaaacaaaactcaagttttctcgtgttgagaaggagagtcgctagttcttctttctcttgttggcatttagctcgaaagggatcaacttcaggctcatcactactttaattcaaaatgtaactaatggtccccgactttcggacaggcaatgaaggctcgtttaatagacagcaagctatagctttaacgagcagcaagcacctactcctaacaaaataaaaagtgacaagcagagattgacaaaacgagcccctacaagagaaattgtatgctcctgtatatggttcttactcaattataataatttgatcgtaaggttaagatttagtagttatgacgtgtacatttgctaatcatttaactcatgaaaaatcaaattttgcaaaataatcaaatttttatgatttttttttattttaataagataagcaatttttttttgcttttcaaaatattaaataattactagtattttttatatatctagcccatcctaattattgaaagtattatattttctaatcaactaactgatataattattaaatatctagtccaatgaattattattaattttttaattagtatttcaaagcatatctataaggttccattatatatttataatatattttgttaaagttgacatggaatataaaatatatacataattttagctttaatattgttttcttcaataattttttttttttgactaaagaagaaattcattaatcaagaacagccaatacaacacaagcctcaccaaccggctccaaccaaacaactcctctcaattcatcaatcgcctatacaaagcatttccttttaattcatgtttaattctaggaatgctatacaatcaatactttacaatatctttaatctctttgactatgtatcccaccatataacaagtg

SEQ ID NO: 37717 - DNA, 3633 bp, Cannabis sativa
tagttagggtgttacaacatgtttgataaagacagcttaattacttacatatcggtccatgtcatatataatatccatcatatacaggatctttacttagatgtcttcctttatcaataatctgaatcgagattgcttgcatcgaacaacgagcatcagtgaactgtaatagcatccgttgattaaaaatttcataactttaaatgttattgactatttttattcatggtcagtgatcttaattcttcatacaatgcaagtcacaacctcatatatgaataaataattttttgatatttatatataaagtattcaatataaaatattaatattttaaaattcaagcatatataaaaagttcaactataaatgtctttatagacttttcagagcataaatcctaacatgtactccattcttctaataaaataatttctaataaagactttaattttgtttgtactgcttattttcttgggaaaaatcacaaatttctttttcctaaggcctttaacactgtttacgactcttcttcaattagtggtttttgatttacggcccccctctcataccctatctttaaatgtttataagtattacatacactttgtagatgcctattgtaggttcacttggatatatatgctcaaaataaaatatgaggccttcaaagtgttccaacacttcaagcaaaagttgaactacaattgagaaccaaattattagctcttcaaactgattgggggtgaatacaaaacctttacaccatttctcactaaacttggagtcatccataggcattccttccccaccacacatgagcaaaatgggttagcaaaaaaaaaaaatatagacacatagttaagaatgcccttacattgcttgctcaagcttctatgcctcttaaattctgggatgaagatcttagaattgcattgcatctccacaataggcttccacacctattctcaatcataagtttcatattgaagtcttgtacaacaccaaaccagattataacaccttcaaacatttggttgcacttgctatcctaatgttaggccatacaacaaacacaagttagagtttagatcaaaaccttgtacctttcttagttataagtgtctagactccacaagtcaagtatacatatctttatatatcattttttacgaacattcattcctttacaaaaaatatgtcatttcacttatgtccaattctccacgtgtgaccaatcctactgttacttcttgtatccctactcatcccaacccattatacctaacctccattaattacattagatgattcatcttttcatgcaccatcatcttcttcttcatcaccatcctccagtaccaattaccatgattcagatgctcactttactaatattactaatgagactcttttacaggccactcctgagcatcactctcacatacaacaacatcagcatagccgctcaccaccactaggctttcctcatattccctcaacctcaggtctgcaaagatctcatcagtagctcaaaatgtctccacctccaggacgggaacaatcacctttgcatgttgcattgtctcttcctgcgccaggtcatgcacctaattttcttcctatttcttagcctgcatctctgcctaaaattagttctacacttgtttatgatgtttcatcacttatggaaccttcaatatccactcataagatgcaaacttgatccaaatcaagtattcataaaccaaaaacttttcttgtttccatagtacctctctcccttaaagaggctcttcaacaagaaaagtggctatgtgccatgagaactgaggttttctctcataaggaacaaaacctagatcctagtgccacttccagaaggcagacaaccaataggctgcaaatggttctacataagagaatcctaatggtacaattaatacatacaaagccagattggttgccaataaatttcatcacgagcctggcattgatttcacatagacttttggtcatgttgtcaaaccaatcaccattcgagttgttcttactttagccttatccataaactgaattgtaagaaaacttgatgttaataatgcattcttaaatggagacttaatcgaggaagtttacacagttcaacctccagggtttgaagatccaacatcaaacagcttagtatgcaagctcaataaaagctttatatggtctctcaaacaggcaccaaaggcctggtttgagaagctccaataatgcattccttttggcttctccacttctaaatcagacacttcattattcatttaacattctgctcaaggtacaattcttgtactagtctttgtggataatattttgattattggcaacaaccaacaagccatagattcacttgttcaagcactaaatcaaaaatttactctaagagatcttgaaaattgagttactttctaggtgttgaggttaactaaacactagaaaacatgcatctttcttagaccaagtatgctcaagatcttttgggtaagaccaaaatacaaggtgctaaacactcgaacactcctatgacaagtgatttgcaactctctgcctttggcagtggcattgttgaggatgtgcagttatatacattgaaagagattttaggccatatgattgtgaggtattggagagctccaaccactaacctatataactgtacatcctcaacaatgctccctactaatctacattcaaaattgtaagtaaatgtacatatatatatatataagaaagttagaaaaagaagatacataaaaattatattatattacatatatataacaaaagaataatatatatacatatataaggaatggaatatatatatagtgtattatatgttgttgtaacatctatatatttaatcaatttttatattgttcttgtattatttatattttataatagaattgtaatatatcttgattttttttattgtaataaactctctaataaatattaatcttgtattggtatttattgtataatgattttattaaaaaaaatgatgatgggacaatttttttttaagttaaaatggtaagcccaaccccgacactcgaattcagggaaaaacttgttgaaatacgcttagtataacccagacccagaaccctctaaaacccggtgctaaaatgggtgggtttcgtatgtgagtccatatacctagggccggccctgaaatttagtaggccataggaaaaaaatatttttgggccctcatttagaaaaaaaatgtgatattttgataaaaaaaatatatgtaattttaaaaggggataaaatttttttgggcccctgagctaggtgggccttaggcacaggcctagcctgcctatgctcagggacggccctacaaatacctgaaactcaaaaactcgaacccgatcgaacccgccggatgtgcagccctacattaaaaaggaaaaaaaattaagtacttaaaaattacaaatacaataatttagataattccaacgcaaatattttttttttctgtgtttggaagtaactgtgtaattactagggtgataattacacagtttagtaattatactatattttaaaatgcaaggtgtgtttgga

SEQ ID NO: 37718 - DNA, 2917 bp, Cannabis sativa
gtgtaggtaaaggcaacgctaaagttgaggagccgtgagagcgagtaggtgaaggttgtacatgtcgcggcgattaggcctggagcgtacaatcctcgagacatcagggattttgctgtttagtcagtaggcaacaaatattttgtatatgaatagtaaacttttgtaactgtattttgtaaacgggatcccaaaattttataaatgtcatatgttatgttttaattaattaagaaaattttaattattcacgattttcaataacctcactaattagcaacgagctgcacagtacgttaaaaataacgctaacacgtctatattagttagggtgttacttgcggtccccttattttagggtgcaaggtcgctttcataataggaagattaaaatgtcagatgctttattgtctcaggcactattaataggacaatagttctctctttcatgtgtactttgagtgaggtaagctttgtcttcattgttcgtacttgctgtatggtcgctttctcatctgttgggctctttctcaaatggccttagtctaaattattactccttatccccctatgcccataatattatgtaacattcaataaattcatgttgagcttatgtgcatgggcctttggggaagtggagtggggagatgtggtatgaggggaaaataaagggggcacggggaggggcttctcgcggggagagagtgcggagagcatgggcgcactgggaggggtggtcgcgggagtggtaacgcagaacatgtgcatgtggggaggggtgctcgcggggagtgggagtgcgcagggggagttgtatgcatggaggggtatgggtgtgtgggggaggtacaatgatgagggaataaaagacaaaggaaagaaacaattaaaagaaaggaaaaaggtgtctgcctttttctcctctttggactttttgtttgtctcaagaatctcttgtcctttgtgaatattcatttagtgaaattgtgtggttaacatttaataatataaaattattacatttcatatccaactttgttgggcatgaaacgagcattgacgtgggttccattatcagctccagcaatgttggacatgaaattttttttcatgtccaatatttttttaacataaataccactttatggtgctagatatcatgtccaacaactaagtgacaaaaaatgtttttcatatcaagcttcgatctccatgaaaaggagcttttgtgatagtgtccgtttgagagtttggtgaggcaagcctttgggtctgagatattttaagttcttgtactgtaagttagttatgacagttgatagttggatttaatttcaatattttctctaatgtttgtgggtggatcatttagtaaggctctttggcggtggagatattttccctttagaatttaagttcaattggagcattcatactactagatgaaagggcatgtcttggttggaagcaaagctcgagactattgggcaggcacttatttttgtagtcacacgactcacactctcaacgagccttcatttgccatacattcacatggtttggtgggtaattcaatctttaaaatgtggcatttgggttagaggtaattaaattgaatggaatagaaaataaataattttatttcattcatttgtttggtggcattataaagtattggaatataattatcatagaatgactttttcatcattttaggggaatgactaaactattttaaattagaaaaaaaaaatcattccactgtaagatgaccaaatacttaataatttttttatcaatttttttttatacattttaaacttcataccatttcattattatttttattcttatattttcattcctcctaatcaaacactaccttaattcctgtagagtgcctgtaagttatctacattaaaagaagtcactacacaacactcttttactattttattaacacgtatgaaacattttaataatgaatatattataatgttctaatccgtaaacatgtaaaataaaattattcagtaagctaaaatatataatattattttattcctcattaagacaatttactttattacatatatgttgtgattgtctatgtaatgtagacattcgtacttgggagcatacacatggtagacaagctagacatagatatataaataagaaatgtatgtattgtataaggactaactaattgataatggaaataggttgtcataggcttagttcagtggtttcacacttcttttcataaaaggaggttccaagttcgaatccccctcccctaatattaaaaaaatgataacagaaatatatctatttaagacaattaaggacgacgcggtggaagaggtgggatgctttgttcgtttctaaaaaaattattgggatcaaccttggttttcaccttaacaaacctgttaaaatttttactaaaatacttttcaccccaaatacatgcttgtgtgtaattattaggactcttgggattagtttttcctaaatcaaggtccctataattgagatatgggaatctttgattttaggacacataaggagttgtgaaattataaacacttcgaacccaatttatatgcttttgattatcttcttgcttttcctaggtagctgcgtaccaaagttcatacatgattccagctcgatgagggaatggaattgctgattctgaaatctcatccattgtaccgccgtacaggatcaaaagttacatcccaactcctacatcttcttcatataattttccaaaattttgaccattgcgattttcggaattgggttcttaacgtagtctaacttaattgagaaagctgtcttcggcccagctgatcgatcaagcaaaatttcctttttaaaattagcagtgttgaatttacaattc

SEQ ID NO: 37719 - DNA, 3540 bp, Cannabis sativa
atgtccttccaaagttctccaagaacctcaatgcccctcagtatcgcagacgactttcagacttcggtcacccatgcaaccttagtcgcctccgtcatgaatctactgatgtaggctcggagaggttctcctggtctttgcgtcacttcgaccagatcccctaagtgcaacgggagttggcgagatgaggagaattgtgcatggaactccttccccatgagttgaactttccgggcgccaacttgaaataccattgttgggcggcctctgagagcactactacaattttcccttttagtgacactatatagtgacccgcagaaaagtgcggctcactaaagagttgggagtgatttttagtgacatgcacaattagactctaaaaattcagtgttagtctcttaatgtgagtcactaaaaatatggagtgtcactaaagagtaaaacccaaaattttctgatttttattaatataaaaaatattggcatatagtgacgcgccaagcgcgaatggataaatatatccccactcatttggtgtgtcactatatcataacctaatttttctataaaaaagtacaattataattaattaataaataaataataaaaaatatatttaataatagtaaatcctagttattcacgccacatttatcagccaatataaaaaattaaataatacaatataaaataaacattgaagaaaagctgaataaaaaaagaaaaaaaagttgaatttaatcaaccaatttaaattatatatgtatattgtataataagcctctttctctctctcgacttttcctattccatagaaaaccctaattttttttttctatctttttccatctatctctctcgcctctcctgtctaatgaagtagtggttgaacggaacggggtgggagcctggggacgatggggccgtggatgtcgagcttaggccgtggacgacagggacgagaggtttaggccatggatgtgacggcgagctagggatttgggcatgtttgactgggagttgcgcgaggatattggtcctctctttctctcttgatcctcatttctttctctcggtaatcccaagatcttctttggcgtctggtggtagcctaaatagctcttccatggtcttccctaccattaaaacacctagctcgagatgacatcacatggtcttcccagcccaaatctatttttggtaaggatgttaccttttatttttggctagttttcgattaatgttagttattagagctgaaattttatttgttaattcaattttcatgtggttgaaaaaaatggaggcatggatgatgattatcaatgtatatatcttcagatcctattggtatgttttttcatctttatatatttttgttatttatttttcaaaaataattgataaaatggtctcgaaaaaattattattttttgttatttatttattatggattctgcattatttcatttcatgtgatggttttgaacctatatatttaatttgatgatttgccatttgtgttttcaaaataatttagcttgaaattttttttttcaggtttcatattgataatattttttggtatttttaatttctttttcagatccctaataatgaaaaaaaaaaagacattgtgttatggcaaagaagctcatctgaataagcttccaaattcaagtttttagatctgttttgtttgaaaatgtcatattgcaattcttgaatgttttaaccattataatttacttaagattttctttttatctcttgtatagaattgaattaatttgtaaaaaaatctacttttctgtacattaagtttgttcttatattgtttaattattttttagttttaagttttattattatttttttggtaaaaaaggaaaataaaaaataaaataattttgatatatcatgcatatattttttttttatttttttttaaaaaaatatgatatagtgacactctataagtgtggcccttatcaggagaaaaaaaaaagaaaaaaaaatagatttagtgacacgctgtggttgtggctgttgtctttagagtctgacaatgtgagattctaaaagtctatagtgacacgcggtgagcgtatctaaaaggttttagtgacccgtactaaagggtcactaaatattacttttactgacacctacattagtgacacgcaatgaagtgtcactaaaaatctttagagtctctcaaaatgggtcactgaaccccatttttctagtagtggagggtggcaggaaaaactctgcaacatacatctcttcgtgctccttggaggtccatttgcattttgaaatacttgagctgggataagggatcttccttcccaatgtacatcttccaggttggcatcttaaacttgtgaggcaattctaagacattaatctctggggagaaaggggatccacgtgctcggtccaacatgaggtcattgttcctctgatcggtcatgccttggaacatattttttagttcatccaactgtgctcgcacatctggactaacttgttcggtctcttggccaaccagagtcgcgtcagtatctctttgagtgggattttgagcgcgggtttcgggctgaacgactagtgcatcatgctagtcgtccaatcctctcctcctgttcaaatcatttcggagatcatgaattgtccccgatctatcaaatatagaaacacctggttgtctcagtgactggttggtttggccaattagctggtcggcaccattaagttggttggaattattaggtataacttctcgtgatgaattgctagataaggtctgcccgcctaccacttggcccataggcggaaactgtgaacagggattggaggctgaccatttatagtctgagaggtgttcaccactggatctttgtctgtctcgcccagggggatgacggttgcaggctgtgttccggtagcctaataggattttcatatcaacccggtggcctaccgggttcgatcgttaatggctgcatgttgagcccttaacgtttccatctccttgtccctccattcagctaacatgcgcctctgctattcaaatgcaagatttatcgcggcacggagctactcctgatcgttatgcagggtgttggtatgaccttgcatgactctaagagcagcacggaggttctagatttcattatcatcttcgatggctgttcgaacattggttacgagcggaacgacagtgttgaggatgccctgattagctgctgaactggtattcccagtctcttgcacaccaggcgtgattccactcacatgagtcgccacaccgtgacctacgatcgagggttgtttgggatttatggttggcgaaaccgtcatgttccctgggtttctgcagtgcaggatccactgcctgtggatttcccggatcaaccacgcctctacgagtttgtaccaccattgtatttgtgatcagatttgagaacgttcttgagttcagctctcaatgaaagcacagaaatattgacatcacttttagccaacgac

SEQ ID NO: 37720 - DNA, 2889 bp, Cannabis sativa
ttacaaaataatgacaaataatatacattgtcatatgttacatattattagtttattacacatatttaatctatatattatattgtttaataataataacatactgtacctgagcccatatttattcgagtcgtgctgggcccaagcccatattctttcgtgtcttgtcgtactcatgtcactcaaatttatactgatttcgtgccgtgtcaaaaagtccaacctaaatgtataatgttaccgtagtatagaatttgaaaagaaaggaatagaattttttgaaatgtcgaaattacactattaatttagcatattgctaattgtacaaaaaagaaaaaaggttatagtgaacataattcaaagtttactacatatataattaggaaagaaagatagtatatgactgactagaatatgcaatacatgtaattagtttcacaagattgtaaagtttgagcatgaatgaatacaaagggctattcactaaaaaaaaagttaaaactaagttataatatcacaattagagatgaggagtgtatattaattagacatacgttactttatgaggaaaagagaaaagaaaactcatacacatcacttatttaaacgttaacaactctttcttgaagcatacatgcatgtttcacatgtgtacacccaaagtttgagtgcattttctaaaaatcctaatcatatatattccatatatatttataataaaattgatccccacatatttataattttatattaaaaagatttttttttttgggtatatactcaactttatgattttacaaaatcgccaatagaagaaaatagaataagaaatatccacttttttgcttattagtgctttaatttcaaacacaatctgaaccaattcatttcatttgcttttagaaaattaattgtaccattaaatatatctaagcatttattattaatttctttcatatttgagtatgtatacgtgtttttttttctttttccaaatgaattaaagacaaaaatggaaaaataaagtagagactaatttattgaaacagaatctgataaaatttattagttaatttatatgggaaattaatgtattgataaatttgatattaagatctaaacaaccatatatagggtccccaccttgttctagggttatacaacattacttatccagcaggcaagccaagctatataatatataattaaatttattatggatttattaagtgcattgcacatgatttatcagatttagtcaactattaacttttttattttatgaaaaataaaaataaaaaaattgtcacacttataatcaattcatgttagaaggaaatattcccttacttttaatttcttattcaaaatttacctttatatatatgaaattcacgctttccaatggtataaatgttttttttacactatcaatgacaatttcattattaaatagcagtttctaatcctttgtttagtaaaaaaatggtttgtttttattgatattaccaaaacaacaaagtttaattagaactagtgcttgattaaaaaacaaaacctatatttaattaattatttaaaataatgtaaaaaaaataataatctaaaaagagaagaaacgtaaaaatatatatatttgataaagattgtgtgtttatttccaaaacaataattagaggaaaatttactcaaaaatattagcaatattatatgtgttatggtatacgtaattaatttatatgaaattatgattttcatataataatagcaaatgataacttgttattaacatattgtataatctaatttgttgtgtctaaccaaaaagcattcaacaggtgaataaatattcaataatgaaagcaatgctcatcatttgattcaattaattaattagataaaatgaactttaattcaatgatcatcatttataatatgattgtgatatgtaaattactatatatgtatatatgcttacattagcatccttaatgagggaaaggttagtaatgaaacaaactataataatatgcatgtttaattatttattcacatatttaactttaggcctaaaggggtagccacgtgatagaataatatggcaattaatgattggattagtatatctttgtttgtatagagaaccattactactactactattatcattatcaatacaataattatgtagttatttgaagataaaaatgttataataataccatattgtgtggttttatttagcaagactcatcattataaaggggattaattaaaagcaattatgtagagatgttttagcaaaagagggaaaaaaagttactttgggttatgatataaaataatactttgggttatcatataaaatatgaattatttactatttaattatatttgagtgtaattcaattatattacttaatttgatatttttatttgaacatgtaattacatgatatctatgcaattaaagataactgtatgtttttattgtaattatactaactattttgtcaaataaaataataaaattttatattaaatactttttatgtgtaaacacattttatattacttaacaatttcaattttttttttataagaattacatggtgatatttaaatttacagttatatagaattttaaatatttatatgatttttaaaattttatttacaaaaaatatagtgtttcatgttatttttatattgtacacttattattttattatttttatattatttgaatattaaatttttattattttttatgattttcttattatttttatagtgttctataaaaatattaaagaaaaaaaggaaaaaaatttaccaaaaaaatagtactctaatgtaagagtgaagtttgggccgagtagaaaggca

SEQ ID NO: 37721 - DNA, 1962 bp, Cannabis sativa
  modified_base (389)..(395): a, c, t, g, unknown or other
tttttttctagtttaactctaagtttaactctatttagtaactctatttagttactctatttagttatatttagttataatctcgttataatctctcaatataatctctcaattagaatataatttacttggtcccaagtgtattcttggatagaagttctactgtataacaatttgttgcagcttgagccttactttacattttactgtaggctgcatctgggactaaaggtggttcaagtggttcccctgtcattgattggcaagggagggcagtggctttaaatgctggtagcaagtcatcaagtgcatcagcattttttctaccactggaacgggtggggacatttttattcgatcactgaccgtattattattattattattannnnnnntattattattattattatttaagatgatgatgatgatgatgatgatgttatttttgtaccatatgtatgctgtattttatactggatgtttaggatgtaacgcagatgattttgatattctttatctatgcatctctgtttcttataaacaatgtactattaattttagaaattcactaattcagtttttacttacaactatggcaattaatttgcaggttgtaagggcgttgaagtttcttcagaacagcagagatctttcttgtaataaatgggaagcagtttccatacctcgtggaacgcttcaggtttctcattctctgagttcatctagactattattataaacctgcaagttctatttttactatattttgaaaaagagaaagagaccacttgtcttagattggcccctcctcgttatgtattggaagccctcacttgtggcggaggataaccatggttacataagttttagcgaaaattatactaaaatacagcaaccaaaagaaatacacacaaaaccaaaattactgaaacgttttccttctctacagcagtggtttccactccctaatcagctctaaaaaggataattcctcaaaagtgtttggttttataaacccaagtggctgtccaaaacttaattttatcccaaagaaccactctgaactttaagaatcttcaaaaaccctcgaacttctttccagccaaacagcccaaaatgttgccaaaatcgccgttctccaaaggaaattgctgggtagctctgcataatgaatccaaccccagacgacatagagacccaatttattcttaaccttgcagattgtatgaagtggagaattgctcctatttaaatatccatcccctcttttttattttatattttacaatccatccttagtgttgaaagtttatgtagtcatccaatattttgctctaacccaactagcacatatttctgctaccatatcaatggaggttccactatatctctgcaatcaattggccctaaggataacataataccccacattgcacactgtccttcctgaaagctcccaaatttgcatttctaccttctactcaagcccaaaatattgattatatacccagctgtcttgattccccatactaccaaactatcttataagctttccacctgtgtcctctctaagaaagctcctaataaccagccaacaatccagtcttatcaatgaggttccaatggttcctgtctgtaagtaactctagaaatcatggaagtgtcacattcatttgtaaaaaactcatatttactttaataaccttataccacaaagtttctgctccattagaaatctctacagccatttcatcaataaagctatgttgcaattcaaaggatgatgttagagctcaaccttctgaagtctttagggttgcaaatagacccctatgaaaccagatctccccagcatcactcatttcccagtggaaaaatctcgtttggtatgcaggattggactggacaagattggattatgctgaaagtaattttgtgtttggtttaagaatagactgg

SEQ ID NO: 37722 - DNA, 2348 bp, Cannabis sativa
tgacagcatctgcaacaaagacactagccattttaattccaagtgaaatacaatagaatttaaaaaaacagattattaggacatccacatattttgtatataacaaactgccaagtttttttatcctgataagaaaggaaaaagttataactgcataactaaaaatctatatttcttataaaccaatttcacactaatttacatagcgatatgagaaatgacccactctaattaatcagaaaccatcttagacaacataaacgtataaactacaaccacgaaataacaacctgttcaggggttccttcaaacagtttgccacatgataaactgaacaatgtatctccagtaaaaattgccccagatccaggaaagtagaagctaatatgacctggtaagaaagcaacagagagattagaaacccggggctatattcctatatcaataaatctacttgagatacaagagcacatggctgaaaacatttactagaaataccccaggggaaagaaaaataacttaagtatatgactgctaataagccctgaaccacaatagaaaggaggtctaatcaacttatgacaaccataaccccgttattagtttcaacttagcagcttacacagttttccatacattatgcctaagaggtttagaagagcaaaacaacaaaacaataagttctaagataaaaaatgataagattaaagaaaaagagcccaaatagaaccaaagggcatgggggatatgttcttcatgaaaataaattgaattccattcacaccctggaacaagaaaacagctaatgagcaatgcagttatagcaataaggtgattcggcttcagtagtaatccaaacgctacaaatgatattcagactagtcaatttatggagtatgacctcgtgtatgaccaggagtctccataacatgcacctcatggcctgcaaacatccacttatccccatcatccaaaacaatatcaatgcctggaattctgttcctgtctatagctgagccaatcacctaaaggacacaaaaaggatacatagatccacaaaacttatcagcacaattggagcattctgattggaatgggaaagaaaagctgctaaaatgagtttgcagttttatgctaacaagtttacagattagttattttatcaagtgtaagcatagttttacatctttcacgcttttccacaataatcattataaatcattcccatttgaataatataccagtacagcagtaccatatagcaatttattgctggatgcaataactcattcaagtttttatgctactttcttggagtagcagtaccaataataattatgcaagacgaaattagtacagaagcaaaattggggacaaaaatctcactactgcacttgtaataaaagctgttgaagtttaaacatgttgatgatatgaagatgagagtcaaatcaactgataaaataatccaagtccaaccacaaacgataaatgatagtttttcttatatcctaacgtcatgtgcctatgcatcaacatgtaatacaaatgtgttcattttgtgtgaaaattaacttattaacagataaaataagaagaaaagtagcttattgaaaggctaatgtcatcatacctttgcaccataccttgctttcaactccacgttaccaccagtatgatcatgatgatgatgagtatttagaatgtatgtcaaatttctatttttcctactcaaagcttcaataacaggcacagcttcagaaggatcaaccacaccaactgtgccagtatccacatcatgcagaagatacgcatagttatcactaaggcatggtacctgaaagataaaagtatcataaaaatgataggattaattatagtcacaatgtcagatctcatctaagagtaccaagtgaaatatttgtcatacattgttccccttgtattcttagtataaagcatttcaagtcattaaatgcctgtgttatgtctgacatggaataaaaatgtatcggtaaaataaatatttcttaaatgagcagatcatgatcaataaacgaaaaagttttggggaaattgaaaagaagagctcaccaattcaatttgcaatgaggatgacatattaacaacactacaaaactgatcaacccgaagggttctactagctccacgcaaggtctttaatggagaagagaacagcctcataaacccatacagcaagccctttctgaggcaaagttgtctcatacctcgccatacagaaaacccactccttacctaaaacatgtttttcaaaaacagaacaggcaaaatcatttaggttccaatagcaagaaaaattgaaaaat

SEQ ID NO: 37723 - DNA, 4812 bp, Cannabis sativa
gtggtggtgagggtgggcggttgcagaatgctagatagcgagagagagagatgatgcagagagagtttgagggaaagagagagaatgaatttgaattgtgaggggagtatttttgggttttgaaaaaaatgtcatagtttttttaatttaaaaggttttgctttaataataaatttttttaattttttaagtatataaaatcaaaatttccttttcgttatttgatatgtggattagtacatggattttggtaaaaatataaaaaaattattttaaagtgtaaaaattaaaaaattctattttattattctagatgataattaatttttttttttgtttgattgatgtttttaataataataataaaaaatagtattttaatttacttgaaaaaataaataaaaaataaaaaataaaaatagaattttaatgaatgccctcccaattttatttgagtttttgggtgagcatatctgcaactaacactactacgaaagatctcactctccttcttcacctctttcactccgctcaaatccaaggtatctctctctctctttcttctcttttcaatctctctatatgtacatatatacatatatgtttgtatctttctgaaattctatcgaagttttgagctttctatttccttttagggttttgatgagcaagtagacacgttattagggtgaaataagtacaaaccaagcttttgggtctgactattttcgagttatttagtacaagattttatcaagtttcagtcttttgaggttattttctgttatgtttattgttactgaacaatacccattttttttaaatgctcactgttcattctttgtaatcttaattagagggtattatcagtatcaatggaggtgcaatcgaatgatgatgatatgcttcaaaagccactaagtccccccattgatactcatcaaagtgatgatatgatgcaaaagccaccaagtcctccctccattgatactaatcaaaatcaggatatgctggaaaagccaccaagtccccccattgatactcatcaaaatcaggatatgctgctaaagccaccaagtcccccaattgatacccatcaaaatgatgatatgctgcaaaagccaccaagtcctccccccattgttactcatcaaaatcaggatatgctgcaaaagccaccaagtcctccccccattgatacccatcaaaatgaagatatgctgcaaaagccaccaagttccttcattgatacccatcaaaatgaagatatgctgcaaaagccaccaagtcccttcattgatacccatcaagatcaggatactgtggttcctgatgtgccgaatcataggtacaaacatatgctttttttttagctatcttaatccttaacttgacacaacactcacaacaatgctgtatccatgggagttgtttaatttaagttgctagtgtttatgtttttaatcttttctctctcaaatggttggaaatgttatgaaatgttatttcattgattttataaaggtgtgtttggaagtcactgcatagtaattacacagtctagcaattaccttcaattacatccaaatttaattacactatggttttccaaacgtatcctatattttaaactacaatagttagtaattatacaagaatataatattttttagtacgtaatatctatgagaattgaagaatgtaattgcatagccaaacaaacatgtcaaaatgtgtaattacctctaatcacacccaaatccaattccacctggctttccaaacacgccctttagggtaagtgaaagttctgcatttgtaattgaaacgtcagggcaacattcataaccattttacatcttttggttaggcagttttttttttgcttattcaaacatattttgaaaactttcatattaatggagttgtgtttttcttgatatttcagcgaggaagaagagccaccgaagcttgagattactaaaaatgaagctagagccatacttgaagttattgcatccactgggaagttctggtatgtttatatctagaccttggaactggtgacttgctcatatgtttttagtgttctgagttttttgtatgcttagtaatcttctttttctatctggagaaggcaacccgaaatatgtagattgcgactttagccttttcttccagaagaactaaactcttttaattgctttgttaagcactatgataactgttgttgaaacaactaaagataaattttagaatttgcctaatattttggaagtcgttgctaatttattgttttgcattgaagccatataatatattgctgttataacatcttcttgcttcatatttgttattttaggcatgagtgggacaagttaaaggctaccttatcctttcagctgaagcaggtatggggaggtatgacggcatgtgggtcttttgttcgtagtttatatgtaatgaataagtgtatagctaatgtgtctcttcacctctaaccatccaagcggattttttcttttctttttaattttccccttttctataatttatgaaggttttgtcggagtatcctgaggcgaaaatgacaattgaagagcaaaatgcttctctaagagaaacattcactgagctggtaaaaaggttggatgaaggtatttcatttccttaatctgtattttcgttcattttgatgtcgtttaaagagtcttatatagttttagctttcaagtttcaactggaatatatgaactgacattacaaaatgaagagtgattcttgccacttggtccccaatttgtcaacctttgaaatctttcttgaccttgctgtatgttttttttttttgtttctgatattaatagaattgtataaatcatatatccgagatgttatctcaaatgatcagacatgtgatttgttcttaccaagtctaaggttcgattatgttgtgattgtaaacaccccctccacaaatgagctctttaaggaattgatgataagacccaaactgatcgaacagtaacaaacagtagagaaagagcaatagagaaacaaaccagaaccagcactgtagtaacagtaagggccctatcgaaccatgatttcgagaataatctcaattcttgcataacttctttccttactatctcactcggaaacccactctcaatacaatgactcgtgtacccttttttatttaatgtcttataccatattctactatcttggggtctaatcttacgttaccagccgccctaatttaacctcatcatcaaggtgaagtgcattggaactaaagagggagtcccgaaatgtgaaggtgtgtcctttgtcaaaaaaccaatcgaccaaatggaggcttgtagtgactgaatgtttgggaatctgtgataccatattctactatcttggggctctaacaattgatgatcaagctttctaatgaccattaccaatacattaaataacatgaaaaagagagttgttggagtatcatttctttcctataatgtgaaattgaaagtggttcttgtctttgtttcaaaacactgttatgttctaagcaacattaaattcaaattgccatgctgttattacttaatcatatttcttatatcgcgaaggtctttttgtgtgattaacaatgtatgttctctacattttcagctctccatagctttgatcaaggtcccccatttactcttcagaggctgtgtgaggtacacttgctttgtttaatgtgttgcaaattaacttgacaaaacactatcttttaatggattttgttcaaagcaagtatgattttgatttttctatttcaactcatcagatcctcttgaatgcccggggcatttatccgaatctctccaagcttgcactagcactcgaaaaggtactttggtttaacatctgacattcattaacttttcttgtttaactacatagaatatagttagattcacttaataggttattgtcttattgtaatttttgttagatttaatcttttcaaaacataaaaaagaaatctttcccggatgttgaataatcatatcattagtttgtacttgggcgatttttcggttgtgtagaatctcctagtgacatctatgcttacaatctccaccgatccatatcctcaaccaaaggcgatattgccagagccaatcgaaccagaaaaggctagtgaagaaccaccgaaaatggaatctgattctgctgctgctgccccacagaatggggtagaagactcgagtggtgataaagatgaagtaatgacagaggtagatgaagctgatacagttgacaacatgaccatcgacatggaagccttggagagttttgttgaatctaccgaaacaaacaccgcacccccgaactcataattcttagtttccattactctggctcgaatattttattaattctaggcgcttaacgatcggtacagcaatacaaggtattcatataagatggcaaattttttatggatatttatttcttctatggccatctacttgtacaattcaagttcattaacttgaggaggatccatttggtttccttaaaacattttttattttgtgttaatttttaacaattagttttgagtttatgtaactatatatatatatatatatctctatgtttagaggctatatataaagctaaaatcttggtgttgaggagatatgattttagaagtttcaaacttgtgaagcaagtaaatttgcaatcttcttttcatgtataaatagtttgactctatgaaacatcacatggaagcatagcctttccaaatattgt

SEQ ID NO: 37724 - DNA, 2630 bp, Cannabis sativa
  modified_base (2271)..(2271): a, c, t, g, unknown or other
ttgcgaaatgcgctggtaaaagtattatttttaccagcgcagtagcaaactgtgctgataaaagtcacattacttgtattgtgtcctaaaataaagagaataatcaaatgcacccctagtgtgatcttcatatggacctgcagaccaatctataatatatatatgataatataaatatatataggaaattatatatcagtcaagttgttaaattggtacgttgccaatggcaagttgaaaagtgtaataaataaagtgagcagaacatgattcttttaagatatgtttgtgattaattactatttaccgatattattcatttacaaaagagaaagagcaataatgggtgaaatatctagagatgtttaaattatattactttagcaaaaagagttttgtgtgttagttttatttcgttttctagaataatattatgggaccagtttagctaataaaagaacacataatattggaaaagagcgctatagaataattttcaaaacaaacttttattataataaactaaactatataaaatagaataaagttcaaatctacaaagatatagctaataaatatctatgaatagaataggaaaattaagattatgccatctatatagctagtgctcagtcactaattaaaaacccccactataaaaagaggtagctagctatatattacacataaaccaatataacacaacataaaaatatctattgtgtagagaataacatattactccaatatattatctctttaataatttgttgttagtatgggaagtgatgagattgagagagatcgtctagctaagataggagctgaagggtttgctatgatagatgagttgtatgggcgacccggcaggcgaccaaggaggaataatggttatggttcttatgcttatacaagccaaggaccaccaccactaccaccaccacagccacatgtatctcagccaccaccaccaccaccacattataatcactatcctcatcatcagcctcagggtcagggtcaggggtataatagtaataattaccaacaagtactacttcccatgatgatgagaaaccagcaggtgctgccggagccacccaaaaagcatggtgtctttatgatttataagaatcagcagggtgcctattaaaatcatattatatattccactactttataactattgtatattatatattgttaagctatatatttatcagatcggtaatgcatgtttgaagacgaagtatagttcgatcagtacgtagttaatattatggggtaattatgtctagcgtttcaaaatcaatgcatgcatgcatatatatatatatatatgtatatatatgcagcctagtttattattgtaatcaacttcatatatatatatgatcgatccctcctttttatatatatatatatgttaaattcaagtatcatgttatagcagttaaatatatatatagtagtctttcctatgagttactatactaaaaataatctcctacaaatatatatgcacatttgacagtggtagctacatcagtgttttgtggaatttatatgacagttattaagtattaacccataatacggttttggtaactaggtaactaggtaaatgcaatttttgataatttttttttttctaaaagttactctttacatttattttttttttttttttaattgtaactatttgagcaatcttagagggtgcaacattatgctaaattattagtatagaatttccatactatcatactccaagaacaccaaattgcacgttgtgcacaccaaattatgcaatattagtaatgttggattttgaattaatttacactaaataattggtgcatatttttttttttcattctctcttttaatttgttttaaaaataaattataaattatttgttgacattaatatacataattatatcataaattactaattaatatttgtttagtaattaaaaattcacaaacaagacatagtcttatttagaattttaattgattaattaaaaccaattaatgtaatctacaagaaatattatcttaactaatgtagggaccatgagcctatataatcaagctttcaataagtagttctagaatttattgagtaaattttctatcttattaattcctctcgactctactataaattcaataatattgtactccgattacatagaatgctctattcactaacaatagatatggtataattatccattgtccaaataatcaaagatcctctanagatgatttacatcgagtaaggacaaatttaccgttctacccctcaatgtattttatccttaaaacacttagttttctataaatgatattttattaaactaatataataactgaaataagaactcttccatttatgtctgttaagccaaactcaaaggaaattatcattttacttttaaatagttatagaagctatagatttcaaatctattattagcgctccccctcaattgcatacaatgttcccaagatgtaagtattagaccgatctaattggtcagctttaacgaacaagtcaaagaacacaaataatacagttaagccaatacctaaccatcttaggatcaatatttattgac

SEQ ID NO: 37725 - DNA, 3845 bp, Cannabis sativa
tcagtggttcatgtagttttggcagtggtggccaactctggaccagacccccaaagtatccaacaaaacaagacacgttgttttgtttcattagtgtcgactgtcgtatcgatatggaacgacatgtcgtacgctcaactattttgtctcagctcagtaaatgtttttccgagaaaatataggtggggattttacgtgcaaaacaaactatatatctatctatctagctaataagtatgacaagtgtattaaacaccataactgttgttcgttagcagcggaataggtatgacagtatcaattacaaacgattaaatagatgttttatgagtaaatttcaaattatataaattattttaattttaaaaaaaattctcaaatatctctttcttattgtgttgatgtaactttttaactgctgcagtttctactcctgttaatagtttaacagattctttattgttaatttggaatcactggaagattttactcgtcggtgtgtaaaatttcatgccaaacacacgtgtatcataacccaaatcgccaccccttacaacttgtttttgttttggttgagtattattgatttttgctgaattaggttgagtattgattgctctgctctgccaataaagaactgaaatttataggtgaatttgtacccttttttgtataaatgattgttcatattgaaaaaaagtagtaacctttgttttggtttttcctttttcaagaaagagtaacctttgtttggtaaaaatttcgaatgtgtttggagacccaattgtgaaaattttccgccatggaagctccagtcagaagaatcttctccaaacccactaccgttctcaacctaaatcgccaccacctcattcacaaaacgacaccgtcctttgttacattacccctcaaacgacatcgtcgattagcgaagcttgcccaacccaagctctcagtctcacccatatgtcgatcatccacattcccttcggaaccaaaccctttcaaacccttccaatccttttcttctctttcccaaatcagtcattaccactcgccgtcgccgctttctcaaacgaacgacggcgtttcgagttggagctcagcttcgcagaatccgattaacggaaacgacggcgttttggggggaaaaaacgattgtgaagtggcggtggttttactgggttggcttgggtgcaagacgaggcatctcaagaggtacgctgagtggtacaattcaaggggttttcacactgtaacgttcgttacgaatgtgagagaggttttgtggttcgatttagctcggagagcagaggaaagggtgttgactttggccgatgagcttatttcgtgggtctccgagaaaggacccgacggtaaagaacggtgcttggtttttcatactttcagcaacacgggttggtttgtgtaggtactctttgaatatgaataatttgcttaaagaaagaaaattattcaatttgggatatgaatttggaatgattgtattgttggtgttttgtttttgcaggtatggaaccattgttgaagctctgcatattagaccagatttggtagataaggttaaggggtgtattgtggattcaggagctgctgagccattcagtcccaaggttcttttacttatattatgcttttaatcaacatgaatttcttatagagatcttggtaaatgtttttcttttagttttagaatcagatgtattatgtttagttcatcttgttcatatgatctgttacagtctagggattgattcttcatggaaggagacttacctaaaaatatgttagtttctttgatttacaacatgagacttacctagtaatatggtgagagttttccactgcctagtgcctcctaataatgagggttgttgggaaattgagacaagaaacgaataagtcctttttagaattaatgttaggttgaattttctacttatcaatatgttacagtattttttctgttttggatttgatgttcctttttgatctctcctcaatatcatgaggggttggtatcttcattctggttggtgtggtgagggggcatcctgattgtaatgatttcttccttaagtccgattagtttaactaggagatgagtatagagcaattggagattagagctgcaacaagtaatttgaatgtgtaatcctttttggtcttgatctggctctggtgataggcgaaacgaaaattgtgacattcccatctcacaatatctcaacttcaagaggagtttaactctgtgatgggagttgtatgaaagtggctgaagattctaaacatgagatttcaatttgttgaaattcacatatattttcatgattatatctttgctaatcctcattttgctacattaagctcaagtctatctagtaactgtagtttatttttgtttccacacataattcaaatttaaggtagtctataattgtttgtacaggatttcgggtatttcactatttgtaaccttcctttaatcgtggcaggtttgggcggcaggattttctgctgcgattctgaagaaacgcagtgcatcaactttgcaaacaaatatagaagcactttcaaacacaaaagaaaaggaacaaccagttattgaagtagtacttctatcactattggagacactatttgcgattttgttaaactttccagatgtgaatcggtgagtattcagcagactcatcattccaatgtcacaactaacaaatcatgttttctgaaattgattgacactatcatttttttctcttcttcggctgcaggaggttaacaaatgtagtttccgtcctctcaaaaaaacagcctccttgtcctcagctttacctatatagtacagccgataaagtggtaccatatcagtcgatcgagtcattcattgaagaacaaaaggaaatgggaagagaagtgaaatccttcaactttggttcgtctcctcatgtggatcactaccgaagctttcccaacttgtactcatcagaacttgagaatttcttaacagagtgttttgccattgttaagcagacttgaaatccgttctagttttctgtttaacctattcacttgatagtactatgttgcccatgttttagctgatatttaatactgtttgaccccattgaaaacctaatcagatgaaatctctgataaaataaacaaggttgaatgattatggtataattgtttctaggcataaaacatattgtgattcatgaattatttagaatgttattattggaaaatagaaattttatgagtatcattcctaatggtaatttttggacaaataaatttcataaatttatgtaatctttttaattgtgttacaatttagatgttagaacactctttttttactcttttatttaaaattcatcattaaaaaaatttatttttttattttactttaaatttttattgaacactaatttgtttctttaaatattttaaaatttttctattttaaatcatacttatatctttcaatggtaatcgtaacttttgtaatctattacattctttgttttttcttaataataattacagaaaccaatataattcccattataattactacatttcattacaaagaaggtcaatacacattctattctattatattttcattccaactacaaaacaaatattataatcaatttttattactattcttattctattatatttcgacaatgataacgatgagtagagttagaagagactttcggacatattgcaattttgaattacagttgtagcattactaaatatgaaatctatcactgattttcttatattcaatatcacactgatat

SEQ ID NO: 37726 - DNA, 3319 bp, Cannabis sativa
  modified_base (388)..(389): a, c, t, g, unknown or other
gcattctataactcctatattatttatatatttatgtgtatttttgttatattcactgaattatttcagttttttcttttgtgtgctaataacaaattttggaatatatataatttatttacagatacatgttcttgtttaattagacagaatcacgtgcacgttgaaacatgtaaaataccttctcttcttcttatattttctttacaaaaaacacttatttagataaataaataaataaataaaataaaatgcccaccatttcccacccacataatacacacggcctttggcacaacctaaatgctacttatacagtctcactatattctccacttacaaaaattccttattgagccctaaacactactctctctctctctctctnnctctctctctctctctcatgatgtgtgaaaattaacagggaaaaaaaagaggttgaaaggattcttctagctaaactttttaaccctgcctgagagtctgagtagtgtatttgcttacaaaagtaaacgagggctcagatttgaaatgattcccatcaatgcttctgtgggctgccctgcttaatatattaatttctctatttttatttaattagtattttattcttgaaaacccttgtttgattatgctgacaacagttaaaaaaagttacattaattgatattatatctggcacaaacccacattcatatataatagcatctatatagggttcttttaatttactttatacatgtacgtacatgtctttatttatgtaatattattatatataaaaaagagagagttgtacgtagccccctaaaccctaaaaaattaacatatttgtctctgaatttgtaattctttgttttggagctcattaattccagtgggtgtaagtgctttatacttcaatggaatttttatatataccagaaaaaaaaaaaattaacatacaattaagacctaaaaaaattaatgtagattctcttcctctaattattttgtttagaacgcaaatcataattaattaaggaaaatttgaggactcttagtggtactaatcccaatgtagtagtaaagtagtgcagacatatagtcaaactctcttcctgtcacaaaagtaattatacaatccaagtccaactcacttctgatcaaaaaaccagatataaatatatataataatagtaacaataatttatacaaagatatatataaaacattaaccataattatatactaattataatggatactggtaattagcaatcctcacctctcactgataacccttatcgacaaaaatcttcatcagcttttagagtccccacccactttgggaaaccaaataatgaatccgaaaattaatattgttgaagggagaattaggtgatagatatatattatataatggggttacctattaggttgctttctcatcatgtgaaggaagagaagttgtactactctatattaatttctctcttctaataaaaagagaaaaaagaaattaaaaggaaaggaaagtatgttttcttccatcaacaacaacagtccttttccacagtactatttccatcatcatcatcatcttatccaccaccaccgtttccaccacctcctcttcctcttccatttcctcctcaacaacaagaaccaaactcatcatcaagtactgttgataccacaacaacaacaacaacaaccttttctattcccaaaaccaccattttcatgatcaaatcccactttcaactcatccttttttcgtatccaacaccaccattaataataataataataatattactcctcaaatactaatcccagctgaaacttgtatcaatttgggagtttccaactctccacccaatgctatggtcccagccagtagtaacaaagttcaccaggagaagttgggcaagaatggtacaaagaaagatcggcacagcaagatttacacggcgcagggactcagagatcggagggtgagactttccatcgagatcgctagagagttcttcgacctccatgacatgttagggtttgacaaagcaagcaagacccttgaatggcttctcatcaaatccaagaaagccataaaagaggaatcattagcaaggtccacacccagtagttattgtaataacataagtttgtcttcaacaactactactactactactactacttccgagtgtgaagaggctgaagtcaacgaagctgttgttgacccttcaagtcatgacccacatgaagaaaatttattggtttgtactaagaattttgatgtagagaagctgatgttgagtaatagtaaggagtcaagagcaatggccagagctagagcaagagcaaggactaaagaaaaaaggtactatttcaataatagtaatagtaataatcataacaacattactaagaggagtagtacttgtactagtagtattagtattagtattagtattatagtactccttgtttgatcagctcatctcagatcttacaccaatgtatcagatcccccaacttaatcttgaaaaagggcccttctcttggggttgatgatcatcatcatcagtcatcatctgctgtgatcaaatggtccaagttgaagctattttcaggtggtagtactcttcatcatcatcaaccaatggataataatgatagtaccactactagaactagtagtactacttacgaccatgatcatcatcatcaacaacaacattcatcatcatgtgggatgatgtcctcattcaaaaatcaagatcatgaaaccaactcatcaaataataataatgacattcatgtctattctcctatgatcaccttgttacctcaaaattgggacattaatggcacggccaccactactaataatgtgtctggacgccctgttggatttcgcttacccattacgtgatatggattattattgtaattaatggtaatatatactcatgatatatatatatatacatacatagtactgtttttctcaactatattgatcaatatgtattttgctactttggttaatttggtcccttttatttcttgttgagattgataacatatataattaaaataagtggtttgcttaaattttacagaaaattggaaagatcaactactactgctgctgctgctatgaggttataagatattgggatattgttgtacgtgtctactatagctagccacttccatatctcttcttccggccggtactaaatttctgagtacttattatcattctcttataattatatctttagaatttcaagctttattttactttctaattaagcaacaagtt

SEQ ID NO: 37727 - DNA, 1974 bp, Cannabis sativa
tgaagtacgtcggagccagacttcactacactcagccatgaacaaaaggggtcggggaaaggtaattgctaaatttgatcttgatgaaattgcgattgaatctgaatattggagtacataaggcagtggttcgtaatgttgctgccgtggttgatgttgctgatgcctcacgcctgattgctgctgcaactgttgagaatattcagcaaacaaaaaccgctgtgacagatagcacactacaagtttcgacagtaagaaagaaagggagcattgtacagttgggagttgtggaagacaaaggaagggcagtgggaggttcgaaagaggaaaattgatggaatttagaaaagaatgattaagcaggggaatgaattcattgtattacagaatggataattgcaatatactgagtttgaacattagggcattcaataaaaggaagaaacaggagaaagttaaagaaattttgtgtacaaataaggtgggaattggagcaatcttggaaactaaagtaaggggtagtaaagttgaagaaataatgaaatcctcttttgtaggatgggaatattatacaagtccaacaataggaggtagaatactaatcatttagctatgtaagattgtttcgattgatgtgatagaaaagaataagcagtttgtttgtacactacagagtaagaataactggtattaatgaagactattgcttcactgcagtatatgggagcaattttctagctgaaggacaatgtctatggcaatggttagctggtttaggtatgccagtgaagccttggctaatttatggggactttaacactgtgtttcatcatagtgatagaattggagggaaaccggttacaaccaggagaatggagtaagaatctactcaagaatagattgggtgtttaaaaatgaagattgggtagatctttacccaaacacagaggctcacttttaatgggaagacatctcaaatcactgttttgttgtaattaaaagcttgaatttggggagtttggggtacaatcctttcaagtttttaaatatgtggattgtgcatcccgagtttagtaatactgtcctcaactgctggaggaaggaagtcaaggggagagatctagtggctgtatgtgtcaagctgaaaagactacaaagatgatcataggatctttaatagaggaaagaatggtgatgttaacgttaaatatgagaagacaaaggagtgatacaataaggctcgcatggatttacaacagaacccccactgtgtaaagctccatgaggaactagaggcagcccgtgacaaacataccaacaacagtaaacaatttgaaagcttcttaagacaaaaaagcaaggtagattggctgcaatttggagatgaaaattcagcctatttccatgcttatattaagaaaaaaaaaagggaggcaaataggattacaacctttattgatgagaatgacaagattgaggatgactgtccaaaagttatcactcattttctttcttattttaagggtttcatggggactacaactgtaactacagaatctattcttccacaaatagtgaaagaagggccatgtctttccttagagcaacagatcaatctcatcaagccttttactcagcaagatgtgaagaaagcactattctccataccagatctaaaatgccatggaccagatggcttcgggtcaaaattcttcaaaagtatttggacagaattgggcaaagaaatctcatctgctgtcatccaattttttctgcatgggaaactaccgattcagctgaatgagactcttctcatgctcattccaaagactgaaactccttctcaagttgtagactacaacccaatagcatgttgcaacacttatacaagtgtatattaaagatgatttgctcgagattttctgaagttcttccgatccttgtagatgagaatgcgttcattcagaatcgttc

SEQ ID NO: 37728 - DNA, 2283 bp, Cannabis sativa
  modified_base (2216)..(2225): a, c, t, g, unknown or other
tctctctctctctctctctatggcacctcccatcgccattgactcattgaagcaccccaaggaagctctagtctattatttttttttattaatcagaatcaaaaataaaacccccaaacactactttaaaggttttgaacacatctttgtacgatctattagttttgctcgcggttttttttttgtttttttttttgaagtgtgaatttctgtaaatctgcagaattttgaacaaaatgaatcttttgtgatgctcctgtttttcatgatttttgagatgaaaaacaataccctagtgttctgctgctatggggaggtggtggtggtgccatcgtggtaaagagcttgagagagaaagggggctgataatgggagaggtattaatgtcttatgtttagagaaaagcctatttcttcagtaattatcaagattggcattttttttagcgaagggtactagatagaatagaaactgaagttttccaagtgaaagtcttattaatttataatgactgtacatgccatgccatatcagcatatctttataaagtaaaatagttattattattttaactcatacaagctgttacagagttctggtacaaactcaactgtcaatttgtggcgggcttcttcatccagtgaggacgagtttacatctgaaaggtatttttcttacccagagaacacttccaagtccgatcggtgttgactttattttatatccctcgtatatttttgtttgagatcataaatatattcacgtttttgacagactagttgattcaccaactagagcaaatcagctagagccattactacattcttacattgattatgaagacagtgtttatggtaatcactgctagctctagtttttttcttttgaaaacatgattaaaaagctcagaattaatgacattttcaatgtaaattacaggccttgcttggagttctcgtgagccttggatctttgcgtcattatcttacgatggaagggtaagcaaattttatattaatttctttcatttgttggatgaattttaaattactagtttccattccattatgtaagttgatctttagtggttgtggataccaattttattgttttataatttgttttcccattgaaatttgaaattacaggtagtcgtagaatcagtaaagccctttctatccagaaaatgagagttccatacaaatggcaccgacgcagttggtcgtatttatactgtcacctcatttacatctttgcgcatttttctcttgcttttggagggcaacaaggatactcctaaggaaggatcagatcatatcgttctagactttgtttattcgacaagtgattttgtgcgttttacgtgttaaattttccatttccttttccttgtatagtgtggtcgaactctaagtgaaggggatagtgtatgagttaaactgtacaataaatgaaaggtatatttgaggaacaatttagaagaacttcaacccattttttgttaggctgcgccttattttgttcgtctattgattggggtttcatgttttaagcttgcatattgaatgtttttcaattcaaaccgataaatgtacccctatggcctcctatttgataagatgacaactaaattcgttctttggatttaaaatagaactgctcttcgatatagcttattgttctcgtcacatatttcaagtggaaaaaacattaaaattgaagatggaagttttcaacttaaaccgtcttagtaacaacttattgggaaattttatagtacactttcaaaaagagagtttaggtgcatcatgtctgttttttcatttttttgagtacgttgtacttatttaagattactttaattttttttaagaaattttaaatagtttaaataaagtttaaatactttgttgcatgcataaatgttttttctaatacgcgtgataaataattatttgaactttaattttagtagtacagtagaacttctatttaggaatatacttagaccaatcaaattatattctaattgagaggttataactaaatagagttacattaaaaaaaatcaaaatactaaaaaatatcaatgtaaacaattcttaatactatatcataataaaattatttttgagtaaataaaatatttatacacgtattataatttagaacaaaattatataaactatatgtagaaaatgtataactaattacannnnnnnnnntattcttatttataattggctcaaattgggacttactattttttatatatatatatat

SEQ ID NO: 37729 - DNA, 4022 bp, Cannabis sativa
accataaaaaactttaaatttggacaaatgccatataagagtggtaaagttaaaaaagccatatttatgaaacttttttatagaatcccatatatggtgtaatttttaattttttattcaatgttaataaaatttacatcaaatcaaaattataaatattaaaaaaaattaatggtacttagcatgttaatataactatagtattaagtttcatataatttatataataactttttaaaaaaaatatggttagctaattataaagtggtactaggcagtatcacccatagcaatactcactcaatcaaaatcgactttttgactctaaagtcaaactaacatcgtgtcatgtgttgcacctgaataattccctttcctttatttaatatttatataaataaaaattattaatattatatatccttaaaaatctgttctagagttggatgctcacctcacctttctttctattttttctcttactattacagagctcgccggaaacctcaatcgccggcgaggaaacttctccggcgatcaaaaattaaacagcgaaatctaaaagtcttactatggtaacatcctattcctcttcctcaatcttctctgctccctatagctcttctcttgctctctcttccgtcaaccgccaacctttcaaagttccaatttttcaccctttttcatttccggccaaaacttctaatggattttcagtttcgaataagagaatcaacaatggggttttgtctatatgcgcttgctcgacttctccgttcattggaagagttgggtctcatagaagagaaggcgaatcgtcaatgctttcttttggtataaacccagaaacgacgaagacgatgacggaagattctgaaaatggtaatgactcttctcaattcttgtcggcaatgcttccattcgttgttgcagccactgccattgctgctctagctcaaccttcaacttttacttggtgggtacttttccaatttctcgaattattgatatttggggtattgcatgttgatttttcctttctctgaatctgtttttctagctgaattttggggtatttaagttttgcatgtacttttactttgtcgttttttgcaactgggttttataagcataaatgaacctgagattgggatctgttttattaaatttaaagttgaattcttgttccttattatattaatatgctgttccttttacatattttaagttattaataatataatattacatcatgtcagataagagattgttctcagttgtgtagattaaacacttatgaatatactttccttaagaaagggcttgtcatatgcttaaaaaaggtttcttctttttttcctcaacatgttcagattaaagtaaattggttcttgttgcttaaggaaataaagtttggtttttatgtgtttgattatatgcccatgagagattctgggccatgtgcagatcaatttctaaacgactttactaatctacaatggttattttcaaattcaactcttttgcagggtatcaaaagatttatatgcccctgctcttggtgggatcatgctgtcaattggaatcaaactttccattgatgattttgctcttgcatttagaaggtattactctttttgtattcttctagttttatatgttatatgtaatctgtttgtgagatctcaacactctaaatcaatcttttgtagacctttaccgctctctgttgggtttatagctcagtatgctttgaaaccggttcttggagtattaattgcaaaggcatgcggggtgtctccgatgttcttcgcggggtttgtccttacctcttgtgttgctggagctcagctatctagctatgctagttttctgagcaaaggggatgtggccataagcattcttctcactagcacatccaccattgcctcagttcttgttacacctctactaaccggccttctaatcggttctgttgttcctgttgatgctgtggccatgtcaaagtcaattttgcaagtatggtgtttgaggaagattacataaatgaattcctttacatttactatatttgctaatacatttccttgtcttctattccaataggtagttcttgttccagtcactctcggccttgtgctcaatacttatgcaaaacctgttgtaagagtccttcaaccattgatgccttatgttgccatgatttgtacttcattgtgcataggaagccctcttgccataaaccgtagccaaattctttccccggaagggtttcgtttggtgtttccagtagtggcgtttcacacagtagcctttactttgggttattgggtgtccaaagttccagcatggaggtacaaaatgttgactttctgcttaaaatgtcatttctaattaagaattattccaaaatgaaactatgagtatggtaactatttcatttcaagaaatgaacagttacttttccttcattcaaagataaattcttattcgccgcgttgttgctcacaggcaagaagaagaagtgagcagaacaatatcactatgcacaggaatgcaaagctcaaccttagcagggctgttggcaactcaattcctaggtagcagccaggcagttcctccggcttgttcggtagttgctatggctattatgggcctatgtctagcctctttctggggtagtggctatagaatcagagacataccatcccttctaacacatcaaactggctccactgtcaaagcatgaagccacagaaggaatagttttggagtctggtttttagtgctagtttagtgttacatcattcagagggtcaaagcatatacatatagaggtgaagaataaggaacaagtgttggatagtaatgttggaagaagcagatgtaggaagaaagaactagtaaagagttgtgtagtttgactgactgtacatctttaatgtaagcagttaatccagtttctattgttgtatatattatgtaaacttgacagaagtatatatagttgacaatatacattgcatatactctaagatataggcaatgaatgcatttttttccttgcttatttgactttgagtaaattaaattgtccaagatgagcgaataaacctaaaatcaagtaaaacaagcataattctgccccaaaaatgtgtagatatattaagagaacatgactcaagacacttaaatagtaagctaaaattagtctaacatctctgtcttcttaagtttcatattacgaagatcatgtatctgaacccataaatccaacgtattcaaaggtattatagtacgcggattctcactctccttaagcctagaaataatcaatgcttttggattaaaagaccaaggactttcttcaataactcttgtgatgtcaatttgatggtaaaattgaaataaaaatccattagcatcaaattcctttatgtaaatatcgttaatgggtttccaaaaaagcagccaactgacaaaaaatccaccgccctattagtaagaaaacgaccaccaaacaccatctagcatcacaccagtataagtttttttcccctttttcttcgtaaataaccagtattaaattttattgcaccaataaccaaaaaatcacagaccagtagacacacacaaaacaactcaacaaatgcaaacccaacacactcaatcaggagtgggcatctgatttaatccaatattttttttcctcatccgacccaattcaatcaataattagatttggaaaatcatccgatcaaatctaattagacctcaaaatccaatccaatccaattcaatattgaatcgattttttttttaattggatatccaattacacatttaaatttcaatattaacttaaaaatatgaagaaaaatacgtacaaactaagtatcaccctttatttaaatttaatatttcaaaaacatatcatcgttacaagtgtaatgtagccaaaagttttaaataattaaaataataatatttctaagtaataaaatagaacaaaacatcataaa

SEQ ID NO: 37730 - DNA, 5829 bp, Cannabis sativa
  modified_base (1262)..(1277): a, c, t, g, unknown or other
atctctcctggaagtgattgcataagtgctagtagttgttcctctttttcagattgttgagatgaatttgggcaataaagtgggtattggtgactccaaccctgaagtgattaaattactatatccataatttctttagttcttttaagattaattatgatgtattttttattatggtatatgaattgaaaaatctcaaaagtgttatgacatagtttttcttagctagcgtgctatatgtgattgcattgccaataattaataaaagaaaaaaaatttaatgatagtagttagtatagggttgtggcctatttgtaatatagcgaagtaaggtatcttatgcaattaatgtctcataagtacctttcattataattaagaagtacattggaaacttgtggcaatgtagatgatcagtacgtcatgagctgttattatatatatccttcaaataattgcactaacattcttcaaaaagttattatttattatggtgcacttaatttctctacttatcttctcttccagttctctctttttaatttttatgcttcgtagcccaatgcatttatttgtgttgggcaaatttataagaccagagcgcaccttttacttcgtacgaaaaattaagtatatatagatcatgtgatagagatcaaacgtgaaaacctattttgtttatcacaaaaaaaaaaaaaaaaatgcaacaatataataattttaataatcgattctatatatctcttctagaatgatcaaataatgatatataatttacaaaacaatgtttgcatgatatgtgtaaagaaaaaattacaaaaaaaccgtaaattcaaagttagtttttataaatatagaccaaaaaaataataccatacatatactactatatgtttgttcttttttctttataatattgcttttacttttattctttaagataacatgtgtagttactggttgtcaattaattttcattttataagtgatatatatatatatatatgatgtgatggtaaccggttgtcatcactcccatcaatttttaaaataatcaaattcgaatatttgtagctagttattgtaaataattaacaattaaacttataaaaaaagtataattacttaatttgatccatggagtgaatagttattaggttctaaacatatcgtcccaaaaatgtcgtccacaaaatatcaaattgaatcataattaattaaaacgcgcgcaaggatccaaagttttattattattattattnnnnnnnnnnnnnnnnttattattattagtattagtattagtattagtattagttgggcgatgatatataaaattaatttttgagaatttgttgttttgtgtttaccacattgatgtttaaaacttaaaaatatgtaacaactccgaaattggttaattagctggtcattcgccttatagctagcgtgcatatatatatgatagaaaaatacctgtctttcagaacacaccacagtggttgataggaaaatatcacatatgaagattaatgttataaaacgtaagtggtttaaattttaaaatattacattgttattcctacaacaatattaagttccacatatatatcttaatcttagtgtaaattacacacgagtttttatacaaaagaaaaaaatatattttataagtaaaattaaaaattaataaataaataaaaaatacagaaaaaatagtactataagtctaacctctttgataatcattttttttcatatttttttaacttttttatttttaatttttcacacaaaataatttttcaaaaaaaaaaaaaacaaacaaacccaaatttttgtaaattttgaaagaaaatcataaaatgaaaatttccctttaatttaataactattaaacaaattcataatcaccttataatgcatcaatctcataatagtgttaacaataatatagagaaaaagctaaaacaactactttatcaattggcctaagaaaatcacaatgagtaaaaaaaataataacaataaagaagcaagcaatagcaatagtagtatttcctttatatttttaaatggaggaagcaatcgatgctatcatgctattggattttgtcttggatttgtttacttttccgacacttgaacctttttcttttcctaatttgtcaacattccattggatattcctttatttttataatttatttatgagtataaagctacaattaaattagatgaccaagtccaaaagggtaaaaaatattaacgtttttattagttggagttttgaattgaagtgtaaatataacactttagaaactatccaaaagaaactgattaagcaagagacataaaagtctttggtaagaaacatgggcaggaaaagctttatcttttctcttggaaagttcttgccaaatggcattcaaagtgatacgactacgacttgttcccacttttcgttgtcctcacctatattgcatatatgaggtaaattccattggaagctagtgtgtactactatacctatttatatttgacagaaatatcataaatcccaacggtacaattcatatgtaataatttcccctttcttaatctctatgccaattatctcaaattataattatcatcattagatagtacattagccaatcaattagtagataataatgatgattatgctagtagaaccaattcagcaattgattagtatctacaaattgagattataagtagtgattatcacccaaaacctttttaatctttattatataaatgcacaaactggaaactaaataatcaattctgacaaacgaaaagagataataataataataataataaaagcttttaatgatacacacatctcaactctcaataatagtagtacaagtatataaccatatattacataattgacttaccaagttgtgaactatttatattcatacataaaacgaggcttgatcacatgtgcgcttaattctatagctactctaatatattaatattaatgcttagctttaaagtagtgcttaaatctaggtattaactaggtagctaattataattagtatttcatcacgactttacttattgtagtttttaataatgaaaatcatcatgacttacgaagaaggtgattatgaaagagaaacaaattaatatattactcattgtgtactgaatcaattaattatgttacaatttatataaattataatgactgtgacaataattaattatattgttagcaaaagcaaccccaaaaaaactaagccgtaaatataaaataaattaaaaagtctattttatataataaatatagaaaaaaaacagagcaattaaggtaataatgaattactccacagtactagaccttcaatggcgtcattcggaatcaaactttcggtagctaaaatctgatcagaaaattccccatagaattcatttccctgcaatggcagctctaatcccaaggaaggatattcaaatacccaaccatcatcgaccgagtcaccaaacatcatgaattggctccccgattccgaagaatcaaacgtcgtagtactactagtacttgtaattccttctatattaggcaactcaacgatttcgcccaactcatcagattccgattcagtcgaggaagacgaagtcgatgtcgacgccgacgcggacatcgtggtggagacgggattcagttcaagtgtcaccatagcggcggcttcagcggcggcggcttgaatatctctcggcgctaaggaagccgggcgaggcagtgaatcgtgaagttcagggaaattaagaaaagcagagtttcctttaatggcgagagtagcgacgtcgtgagctcgtgcggccatttcgggagtggagaaggtgccgagccagattcgagatttcttgcggggctctcggatttccgaaacccattttccccaactccgcattcgaacaccgcggtagactgggtgtttggtacagtccccggactcacgaaccctcgcactactactactgctgctactactactcgaattcttcttctttatctttttggactcagtattaagcattaataatgaaccagaagaagagagagatgaagacgatgatgaagaagaagtagaagaggaagaaatgcttgtactggtctcagaagattctggaaattttggattaaacgacattattgatgacaatcataaagatagagagactggtacttcagtgtatatatatctatatatgtttgagtagtactaatgagagagagtagtattgcaatgtgtgtgtagagaaagagagagagagaagagtagtgatgaggagagaggtgtagagtaatgaaggggggtttttgtagagataaatggtgtgcgcgctcctctctatagtgactcttaacctacctaatttagatttttcaccctgatatatacatactaacgatgttacataaatatatataattttttattttgaaaaaaatattacataaatacatttagatgatacaaataatagttactttaaatattcatattttcagcatttaatagataatattttcgcattgattattatcaatgaaatcttcattattatttatttgtgtaaaaagaaatatcatcatatataataaaataatttaagggttgtgactttttttgtgatgatgtagctggtatccttgtttaagggaaatggtaaattaataattaattaattagtgaatggaaagagaaggttggaggtgggagtgggacctataaagaggaatggaatgggtcataaaagaggtcccacaggccatattgtgcaccagcagctaacgttgcaataaataaatttaatttaattgaataaaatgatatatatttgttgttgtggttgaagtgaaggcctaaatggtccacgtctctccctcattttgtccgtttaagttcactgctttttgtccgttgttttgtttaaactaattcccactctttaattataatactcttcattttatattattatttaattaattaattactaatccttaccgtttacactcacaaactcaacgatcttaatataaataataagaaaaaagagtaaaactttttgacataattacgtaaaatgataacatatatatgtatatatattagttcaataaatataaacttttcattgcttgaaatggtaaacaagcctgacaaagaaaatggtaatcgataaacttgtttttgtttttgtttttgtttttttttttttttatttgattagcttcatataaaatattctgaatttggaaatcaatcaagtgtcaatagaagtatatatattatgtgatatcaacttattttttttttcgatgattaatagattgtattattgttataattgagacgatcataacatttgacaataagatggagaaatttctaccaatctaaataagtttagccaatacatagtcgattcctaaacattgtcaccatcatgaaaaaggaaatgttttgaaaattttgacgatataaataaatataaaagagaaaaaaacactaaaatttgacaaattttattttttaattggaaaatttacaccttttactaactcttttccaaacataacatttatacttccataaataaaatttttacatttatatttttcctatttaatttttttttctattttttaattattaaaacttcaaaaaaaaaaaatttttttctcttctttattttgtaactttttttttctcaaactaatttctttttatctttatatctttatatattaaaagtgcctatctaacggtatttctt

SEQ ID NO: 37731 - DNA, 3562 bp, Cannabis sativa
  modified_base (55)..(67): a, c, t, g, unknown or other
atcccacttgaccttccccaggcggtgtgagattgcacagcttacccggtatttnnnnnnnnnnnnnacgggactactgactgtcacacgtcttaaagagaccaacttacttcatgactcatcccaaattttcattaagtaatttcgtaatcccctttaatttaatttctagagtaactttaatttaaattttaagactttacgtttctgccatgactatcattggaagagagaagagtcacacaaaggatcacttgaacaatacatgcgtctagtattctttttcctcataaaaaaaaaatataaataattttatattacgatatgtattccaagcagtagttttttttttttttggaattgggtagtgttgcgaatgtcttaaagaaagcgacttactttgtgactcaacccagatttttattaagtaattcattcctttttattggagtacccacttttatgaaagatggaagagtcacacacacaaatgcttacttgaacaccacatgcgcgtcgctgctatccgacggagccaagttggttggttagtaaaaattgagataaaaacacttttatgtattcttttcccaatgaaaaaaaaaagttttatattacgatatgtattataagcaataacattttttgagaaaaggtagtgtcgcaaacgtcttaaagaaagtgacttacttcgtgactcaacacaaattttcatttagtaattttgttcctttttattggggtactcgcttttatggaagagggaggagtcacacaaagactcacttgagcaccacatgcgcgtcgctgccattcgacttagccaagttggttagttagtaaaaactgagataaaagcagttttatgtttttgccatgactacgagagacgagtcacacaaagactcacttgaacaccacttgctcgtagctgctgtccgactgagctgagttagttgattagtaaaattgagatcaaaacagttttatgtaatttttttctactgaaaagaaaattataaataattttatattacgatatgtattttgagtaatagtattttttggaattaggtagtgtcgcgaacgtttaaagagaatgaattatttcatgactcaactttgatttcattaagtataattggatttttttcttaacaaaataattgtttaaactttatttttaatatgataaattattaaaatttttccaaacaaaatctcataactataatataagtttatgataaaaaaaaaataaaacataattatttaggtgtctaaaatcactaccgtaaaagtaattacattaaaattttcttataaacattttcaaaaaaaaatgagatatatgaacaaattatgtcttcttcgtttctttttctttcaataaataaaattaagggttttttttttatttttacacttttaaatattttttttttttgtatttttacagaattttatataaaaatttctattgcaattagcgttgtaacttaaatcgcaataaaaaatcgtataaaaacttttattgtaactaactttgtaattactttagaaattcaaagcataaatttaaaaaaaaaataaaaaaaaaacaggagtaattcccttaaaattaaattggttagcattaaaaaaaaaaacaaataaataaagaaaaagtggagaggaataataattgagaggtgccttctagttctaaattgtcgcagtgaagaaggacaaaaaaaggtgttggagtgtgtggatatgctggaaacaccggaacatgacacgtcataataagagggtcccacgttagcatatgtccagctaggcagtcctcgttggcatttgtctactctagtatgtgggtggggcccttcaactacttacaatttttcggaagcacgagacccatgactcaccatttaattacgtaccatatcctataatctaatctaattaattccacttatgatattaacagaattcgtatttttattaattaaatatcgcgtttgatataacatcacctataaaaagtattgtagatactactggtattaacagaatgttcaatatttatctctcttatatttttacaaggaattcataatttttgggatactgatttttcttcccaccataccaagagtgttgttatagctataattattataaatacgtactaaaactctcttaattaagtttattggtgggtcttttgttatgatccatagttacatatacacgtgacaaacatgataaaccaaatattgttctctaaatcacatattcaacattgtgtggttaattactagtagggattttattagaaataaataaatatattatagcaatattatttgcttaaaaagagataagaagtgagcaattaattattttagcagtggcttcgatttcgatcgatctaattagtttgtgaacgtggccattaattaatatatagaagagattgtttttagtgatattccattaattaaaaccatgttctctcatgaaatctttgtcaccatatgataaaatgtccccttcttcatctaaccaacacaattaattaattgttctcaatatatataataatacgtattaatttacattaataataataacttacattaagtactatatatatatatactttgttgcatctcttaacaaacaaaaataaagaaggtatgaatgaggaggataaggcatttcgtaccatcaaaaagacccaagaatcattatgatatggcttattaataacaattatgggacacgattttgttatgtgatgtagccgttagatgagagagttatttaatctggggttaatctaagggtaattagagttaaaaaaaatagtaatgtaccccaagacctatctaatgtaccacagaacacattccgtgaaaatacattacgggacaaaatcgtgtccctaacaattataaacccatatatatatatatattagttttgtacttgtagcctagccctcattttatttttctaaatttatataatataatatattgactaaaaaatataataatttattcctagcttattgttatttctatgtctagtacttataacatttaattgtccatactactctacctaacactctactcgttttatttatttattttttttttctttgaaactagattttttccatgtagtactacacatatatatataactagtgtgtgtaacgttaaagaaacctatgattgaaaaagagtgtcatgcaacttaaacatacactattgtataatatatcatacatttaaattaactacattatgaacaattattgttgattatacatttaattttactcaaatgatactacctcaagaactaatttagggatgttctgataccacatcttagaatactgtaaactctgaatatagccctaattaatttaagagaatcaaataataagattaaagattagcggaagcttaccggagtccatagaatcgacctttaaatgatctttattggtatgatcttttaatttgcatcaaaacctttctctgtaaacttttgctct

SEQ ID NO: 37732 - DNA, 6583 bp, Cannabis sativa
ggtgaggtgatttgattattttgatattgtattatcataagcaagcaaagcacttttttttatcaccatttttgacgtgatttattaatttatttttcttacggtattgtatttataataaggaaacataatatcacatatttattgataaaaatcataaatataacatttatttcggctatatattgtagacttctagtatcccttattaatatttaaaaaggaaaacttaattctttcccaaatattaattatgaatataactattttttttattctctttgaaaattatatatttttttttttgagagaatatatatatttgatattgtttgtgataaaaaataaaaattatctcatatatattttttaattttttttaatttacagtttaggtttctatacttttttgcaatagaaatttctatgtagaattctataaaaatacaaaaaaaaaaattattttaaagtataaaaataaaaacacctcttaaaaaaatttcaaatacacctttcatagattgaaataattaaatcaaaataataataaccttacaatgggaataaaaaaaaaataaagaatgttaaagacataagcaggagctagcacctttaaactaagtattggacactatgtagtttaatatattaacttatagaaaatattactatattactagccaatcacaaaatgacatatataaaatgtgctaactctctaatagcaatactataaaaaaacaataaaaaataaaacattaatttttttttaaaaaaatattgctcattaaatgagaagtgaatcaagtgatgttgggcaagcatttcattgttttctcttcttcttcatgaatacatgggaaaggccggagaggggacatcctaatattcaccagctctaaagtaactcttagcaagtcacgaaaagatttgttaacatctctaaattgtaataatatatcaacataacaattagatcttctaaacaaaaataattgtgatgttggtattttctctttaggtaattgaataaatttactattggactgctctccttaaccttttcacagtagtactatgcctaaaatacattttaaattttttaaactgaaatattaaaaactcagattaactacaatcaaatatcaatataaaaataaatatttcggcatgtgatttcgaatataaaaattgtataaaaaattgtaagtattgatacaaagtcaaaactttattggatttggcgtggtaatagatgctagctttttttttttttttcttttctgtacagtagaatcaaccttggtaaagcgaaaattattcaaaaattgaaggaatgggctttcaagtaatcgtgtattatatttgactttaaaaatcatcaaattgaaactgatatatacagttgttgagtctaaagttaacgaccaaaccaaataattcactcacaaccaacaatttctaagctgagtctccgccgtttccctgaagctattaacccgaaccaagcaaaaatgggtgcaacccaacccaagtccgcaacccgacccggatccaacactactggttttgagcaaataacacgccggaggacactttggtcctttcccttgtaacacaaccccccattccctcgtcacctccttttccgactcattactcccatgcccaagctcctccacgaatatcaacccttccggcgatggcgcatctccagtctcccatttacccttcgccaccgcccaatccccagccgacgccgtcttctccatcaccatctccgtctcaacgccgtcgtttcgacccttattatacacgtggactatcaacggcgcttctcgaagatacttaactatctcaaccaccgaatctctcatccactcgtctaatttctcgcaagccactgatcccatatccgaaccggaacgattccacccgttctctaaatccagtggatgaatcgaacggcttttctcgattgtcatcgtcgatttcttcccggattttctcttggcgtcgttccgaatcgtcaaagaaactggtcgatcgttgccattcgaatcaaacttaaacaaaccgaagtttcggtgtagaagattgcgattgcctccgcaacgagttgccgccaacgccatgtgtgccgatggtgagatggcggagcaagaaattggaatgggtcaggtcaaaacgacgtcgtaattgaacgttttcgtgttgatttcagaattctacttcaaagcaatatataacttagaagtttggtttatataaatgttatgataatttatggttgacgaaggcttgattggctggttttcgttgacacgagaaggcacgtgggaacacgtggaaagtgtatgccaatcgaacgctgtaacttcctaaaccacagttctgcgtaaaccttcaccaatagttggtgacacatcagcattgtatggtgccacgtggaccatttaaaattgaggaattgagttgccacacctttttcgtgtgatttactatacactatttttattggaagcggacgtaataaatatctttatttaaaattttaaatcgacaacgagattgattaaataaagtgaaatataatatcgcacatttatttcgggataagcatttcgtgatctttttatctatctctcgaaataatgaacatctctcactaaaaaataataaaataaacaggttacttcgcataagagtttaaagaatattgctattcaactattattatcttttaatttaaatacattatcttataatatatttaatttaaataataaaaaataattattaatttttaatttaatttattttatacataaaataatcaaacaaaagccaaatgggttatgttttaaagtttaaaattgatttctaaattttaccacaaataaaatttattatttattttaccaatagataataattgattaattctcattcatcccttattttattaaaattaaaataaatattattttacactaaaataatattttctctctctttgatattttttcaagaataatcctatatttaactaattaatatagtttcatcaaataaaactaaatagttaaatatcactttaattattcaaaataataattacaaaattactattttgcctttaaaaattatttctcaatttatttatcaagtcaaacttttccctgtacaatgttgtataaaggtgatctaaggaccatggacctatatttcgatgctccaataaacacttgattatttttgaactcttcaataaaataatccgatttgttaattctattattactacattatggatatggaattgcactatttgacaatatagaattattgtataacatgttcatagccaattatgttattaagcttctaaaataaaagttgtaagaatcattttctcgaaaaaactttaactagtgaatcaaagaactcaatgaatgcgaataagagttcatgtatactcaggattcaggttgatctactaatgatcatcgttgtgatatgaataactctttcatggtaaacgacatgttgatgaaagatgttattacatatcgatccagtcatgtataatcaaattatacacacagtacctttactacatgtctgtccacatatgtaatctgaatcaaaatcacatgcattagagtatagtgcatagtaaaccatacttggtaattttatattaaagattcattactttaatacactatcgacttggtttattcgtattgtataatcttaattcttttgtatgaccttacaagattataccatctctatatgaataaggaatttttagatattattaattatacttctatacttaatgtaattatttatcttataattatattcaaacgacaactactttgactgctggcgtcaataaatctccttttgatcaagaatagtaaattatttcttctaaattaattggaatcgctagtttgaaattaaatcattcttattgcgaagattcttaagtttgactttacacgcttttatcctttccccaaactttgttgtaacattcctcccccaaggctttacaaggtccataggtgaccactgccataaggaaatagcagtgctctctaaaattggagaccactgccatagtggagtggcagtagtcgggtgctacacaaggaaaaggagttcattggccaaattgtattttcaacattcatgtaccaaatacaagtgagaaacaccacccatggcttcctacaagccatgcgtgaccactgctattgtccggctccaactgttggcagtggtcacgcgttagggtttcagacatcgaaataaggtttttgggtcccgagacccccaaaatatgactcaacataaaaaaaaaataagtctaaacacaccccgaggagtccgagagcatgcatggccgaccactaccattttgtcatgtcagttctcgcaagtactggtacaagtcagcataaaccgccttcaataaaataggcataactctctcaatttttatccaaatgacttggtttgacttgcgttggaaagataattttgatacggatcaaagtttgtctcacagccataactcaattctgagtttattaggcccaaaatcggcttacaagcaagctagtacattttactaaagaattaggaaatgcggctaagcgagggttggtggagcacactgccacagcctatgtggcgttgtgtgcgagcatcgactttccaaaatgcatgtgttcaacactcatcaccaacatcgtacatttctaggagagaggtgacatcccatcactccattttaaattagtgcatcctcaaccggaaataattaattgtctaatatttgtgggatatttgcatagaaacaagagaattgttaaagatatttatttacttgtaatattttattcatgaaaaatagtggtatatgggatttgttaatgagatgcccccgatgtgtggggatcactaacaaaccctctagcctatatatacatcaagtaggaggttgagaaagtaatcttcttcttgatcttctttttggaccccttttctctctttttcaaatctttctttgcgtaacattccccttaaagttcacttgacaacaaccaagaacaccagattgattccttcatcttgttcattgagtccaccatactcaggcgacgccagacctcaaaacaccattgatacacacatttccttacaaattattagttttttgttccaagaactttacaaccattaatttagatcagatttatgaatatcaagtctcccatgagtcttatattcacaaatctcgattaagattttacctagaaatccttggctgcatttttatccacacactcttgagaacataactctagtgtttcgaatctaatcaataaaattacaagtagacgtagcctcattagcatcgtgacatgggagtgaactactataaatccctggtgtccatttaatttattgcggttttattagtcagataaattcaccgtggtcctcttttattttacgatcttcttagatcagttgacgataaactgcgtcaacaaactcgattagagagagattgtcgctacaacaatccgagaaagagattgatagttcttggcggtacaaaactattgtaaaaggtttggaaataccttggtgaaaatttcccggttgtaagggttagtcaagcctgttaacttagctcgatagtggaactcaaagctagatccataactttgaagaccaaggacgtaggtagtatagttctaccgaatcttgtaaaatttgagagtttgcaatttcctacccttaaactctttactttacaagtttgattatttgctatatatatatattattacttgccatattacttgcatttatttcattaagagattaattgcatagttttgtgttaaaagtcttaagttaccgaaattagtttaaatttccaattcaccctcctcttggaaacatatcttgtttttacaaatacatagtgagatttaaatccatactgcaagtcataaacttgaacccacaaatccaaattattaatcacaacagaccgcggatcctcccttcgctttaattttgtaaacacaaattgtgttttattgaacgtccacggagatccatccacaactcttttgagatccaaatcatgataaaactgaaataaatatcaattaacattcagctctttcacatacattctcttgccaaactgctataacgagactatcatgtgcctcatcatgtcgctttctttaggtctatttgtaaaaaaaactaccaacaatacaccaacgctcatcagtcgttcactcctcatttttaggaaaatcacatatcaactcacgctcctctttcccttcaatcacaacattggcacaattcttcagatcacaaacaaacatgttactagaagctataatcgacccctacaattactacaattagagtgtgcataaatcgattaaatttaatgataaccgactaatctaattacaatcgactgatccaattacaatcaacgactaaatattagatattcaattat

SEQ ID NO: 37733 - DNA, 4552 bp, Cannabis sativa
gaggattattttttttttaacaataacgtatacgatcataaaattattcttaagtaaatttttttttctaaatacccaaacaggtgcagtagaattttccaatactatatatatatatattaatatattatatactatatacgtagttgtcataaacaaagacttccttggaattttacgcattagtagttagacacacacatattttccaacattaccaaacacaactctactctctctctctctctctctataaatatatatatatataactatacctatatacacatattgttattgttgttgacatgtgtttccaaagcttgatcaatctctctctaagcatcttcatttaacaagattcattttttactcataattcccaccataatatatataacaataatctcgatcttttcttgtagagtttgttgttaaataactaattatatatagatatattatattattatattatgggaagatcaccaagttgtgatgagaatggattgaagaaagggccatggacaccagaagaagatgagaagcttgtggattacataacaagaaatgggcatggaagttggagagctcttcctaagcttgcagggttgaataggtgtggcaagagttgcaggcttaggtggaccaattatcttaggccggatatcaagagaggcaagttttctgaggatgaagagaagctcatcatcaatctccatgctgttcttggcaacaagtaagttcatatatgcatatatattttatgatatagaattattagaaacatgacgagcataaataccctctttcaacttctattctgattgattgaataatgtatttctttaggggcattttagtaataaattctataagaacttgacgatctatatttagcgacaaactcttatgttcctttcatttacagtattacagaatcagaatgatcaggatcgtaacctaattaattgtgaatagtttgttgttcttgatactcacaagtcgtccctgatagcttctactagttggtcaaagagcattgttttcaggaacaaccattttttattaggaacgacaaagaaagttttcagggacgactgttgtcattcctgatgatcatcatttttcttgtagtgatcagaatcgtaacctattttattacttgtgtgtttgttttgattaaacaataggtggtctactatagcgggacatcttccggggagaacagataacgaaataaagaatttatggaacacacatttgaagaagaagcttttacaaatgggaattgatccagttacacatagacctagaacagatattcatctcaatcttctctcaaatctcccacaactcattgttgcagccaactttgcctcaaatttcctcaacaacaacaacaatactactaatcaatcactatccaaactccaacttcttcaaaatatcttccaagttctaggccccacttctaaccctaaccctaaccctaaccctaaccctaatatggatcaagcaatgcttcacaatctcttgggatcatcatcatcatcactatcatcactaaatcattatatgattaacaatactcatcaagatcatcaaccctttatggttgatgagtatttaagatcattggagcatggaataagagtagataattacaacaacattaatcatattgttaattatgatcatgatcatcataatcataatcattttgttactaacaatattactacttttccaactcatcataatcaagaatctattgtgaacattaatatagatgatcctaatatgaatatgatcatagataataacaataataatgatgatgagcttcctaagttagctgatgatcatgatcatgataagattaataataataataaaaaacaaaagattaataatttatcatcaatgacatcatcatctactaataatgaagcttggggagatcttattacaaataatcaagatcaaaataatcatgaacaagcagctgatcatgattcttgctattggaaagatattatggagtaagtttaattaattaattaattaattattaattatatatattattcataattatttatttttattattaattaattaattataataattaaatttgggtgcaggttagcatcttcacagacattggtcaacctcgttgactaaatttgaagcttcatatttcatcatgattagttctctgggtcatatatatatatagatatatatatatatatatataagggtttgttcataaagagatatatcatgtgcatatatagagaccaagtattttaattattagaagtttttgatgaattaatattatatatgctgaattttaattcatttgtaattccatacatatatatttgttgctgtaataattaattaatgtatattattctcttcattattgttatacacaaacatatacaacttcatataattaatattattgatgattttctatttatttaaagtagttaaatgttcttactttctatatatataaatatatttaaaaattataatattatataatctgtagacatgcatgatcatgagttataacatagattgatccttaattattaaaaaaatatttaattattattattataattaattagctagtgtatctagaaacttataggtagactaatgacccattaatattatatattttatggtttaactaaacttaatgaccattagtgtaacttatcatggttttgatgtttcattatatattattaattaaacaatcaataattagttaatattatttgccacgtgtaaaatgcccaagtaacaaatcacataattatggaaggagttagttgtatagggtgtttagaaagaaaattaaaaggattattaattaattactgttattttgttttaattattcttttttttggtaaaatgacattttttatgaataattattgaaataaaagtacaaaataacttaaaattaagagacaattctactaattaattgagtataatcatgttttgttggataaggataaaaaaaaatcaaatcaaacaaatattattgtctaataaaaaattataattaaaaaaagttattaattttaactaatttgatatgattatattttatatatcaagtgtgtgattttgtaaaagtcaaaaggttttgttacctattaggtgagaatatatagtgttacttgtaacttaagccatagatgcaaaattaaaacaagtaatattttacagcccaaacataattattatgattaacactcttttttcttctcatgtagttattgatcaatatagtcatataatatatatatagggggatcttaaaatttagtgagttatgagaaaaaaatttatttttgggtccttgtttagaaaaaaatatggtattcttaaaaattaataaaaaaataaattttgagctcctaaaataaatagacctaagtacacgcctatccctcctatacccagtaccgagctaatatagtagtcatctcatgaagttgatagtgttgaaaatgatgccatgggatatggacttaattggtatatataaagtaatgcacttatatataatgatcaatttttttctcatgttatagctcatcttcttctagtaacaatgtataaatatatatatatatatatatatgtgtgtcttgagtgtatatatctcaatatatatgacaaaatctccaaattacaagctataacatgcttgtctaaatctaaacaaagactaataatgataataatgagtaggtattatattcacctccatcaactaacctacctaatttcacaaatataacataaaaatcaatgagttttataattttttttattagcataaatatctccttccttttatgtaattttacattttagtccttgaaatatttttttagcccataaaagttttggtaatttttattatttatttttcttcttatttttaattgtaattagtattataatatttataagttttgtaacacttaaaagagttttgtaattgtcaaagaaaaacattaattaagaacaaatcctaagttactttggatatttatccattatatatatgatactttgaatattttactaattatataatattatataatgaaagtgtattcattataacaatcaacaatatcaactaacctacctaatttctcaagaataaattaatatatatggataaatagttttttccatcctagataatgacacttatatacttttgtcttttaaatgtttttcaaatgattaaaatataaaattaaaacaatgaatcatatctaaacaaattaatcatagggtgttctggtatatgagctcttctaaatataaaattaatttaagaaaaattatatatatatttatattaaatggtaattatatcaattaaattaaattgggccattgggctaagcactaagtgggccttaagtatgggcctaccttagcttagtgatgctaaaactttgagcccaaacaactgtgggtg

SEQ ID NO: 37734 - DNA, 2470 bp, Cannabis sativa
  modified_base (2101)..(2111): a, c, t, g, unknown or other
atttaattattgaattgaaaaggaccagccagttgccaattactaaatttgtcattcaataaaaaaaaaaataagacatatatgattacagacagattggataactcaaaacactatctacatatactacaataaatattaaaaaaaaagagagagagaactgaatagataaaaaaaaatgtgtccaaattaagaatttaattgttattttttgaaaataaattaagttactgataatcttttcttcatatgaaattattccaaaaataaaaagaaaaaacaaattaattgcaagtccctataataaaaagttgaatgtataagacctattaatgccaataattagtattcttttaaaatggaatattctcatcaattgatcagtgtgagtattatttatatatagctcacaatattaagagagctatcaaatatcaattagttttaaaataataaactctattttacctttaaaattacttacttataccaaagaaaactaatctatcttaccaaaacctccaatatggatctaataacattactatataacaataacaatttataattagtatattgagatattatgatcaatagatgaagaactaataattctacatgagtaatcaacatttaatggtctccaccaaataagggtcggatccaagaggaagacaaattaattaattaaattcatcctttaaagcaatctaaactcattttttaaattaaatttcatgtaacaatactaccttcaaaaaaaagtattaactgtataagtattcttccaaattaaattggttagattataagttggtcggaaaaatattatttcattgcttagaattaacacaaactttaactatatatatttgctcatagaattggtgaagcaacatgttcttaacacatagtgactaagttattgtggttaactactataaataatattgtagccattacttaattaaattatgataaagaattgtgaaatgtcattgtacgtagttgagttagttgtggtgcactagaaatattaatttgagcacctaaaatagtgactcaggtgacaggtccctctaatcaagtatacttaataatattaagagcatttttattgagtatgagtggtacttaatattttttttttgtagatgatgccttatatttgattattaatatttttaaaaattatttttttaaattatataaaattcgatacttatgataatatcatactatactgaggagggtttagacagtaataatattttctaacaatttctaatattacatatatggttgaattaagtggttgtgtttcacacttatatatatcttataatgttaatggttaattattttgcacggctagcagctcagtcatgccagctcttgcgaagctaatagttttttaatcactccaattttcaattaatgaattattatgagttattatcaatattgatggtgatgtacattcctataaatatatatatatatatatataaaataatgtaccacatttactagcattaattatactattttttagtcaatcaaatcatattaaaataaagagaaatgctaaacggtattattggtgcctagcaccattctatgtgttaatattgctattggtccaactaagtatcgggtctcatatagattaatataatagcttttagggagtatcgttagccaatcgcaacgcaacatgtcgagaagttactagacactactggtgcctaaacaatactctaaaataaatgaaccctaaaaataaaaaatgaagatacatgaaattaattacacaactaaattacacaaggatgttctattgttagatagtcttacatcgccaatgtgtgaaaagataatagaatacataagatgaatgtgctacttctctcattgtcaattgattttgccaattagttttgagatagaatctcattcatcttattcccaattctaacatggtatcagagcaaaataaaatataaaaaacctctagcaactattcgaccaaaaaaaaaaaacgatcgaagtagagctaaagaagagccaccaatctaaaaatactgatccaaaaagtagnnnnnnnnnnnacttgtgatcagggatagtgagccagaaaaaatccacttatggtcaagttgtccaagatggtgaacaaataaaataactactatcttgagggaatgttagatagtcccacatcgctaatgtggaaagataataaaatatataagaggaatgaactactcctcctattactaattggtttgagatagaaccccattctcaacatctattggtagagtgttaagtggcataaatattgaacaacattgtcccacatggattaaatataaaatattgagtcaaagtcatatataagaacatgagctactccactcatcaccaattaggtggcgtttcaaggggtgttcatcctatccaatcc

SEQ ID NO: 37735 - DNA, 3103 bp, Cannabis sativa
tacttattttaggatctatcaaaaattttgtctaacctttttatttttgtgtaagttataatcttttactatatctgataaattttttaaaaattcaggataatatataatatcgaaaacagtattaaaacaatattttatactcaaataaaataaagtaataatgcatatgcatgcagtaaactatttctaacactattttttttgcacgttaaattttttcaaatttttttaaattttatagaatatcttaaataattataatacacatgtttattaaaaaaaattgattaaaatattatttaaaatacaaaaacaaataaaagtattagtgaatttttttatgtattataaaattttccattaatataataagcacaatatatatatatatataaggcacgacgtcgcacgtttgcttgagttgagagtatatatatagcaagactaacaacaagccccatacccagaaatataaataacattaattatatagcactataattaatctgttttctttttcttttcctctgaaatttcaatggattctcatcaaaaacagctccactttctcatgattcctttcatggcacaaggccacatgattccaatgatagacatagccaggatgttggccaaacgtggtgccaagatcaccatagtcaccacaccaggtaacgcagcctgtttcgaaagaattcttgctcgtgctgttgaaaccgggcttagtattgatctaatcatattggattttccttcaaaagaagtaggattacccgaaggatgtgacaatttggacaagctaccgtctctacattgggcatcaaaactctttcaagcagcctctatgatgcaacaaccagcagaaaaaagaattgaagagcttaatttgaggccaaattgcataattggtgacatggtttttccttggacaatcaacatagctcgaaaattcaacatcccaatgatatcattctctgtaacgagctgcttatgcatgttatgttggcgtaatgtgtacagttccaatgttcttgagaatattagttctgaaacagaatgctttgttgtgcctggtttgtcaaaacggtttgagattaccaaagctcagttaccaagtaaacgatttcttgaccaatggatggaagctgagaaaggttcttatggaataatcattaatacttctgaagaattggagccagcttttatcgatgactacaagaagttgagggatggtaaagtttggtgtgttggaccggtttctttatgcaacagagatgaattggataaggctcaaagaggcaaacaatcttctattgatgaggatcaatgtctcaagtggcttgatttgtggaagacaagctctgtagtgtatgtttgcctaggcagcttatgtaatttggtagcttcacaattgatacaacttggactaggattggaagcttcaaacaagccgtttatttgggttataagtggggcagcaagtgcttcagaagaactagagaaatggttaaaggaatatggatttgaagaaaggaccaaggatagagggttgatgatccggggttgggccccacaagtgctgattttatcacatcctgctattggagtattcttaacacattgtggatggaattctatacttgaaggaatatgtgcaggggttcctatggttacctggccactatttggtgaccatttttataatgaaaacttggttgtgaatgttttgaacatagctacaactctttgggtggaagattcaagtaaatggggagaggaagagaaagttcgggtaatgaacgataagggagaaagagttaagaatgttttaaacgaaatgttggatggtggagaagaaagcaaggaaagaagaaaaagaagtagaaagcttcaaaagatggccgagaaaactgttgaagaagatggatcttcatacattaatatgacaatgtttatggaggaaattatgaagcttggaagtagtgattaagaataagagtggagatgagaaggtgaaattgttcacgttttactcgttattgatttgcgtgtaatttattttcttagttgtcgtacttgtttatttggaaattaataatgtaacataattaaccttttttttttgtttttgataaaactattttggtttgcatgttaatccccttgggtagtttatgttggaaatggtgcccgtatttttcgtaaattatttattgaatattaataatttattttttctgtttctttaatcaaaaaaagaatcttcattaatcaacccaatagatttacaattaaccaaaacttacaataattgtgagcaaattttatccactgacataattagttcttatatttagaaatttaaggaataagtaatattatagtggttttattttaaaattatcattgcattgacctacctttatgttccaagccaagtttctttaaaaacttgatttagacacatatttaaaatttttactatattaatttataaaatgatgtcacccataaatacatgcaagtttaatttgataataaaaaatgtgtaattaataagaatttctctacattatagcaccaaagattatgaaacatatctctataaatagaataaatgttagtaaattaatgatggggatatttattacacttgattttactaactttatttagaatttgtatgaatttcattaaaaaaatacattccagcaagtcaaaaatcggtacacatttgaattctatcatattagaaatcatgtacaatacaagtcaattaattttgtagacatagaatcatatttttcatcttatttattaatgattactcacattaggtgtatctttacaaaataatattttatgtgtttcaagacattttaaaacacatgcagataaataatgcaatttgcatattatgatagtgaaatcaaatatagatggagaatactacattaaagtttgtgaggatggatttgttaaaaatttattggaggtcacaattgtatatataaaatgtgtgttgggtcatcaaataaataagtcaaatttatgtggtctattttggaataaagtttatgacttaagggcataattgtca

SEQ ID NO: 37736 - DNA, 2119 bp, Cannabis sativa
tagtacataaaaaatcactgaaattttgtgtcaaagtttggggcaaaaatcataattagccttgatttaaaacagaatctacgagacttgctactcaaatacaccaatcaatatatagtggtgttgggtatcactactgtatcttatagcaatgttcttcaattagcgcggggttaatttttgttttttctttgcttttagtcctgggacatcaattggtgtgagttcaatacttttgggactaattctagttggaagagcagcctttgttttccctctctctttcttatccaacttaactaaggactctccagatgacaaactggacttcaaacaacaggtataagtctctaacatttggcttctcatattccaaaactatttaaaatctgatttgcaattctctttttgttgcagattaccatttggtggtcaggtcttatgcgtggtgctgtttctatggcactagcctataatcaggtagattgttttttttttttggttatttactctgtcttaacagattttggtgtgagtacttctgttgtcaacctaagacaaaacaaaataattctaaacttttattcgtgcagtttaccagatcaggccacactcatttgcgtgagaatgcattcatgatcaccagtaccataatagtagttcttttcagcacagtggtaagacacattttcttatggtaacaagaaatcaatagaagaattagagttataacaattgaagttttatgtatgcaggtgtttggtttgatgacaaaaccaattgtgaagatttttctccagtgttcaatacatgaaccctcctctcctagctcaaaatctttaggagtaccattgctgggctatgctgttgatgatctagaagccgactatcaaacttccagttttaacatacctcgtcccaccagtttaaggatgcttctaagcataccatctcacactgtccaccgttactggagaaaatttgacaattcttatatgcgtccgattttcggtggccgtggttttgttcctttattcccaggttcgcctactgatcctcattaagtgtgttcagtgcatttcatcagtacagttttactcaccaactcacaagttgaagaaattttcaagaacaaaacaactctgaatagaagaaaagcactaatttttggtttgtgtatagatgttaatatagggtggagtgggtataattctatacgaaaaaagagaaagaaaaagtttttgtttggagtgatgatttgtttgagttttttgttgttatttttggtgtgtgatatatagttttgtgaggagttagtagtctttcatgtattttttttttagttttgtgttattggttttgcaaaaggttgattgacatatattctaatatgagagaatggagaatttgacatttgtttgagaggattagcttttaggaatttgacatgttagtgtcagtaaagaaaagaagatgactacaaagagtaatcattcatgtcttccaaaaaggaagtgtaggaagaaaattattactaattaaaagtacatagttatgaattgctaccagttcatgcttaagcatttctctctctttgttgttcattatgatttagtaagttcagcatgagagaaagagattttgaagtgtcaactctatgtgaccactcaaataagtttcttcagcatttctcttaattttaacttcaatcaatcaccgactaacaagaattaaaatactagcacttccaatccttaaggactcatttggtacgccggataagagtcatattgtattaaataataaataacacaatgtttggattaagcaatctattgtattaattattacgattaaattttttaatataatatatgttatgttgtattatttaaggtccgtattagcttgtattataacatttacaaaggatttggggtcaacaccaatttccgacccgacccggacctaggacccagactcggatccgaatcccgatcccggacccgaatctcggacctgggacgtggacccgggacccgaacctgtaattagtgttggaatttagtgtattaaaaatatattataactttacacaatcaattaatataagtcaata

SEQ ID NO: 37737 - DNA, 1889 bp, Cannabis sativa
tctctctctctctctctcccctatcacaaaagggctttggttctctagcaagtggagtattcgtatcaatgatttcactctaatctccgggacagaggtggtgaagtggattttcaacttgttttctcaaggccctaacccacagtttgatagggaagagttttttctattcgcaattgtgatatatcataacatgtagttttttaggaattccaacttttataacaatggtcaatggaggttttcaaacatgaaaaagaaaatctttgagaatttccagagctattggaagatgatcttaagcagcaggcttgctagttttgttggtggtcactctcttgagactcggtggatcctgcctaggcctgggagaattaggctaatgtggattttgccactaaagagagtaatggtgcggttggtgaggtggtttgggatgcgtctggtggtatcttggtcttgtttgctgttaagatccccttcctctctgtgattcttggcgaattggttgcagtctgtaagggtgtagaagtgctacgcagtttgggaattaacgaggcagatattctttcaaattgccaaagtttagttcctacgctttactctgttgttgcccctcattggaacgtgtgctttttgttttctaaggttttaagtttgctgactagtttgtctactaagtttttttggattcctagatctaagaaccattcggctcatgctcttactaaatggggattagatcacttgtgtaagggtttccttaatttttgggaggtgagtccccatgtgctcacccgtatcttttcgtcttttgaataaagtgtttgtggtttcttagcaaaaaaaatgttaaagtggaaaaaataatttgttaaagaaacttttagtcactaggttaatgttacatgcattatgtgcatacttagttatattcttagtttttattttggctatgtgtatttttagttgtataattaattgtatattatttattgtttctcttgattcaatcactatttctatataatgttatacattatttattatattatatataaatattctttggtagttaatgatattttgtgtctcctacgttaattgagtatattttttgcttcctaaccttttttttctttttcttttggtagttgagtgcattttgtgcctcttaaattcttgatatagttgagtgtatttttgcctcctattacatatcttctctagtaatggcggcataagtaccctaaattttatgtttgtaagcgacataaatatgtttgtaagcgacataaaccctatatttattattattattattattattattattattattagttgatagcattttctgcctcctaactttgataattatctactattgttattgtcatttttttaattattgtatttagttagttataattttatttacttttctcaagaaaatacttgaaaaaaaattaaaaaaaacaaaacttattctttcaacataagcaatttttgcttaaaggaaatttggtaaagttctcatctacacttaatagttaatcccaaagagttgttattaagtcgtgagtaagtggaatcaaataggcctgggaacaagttaaacaaaaaaaattaatttttttttaaaaaaaaattataatctcttcatgctataagtatgttttgtagttgcggtctctaactaatcttccacgtaagaaatttatcgtcatgagattatttgtgttcttttgtgatatttgtgacattgcatgtatccatcattgggtacaataagattcgtatcttcttggatggcaactagttttccttgataatttggtgagacttctcaatatctttgtcaccatatctttttgagtaagtacctt

SEQ ID NO: 37738 - DNA, 1626 bp, Cannabis sativa
gatctaaatatgagatagagacgatgactcgagttagtgaaggattatgactgtaaaatcctttatcatcttggaaaggtcaatgtggtagtgaatgccataaaaggtcaaggacaagtaacatgatacagatttaaaagcagctggcagatgaaatgacaaaagttaatatcgagttggttgtgggacaattagccaatattactttgcaatccacattattaaaaagaattagagaagctaagcatggacatacggatttggttaagattcaagataaagttttagctagtaaggctgaggactttattgtggatgaaagtggtatgttgtggtttatgaaccgtgtatgtgttcctatggatgctaatattaggaaggagattctggatgaagattagtggaaactcaagttaaatctctaaagcatcttgacggagactagtcctaattttgtaggggtgaactctgagatatttctagtgtttctctttcttttcttactttgtttttcttatatgtactttgattgtgtgtgtgcatgtctgtgtgtgaatctcggttagatctaagcaagttcttggcatgctaggatttcttttgtgatttgtgtgtgagtgagattgtgtttgtggtttgtgtaggcttctcgattgttctaagacaagagtctttactcttgaggatacacgacacactacttgtggtcgttttgtgtttaagctttattaacataaggtaaggtcatattgattttggaactaataataaagagttttgttggtgtaggcataaggctgtccaaattcctatagtctatatagatggttttggatttttttttttttttttttttaattttggcaggcttgaatggtgtttgcagttttttttttttggaatttaattgtgttttttggtttgattattgtattttgttgttgttgaagaagaagaatgacgaggagtgagagagtagtttttttttttttttaagttatcgtatttaatttaaatattaattaatttttattagtttttttttaaaaaaaatatagaccaatagtatattgacacgcgacatctcacttgccaaattaaatacttaacgatactagtagcgacaaaagtaataggatgtaacttaagttaatttttttattttaaaaaaaatataaatatataaaattgaaattatgagatatttatgctgcaaatatgccttttgaaaattttatgaaaaataagaaccggtcacctaacaaaatgtgattgacagtcaatgatgtaagattaaaacatatataaaatctatttaaaatgagaaatttacataaattattatttttggcaaattttttacatatttacgtttaaagattttattttttaatttttacaatgttcataaaaataacactaaaataataaaaaataaaccacatgaaaataataaaacaaacataaaaaaaataatatacaaaaaaccaacaacaaaataaaaaaaaatcaaaagaacgtatgttatataaataaaatattaaaaacagtaataatatttaaaattctatacaactgtatttttatatttttttattattattatttgtggtttttttttttttt

SEQ ID NO: 37739 - DNA, 7810 bp, Cannabis sativa
acaaaattaacaaaaaaaaaattataaaaatatggttgtacggaattttaaatatttttacgattttatttatagaaaatacggacttttgatgtatttttatgttgtatttttgttaatttataattttttttgttatttgtatattattttttgttgttgtgtagatgttatttttcagttatttttatgtagtttttttgttatttttatataacattataaaaatatataaaaaaaaataaacgtgaaaaatataaaaaaaattatcaaaaaaatagtgttttatgtaattattttaaaacaaaattaaattttcattttataatatataatctttgttttttattttaaataatgataaggtcaatgtcactcctaaattgttgtttagccatgtttgtggctataaaaactattggctttccttttttattttatttatttaaaatatatttttggaaaataaataaataagaagattttattaaagtcccttacttacatgctccctactttctctcaatctaaattgtggatgaattattaatgtttgaaaaagtcccccttcttcccatgtttgcaaaaaagaaatattaaatttaaaatgagataggaaaagtgaagaataaatgaatgtatcttaataaataatttaagatattttttatttaattattataatgaaaatggttctaccaacttaaattttgttatagcaacttgtaacatatttttgtgtaatattgaaaaatgaagttattagacaaagcactattagctttttgaggtttaggagtattagttaaaagagtttaatcaaaatgtgaatcattaagatagaataggatgttatatagctattagttaacaactacttttttatatattagtgaaatagataagtatatttctcctaacttattattatcaattattattattataatatttctatccatgaattagttttaggtaaactcttttatatcctccacaaaactactccatcatctataatcattcacctaatgttagttttttctttaattttaataatgataattaaacactaaaaagggctaaaatcacaccaccactcccacccctaaacaaatgtatttaataaaaaaaaattgttaaaaattactaattttttttttttgtgtatcttttaaatgtttttttttttttcactcctaaattggatgggttctaaacacatgtttagctcgtcttagtccaagaatgccctagcgcccaacaccaccattatgaggtgatgccaaggttggtcctagaaatagagtaagaagttgaatgcctagaagccccaaaactcaagacaataatgtctttaataaaacaaaaggtaatttcttataattgacttgtaacgttcccacttcatatttttattagatctttccctacaaatttattattcttatatacatgtatgtcactttatctgttttctaaaatgacgaatgatcttgtaaatcaacataatgttttcagcatattttgtccttactcgtacgcttattgaaaaaacgtcttaagagattatgattactccaagtcaaatacacttaactttaaagttgagacatctaaaaattatgttacattcaatattaacttatgttagcctatcaatatatggtataactaaatcaaattataattaatatatttattaattctgaaaatcactaaaataaaattaaaaaaaaaaaagtttgcaaggaccaaaattaatatttggttattgagaaagcattctaattaataatcattattatacttattactcaactttattttttaattaattgttaaaatattcaaataataattatcaaattataagtaatacatttgttcattctattgttttttgaacaaatttattgattacatttgattatatttattacttaattaattattaaaatattatgatattaattaattgtaatacaatgttacagatccacatattaataaatttcattactgtaattttactaaatcctacttgaaatcagaattatcaatagaataaatgaaacaatttaaaatataaaataataataattcttattatattgtttattaaattatttcgaaaagaaataagaaacattttaatttgtttacctaaatatgaaaagcaatcaaaatattttaatttatttaaattattattattagaatatgtaattattttttatttataaatttttaaagagcatatttatttttttatttttaattaataaaaacaaaaatgtgttgcttatatagatagaaagagaatctctccttttatattttgtatcaagattaatattatacaattgattcttattttttttagtaaatatgtcataattaccaagatttaattctcattaaattttagtaattaaattaatgcaatatataattgaaataaaaaaaaaaaaggaaaaagacaatcctttctaattctctctctgaaaaacatttttttaatgatgatgttgaaatgggacacgtaagcacgcacgtccatttcatgattgggaaccgtttaaagacaaaaatgttttctttatcaattttatttataaaaaaataatatataattaaagagtaatcataaatatataagtttaattttcgattgtaaataaatatataaatttaattttttttataataatatttaaattatattttttttgaacttctgtaaaaattaatcggtgagtgttaatttattatctacgtgttactttcttattagtatatttaaattaattttaaataaaaaattaaaatttaaaggtttggaccaataagagattttcaagtggtaatttacttgacacttaatagccaggtatatacaaaaatttcagaattataacttaaatattattacaataaaaagttaaactcatgtatttatttaaagctagagttaaaagttataggcataagcattattattaagcaacatatggtgccgaacaccataccgatgtggtgcattgcgattggttagcgaattcttatattatttattaaattaaattgtgtgagactcgatattaatttgcaccaataataatatgtcacattttgtggtgcttgacaccataagatgtcacttaacaattctctttaagtgagcattgttattgggcaccactgttacctagcaccttctagacgtatcaccttacaattggttatcgataatctctaaaagttatttcattaaactatatgagaccccgatatttaattacgccaaaagtgatattcacacgtaggagagtgctagacactactaatgctttttagagaaatgctaaaaggcaccactagtccctaacacctctatcgtaatcatattgttattggtgtaattaagtatcaagtcttatataatttaaaaaaataatttttaaagaatattgcttgtaattcttttaacattaactataaggaattatatggtaaattattcgtaattaaataataaattaaaaaaccaaaaattgaaaaaataaataaaataatgataataaaaaaaaggacaaacgacaaccttttttggaggatttgttggctaaaattggttcgctcaacgaacgcttcaacggcattatttcccggccaattctctttctctctcattcccaaacaaaattctctctaatcaattctctctaatccttttttgggtctaatctcactaacccaaactctaattttctctcaatttctcttcctcttctccttctctgtgtcaattttccattctcatttcttttggggtttcaatttttttactttccatctaaagttctttcctttttttgtacccatttagggttagggttcgtgggagttattgggggtactggatcgtgtggatgtatatttagaggaagaatatcgatccctcaggcgaagatctgaggctttggtttctttttcttttttctgttttagaaatttgaaaattggaaaatgagtgcttcgaggttcataaagtgcgttactgtcggggatggagctgtcggaaagacttgtcttcttatctcctacaccagcaatactttccctacggttagtttcaatctttgatttgattttcaaaatataaaaattgtatgaaattgaattgtaatggcaaagaatgctcgagcaaatttgaccccttttgatcgttttctttctttttttggctgtttgaatttctttggttgaggttttctttgtttggtgttctttctaaaattggttgatttttgtttatttgttttatttatctttgtttgtttttagcttgattttgaagatactgatacatttgtgttcttatggcgtaggtgaaatttttgagatttatttgttgtgattatatgggggattgttgatcgtttgggctgaaatttagattatggattctcaattagaatgtttgttttaccaattgtattatattgatgagtaatttatggttttgttctacaattgaaatcatattttggtggaaaaaacaggattatgtgccaactgttttcgacaatttcagtgcaaatgtggttgtgaatggaagcactgttaacttgggattgtgggatacagccggtaagtattgaaaatgactaaaatgcaagttgtgttaaacagattttcttttctcggtctgaacttttctgttttcgttttctatggagaacaggacaagaggattataacaggttaagacccttgagttatcgcggggccgatgtgtttatactggcattctctctcattagcaaagctagctatgaaaatgtttccaaaaaggttggttaggctttgcttttatcatatgtgggcagttatgatttattaaaatatctctatggagagttggtaatcccattaatgttttgctgatgtcttccattaacatttgtttactatgttttttttctccagtggattcctgaattgaagcattatgcacctggtgtcccgatcattcttgttggaacaaagcttggtatattttttatctttctattgcttactattttggtctacattacgttcttaatcagctttttaatcactactaaatactaatatgtgtatccttttctcatgataaggttcattttcattttatagtaaggattgattagtaccaatattgtgttatgttaatggaagttttggtaatggcatgaacaacaatgttcctctttttcatatattttccttttggtttttacgagctagaccttcgagatgacaagcagttctttatcgaccatcctggcgctgttccaattactacagctcaggtgaaaaatttactctttacaatcctctaacgtttttacataattgcacattttcttcttctttatattgacttgtttatcgcattaagggagaggaacttcgaaagcttatcggtgcacctgcttacatcgaatgcagctcgaaaacacagcaggtaataaaaacataaaactttttcccttctttctgatgaaattgtcgtagtcttaataagctcggtcttgtatatacacagaatgtgaaaggagtctttgatgcagccataagagttgtccttcaaccgccgaaacagaagaaaaagaaaagcaaagcacaaaaggcttgctccatattgtgatttgaaagaataggtgtaaagagacgacaacaacaacaatcttcgagttctgcctctctattccacaccatttcctctcccctctcaccattttttctttttaacatttttactgtttaattcagaagaagaagtaggagttcatgaatggtattgtccacttttacaatctttttatgaaactcttaaagaagaagaagaagaagaataagaagaagcatatcagtctgttataaatggtgttttgctttttcttggaattattgtggttctcctcactcttgtttagtagcatggtttgcttatatatttatattaaattcaggttttattgattattattattaaatttttttttataaattgttttaatgtaatagactggaatatatcatcccagttaggaaatgcttttttctatggacacagttatgttattaattttattgtgctttaaaaggcttggcaatttctatggctttcttctattaaatatttatttgtattttgacaacacttgggatgtttcttttggaaattgcagcttcttccaaattatcatttttattttcttaatatgtaaattcagtatatttgtatttttaaggttttttctttatattttcttcggatttgattcttgatgatatttgagttttatgtaaatattttagtattgtcagtttttaatttttgttccagaattgttaatgtagtagttggtacttttgtcaaatttactgtaacactattattgctagcacaatttggtggtctcggatattcaagttgtcttagaaattttatattagttgatgctatttttcaatgaattctttcaactctcgggttctttgagtctttttcattaatagtagtattcttattttttttaaaaaaaataaataataattggaatttctaagtgatgtcccagtaaataaataaataaataaataataataaaaggtgggtggtggagtggagaatgattgacttaatgagagagttcttaaacacaaggaaattcacctgttcaataacataattatccttttcattgtaacaaatagtaacttgtgagagacttggtttatcttcctagagaccatcttactattacgaaccaagaacaagaacgagacatgcaaatgaatatgatgaatcaagaacaaggagtgggagatgaacatggttctttggcaagctcttgcgggagcattcacctacgtaccctccctcaacaaacatgttgtttactttcgagaagggcatgctgaatatgccgaaagctacgagcgaagctagaattaaatgcgagaggagccaaactaaactaaaacttaaataacaaagggtatgtttgtagtacaacttcttaaaaagttatttcggtagacctgctatttgctcgacatttagaaaaaaatttagatatttttttttatgatcacatacgttgcagctatataggatcacttgtaatttttttttaaaaaagtcgaataatttataatgctaaaaataaagttctcatattttattgcactcgtgactgttttttccttatgcgcttagaaaatttacaggtgattctatagacattttttgaaagagatatgggatttacagaaacaacattttaggatagtgtactataaatatttcccataaaaatatttaatatcaagatttttgacatttattcaatgttctatgttataaattgctctttaatttaccattgcaaattattattaatatattattagagaattgctaaaaggcaatattggtgcataacaccctctttcgtgtcatacaggtgtaattaagtaatggatccccaaaaacttaagaaaataacttttggagaatatcactaaacaatcatatagtcacctatagaagatgttaggcatcagtagtatccaatagcaatgctcatagtcatagcattaaatagagctcaatctgatcactttacttgctaaggacctaaggtagtaatttcactatcatgtgtagcttggtttgaaacgaagaaaaaaattgtacatgttatgttccacattgcttatgtaagagtaatttgtaattttatagaat

SEQ ID NO: 37740 - DNA, 2795 bp, Cannabis sativa
gcaaatgcatttggagcttgagcactttgtgcaaatgcatttggagcttgagcactttgtgcaaatgcatttggagcttgagcactttgtgcaaatgcatttggagcagttccaggaaaagtttgattagcgggagttgaatttcggggaactggaccagacttgcaaaggttttcaaactctatcaccttagagttcactaaattccgttctctatcaacctgtagaaaattgtgtcaataatatgagaaacataacaatgaaacctcaacacttgatatttctgtgcaaggaaatattccatatagaagtatcttgaaacaaataggtaggaaatactgaatatattactgataccaacaaagagtcgctacaattcatgcgaacaactacctcaaaaaacataggccctactaaactatgccctttgcaacaacaacagatgactcactatatccatgtttatagcaatgatctttagataaatagctttccaattgacagcaagcatatcaagaaaagaaaattagaagcggcagcaaatgacttcattgaaaatttgaagcatcatgagatggaagcataaccacataaatttacatttcacttctcttacaagcaacataatttgtacacattttcccatgttagagttgcaagatgcacaatataaaactgtgtgccacaagcatcaatggtgacacaaaataacttacgggaaatcaagtgtattaatgtgaacttcaaagcaagaaaacagaagagcaaaataaacacatgaaatattcttactatagtctgcaaactcaatccacgcttagcatcatcatatgcagccatcctcaattcttcatagctaatgtcaccaacaatgtcacaaggagcactgaagaaaaacaattcaaaaactcagttcattgcattgttacatagaactttgaaagaaatgaccaaggactgtatatctaggtacgtaaatttgtctcaaatttgtctcaaatcaaatgaaattaattgaaaaaaaatgacatgtacctaagaattttaagcttgtgtttttctaggaaataaaccaacaaatacatacatgtaatgctaacatgtgattttactgtgaaagcatctcataattctccaaattcaaagcatcatctctgtaaaattatctatgtcatctattctaattaactgtgttcaagggttttcaatgttactaattataaattgaaactatatgaatgtcaagtgtcaacataaatacaatacaactatttgaatgccaacgcaatatcgagagtaaaacatactttttccagtgaccatagcacgtaagtctccaaaggggtctttcatgctgaaaatcctcaacagctacgcgtctgcaagattcgcgatctgtacaccttggagacacagaaattcatagctgattaatagtgtgacttgatgcaagggaataaatgaaataagtaacattaacatagttgcagagaaaaagttacttatgattggtagtctggctctgactttcagatgtattattggcattgggcgtggaagaagaacgagtccacgagttttggaatggctaatcaagttttataagagcaaaatatcagattattaattgaatgacaaaaaggaactttcaaatcattaattaaaaatgaaaaaacaaagaacaaaaccttatgttggttgggcttggaaccaaaatctcctgccccttttggttgaggattgttttgaacaccaaaaccatagggattgctgggcttctgctgttgctgctgctgttgatatgagaaaacattattgggtctctgttgttgttgtgatgaagtcacatgaagaaatttacaccgttgcccatattgacagctgaaagagacaaccacaccaaactttatatataaattatatatatgtaaatattgcaaaataaaagttcatgtattggagataaagctttatacccacctgccgcgctgaaaattccggcaaacatccttcttgaccggcatttggttgtcttgaattgagtcagtgaaaaaagaaacctttaaaccttaaattctagagtgactagccaagctgtaagggaatcaaattctaaagaaaatcaatttagagtaatctaattctcgtcaaatacaaagcagtgtaatgtaagtaagtaagaccaaattcggtcacgtctaatattactgatgaattggaatgtaatagtattagggcagccattaatgaatggtgagttaagcttgaagaaaatgtagcggagagtgtaagtgaaaaataccgaaggaggagagtactgtaagagaaagaagcatgaatcagaagctaatttggagtgattctccgggtccggtggttcgccggcgccgcccaatttggacagaaaagtgaacgatgatcgtggagagagagagagagaggggttagcgtgtaatttacgagggtaacctctctaatatgaaaagggttacttggtactattatctaaagttttgagttttttttttttttagaaaaattaaagttttgttgttgtaattgagtaaatttagatgatatttgatttgatgtaatagtaatgtaatagaataaaaattgtaatgagaataatattatgatatttagtttgacattgtaatgagcattgtaattagataaagtaagaagtatattgataaaaatatccttaattttataatttttaatatttaaatttaataaaagtaaaaaaagaagggcaaaacatgtcttttttaactatgtaattaccattg

SEQ ID NO: 37741 - DNA, 4438 bp, Cannabis sativa
gtttagtttggtgtatagaaatttaattgtaatggtaatagtaatgaaataaaaaatgaatatagaaattaattataatatttggttgttggttggaatgaatattgtaattagaattattgtgtttaatttggtgtgaactcgcccaagaatcatctttgagcaaagatgttttaatgcttcaaaccttccaatgctccacactaatacatttggatgttactttacgaagaaacacgatgagagaataataaaaatagggttagcacatttacaccaaaaacaataatttatggctggctagtgtagtggtgtttcaactttgatacaatgccacttgataccattaagatatgattgcaggttttggatggggacgaaaatagttacaatagaataaaatttcaaattaatgtatgattttacaaaagataaattaattctttttattattaaataactattatataataatattaaatttttaaatacacttaggatactaaaattaggggtgggttggatgggttagaggtattttaataggccaacctaatgattgcggtttggataagctataaaccattccagttttttttttattgtacagcccaacctacttaatacaataatatagggtgagttgggttgggttcattgggttgagatgaatattttaaattttaatatttatgttacaaataggatattattatttaacctagtgcatacacaaaaaaaaaatgatacatatgtgtgtgtagtatagtgctttaaaaaactaagatagtagtggtatcattgtgtgagtaacaaagttaataatagtgattgattcttacactaggcttgttggtagaagtagtagggtaactataaactacatgttactgatgtatttttgttaattcgcattctaaggttatcacaaatataataaatttatgtataaaaacgtgatatatatatatatatatatttgtatatattttgtgaatcgaaaatatattttatatatgaaagttgtttcaaatttgaaatattttttaagaaatgagttggtttgggttatatagagttaaaatgtgtccaacccataaccaacccataattatatgacctatcacttttcaactcaacgaactatggtatactcttaacataaccttttactacaaaaataaattgagttggccggttaaatagtttgacccatatcttgttcacccctgactacaatgaataatttttaaaagagagagtactaatggatcattatacaaattataaggcagaagtgcataatttaacatattttgcacataatcggtttggacgattatttatctggtctattcttaagaatatattttgtaataaccacgtgctctaacttttcactatctaacaaaatcttcttttttctattttttaaaaaaaaaatgtaaataaaagaaaacctaaatcccaaatccccatcctgttcgaactcgaagcagaccaccagaccaaaccccccaatcgttctcttcctcctcgtctcagattgaaggctccctccgaccaaaacaccaggtaccttcctctcttatttcatattcatattcatactagtctcatacccaaaaccaagattttagactaagcactgtatcagctgaccgtcgtcaagactcaattgttcttattaattgtgtggctatctttcttgaggtctttagattttttttaggatcaacatggttaaagttcttgcttttaatattttttaaggattttttttttaagttattttgttcgtatcaaagacagtgcatattatcaagagttttctcaagtgattatttattgttatcgcagagatcacagtacttcgtctagtctctctctatcaattgaaacgtgattacccaaattgaatgccaaaacttaacctaaaacaaattccaaactcaaatatcaattattgagactctcaaaccatgagcgtcgaacctttcaacaggtattcttttttctttcttgaaagtataaaatttgaatgaaaaaaaagtgaaaaaagaatgtttcatccattgttgttttaaagtaagaaaatcgtcgttgaatttgttttaggttggtgaagcttgcggcgagagctttctacgatgatataactacaaaaggggataatcaacccaaaaatggtcggagtgacaataggggaatcgctgtggtggtactcgatgccctaacaaggttttcattttggtacccttggctcttcttctcttttgaataattgaacgttgtttctgggtgttcttaataccttctttagcgtgttatgtattgcgaatcccaaattattattattttttgtttaacgttggatttcttattgtttttgtgctattttataggggctagttagggataagtttctgttagcaattttttttttgttcaagtatggctgttgcttattgagtatgtcatgtttcagacgacaatgggttcgagaagaagatttggcgaaggatttaaagctgcactcgaagcagcttcgaagaactttgcggttttttgaagaagaaaagttggttacccgggatcatagaagagaggttagtaatgcttatgcttattgtttatttttgatgatttggttatatatgctttgcgttagcttctacaaataatattacttcaaatgtgatttaaatgtgacagttgtagagagcagaatgtttggagtttttaatgactagataggttatatgacatatctacatataactaggttacatatttgttttgaattctatgtggttgaattgtagtaaggcctcgtactccattattgagaaaatggtgataatcgtaattatgttgttaacggccttgtataagttgttttcttactatctatgtattcctcaataagagacaaagtacaattattaagctctgaattatgaaattaagattatatccaagagaggtagctcaaatggttaagcatatggtatactctcgtaaggtctgtgactctagggcgactacatagagattgctataattttctggtcttcaaatattatagggttattggtaaggtggggatcctaattttggaaaaaaataatgaagaatttaaagttacttttaggcaccagtcctgtgcaaattggaaatgattttggcaatggagattattattattatttgaatttgggccctgttcgactgggagacctcgcagtggcctcaaggtttttgagtctttggggattcgaaccttggaacaaatatctacaagcactttccaatactccataccattagaccaccccttagggtttggagattattacaatgcaaagttgattctttctttgttgacatgagaaagacctttacgatgatgaaagaaagggtcgaaacatcacaaagatcaatatttacaaatcaaactggagttagattttttttttcctttatattgtctccttgctcatctggatcaaggaaagagatgcaataatagacgtgaagcttaggagctggttggtttctattttgaaaacagtattttaaaatagtttgaagttttatgatttgaaagttctgtttaaaaagtaaaattttgttttttaaaatttgattggttagtaatgtcataacaaaattccattctcttgtcaagctgagaatcaagttatgtttttaaattttacaggattaggtatgtgttgatgaaatcgaggttagtattttttttttaaataaccaatattttagtgcgtctctcttaagtcttttggatttgtaaaattgttttcttatccaaaactaatcaaactaggttcgatttcgttgtaacagttgaaggggatagaaaaacaattaagttacaggtgcttaacagctgtattttcttccttcctttacaatgtcttatgtgatattttcctagattttatttcctgttctgtactaaggttgagacttgacttgggaacgacaaaatttatgctcaaagatgcaagggaatattctttctacgaatgtatagcttgtgtgaaggcttttttcttctgtgtttttccagtttgataattgtttggctgatatcttattaattttatatgtgccatttcacttggttttctgcatgttttaacccaattaaatgccttttgtagttgtgactttaggcatctgtctttttgttagtttttcttctaattatcaactcactgtaagagtatgaaacctattattgcagacagctaagggggcaaagatttttagtgctgcagtagctgcaactgtggatggacatacaaaggagggggatgagaagattaaaatgcacactcattcttactgctgtctggactatgcacaggttatttttctttatgcattcatgtcttaataaacatcaata

SEQ ID NO: 37742 - DNA, 5248 bp, Cannabis sativa
atgaaaacccatatgggacatgacagcctgaagatagttccattcaacacggtcgtaagctttgctcatatcaagttttagtgccatgaaccccttcttgccaacacaatttagattcaaaaacccataggatttccctccctcccacaattcaaaaaagaaaaaaaaaatagattagagtgttggagaagctgcttgttttctttttttttttttgattgaattcgaaagcaacactacctttcatttaaattcaacctaacttatccaaagtcctaagcccccatgtgaaccaattaatatctcccaaactatctttatgattattattttttcattaataattagtaaataacccagaaaaaaacagaagaaaaatctacttaaatcatttgaaatgtgaaggtgatccaacggttccagccacagtaacattaaacagctgcgttcacaactaacaagaagacaactcagcgttgcttcgcccctcccaccttttgcaacccaaatatcaaactcatgctaattgacaccaccaactgccacgtttacatatattaaattgtcgtctcctttaataagatacatatccatagcatccgtacggtagaagcttcaaaacacatttgcccaaaataatttcaataaggtcgaactaaaatttagacactgcttaaatattcactattacacattgacattcaaaagaaaaaaaatatataacagtgacaaattataatgaatataattaagtataattacacaaaaattatattgaattatgaataaagaagagtgggtcccacagaaaccaagataacaagtcaacaaaatccgagttacccgccacaaccctttcatcgcacctttttttttaattccctctctcacaaaaaaaaaaaaaaaaagtgaaacaaattggcgggaaattcgaaggtttagagggaaacatcaaacactgaattcggcaaaccctaatccccaaaactttcaaatatcttatctgttaccccattcttttatataaaccgtataagtttcgtttcatatagactacacgcacaaacacaaactgttcgacgaaagtcctcagtcagagagcgagagagaaagagagaggcaagatgtatgttgttaagagagacgggcgtcaggaggcggttcatttcgacaagatcactgctcgtttgaaaaagctcagttatggcctaagcatcgatcactgcgatccagttctggtcgctcagaaagtctgcgctggggtctataagggcgtcaccactagccagcttgatgagctcgctgcggaaactgctgctgccttaactgccaatcaccctgactacgcttcggtcagtttttctttatccgactcttgactcctatgttcattttgtttcggcaccgaaatttttgaaatattctgaatatttatcgcctctgtttggtcagttagtacagacagtcaccttgttattgctgaattatttgttagatcatgaatagttattgggttttcaaaattatctaaattttctttggaaatgaagagtaaatggatgtagttttgtctgatttgtacttgcgattgagaattttgttataatgagttgaagtctgtttcatttgatgcagttggctgcaaggattgttgtgtcgaatttgcacaaaaacaccaagaagtcattttctgagacgtaagcctcattaatagtgcattttttagtttgtctaaactggctctggcatctaatcaaatatgtaaacttttctgattgtatgattttgcaggatcaaaatcatgtacaaccattttagtgagagatctggtcagaaggcgcctctaattgcagatgatgtctatgaaatcatcatgaatgtatgtttattttctccccttttttattttactacatatattgctcgctagtatgttcttcctagttttggaatatgcgtacttctttttaaagatattcatttacctgacaatagtggttatcctgatattttttttttcctttctttcagaatgcagctcagttggatagtgaaataatatatgatcgagattttgactatgattattttggctttaaaaccctcgagaggtcatacctcttgaaggtacaaggaaaggtcattgaaagacctcaacacatgttgatgagagttgctgttggaattcacaaagaggatgttgaatctgctatcaagacatatcactttatgtctcagcggtggtttacccatgcttctcccaccctcttcaattcgggaacaccaaggcctcaggtatgattggtgtacatttggatattttaagaactaattgttttaaattgtgtgatgcattgagttctcatactaatatcaattgccacttggtgattgttgttgcagttgagtagctgcttccttttgtgtatgaaagatgatagcattgaaggcatatatgataccttgaaagagtgtgctgttatcagcaaatcagctggaggaattggtgtctcagttcacaacattcgtgccacagggagttatattcgtgggacaaatggaacatcaaatggcattgttcctatgatacgagtttttaatgatactgcccgttatgttgatcaagggggagggaagaggaaaggtagttttttcttgatttgaaagtgatatgatttccatttgacgtgtgaattcatgctgatgttgcgtatttttccttgtaggtgcatttgctgtgtacttggagccatggcatgctgacgtatttgaatttcttgatcttaggaaaaaccatggcaaggtatgcataatgaatcatccatacgtgcaatatagcaattgaagaagatttatttaggagcttgaccactaaatatgtatgactgatttattcttgcaggaggagcatcgtgctcgtgatttgttttatgctctttgggtgcctgatttgtttatggaacgagtgcaaagtaatgggcagtggtcactgttctgccctaatgaggcaccaggtttggcagattgctggggtgaagaatttgaaaagctctatacccgatatgaaaaagaggtaaagtgatttgacatttgcattgttgctgcccttaaaacattttttattaatgctattttgtctagctggtttttaataaatgaatgtgttacagggaaaagccaagaaggttgttcaggcgcagaatttgtggtttgaaattctaaaatctcagattgaaacaggaacaccctatatgctttttaaggtgcttgtcttgtaatcttacttcctgacaatacctcatacgtgatctgcagcctgaatgattttcttattttgtcttgtaactgttgtcctgcttctctataggatacttgcaacaggaaaagtaatcaacaaaacctcggtaccataaaatcttcaaacttgtgtacagagataattgagtacacaagtccaacagaaactgccgtgtgcaacttggcatcaattgctctaccacggtttgttcgagagaaggtaagacacttctagaatttattaataaaacctgatttttgttgtttggtctgttgtggtgtgacacttttattatttgttgtaggatgttccaatagagtcccatccttcaaagattgttggtagcagaggttccaagaatcgatattttgacttcaataagttagcagaggtttgtgttataaactcaatctacttgttttgttttattttataacacaatgtagcataaaataagatagctggagcgctttcttcatttacattcttagtttctctcaagtctcattgtataaattgtctcaatgtttatccttttgttttggcagatcacgtcaacagtcactttaaatcttaacaagataattgatgtcaattactatcccgttgagacagcaaagaggtcaaatttgcgacacaggccaattggaattggagttcagggtttggcagacacctttattttgcttggcatggcatttgattcacctgaggtaattcttactttagtgctatgctgtagtattttattagagtcttagcttggatatttgaggttgacattgtcatattgtggcaggctcaacaattaaacaaagacatatttgagactatatattatcatgcactgaagacttcttctgagttagctgcaaaagaaggcccttatgaatcctatgatggatgtccagtaagcaaggtatataagtgtacttggttatgtaattacatttcctattgtcattaatgtacatctaaaaccactggctaaacctttgtgccctttgattactaagggtcttctattctagtattgtcttgtcagttcatttgttccttcagagatttagaacctcaacaccatagtcagataatgatgcatttccagtttcttaacgagtcatttttcttgtgcagggaactcttcagccagatatgtggggtgtaacaccttcagatcggtgggattggaaatctcttagggaaatgatatctaagaatggagttagaaattcgcttcttgtagctccaatgcctacagcttcaaccagtcaaattcttggaaacaatgagtgctttgagccatatacttccaatatttatagccgcagggttttgaggtttgcttttctggcccacatattcaattttcttttaaggtttttccaatggtctaaatatttttttatctcttacagtggtgagtttgttgtggtgaacaaacatttgcttcatgacttgactgagacgggtgtgtggtcacctgctattaaaaacaagataatatacgaggatggttctgttcagacaataccagaaattcctgatgagcttaaagttatctacaagtatgaaactgcaatttccccacaagtgtttttgtttctgtatagttacttttttttgttttttggaattgtgctaagaaaatattctttaatcagaactgtttgggagattaagcaaagaacattggtagatatggctgttgatcgtggatgcttcatagatcagagtcaaagcctaaacatacacatggatcagcccaattttgggaaacttacttcgttgcacttctatgcgtggtcaaaggtatgtttacatttgctgctactttgagataaagtggacaagataaacttgttatgtagaacagtaatgtgcttaacgtttgatctagttaaatttgcaatgaaccagttctattttcattatgtgcttctcataatt

SEQ ID NO: 37743 - DNA, 3372 bp, Cannabis sativa
tctattgatattcctgaaattgttgacgaactgaggatttcattgaaagttcatcttcagttgattagatgttcattctgtaactctttgatgtacttttaaagtaccaaaatcactatgttaatgagaaagctgtcttagatgaagattttgatgatggaaatatattctgtaatgatgaaatatatggctcaagtgatgatgacatcagaagtgctacaaaaacagaatttgataaggatgtagattcatatttcctagttagtttcttaacatttcttaatattcttttaattattatatatttcattgaatgattttgtattttttgtttatttcaaagaatcttttattatggcacgtggtcgtcgcaccactcgatctactgctcggagtcaacaaattgtaccagtcattgatcctcctgctccacctgcacaagttgttcgcactactcgatcaactttacagaatcaacaagttggtcgcaccactcgatctatggtaaaaagtcaacaacgtagaaccactgcacaaattaatgtagagagtgaacaccctcatccctccacgcagtctgaaccctccgcacactctcctgtgcagagtgaacaaatcaatgcgatgacccatgtacgcagtgaacaagtaaatgtacagagtaatgatactgaagatgatccatcttattcttaccaaactccatctggtaaatctattgtctttcatattcatttatattaaatttctatttctatttattttatgatcaagattatgttgcattgtaggacaaagatcttcatttaagacacgtggggctactcgtggcatgacaactgcaagtatagctaaggcatcatcgtccggaaagttatctgtgatttttgatgcggagtgtcgtcaaccaatatgtactaatgctgagaaatttaataatgagattggattcattattcgaaatcatggtacatttcattataaagagtggagaatggtaccagaagaagtgagagctccattacgacaccatcttttggtaagtcatttcataatgtttacctatatatttataatatttgtaattaatattattttattttatagaaatattttgacatcaacttgaatgatgagactacaaaaaaatgtattgatgatcaaatgagaaaagcttggaagggtcacaagtacaagctacacttatacttcaaaagaattggaggagaaaatgatgttgagatggccaagagcaaacgacatcctgacttaaaggaggatcaacaagaagattggaatattttgtgtgatcgttggtgttctcttgaatttaaggtaatttttattataatattatatatatgtatataacttcactaaaatattttgtttggttttatttcatcaggaaagggcaataaagaatactactaatagatctaagaggaaatgggtgtcaaaaaatggttcagtttctacagcgcgacatcacattcgacgtggaatggtattaaattcttctaccggtcaaattgagacatggcgtctaaagcattatgatacagaaaagggatggactggaccagatctcgagctactatatgtaagtaatttaattttttatttcaaaaacttttatggttattataaatttttgcttatagttaattaaatatattattagaatgaaatgatggagttaagggctcaacaccttccggaagacatgtctgataaaaagattatggagcgtgtacttggacgtcattcagtttacttgcgaggatggggacgatcttctactgttacaacttgtacttcagatcatgaaaatattgtgagtaatcaagtgaccaatgaagaattacttgaacgacttaatgatacaacttctcgtcttaatgatgcaaatagccgtcttgattctactaccaaacaacttaatgtggttttggacatactccgtcattacaatctagtgccaccacctccaacagatgaagatgaagatgaagattcagatgcaaattgttagtttatatatattaggttttttttttttgaaactatatgtgttagcttgttaagtaatgatctttatgaaatattttaatactgatgaagtgttttagcgttgaacattttattatcctatgttcttttttttaccttgtcttacctattataaaagagtcaagttttttttttttggaaaaaaattataagtcaatttgttaattaagttttggtttgttagtgttcgagagacaggtggcagccagcagctttttttttttttttggtaaataagtcagtagaatttcatttcaaaatgagaattacaccctcaacaaattaaatctctccctttctcttactaaacttttcccaccaatcttacctatgtttttcaatgatgtaaagactacttacagtttacttgctttgtacagtgaatagcattttgaatggttttgaccttttggaactacaaggccccaatttctttccaatcaaataaaaccaacatgaaaacttcttttcctctaggagctgcacctgcacttcttttaatatggttcgagattgacataaaatccatctgaacgatgttcaaaccagcccactgaagcatctctttagtgaatttcctgctgaacttgcaaaggaaaaaagatgagtgggacggttattccacgagaaatttgtctcggttctaagttatttggacttaaacttaaataattttttttatacaaatattaatatggtctaatattattaaattgtgtagtttggtgtattggtaaatttacgtttaaagtttaaggaggtcactaattcaaaattctacctatttgcttaattttttgtattattgctgggatttgaacttagtaattaatttaaaacatgattacgctaaaattattttaacataattgtttactattttatacataatgagctcgtttgatacgttgtattgtattgtattaatattatttaatacaatactatgtttggtattgacttatactaatagattgtgtaaagttataatatattttcaataaactcgaccctaacaccgattgcagttcgggttcgggtctcagtaactaggtctgggtctaggtctcgggtccgatcctaggttcgagttcggagtcctgggtccgaattcgggtctcgagtccttggttcgagtctgggtctcgagtcttggtcctaggcccaggtacgaattatgagtcctgggtcgttgggtcaaggtcccaagtttgggtctcgggtcccgggtttgggcccgagtcccgagtttgggtccgtgtctgggtcttgggttgggtcctaattcgggtccagcac

SEQ ID NO: 37744 - DNA, 3828 bp, Cannabis sativa
atttacaatcggatatagacccgattgtttcgggccaccgccaccccgtcggatcggggctccaacaaatgatcaaaacaattcagccttcgatagagaatgtgcaatgttgtgatttgttaactgaaaaagcaaattaattgaaagtgtagaaagaaagaactaaaaaaaccgtagaaaacgataaatcagtacctggttgtgaaaagagagcccttcaggcaatgaaaattggtttcagcgaataatggaaaacagaggatgaaaagcttgagatgagaagttaatttgttttggggcactaactatacaaaaatcgactcgaagtagtaatttaattatataaaaaagaaagaaaatatgtacaaagattcttattgctaaaaatgtatcaaaggaaattagcacaaaaatggctggaggagttctgctcagtggctttcacggcaagattaacagccccagtagtgattacgtgcatcgttgcttgctgtctctagtggcctcattttgggctatgacttaggaatttcaggttcctttctttttctccaacttttatcatatctattagcttgaaaaatccaaagttgaagggttgatatactcttaaaaacatctgctaatatatatatttcttctctcttctattgattactgtgcaattttcaaggataatataaaccccgagacattatggatagtagcctagcataaaggaaaaactattataataaaaataatattcgtacaaacatttgagcaaaaactattcatactaaactctattaactcttggagccattgctatgcagaatgggaagagggaaatatttttacaagatcttggatcatatttaattcatcctatcatatggaggagactagataaaaacattggctctagacatgtgtgttcaaatgcaacacaagattatttacgcaaaagaaagtataattcatgagcgaagtttgtttacatcgctttagaattactgtacagatttggtgataaaaaagaagagcagagcacaggatgtcctgagcttgattgtgcttaggttcttcagcttattgaagatgtagttgaggtaatgctcttggtctgggaagaattagttgacgtgttgctccttaccctggaactctggcttgtggacgatgattcagtaaagaaaactacattctcctgatcatcaccaaaaacttcaagtgaccttggaattgggggcagattcacgtctataactccttcaaggatttgaaccacctgactcattgatggtctatgaacttcatcgtcttggatgcaccaacaagcgactctacaaactcttacaagctcttctacatctgcattccgctccagtctcgggtccaataggctaagcgcatcaccttcttcaatgataacttttgcagcccaagttgggaagaattttatttttccatcctcagaagggtctgagtttctccttcctgacactaactcaaaaagcatcattccgtagctgaaaacatcggctttggatgttattgccactcctgcaatccattccggtgcaagatagcctcttgttcctctcatggttgtgaggaccctgctgaagtcccttccaatgagttttgctaatccaaagtcagctattttgggacataattctgcatccaaaagaatgttttctggcttgatgtcacagtgtatgatgcattccctgcatttctcgtgcagataaactaaccctctagctatacccagtgcaatttggtaccttgttttccagctcaacacatttgaattacttccactgagaaggactgaatctagagagccattggacatgtaatcatacaccaataatcttttagtaccctcagagcagaacccacgtaatctaactagatttacatgttgaattgttccgattgtgctgacttctgttcggaattgcttctctccttggctgacactctcaagcttcttcactgctactacagttgagtcggccaatacccccttgaaaactgaaccaaagcctcctccccccaatttatccgagaagttcttggttgcattttgcatgtctctgtagccaaacgccaccaacgaaccctccacttgttttccttttccaactgttctatttcttcgccttaaaattaagaacaccataagaccaacaacaaccagtagtcctacaactgagcccaccacagcaccaacaatcgttccttttttcttcttcggattaggaagctcagaagctgcaagcctaacgtaaagattgccactgttgccacctgctgctgttagttggttcagatttaagagatctcctgtccaaattgaacattcattgttttcataggcataagctgtgcaagagcagttgtctaggcagcttgattcacattcatcagaactccccacctgcaaagactgtttattttcaggtaataacatgttgagcatctcttgaaatctgtctttctccccattaggaaggctgttgttaccacattcaagattggttactcttgtgcatccaccagaatactcccccaagtcccattcactctgaaacgcaggcttaaatcccttcaaacatttacaaaatggcaaggaattctcattgcagcttccatatcgcccacacaaagcataaacttcacattgttgtctcggttgagaccaaaacaaattccatccattattaggcagataattttgttgcttaatctgcccagaaacatccatcacaaaccgagatatgaatgcagaagtgggcttaactgaatatgtaaaatagctttcattttcattcgatacaaaattaaaatcatagatataatctttcctcatctcagggactaagctaaaaatgcgtccgttccaagatccgctggtccaataactcctagacctattccaaagtatggtataagagttgtctttttggtctagctgaagagtaaagaggccaggagaagggtcatcggcattcttccatgaggtgagaacttggtgggttttggtttttttgttgtacgcaattttactaccaggaagccatgtatgagcaggattatcaaaactttgccataaaggatttgaagaattggaaccatcagttaacactagatttccattatccccaagtactacttttacagttgaggagctactggagctcacatttgtggaccaaactgaaagtttagactcattcaaaataactaaattaccatttgagatcttcagctctgaagaaaatttatctgaaactggctgctctctatttgccacccaaactatggtctgctcggtctttattttctcgtaccacatgcctatatagtatttagaagaattacctggagtaaagaatcccagtctaaagactccacctggagagacaatggtttggtcaccagagagggattggtttccagagatggtatcagctccaaaagagagattgatcttcaaaaacagccagattaggagaacaagcaggatccttctgttggtcttgatatccatggctgcaagcaatattgtagttgcagagaagctacaattttaatttaaatgaaacaacacacaaatgatatatatgatcaccaaaacgaagaagaaatctctctacttgacaactcgatgtccatagtcattctccaataaattcaagaagctgtagttcgttttccatgattttgatgaacctttatgttctgacgacaacgcccttggctgtgaactataatagttctgtacgtattgtgcatcataaattttgtgtcaatttattctggttgggggcattt

SEQ ID NO: 37745 - DNA, 2667 bp, Cannabis sativa
gggggggggggggttggtttttatagagatcatctggttctcctactggtttgcatgcgagtaagcttgattctaaaagagaaaaaaaatatcaagtttgattctactagtgacaatgatgaaaataataatgaagttgggagttcaagagtgttgataaaaaaaagaacttgaaaaagaaacagggtaaggaaaaagtggtggataagcatggcgatgatgagtgtgagtctaagagaggtaagattggtgtacaaggcgaatttgaggataagagattgatttggaatggttcaaaaaagttaaggtataatttgtttattaattttttgttaatatttttgtacatttttttgtttatgagtattcttatcaggttgatatttcagatgattttgtttgcatttagttttaatttttatattgatttgctggttttttttatccttaatgttatatatatcgttgtctgtatttatgcattttgtttactaaaatttttgtttcttaatgtttttgattttataaagttaaggatcattattttttttcttttaaaaaaaaattatttacagttatgtatgcttaattttaagaattttttctgtgttttttgttttacatttagttttaaattttttgatcctcaatgttatatatatatttttatttttgtttatgcatttcgtttactaaaatttttgttttttaattttcttggttttataaagttaaggatcattatttttttcttttcaaaaaaaaaaaaaattaattacagttatgtatgcttaattttaaaaaaaaaattctatgttttttgttttaatttttctgatttaataactttttttggttgtttttttctagttttgtaacttttgattttgttgtcatttattgtaaataaatttttgttacttttttttttaataaaaaaaaatatatatatttacaattctgtttgcttaatgtttagtaaattttttaggtttttttattttcattttttgtttgtttattggggataattataaagacggtttagttttaacttggaaattaataaataattaggatttaattatgaaattggaatattagttatgattaatcattttatagagatttatttgaattcaggatgcattatttatgtcatacatgaagttttatgtttttgcatattttatgcccgacaacattagaatgcggcgtttggccaatagaatcacattttggtattttaataatagcggggcaatatagttagacattggaagtgtcagaattagtcaaagttttagaattaaccaaaatacccctaagtgacttagaaggtttttggatttagtgaggggtaaaatggtctttttagccattttattctttgtccttttgtggattttatttatgttttacaatctgatttttattttaattaattagaaaaccatatgtttatttcattttgttcaaagaaaaaggaaaagttaagaaatctaactctctctctctctctctctctctctccctaaaaccagctagggtttgggttttttctgcataattcaaggaattccagcaggtttctaagtgttccaatataaggtatacctccctaagatctttctctttgttttcttaagttaaagttaaaatttttgcttgatttttaggtttagggttttgtatttattcttactgcttgagtttataattatgttatttgagctgaattatgatagtttgtggcttgatttggttgttagacaaagtttgagttttagaactcaaattttggtctttaatggcaaaatttgattctggttatgttgtgatgttttattgcttagaatatgttcattattgtacaataagcaggtctgacagttatggttaagtttggggttgaattgagggtgtaatgaatttttgagtgtttcctgcactgaactggtcgaccggttggtccccaagaaatgccacataactggaatttcggttggagaaccagtctaccggttggggcattttttaaaaatcctagtttttctcgtttttgcaatatttaggttattgccatgttatccatcgatagggaaacttttagtttcaaatttaagtccttgaaaagtgatttagtgtgtcacttatcggttttacgaattatgtgatttaggggcttgcaattcgtcgacccgttgttcccctcaagttggccgacacgcctgaatttgaaaatgaggtaagattagtataatggttgcatttatatatacatgtttagcgtacgttagttaccacaagaataacatatcagggtattagtgaggtgtacataaagttgtaccgagataccaacatatatatgttaggcaaatctatagccatcggattagcatatcaaggcatcagtgaggtgtacatagagttgcacaaagatgccaatagatatatgctaggctatcagatagtatgaactaactgctaccacatcagtgcgactagagtactgagtataggctggattcgcagttattcatactttgtcgagaacgttcctaactcagttagtagattgtgattaagtgtatgggcgtctggttgtagtctgaatatatgtttatgtttatgataatgcttttcttactgagtctgtcgact

SEQ ID NO: 37746 - DNA, 2542 bp, Cannabis sativa
gcctcagctgctttctggtgaaattgtgatataataaatatatatatatagtcccatatataattaataatttaattaatcatgtatattaattattattattcaaccctactatattctaataaaatagtaatttcttgatgtaaattatttatccatgtggtcatgactatatataactacactaataaactaaaatagatcatgttgttgatgaggctatatatatatatatatcgatttcgatatatatacatagaattaatattttggtaccttagggagtatcattcttctgagagagctaacatcactgtttctgagctctttctggaataggaatctcaatctccctagatcaatcccctgatcaatcacacacatatatacataaatataagttataattaatttacattattgattcgaattaatatatatatataatattatacattatgcaaaaaaatacattctacataaattaaagaaaataaaacactatatagtcaaaatacaatgatgataccactactagtctactatactagctatatatattacttaattaattaatatcattgaaatgtataaccaaatattagtcctatatatatctagtttagtagagacatctaattaattaagtctgattgcaaaatttaaatcgattgattgattgataattaaacctgaaatcattacattatgtaattaaaaaaaaaaaaacaaattttagtacataaatctcttattgattatcaattatatagacaaataaataataataaatcttaagcaccacattgtcaagaaaaagattatatatattttagaaaaataaaaatataaaaaaacttacacgtgcggaaggaagagaggatggtggcacgtgggaagaagaggaggaggaataggtgccaggattaggaaagaggaaatgaaggttgatgcgtctctgcctgggtaacctcttcttcctatgagtaacagtagtgggtaggtctcgggtcaacccgattggatccgaaacaaacgggtcgacccgattcccctggacctgctgctgttcacggtgatgactacgctcacggacttgtacaagtagtggctgcttttgatgctccatcatcatcatcatcatcttcatcatgcatatatatatatatagatatagataatgtgtgtggttttctgtgaaagaaaaagtgatgagaagatatatatgagatgagatgggtattactagtggtgcaacagtagaagtagtaagagtttattagtgggttgggttgggtagtagtagtagtagtagtgtttgtaaaaaagagaaacccaaaaaagagaaaaactaacacttatatatatatatatatttacttaccaaaaaaatccttctctttctatttttaggaatctaaaacttgggtgtatagtctcggcgatctaacacacacaatcacagaaagactgaaaatcatgccatttgtgcaatctgcattcactcaaactttgataacagatctctctctctctttctctttctctttctctctctttcttctttttttcttttctttttttgttcacattgtagtacttctaatactcatatttatgctataccctataatgggtaaatgggaaaaataaaaaaaaaaataaaaaagaaaagaaaagaagagtgtagtagtagggtttttttattttggaatttaatttcggtgaatacaacacggggggattttaattgttgggttggttaaatgttgccaaatgtgaactatgcatttgataccatatgtgaaaattgtttttgatgatcatgatgatgatgattcaaatgtgtgtgtattgtatgtatatatagttaagttaaccagagaagagtagtgtagtggggttagcgttgagaagtgtggtggtgaagggtggttagggttggaccaagacaagagtgacggatgtaaaggaaagtaaactgagtatagtagagaaccatttacacctgttcttaaagttctgatttcatgcaacacaaatcaatgccctctacctaaatatatatatatatattaacctatatattacattacccctctctctctctctctttttttcttttttacaccaccatgtgaaaaccatattctctctttctcatcatcatttggatctttgtatatatatatttatatattgatgttgtgtatatatgtatatgagaaggagtggtttttttgagctcaaaacggggagaagagagactggttttacgtggtggcatgggaactgggaagagctgtcgtcaatatggggtggaaatgatcctgtgtattaatgtttaggatactcaaccaatggttttctgacacgtggcaattttaaccccaacttgcatctagcaaatgcttttttattggttctaattaatatctttcagccattttttgctttgcttttaccataagtcaataataataatatatatattttttatttcttcttctttctctgatttgtctgtttctacagctagttt

SEQ ID NO: 37747 - DNA, 2475 bp, Cannabis sativa
  modified_base (42)..(73): a, c, t, g, unknown or other
  modified_base (2400)..(2412): a, c, t, g, unknown or other
tatttcataatcgttttagaatttcatatttagggtgttaannnnnnnnnnnnnnnnnnnnnnnnnnnnnnnngtaaaataatttccaacaggcttgtcatatagcttttaccaacttatgaaaccattagctcgctcgaggaactctttcatattgtttattgagatcctcctgatacttttccaaaatttactcaacggtgagatacctcccaatatggtcgtgtaacgaccttcttctgttaggcctttcaccttagtgacctcggccatgaacctttgaatgtagtctttcaaaggttcaccttgtctttattttatcttcacaaggtcttcaagctgtgagggtattttcctcgaggataagaattgggtaaagcattcttgagagaattcattccaagaattaaatcttcttggggctagcttaaaattgttgggctgtttcgtacaaggttgttgggaatacctggcatcgtacatttctagttactttttagagatctatttgtatctcaaagtactttatgcgtgtcaggagatcttccttcctggtgtacatcatccaaactagaatcttgaacttaggtaggggcagtgcattaatgtattctgaaaaatggtgatccccttgacctgtcgtgttctagatctgacagctttggtccagaaaggcccttgatcatgtctttgatttaatccaattgtgtttgcacagatggtgatccccttgacctaccatgttccagtgggttgttgcccgaacaacctttcttagttggaaaaatgtccttggtcggccagccttggccggccagccaagtttcccttggccggttagctctacatgattagtcacccttccttggtcggccaaaccagccgtacttcttagccgaccaagctaatctatgggttgacaggaggtaggtcgtactaattacttgggttcagtgggtccacctgtctgaaattattgtttagaggtggaacaaagtcacttcggttctcgttccttaacttattgttgtcatgtgcatttttgcttatcctaggacccaacctatcaaagacaggccttagaatgacttgttcctaaatattctaatggagagcattattgtgttagccggccagggtttggccaattggtaatgtctcttctctagagttgttttgtcgttctctaaggccttttggttccaagaatcgactattcttatcatacgacttgtctggcaagatttaatcgtctacaggcaaaggaaggtcgatcctcatgctcgagggacctaattagactgttttctaatgtctacctgcctgtagaccctacctgacctatcgatgagccttccttgcaaaggatctcttatcatatcctggcctctttcgataactctctcattgaaccaccttatcaggttactggactccctattacagtagttcagctccacctaatgggcccagaggatggccttctagttatccatccaccataaaaattaaaatatatgctggacaaaagcatcgaaactaacagcgtgtggttcttcttgtcatgtttgagtgacctggccttcagctcctctgagcctatccagctcaatatcatctccgagatccaagtgaggctcaccaatagatggttcaccaattcctgggcctatttctcttgcgtatgtagtaccgtggagcaatcctagttgtgttctaaggaggttgtttcatgttgatggggccttctgttcaaggcgttgctagtggatcagttctgggtggcaagggctaattattaagattcacaaggttaataggatcaaccgaattagcagtattggtagactttgtaaggtttgttggacttgctggagtggcaggattggcatgattagccggattgatggtattagtcagatcagtaagaccttctgtggtgggaggaactcaaacattgagatcaacgcatcatataatcttgaggaagacccgaggaggtggaggttgtggttcttctggttagaaccatggtgattgatcaggatgacaaacaattctctcaatgaaagtaccaaaatgttgaccttggacttgccaactgacagcgaagccttatttattactgataatcaccacgtgtaagtggtaatagcaaatagtaaaagtgacacgacgatttatagaggttcagtccccttgtttggcgggtaatgatctactcccctttttgttatattgattttggagataataccatgcaaattacaagcttagaccttataatttctagctatggctctcttgaatattacaatggtgagaactgagtgttatagatccagaacaagtgagatttaacgagaggaatagattaatgttggaaataattttaccagnnnnnnnnnnnnnctcacaagtatgttgattaacaatctaaatatgaacttctaaaacgataataaataaacacat

SEQ ID NO: 37748 - DNA, 2276 bp, Cannabis sativa
taatatttcactcttgtatttgtataaatgggggttcactccattggaataaacaactgataaattctcatttactttctcttcctctttctctcttcatcttctttttctttcttttcatctactttatattattttataacatgaagttttaataagctgaaaatagtaaaaataaaagaaaataaaaaatagacaacgtagaaatataaaaatttatttgttaaaatataaataattaaaaaaatatatatttaatgtaaatttgctttatcagtcaaagatataatggattttcaccaaaaacattctacaaaagtagactctaaattcgatgccatacatcacgcagtttattaatggaacatacttttttttttggttcctttaatttttttttttttttttttaaaaaaaaaagaagaagaagagtaaataataacttactacatttgttcatagaagatacaagctagattctaaatacaataaaaatgcaaaagtgccaaacggaaagtttatgtgaaaccagaaaatatggaattttccgattggtgggctacattgacccatttaattctctaccttaaaagtagataattcttcagccaaaacaaaaagtagaaaattccttaaaaaaaataatgaaaaaaatccacaatttgatatttatttttgtcatcaagttttatgttttggtaattagccctccccgctaaaactattctgaaagacatttttcccaatgcacatcaaagagaatcaaattacaataaaaatgaaaggggccgctctaagcttatgattaatctgtgctttattgattagttattactaattagtatgttgtattacatgtacacatataaagtaagacatgtgagtaaatcagtagtaatgttccctccacatatgtttgggtcatgcccgaccgctgcatacaaatgcctcgttaatgggaaaagcaattccttaatttggggtctaaggtttgatttttagaagtgttggtttaatttcaagaatattaagaattatgcgtgaaaataggattgtaccttttttttttcttaatataacactccaatttagcagaatttttttatttatatttatgtatgttggaattatttaaaatattttacaaaattttaataaatttaaaataagttataatataaaaaattgtattgaaatagtttatttaacatacctataaaataaagaatgttaaatttgaaacctattttggtatgttaaaatttgaatcttatttctcaaaattttactaatattttaaataactacaataatgtgtatgattatgaaaaaaaaaaaaaactcactaaaaaattcttatgaatatcgaaactgacagtacactcattatagaatgatgcattgtagaattttctgcttgttttttcaaactgtgagttccaggcgctaatggcgtcaattatgaaataggctccaaagtcattaaaataagataaatatttggtgattgatgatgaatggagtgtggtaatggataaagggcttactttttagaccttttcttcactctcacttgattctcgttcgattttttgggattgcccttatctactttcttcccatacttgaggactaattaagcctttccaattctttatcaccaatgctatacactttttctcagctaactctttcctttcttttttatttatttattttttttaggaagtctgccaaatttcaaaagcaaggaagtgtgttatgattacccaaatccagttatattatttggataattacataagacaccatactttgtaaaaaaaaaatatatttttaagtttaaagattttttttatatataataaaaaaactacataaaaataatagaaaaataacattcatataatatcaaaacaacaacaaaaaataataaatttacaacataaaaagaccgtattttctgtaaataaaatcataaaaattataaaattatttaaaattccataaaactgtctctttgttgtttttatgtatttatgaaataatccctatattatttcacattgttaaagcgttattataggtattaacgcaaattttcgttaacgattaataagcctattctataataaattaaacacagatataagaaaattgataagaataagaataataatgacaccaatttttacgtggttttgcagttaactctgcatagtccacgagtctatcttattaagatatttctagatactgaattatgattttttttc

SEQ ID NO: 37749 - DNA, 3818 bp, Cannabis sativa
aattgatatggatcaatcaggtacacatacttaattattatatttgtgttctatgttatatacaaatagatcttgggtttattattaatttttctaacataagtgtttacatatatatatgcagtcgattttgtgcttagaaatgtaaaacacagaatgtatttcgttgtacggtaaatggatctcaggatacgttataatgtgtgtgaatttatttatgggtaatgggtcacaagctacgttactattttttaaccgtaattagtcttaaatcaattctagtcttcagatcaaataactacctcatctaataactgtcgtacatcacgaaatacatttcctaaactacactatatagaatctataagtacttgtaatgaaatgatgagtaagaagaaagaaggaatgatggcatcgttccacatagtcccatctcttctctcccatggactcaatacatagtcatatatataagctttgcatcgttagtcttattctcaaatgacagaagccacgtggcacaatacgaggggacagaagaaagtcccagtcagcaaagcttgtgtgatagcgaaacgtgtcggtgacgtgagaggaaagaagaatatttaggaaagtgtaaagagagagaaagtgggtcccactcccagtagagcagcatccatccatcaaaggaggtggaaaaaaaaaaaaaaaaaaaaaaaaaaaaattatattttccttaaagtatcatgtgagtagtgggtagaatatagatgagtataaaaaaattattctatgtgtgatacctcatgataactaaagatacaataaaaaattactaccattagattaaaaatgaaaggttataaaaatactctcatttgtaagagcaaaagtagtgctctcacttaagttctttaaaattatatatgttataattatttaagactacttataaatttataaaaaatttaaatagtttacagtgtctaaaatattcaaatattttgtgattcatgtgatctcaatataataaactattttaatttttttaaaaatttacaaatagtctaaaataaccacagcatatttaattatgaaagaaaaaaaataaactaaaaaattctagagctcataaaactcagaattgttttacaaatgtacattaatcttaaataactacgacatatatagttataaaaaaaaaattagaccaaaaagttctctactcataaaacacgagaattatttttttttttgggatgtacaataaattgtattttttcaaaatattatcttgttaatatgttaccctcaaaacacattttcttaagcatgatgggtctgtttccctacatcccctaattaattataaacatatctctcaattcttccatttaaaattcattttaattcaaataaaaacctttgataaagtcgcagacaaacagagttatcatttgtcatcagttattgaacgcgtttcttggcaacttgattttttgtatggaaaacgtcctttggctaattaacaaaccagatgcgatttcgtgacattcatatcaataattggatgattacattacagtgacagtttgagaatggtcttgaataactataaatttaaaagattcacgcggaggatgctggtgttgttgacgacatgtccttgcacattacttacatttatttaactctttatacaacttttcattttacatggaaatttatacgtgtaaacatcaaattggaccatgatttcttcctttctcaattattgaattgaatgaatggacaccaaaaaacttggtccatctgtttctgacttcatttttcatggtatgagctgttttcttgacagatattttaccaactctttacttgttttattttattattatgcgatcccagttgcaccaaatccatgtttaaatattgtgtatggcattacagattttaatattgtgtagtatggcactgtagaagcttcactgtagcaaaattagaaaaatggtaaaaaccaaaaaaaaaaaacaaaaaaaaaaaaaaggcaagaggaagaagagagaaagattgacagaaaagcttgcctctcattaatgagaggtcctttattgataagcacaaagttatacaaatggacaaagtaaagagctaaaacagagctctactaaaacagaaaaaacagttaactaacttctaattaattaactaactaaactaactaaaggttatgttagctaacatcccctcaaatgaaaaggaatggaagccacttgaagttttcccttaaaatagagaaaactatctgttgcaagaggtttagttagaacatcggccacttaatcaattgaagggacaaatttgaccgagagtgttttgtccaaaatctaatctctcacaaagtgaagatcaatttcaatgtgcttagatctagcatgaaatacaaagtttgcagcaagtgcaactacactttgattgtctacccaaataattggtgcttagaaagagaaacatgaagctcatgccacaagttgataagccatttaagttctgcagctgtatttgcaagggatctgaattcactttcagtactagaccgtacaacaaacttgttgctttttggcagaccatgagatgagattctcaccaagatctcctgtcatctacacagctagcccaatcaacatcagaataagcatatagctgaagattggcaacaagtttgagtagaagaccatctaagattgcaccctttagacctcaacagcctcttgcaaactttcgaatgtacctctgttggagcatgaataaactgactcagtttgttaatgatgaaagcaacatctagtcttgtaagagtcaaatattgaagagttcccaaagtgcttctatatagagtaggatctaaaaaagggaccccttctgttaaagataatttatgagcataacttgtaggatttggacagcttttagcaccttcaagatgtaacttgacaagcagattagtgacgtacttgcttcgggaaagatacatcccactggaatctttatatatttcaacaccaaggagaatgaatgattcaaatcctcaacaagtttggaaataagctatgaattggaactaattataagtatatcatcaacatacactaataaaatgatctgcattgtacttgaaccaaagtgaaacaaagaggaatctgacctagatgcaaagaagtaaagtctgcttaagcttgtcattccaagctcaaagagcttgcttcaatccatatagggccttatgcaaatgacagacatgtgtaggtttctctagataaacaaaaccttgaggctacataagaaagcattacagcaagagagagaacagttcaaactgttgttggttttactacaagactaaaagtttctacaaaatcaattccaagtgtttacaagtaaccctttgcaactaacctggactaaaagtgtctacataatcaattccatgtgtttataagtaaccctttgcaactaatctggatttgtatctgtccaagggtcaatttgcttttaacttgattctatgcacccatttgttgtcaataacagtcattcatggttggtaaggcaccaaggccaatgtattgtttttgatgagtgcattgttctcatgctacattgaagcatacaattttggattaagaagagtagcttttacaaatctaggttctattggcaataatgattctggaagaggatgctttgttggcaagtagctcatgggtttggagatgccactttgaacctagttctcattggatgagttctaggagctgtagggacaactttgt

SEQ ID NO: 37750 - DNA, 3305 bp, Cannabis sativa
tatatgtatattaggtgcttgtttgattgtcagtttagtcatctgagcaacagtatctcagatttcataacccttttaatatgttaacttttgaaaagttctgaatagtttaaagtacctttgatcggtttaaagttttttaaaactgaaatatcagaaactttgtcatcaataatgtgaactgtgcagtatttttcatcatcagtaacttttatattactaattagtgagtacatttacatgttcaagttcaaagtttttaactttttttctttttttgaatgttttgatttgtgaaaagggaatgtatggacagctatagcacatatcataacaggggtaataggctcaggggtattatccctttcatggagtatggctcaattaggttggattgttggtcctttagccatggttgcctttgcaaccacaacccttttctcagcatttcttctctgcaactcttatagatcacccgaccccgaacatggtcctactcgaaatcgttcctacattgaagctgttgatatgaatttgggtaacaaaacaaatcatcccttttctttacttggttgtaatatgtaatatagtccaataattcatagcttcttggtgttgatgtgattgaaattgtttttgtagggaagaacaattctttagcttgtggctttcttctacagttgaccatgtatggatttggcattgcttatactataacatctggcattagtatgaggtatggtgttattatgctaaggaagattgttaccgttaacttcttatttcgatctttttgtcaaattttacgtccaaaaacatatgtcaagatttttttttcacagtagtattcatattgttataatattaaacctttaaattttaaaaaaaatcccgagtaatttatattattgtcaatcttcgcgtttgtaaacatacgacaaattattatttttttatggcggcgtttgttatagttacattgcttgcaaatttttcaaccggttaaagacaaagtaaactattcgaatttttttaaaattttacaaaaataatgttgttactataacaaacaccgttatgaaaagaaaaaacaactttaatatatgtttttgaagtgaagattttgctgagaggttgtaattagctcttatctaaaaagtgtcactttgtttccatacatatttggatttggtttaaaactttaaagttcatattgttaacattattctgttatactaaccagagcaattcaagaatcaaattgctaccacaaagaagggcatgatgctccatgtacatatggagatacttattacatgttactatttggagttgttcaaataacattatcccaactacctgattttcatggcatacaatggctctcagttgttgctgcaatcatgtctttcacctatgcccttatcggattgggattaggcgtcgcaaaagtcatcggtatgtatgaatgaatgtgatagaattgaactcttttttcacctcatttcatgtctaaaagtttgtcattctatgaataaaggtcaaggctttattgaaggcagcataacaggaatttcaacaactaatccagttgataaaatatggttggtatctcaagcccttggagatgttgcatttgcttatccattctccataattctcttcgaaattcaggtaaaaaagaaatattttaaacacatattagaaacaacattcaatgttattaaccctttggctttgaacaacaagagaggctgaaacaacatttttttgctgaattttgaaggacactttggagtcaccaccacccgaaaaccagacaatgaagaaggcgtccgctatatcaataatcgttacaacattcttttacctcttctgtggaggagctggatatgctgcatttggtaactacacaccggggaacctaatgaccgggtttggattctacgagccatatttgctcgttgatttagctaacatctgtgttgttcttcatctagttggcggttatcaggtattttgcaaaagttactaatcagatcactttctgcttaattgttatcaattttatttttaatatgacaaatagatacaaaaaatgtaaccaacctgatcgaaaaattcctttttttttactaattttctttctttacttaatatgaatttttcggtttttattggcagatatacagtcaaccattatttgctaatgtagagcaatggttagctgaaaagctcccagaaaatggagttatgaacaaggattacagactcaaaattccactaatctcaacttttagaataaaccctcttaggctgagtttccgaacagcctatgtcctatcaacaaccgtgatcgcgatgatcttcccttacttcaaccagattcttggggtgttaggaggcataaacttctggccattgaccatatattttccagttgagatgtacttgaaacaggcaaatgttgaagcttggacaacaaaatggatactgcttcgggtttttagcaccgttttcttggttataacggttttcgccttgattggatccatccaaggaataattagtgcaaagctaagttgagagaacattaaggtttttatttccatttgcatagtttttctgttgatttaggtggattgttgttagttggttgctaagttttttttgaaaatgcatccataattaagcattttgcatacatgtaagacattttatgtaataagttaataatattttccatgagtttaatgattgattataatatttgtacggatacaagttacaagcaaacaaccttaaacatttgcaactcaaacaaaggagagctaaactaaactcatcacactacttaatatgcccgagcagcattactagtttctcgattggctatcatcgaaataaccaatccaaatatgccacgtgacttggaatgttcaacattttcagggtgattaaggttgtttttgtgtgagaaaaagaggaaagtcacccaacaatggaaatgacatgtatgccatatatgagaactaaactcatcacttgtcaccacccaagcagctcgattgactatcatcgaaacaagctaattaaaaggcgccacatgagcctgctcggggatgttaagcattttcagggtgattaaggttgtttttgtgtgagaaaaagaggaaagtcacccaacaatggaaatgccatatatgccaatacatgagaactaaactatcacttgtccccgggcaagcagctcgattggctattgaagcaaccaatcaaaagacgccacgtgagcttgctcgggg

SEQ ID NO: 37751 - DNA, 6111 bp, Cannabis sativa
  modified_base (4904)..(4907): a, c, t, g, unknown or other
cttatacttgcagtctagcttaattatttattttaatgtttattcttgctgaattaaacgctacacacaaaaacatataaaacttctatttattcatatactttaattgagtttatataaataaataaataaaaggcttaagaatgacactaattaataataataagaagttagatatattatatatacattggtttattaatattgagacaacatacacgacaatgcaagctagatacttactcatgtgtgtctacatacataaatatatttatttatatataaatttatcactgcccatttctgatcaatgtttctttttttttttttgtgatatgtttttttaataatgatcatcttcatcatcatcttgaattatttttatatatactcaactcaatttacgtgttgtgtaattaaattatatatttcttctgacgatcgagtttatatatacatatgtatattaaataataatttaatttttttagctttcgtcctgaattgggaaactttgtaatgttacagcatggcctttccgctagctatatatgagcaaatgttgtctggcacattatatttataatatatacacaagttgagaaaatgggtagactctgccacaccatgtaactcttttgccacgtgtcaattcacggttttgacaagtggatctgaatgcgtgacgtggcacaatcaatgactttgattggttgtgtggtccggcaattgtgatttagactaccatgaccaagtggcagacagttgagaggagatgaatatggcttagttttgttcttattatgtcaattaattaaggtctaatctcttatatatatatttctttgaaaaaatctcttaatattattgaaaaaattactttagtttttatattttaactaaatttaccaactttaattttactattttagaaaattttaataatatatgtattttttaactgaaattttttattcaatttctacaataacggaaatatcactagggacattaaagtccaaaaaagtaccatcaacattaaaggagaagctcttacaatttgatgagcagttcacttagcggatcgtttaacaaaatttaacgaaacattaactaaagaattcaaaaaaatatttgcaatcttccacaacacttccaaacgacagcatctccttaggactacaaactgcttggacaaacaccaagcaattagtctcaacgctactgaccaattagaaatcttgcttcactcacgacaatacctacttcaagctacagcttcaacaacctccggaagcataacaccttcctttaatcccgaaataccagccaccacaaaattgtgatgatctctaatcactccatcaaacccaaacttgcactcctcttcaaatatatttgcatcgatattcaccttaaaattgtcaacatctagtttagtccacagctcaatattatacgtaagacaccaagtatccatcgatggaagaagacttttatcctaatctttcctctattgatcaagaatgacccaagctaaattaacaacaacctccaccacattcttctttcccttccacaaacattgattacacatatatcaaagcgcccaacacaaccataatcaccctaccacacaatcaaacaaagatagatatgacccattccccaaaagaaccatcaaccataggacccaaggtcaaatcagccacacaccaacaactctgagcaaactaacaagtaaccaaacaatgcaagatagactcacttactaagtgacacattggacacaagaacgacacctccatatgtttcgactttaactagactctcttcgggatgcacccattgatagttcgccacacaaaattcttgcctttggaggtaaacacaacttccaaaacttcttccaaaacaccaccacaacataattcagccttccatccctctcctattgttatattctgaaagagctcttcacagtgtaatcaccgattttgtcaaaagactaaaccaataatcttttaaaactgaattacacaaaggaataccaagaatagtatatgcatctctttccgaagaaagatctttgactatatcactatcccaaacaagttcccctacaacaaaaagaccactcaccttctcattaaccaagctagagtaaaaagtattgggttaaatctcatagagagacaaagatctttgaaaaatataagtactcgcaccatcaacaatttccttcctagccccttgacgaattaaatcccgagtctccaaaagactccgccaaatatataaaactcggattgcttccaagttgagcattgagaaaatcctcgttcttaaaatagcgagccttataaatttgagaaaccaaccagtgtggcttagtaaagctccatgcttgttttcctaacatggcaaattgaaatcctgatgcgaccgaaagcccgaacccccaacctctttattgtgtgacatcctatcccaactcacctaaaaaataccatgagagaattagtagatgatttccaccaaaaattagccataagttgcttaagaacatgacgaattcctactgccaaaagaaacatactcatggcgtaagtggggagactctgcgcaacacttcaaaccaacacctccttgcctgcacgagataaaagctttccattccaactttgaatacacttcctcatcttctctttcaagaaccccaacacggtttactttttcctccaaatcgtatttgatagacccaaatacatgctattaacattcacttttacaatattcaatatagaacaaacagactcacgaacactaccaaccacattgcgactaaagaaagaagaaaacttattcaaattaatcttctagcccgacacgttcaaaattctgtaacatctcggtctccctttgagctccaccactattagcttgaacaaacaaaaagctatcattgacaaacatgtgaaagacagatggagctgccctagctacacgacaccccctaataagttgatgacattcataacgtcgaatcaaagttgaaaaccccttagcacaaataaaaaataaataaggtgaggatcacctgcctaatcccatgagtaggaataatgcgaccaatttaatgactgccatgcacaatctaatactgaatgaggaaaaagaaccaaaagctaactgcaccattcgattagagaagctgagcttctcaagtatagcatgcagataatgccattcaacacggtcatacagtttacttatatcaagtttcaaagtcatgacccctcctttttagaaaccttacgcttcaagtgatgtataatctcaaagaccaccataatattttctaaaatcaagcaccttggaataaaaataatttgcatgtttgatatgacttgaggtaaaactactttgaaccagtcaaccaaaacttttaaataattttataattacacaaacatatcggcctcaaatcacccctcgttgtatgattcctatttttaagaataagaacaatattagtatcattgataccatgagaaacattcatgaagcaactacttgtttaaccaactccataacattcgcctccacaatgtgccataattttttttataaaaacccggactcatactattcggatcaggagccttatcaggatgcatttgaaagagcacgttacgaacctcttctttagtcactaacaaagaaaattatcttttgagttggagtaatggaagcttgaatatcatcaagaaggacacctaattcagtctcagaagttgagaataggttttgaactggagcacgactatcatactggagcttagaaattatatttgttcacttccgtgcactggctaccacatgacaataacgactattttttttctccttttaactaaaattgcttaaccctttgcttccaaaacacttcattttaagttaaaatttcaaacaacttatgatgttcttccttatacaaattttgagaagcgttatcttgttcatgttggagttgtttcattctaagcttgctctgcttcaatctgtttttaaattagcccgtgatccttttaccttaatcagccaaaaccttcctatacttatcaattctctcaaacaagtctacctgtaaattttaataataagtcttaatttataatattttagtcaattttttaccttattaattatagtaaagcaaaagtacataagtattttttttaatcaaaattaaatatattttaaaaaacaaactattattgcttaaattttcaaaatcaagtagtttatctcaaagaaacaatgcttaatagtatgcacttaaaatgaaggccgaattatactgcagaaatggtaaaagttatgagaatcaaagaacaatggcagaatacagagaattgaaacagataatgtgttttttttaaggcatttgtaataattaagctatgaattttatttttggtttaattatttaagattgtaaatttttactttcttttttgtagaatgtacatttacgttttattagacgatcatcaaattgagtaacacatgttgtggctagacattttcaatttctttctaatcgtatagtatttttaagtataatatttgagctaatttacaagtacttcttttgtattcagaatgttgctaaatttaaataaaatttttatttcatttgttttaaatgaatggcaagattttttttaataatttattatattgatataaaatacacataaatacatatattaatattgtattagaacactagatcaccaattcatcacccatgtccctccaactaattcgatagagtttgttttgttagttgacataaattatttggaatttcttatttcattattattattattatnnnnattattattattattattttaaagcaataaaaaactcaaaaggtgtttttgtatttataaaacatggaatctacaacgtgattagaaagtgcttaattaagaggttaattattatatagatcaacccattaacaatttttttaacttcaaacacacaattaaatagagctaattattaatcaatatcattattatcaactttggcaaactcataccaaacttcatccattaccaaaaaaataaataatttattcaaaaaaaaaaaaataatttatgataataaaattatttattttattaatagtgtaaaataatacaacttgttgcaagtatgagatggaagtatagaactttaattaagaaggaggattttgcctatatatatgatgatctaaaatatacttttcatacatttttatctgtttcatatttttaaaaaataattttaatttatttattttattttaatgaatgtgcatgttgtaattatttaaaaaattacttgtaattttttttttaaaataatttaaataatttacagtgtaaaaataagtttcaaatattttattacatttatgattattttttcttttatatacattataaataattttttgaactttattttgacattatacattaatttaaaatttttaaaaaattataagcaacccttaaaaacatcttctaatatggaaatagataaaaagtctatcaaaacacatttatacaagttgtactacatatagttttttcttttaatatattgtttatgtactttggagccataccaatcatcattacaataataatattaataatgttttctttttttttttgacaaaaataataatatttttctatttaaataaataaataaattttattattattataagtgaccgacctaaggctataattacttactttcatataaaataaatgatcaatctccatatccaatcaattattattaatatttttctagagaattattattatcattataatttttttttttagaaaaaagaaaagctttcctcggacaatcgacaaagactttacgttgaattaaagtgggatgtagagcgtgaaaggcacgcgccgtctgaaacacgtcatcttggaaagggcggggaacaacgagaagaacccctcccccaattatttaaaaactcaatcttttttttttttttaaatgtaa

SEQ ID NO: 37752 - DNA, 4358 bp, Cannabis sativa
  modified_base (338)..(351): a, c, t, g, unknown or other
ggatttcagtgtcatctccaatggttgtttgaacattggtacggacggaacgactgtgttatgaatgctctggttggctgctgaactagtattccaagtgtcttgcacaccaggcgtgatttcaaccacaggagtcgtcacaccgtgacctatagttgatggttgttcaggatttgtggttggcagaacccttgtgttccttgggttctgcagtgcaggatccactgtctatggattcgtcaggtcaaccaagcttctgggagtctgtaccactattgtatttgcgattagatttgagataaagaacgatccttgagttcagctctcaatgaaagcannnnnnnnnnnnnntcgcttttagccaacgacaatgaatctactttgtaagcgacaagttgtataatacgagtataatataataaagcaaataaagacagaagagttttatagaggttcagccctgagcaattcggtaatagcctaatcctcgtagtttgtattgacttaagaataaggagaatgattccttttcttagagctcttaaaataatatcgctgaatatggattcttagacaagttttttgacccttttgcctagtgagtatgaatcactatttatagggctataagcttgggagggaagtaattcccttctatttacaattgatataagtggaaagattacgtagtaaatacagagtacaccaatcgtgggattcagacaacttgccatatccccgtgatctgatcccaaagttatagggatttcttcgatgactcacgatgtgaaagttgaatttactaagtattggcgtgctgcacggattgctcactgcccagctaagaggactttgtccgagtgaatgtatgttgtgtcttattcgacatatttcttgtgaacaagtacatagagttgattccacgtgtcaccatggcgcaatgccacgtcagagtgcaaaaattggtataacacacagatttgttatagaggtttggcaccatgtggtagcgggtaatgactcactcccctttcttttatattaataccgagggttaatactatctagatcactatagatgggatctgctatagcacccttaaggatacaatgtacgaatcaagaatggcaaatcttaagtgatattgcttgtatgggcatgtgagagaggaagcgaagaagagataagttatcagatttaggattagagcttggacgcaagtattaggcttaagtgagcttagcttttctaggttagatttaaggcctttatataggaagcctaaaccctacactacaacttgaaaccctagatatttgtatattttattatttaattacaaatgaccaaaaggctcttgagcttggatgttattcagctattctgttggggttttagtgcccaatttgcagcctaaaggatgttttccaaatgtagaagtgcacaagaaaccttgcaaaacacctcttggcaagccaaaacctgattgaggacaggctggccagccatagggccggccagctttgtgggggagttggtttgtcactttatgcccgtttgagcgtcaaggtctctattttcttaggtgctgacttggccttcttattggtgagttgtactgccatgtggcactgattttgtccatgtaagcaggccacgtcaggaggaagaaaatcaggataacacattttaaatgttttcttattcccagatgctctctcatcagaccactgatggttgttcatagccatgtcttcaagtaatttataatctccagttgcacttttgctcatgaatgttccttcataagctgcatcaataatggttctagttgtgggacataaaccattataaaagttcttaactaacatccatttctcaatgccatggtgtggacatttcctcaacaattctttaaattactcttaagcttcatataaagattctccatcattcgagaaaaaattattaatttctctcttaagtttagcagctttagattgagggaaaaatttagacaagaatttctgagccagatcttcccaggtaataatagaatttggttgcaaggaactaaaccaacttttttctctttccctcaaagaaaatgggaaaaaactcaatttgatcacatcatcactcaccccattgtatttaagagtaccaaaaacctccaaaaaaattagacaaatgatcgtgaggatattcagttggcaacccactaaattggagagtggactacaccatttgcaaggtagctggcttgatctcaaagttgttaacctccagtgctagttgtgtgatactattttgttcccctaatagagtagggagtacatagtctctcaagctcctctcagcattattttgagcctgacctccttacatagctccaagaattagatcattcttgtgattcccatcattctgcgccatctccgctaatttcttggccttcctcttgttctttctattttttttacaagacttttcaatctcgagattcaaaggaacaagattttctactcctcttatgttgcgcatataacacaattcaccttaaatagaaaaactaagaaactaaacatgttagaaacaagaaaaattaaagtcaaattataataaaaattaattagactaatattgataattttcaatccccagcaaaagtgccaaaaacttgttcagtaaaattaatacgcaagtatacgcaatcgaatcaagtcatgtaatgatgaagtaaagtatcgttcccacgataattgattatcaattactaatttattaattctttgtttctatttgattagtagtaatatttggagaaaagtatataaaacaaaacaaaattaaaattaaataaataacaatgacaaatacaaggattgttatgatcgccaactatcttttattttacttcctaatgcaattacccaatttttcttcttcctattcaattgaaaagttgaattaagtagtttataatctagttaagacttacaaactcaatctatgtgaaaagtccatatattgctacagtaaagtttaatcacaaataaaacattaaataatagaactcataaaattatacagattactttcgtcctaaatcaattttcatacataataatcataacatattcaaatctcacttttaagaattttgatttgaatacatagcaaatatagatagccaataaataattacaaaattaaaatagattgaatagaattttttttctggatagaactgaattaagagcagaagaggaaattaaacaattacattaatccataaaataaattcaagtagttcacataataatccttaaaagaaaattaactactagaagtcattctaaaacaatcgaaattcaattaaaaatataaaaaatagagataaaggacttagtcactactacaatttgggcttttagtgacactctttagtgacacgcataaaagtgcttgtcactaaagagctaggaaaattttttagtgacacacacaattagactctaaactttcaatgttagcctcatgtaatgtttgtcactaaaaacataaagtgtcagtaaagagtaatatccataattttcctacttattatttttataaaaaatattgaccaatagagtcacgccaggagagtctgggaaagtatgtccccacatgcctggcgtgtcactatatgtactcaaccctaattaaaaaaatacatatattattaattttttattagtaaggacattaacaaaaaaaaaataattaaaaggcacttatgtaattgctggcatgtcactatgcgctggaaaacttaaggacatttaaaaaaataattactgaaaagagaaaaaaaaaagcacttatattaaaaacaattttagggttttaaattaatagccttttcatctctctctccgcctcctccctctttgcctcctctctctttctttcatctctttgcctactgctccttcctctccttttccttctgcccagatccaaccttaactacagcaaccagttgtacaaaaacacaaatgaagggtattgttcatggacgacgaagcttcagagcttcaaagttctcagtcgacgaaggtttgtgtcgatggagcttcgagtttgcattcttcgtccctgtgcagatctctctttctctatttcctcaggtcgacgaaggtttgtgtcgatgaaactttgagtttcaaggcggttcgttgaagatggggctttgaagcatcaagtttcagggctactcaaggacgatgaagcttcagagcttcaaggttcttggctgttagaactcgaccgagatttggggttcatggtggttcattatcgatggaggatt

SEQ ID NO: 37753 - DNA, 4741 bp, Cannabis sativa
accaaacgccacctaagtgttaagtcaatggtcacgtgacattcccttattagtctagtcactaaatttttatttttaaatataacttaaatattattacggtcaaatgttaaacttatatttatctgtaactaagacttaaatttaaatatttacctcttaaattatgctattattaaatcactaataatatagttgaaaagttaaatgcattacacattatttatttatttatctacattggtggagcagtattaaaacaatttttttttcaagaattactactaaattatgtttatgtgatattaaatgtatatatatttatattattttgtattaaaagttatttatttatcaataaaaaagtggttgactagtatttagatgactaacttttaagttcaattacttttgtaaatattatccattaattttatgaaaattgcatccttaataacatgttcattctaatttgcaatcaataattttaggtaacaaattaaattttaattttagtcacctaaaatcaatttgtaactatcctatattaaaattagaacattgcaaatcaatgcaggattagaatgtgtttatataatgggatatttgttataggagtttgagatcttagcaatatggagggtttatgttaatctcctccttaagtttagttttatgtaatctcaaactctttaaagacttaaatttgagattctcttaatcttatcccctctcaactaaaatcctctaagtaaaactcttacaccaaatacctcataatagatcagcctatgtctcaattatttttgctgtcatgagaagttataagaattgatccttttttagcttcaataaagtttgtagtttaataatttttgtaaatatattgtcccattaattggtttcatactacacatattttgctatttcatccttaagttttaaagatatttacagttacatctttaatgcttcatcattctctatcgttcttgtgattggaattgaccatcttcctaaatgagctgtataatttatgcatctgataaccccttttccagcagggccgtcggggaaatcaacgatgctgatgcttcctgagtctagatgaaatgatcccatccattcctttgacagattcaagcagtgcaccattagtgctatgttaattgaaggatcaccaaccacaacaacaactctatccgcttcattgtcactagataattccttcagcagatatcgccatgcttcctctgattgttcccatacttctgaaagaaccgtgtcctcgaaaccacttaaccaaccgagctgaaaaggcggaatcacactggtgtcctgtgaaaaggaaaaagaatagtaaactaaagagaataattcttttggcatagtcatatgtaaaaattaatccaacatcttaaatttatttctcctaatttattttttaaatctgaccaactagtactactgaagcttattctatcaagcaaataaatctagaacaaaaaaaaactgtccaatccattggtggtaaagcatgagaactgaatttggtcaaattttttaaagcatcaagttgagttgagatatttgccttatttgatttctgaaggatgttttcaacatccaggttctctgtttgcttcatttccacataccgaggcacacagtcagctcccaaggaatctgcagcttcttgtacctacaatcaactcaattgatgagacacttgatagggacttgaatccatttcttatgataataatgacttgagaaaggaagagttttttactctggagatggcattggctgtttctacacaggctttctttggactgctaataatagaactaactttcgtatcaagaagcagctcagcgattttctgagactgtaatatatcaacagtagtagcacaccagattagatttagtaaatgtaatatatacttgtcaaacacacaaaccagatgtgtacatcatatacctgtataacaccaagcatgttcattgatttatccccagataaaggattgctagcctgttgaaaagtgaaggaaaccttataacatctatataagagattcccaacatgatttacaaatatatagtcacatgatgtactcaaaggtaattattctaagcttgactattttcattgcagtatttgcctaaaataactaaatatctcacttttcaactctgaatttacctttactcacaagttgatctttatagtaaactgaaattttaaactcatatacttgagcttactagtgaagaatctctcacaactaacaatttaacaccttaccactcaatttcaaagatagatacaatcttcttagagaacaaaaaacaaaattcatttgtttcaaacgattggatcacataagtgaggaacataatatgacccgaaactaggatgctattttctagttactcaatttcacacctctgcattgttttgtgtgaatccatgacacacaagtatgatcctcttgcttgtttttcttcctccagaacttccacccacaggtgaatttggtgtctgcattatatattatattcaataccacttagtggacaacttaacttgtgacctacatagtactgaaacttgttaactgcaaccacaccagcaaggaaaaattagagacagagattcttaaatatgtttgccaaaaactcaaattgacaaatcacaaattcatggtcaagtttaaccaaattaaaccactaagtttagaaaacagaatatggtacctgatttaaacgatcaagacaaacaaacggcgacccaccctcgattcgtggagtgaaatccaaaacactcactccacaattgctctggagcaataccctgaaatactcagttcccaaccctgaaatgtggataaataatttaaaactagtaccaaaaccacactcgaaaacaagaaagactgaaccttggtacaattttatcaagaattagtaccaattgcagttgcaacaagagcttgattgacagcattatgagcaaccacaagaacagacctcccttcatgttcaagtatcttgtcccaacaattccgagctcgatcccataactctctcaccggataatgcccatcaatgttgaaatttgcaggatccacctgccattgtcgaaaagtttccccgaatttcgctttcccttcatgctttaaaagcccctaaaattctcaaaatcaacaaaattagaagtattctctcatttcccaattcacaaaaatgttcataataccataaaacagcttacttgaaaagaatacaagtcgatttctctcaagtccatatcagtaatcacttcctcttctcgattatcccaaataatctcagcagttctcttcgaccgttcaagaggactaaaccaaccccaaaaaaaaaacagcaattaaccatagaaaacttcaagggaaagattcaattcaattcaagaaaaaaaaaatccaaaaccttgcgaagcaaacatcgaaggaatcatcaatgagcatttgtcttgagatctcagcttgaccctctcctttcttggtgagaacagagtaattggagctcccttgaatccgaccctcttcattccacgtgctctgtccgtgcctcaccagaacgactcgcttcgcggccttgatcggcggcaacggcaactgcgagtggaggtgaagtggggtctcttcttcttcggaagaggaatgttggtggtgttggggagttgaagaggaaggagtgaaacgagaactaaggttagggttagggttttgaagaagaggattggtgaagaagacgatagaaggagtcagattttttttttttttttttgagctctttagttcagtttggttgaaaacagttatttcagttattttctatggttaccgttgattctaacgtgataaaacgacacgtgcgtaataattttgaaacgcatcgttttggagtttgtagatttgtgttgatttgggatagtaatttgtgttgggagtgttgtgtttatgttttaaatttactgaaaaactacacataccaatacgatatgtgacacaaaaagtttataaaataagaatacaaatatgactcgaatgaattttttgttctgttggcaggttgtaagaaattgttattttagtgtttattgtgtcgtgtgaaatttttaaatttattttaaataattgacacgaacgcaactcgtaacacaaaaatattatcagtactcaaaataatctaattaattagaataataaaacagagaatataattgtttgaaagaatttaaaattaccccacaagaaataatattatttccacaatgataatattataaaagaaaaaaatcttgtaccaaacatgaaaatacaaggtcatgtttagtttattgtaatgataatcctaataaaatcataaatataattataatgtttgatttatatttaaaagtgatgtaatggacttacaatgtaatgatatcatataaatgaatttccataaaagcaaaactaaaatgactctaccaagactgacctatgaatatatggaagctatttaaattttgagtcatcactttgagaatatattaaaaaagagtgtcagggattcaaactcacaccattataatgtgtcatacacagggattcaatgtaatctctattattcaatattaataaagaaacaaaagtatttttcattcatttgtgtgttacttggttcatgttatcaattacttg

SEQ ID NO: 37754 - DNA, 2184 bp, Cannabis sativa
ctctctctctctctctcttggatctgaagctaaattaagaatgagtaactccactgttctatcattgaatttgttgtttaatgcttgtagttgaaagtctatcactatattaaaaagattaactctgtaataatgttccactgtagtggcatctttttgaccacgagctcttcttcttcttgtagtataacgagcattaaaatctggcacatgtatcttaacatttttacaaaatgattttacctcgtcaactaatttagtccattcattttctcttaatttttgaattagagtctcagtagatgaaacaagatgcattgcatttaaaaatatctgaagactgaaactacaaagcttgacaaagtatatttaaaatcttaagaatttttttcataagatgcaaaataaacacaaattcaaaagaagttactgcctcataagctgcatttgtatctcctcattgagcaaatgtagttccatcgtcaataatattcaataaaacttcacatgttgcactaaacatctttatcaaactagaaatagatttcaagtgagaactccaacaagtatcacctgccctttgcaaagagccaatttgattaagtcatttcccactttctagctcatcaattttaagtaaataagcaatatttgcagcttgagcaactttaagttgatcgttacgcttacatgatgcaccaacactactaacaatagagttcaactttgtaagaaattgatagacaagaataacttctctagatgcaacaactaatgctaattgcaaacaatgtacaaaacaatgaacataataagcataaagacattcacttgaaattaaagcttgcaaactattccattgtccacgcatgttacttgcgccatcataaccttacccacgaatagattgaacatcaaggctgtgattcgagaggattgagaaaataccttgctttaatgttaaggcagcagtgtcttaacatgaataagcctgaaaaaatgctcttgcacacagccatgtttgtcaacaaatctcaaaacaattgatatttgctcttttttagattcatctcgtgcttcatcaactaatattaaaaactttacatcgatttcttcatgaattttgcttcaccctttatttctcatgacatgcaaaacttgtttttgggttgttggtgatgtatatgtgtcattttgtggagctttatctagaacttctgctaccttatcattgtaggaagctacgaaactccataaatctaaaaaatttctacgattaattgatgttttagattcatcgtgacctctaaaagggtaagcgtgaaacgcaagccacctaattccctcaattgaagttttcaaacgaagtctacttttagtaatttcttgtgatgtgaagttcgtaaaccttcttacaaaatgtattgggtggttccaagatctacaactgctttctcaatatttttatgaggtgaattgatattggttccaatatgtgctagaaatgcacatttttttcctctcacattttttcaggattgaaatctattaatagtaaatacatccaatctagagtgtgcatctttggtgtgaaataaaaagtatggtagataaaacgaatcatctactttaggagaatactccaaccaagatggaaatagcttaaaccaagatgattagaaagaacgtgaatgagcttcctctaatttttggtagctcgaaagtataatctgatatggaccaactatattataagctctacgaacttcatcacacttctcaggtggatagtcccatattagtggtcgtaatcctggatcacgctctaatgaattgatattaaatccctcttcaatgttaagtcttaaagattttgttgggcgattttctgaattttcatgatcaacatccacacatggatttgatgagacatcagatgttgaactatcaatattcttccttttaaagaatgtgtcaattgtagttagttttttcatctacaaatagaaaaaatacatatgtatatatatactattcatcaaataaataataaacacaactacaaatacaaaaacatgtcaaagttctatcaactatttttataatatatataaggctaattagtaatttttttccctgagttttgacatataccaaatcatgccccttgaacttttttgaccg

SEQ ID NO: 37755 - DNA, 4441 bp, Cannabis sativa
gacacgattaatattagtttaatcgtatactgattatgcttgaggtgacaaacttacaaacagaaccaacgaaattgtataaaattacactttagtaatattggcttgtttcagtgctaaaaaaatcaatagattattgttgttactagagtttggtatgggagttatagacttgctgggaaaagaaatgttcactcaacacatgtttcgtaaattaaatttcaatggtaatgttagcccttcctccaacacaaatttgtattttttttttcaaatctaaatactctctaactctaagtagttacgtagcaaatctcacttattacttttgtcaagaaaaggagaagaattttttatcgttaggggtataaaaacataataaaagcataccctaccacggtagaattttcaatataaaaaagttgatatatattattggtataaaaaagaaaaatgaaaacgacagaaactgtaaaagtaaataaaaaaataaagaaagaaagagagagagaaggaaggtggaagaagaggaggtgtgcattgtgcaagaccataattcacccgcacgcatggccaattctttatatattattattataaaacactctctcgctttccaataccattgttcagttttacacgaagacgtagtacaaaacacacacatgacacacgagagaaaagaaaaaaacaacattacatatttataaacaaattcatactgttttttttttctgtcactctcacttcacttcttctgtttatataatttttttctttcacatgaacaaagatctacttgcaattccattaatctctttttgcagcttttgacgttctcaaacccaacactacagctctctgttttttttctttctttttcctctccttataataaatctgttctctctgatctgtgacttgactagactgaagtactagagtgagaagtaatctattctgagtatggataagtgggagaaagaaactaacccacgaaggagaagaactccatctttctcttcctctcttcttgacgttatctaccgttcgattgacgaatccaagggtggtgatcatcaccaacaagaggaagaccaagctacaactactactagagtagctgtgaagaaaaagcagaaagaagagaaagagagaaccaatctacgccgagctattatgatagagagttggatcgagaaacagagcgttcaaagttctactctttcaacttcagcttcaacctcttcggctgattcaagctcaggtgctctgtggtcttcctccgaaacagagtcaacccgaaaatacagatccaaaacgaagccgtttcgagtcactactactgatactactggggtatcatcgtattcatcgttctcttctgagcagtcaaagaaaaagatcacatctacccagtttgagcagaagatgatgaagaagactccgaaaccggaacagagcggtgggttttcgaagacgaagctcaaggctttgaaaatctatggagaattaaaaaaagtgaagcaacccatttcgcctgggggtcgtatagccacctttattaactctattttcaattcgggcaacgttaaaaaggccaaaatgtgttatgttggagcggttgaggatgtgacttcggagaatatttctaagtcgggttgttccactgcttccactttctctaggtcttgtctgagcaaaacgacgacgtcttctagagccaaacacactctaaatggtggcgctaccaaaaggtccgtaaggttttatcccgttaatgtgattctaggcgaagataaatgtgcttatgaacaggacccaagtttaatgccattgtcagccattagaggctttgttagaagctcatcgttgaaagaagaagagcccaggaaagataataataagaagagtgttgaaagagaaactcgaagtttccttagaggtttctgtgatgttaatggtgaagctgatgatgaagaagaagaagatgatgatgatgatgatggtgagagctattcgagttctgatctctttgagctagatcaccttgttgggattggaagatacagagaagaacttcctgtttatgaaactacaaatctcaaaactaatcaagccattgcaaatggtttgatattgtaattttattattgtttatttttaattttcaaaacccaaaaaagggaagttaaaaaaatgtcagtgtaagttgatggtttagtttttggggattgaattcatgaacaagttatagtatttttttaactttttccatttttcttttagccaattaagttgaactactagtttaagatttatcatagtttgatccgtggtagaagaaagcaaagaaaaaaaaaggttggttagttttgctagaagagaaagtcatatgaattattgaatttatggcgtaatttgcaattgaaacgtgtaataaccaaaaaattatttgcaaaatttgtttctaattttacaataattactaattaacaatcaagcttttgtgggtttagcgtcactcataaaaagttgaattaaaaagagagatgaaaaaagcagagacaaatcttctctgctatgagattggagaaagaagaaaagtaaaagaaagtgaaagattttttttattattattttttgtaattttttcactttttcacaggcttgtcacatggtcacaaagttaaattaggcccccttttaaactaagagaatgggaaatgattgagatcccataacttttttgttgttggttcaatttctttggctatttggttatcatttccaaatgggtaatagtaatcatagtcatttttgcaaagccaatttcaaataaagataattttgtttccgatgggcatatttagttttggtaattttgaacatacacatgaacagagtagaagaaaatacaaatctaaacacaagagatttccatgtctctgacataaagataatgaagatgcattcttcttcacccttagcagacaagtagggtcttaagtaaggaatctaagaagtcaaaatagagcagaagataatatatgatggcaaatatgcaaactaactttttttacaaaccgatttgagaaaaaagatgaaggaaaaaaaaatacataaagttgtgatcaaactcaatattcttgaaatgatatgggacactagtggccaataacgttgactttcaacaccacctcttcatgaccttcttccaaaaaaagaagagcttattcattgagacaaaaaaaaaacaaaagaattgtaaatggattaggagaatttgtcaagaaagtctttttatttttattttttattttttcccttttgtgaaaaggaaggtgacatgtcttgtagagttgatagaaataatgtcatggggcaataatttctcttctctgttaatatgccatcatattattttagctcaacattttacttcacatttaagagttcaacaatctcagtataaataatagaggtttagaggttaagttattattagaaagagatttttagcttatgtgttaagtagggtaactaattttttcttttttcacctgttaaatcaactttttctttttaacgagcctctgtagtagaagcgactaacttaattattttattttataataagaatgacacctataaactaaacaactaataataataataatagtacaaatcatccaaattcatttgtttaaaacaaaaatgataacacccacttgaataaaaattacacgaagctaaatattcaactattggtgggagaaagaaagctacaaaatgttggaagaaatagtattatatatatactataatttcaaagtattaagactaacttgttatcaatgagctgttttaaaagtttgtattcttctatgtcatgaatattgttaaaattctcaaaataattataatagtgaatgagaaattatcacctaaaaatagttaaatgaaaaactaattatgagactcatagtatttccaaatgaaaaagatggtactttttcaaatgtgtatatataaaaatctttgcaaatatcaagtgaagcaaaatcacatcaagcaatttttttttgtctctctcttgttcgaaatgtgttcattaattctttcaaagatatgtgaggactcagtttagcatcaacagctatattttaaatattttgatttttaattttaattattctataattctacattctctctatttttattttaagtatctttttaagtttatttattttcacttataaacaatatcctatactagtattttcctaacagaaatatccattaatcctaacttacatccaagctagctatctcgagattgttagtgctatatagatatatatgttagacttttttttgggcttacattaaattttattggttttattaaaacttgggttgattggatagttctttg

SEQ ID NO: 37756 - DNA, 3077 bp, Cannabis sativa
  modified_base (33)..(33): a, c, t, g, unknown or other
aatgagaatatgaataggaatggaataaaattnaaaatacataaaaaaaaattgataaaaaatgtattaatttttttcttatcatacattggaatgatccttcttttcattttaaaatggaatagtcattccaccaaaatgatcaaaaggtcattccattgatcaaatgacattccaacattttaatatagaactaaatagaagaatggaataaagattttttcctttcctttctattccatttcattacctccaaccaaacgccattaaaattcttggttaataatggtgttctatccaaaaactcaaataactaaatttatattattaaaaatctaattcttttagactattaaccatctatgccactttttttttttctataaattaaaatactcaatcaattgcatgtgtcagaattagattggtttacatccatcaccaatcatctccgtattaaaatattcccatgtacaatatattcaaaccagattgttcaaaaaaggaaaccagatcataaattatttaaagttttaccattataaaatacatcatatatatggaaaaatttaagttatattatcagtaaaaacaaaaaaatcctactatattggaggaaaggtgatgttcctatacattaaatttctaatgtaatgatacatatattttgggtccgcacttgtggaatagtagctatatatagcaattaattaaaggttattggtacatatagtttatttttgttttatttatgtattatttttttattatataaatcacataattttattttgcatcaacacattacaataacaaaattttacttttagttacaacaaaacttgtgactaaaagtaaaaaaattatgattaattataaatcataatttttatgttgtgactgaaaggtccataactaaaagtattaattacaaaaattacaatttgttgtgactaaaactaaattagtgacaataggtaactaaatatactatgttctactcacaaataatattttgttgtgactaaaaatcatatttagtcaaaaaaaaaatatattgtaattaaaaaattattactaaaaatagtagttttttgtagtgcatctttacaacctacacagtgcatttaaacaagtttaaacttctacttacaaagacacattttatttttgttgttatgctacaactgtagctatagcagatttgttttctggattgaggggttattaggggggtttttgccataatcatcaaagaaatacagtatagatcaatagttaataaaatctatgtatgtatacatatgatcagtccacttccattatgtgtcagctagaaatgaaaagagcgtttttgtttgtaagtataggaacttatcaatacaagctatgattggacaatgaatacaaagaacccaaaagcttgtaaaagttacagagcttaagagttaggcctttatttatagaagtagcagtacaaagaagagaaaggaaaatacagttggaagtagaaaacagttacaacagaaataacagaatgaataacagactcataactacttgactgtatcagtaagagtgtgagacagaaaaacgagatatatatttatatacatatatatgtgcatgtttggacaaaaagttcatatggtcgaagacaaagaaatttattaaatgtcgttatgcttgtactatatgcatatgcatgtggccatatgtccatagatattatctgaatttttgaattcaattattgctaagatcacatgatcaaaatttaaaatatatcattaatgattttgaatttggatgagcatatatatataatgcatgagttcatgtaatttcacaatgaatgatctgctattttatcccacaaaatcattttcatttcttcaaataagtaatttgaatactatgttaataatgcaagttactttttgacttaacggcaccccgtcgttctcttggtatttcgtgatatccattatatataaaaaaaattatagcatactattaattatgtacactacgtgtacataaattacaagagtgtttgattaattgacatgaaaagtgagtatatattgttgctaatgattaattaattaataggatggaaactttgaagttgaaaaccaaaccaggaatggcaaagcttctaggcataatagtgtgcataagtggggtgtcttgcctggctttctataagggcccttctttcaatcactttttgcatcttcaactttttggtgtccaccataactcccaacatcgtgatcagtaccattcatctggaaattcttggatcagaggagttttcctcatgctcctttcaaatttcttctggggcatatttcttgttttccaggtacgtacctacgtaacgtattatatatagtagttagatagttagtgctaattttgtccggacatgcattttagtataaatattattgaaatgttttattcgtgacgtaacctaagcctaatttgtttgtgattaaaaataaatatacaggtgcaattgatgaagagctacccttctaagcttcttttaacagctcttcagtgctttctgagcactgttcaatcgtttgccatagccattgcattggaaagaaacccatcccagtgggagcttggttggaatgtcagactccttgccgtggcttattgtgtaatcactactcttccttctactacatatattgcttcttctttctttcttataaatattttgagaatttaaaactatattggaaaaagtagaatagagtacatgctaataagatgtatgttatatatatcttttttatatataaatatataaaataagtctaaaaaaataagatgaatggcacagggaattgttgtgactgctgtgacatattacttacaatcgtgggttattgagaagaagggacctgttttcctagccatgtcaactcccttagctttaattattacaatcttttgttctgctattttcttgggccaggccatcaccttaggaaggtaatttctaatattatttttactcttattatttaattaatttgaatacttcgcttatc

SEQ ID NO: 37757 - DNA, 2485 bp, Cannabis sativa
  modified_base (1998)..(1999): a, c, t, g, unknown or other
  modified_base (2112)..(2114): a, c, t, g, unknown or other
taaaataatttccaacaactaactcaatcctaagtaacttcgtaggctaaacatcacattccacttttaccggaaataaaacatgcaatttataaaaattcacatatgtcctaattaatgcatctagtattcaaatatatctccgtaattgagaaaatattttcctaaggcttatttttaacaataagccctaacttctactcagaaacacaaaattacataataattattgaacttcttaattttctgctaattcccatgatttaactatacggtcactacaattatccccaattaaaaggatttcgtcctcgaaatcaaatttgaataatttgggtcatgagcccacacgtcagattttaatctctaggtgatttccttcgccttattgtcttattaaaatgtcttaaatactaccaaaagtctgttttagatgactttacttttcttatcaagaatcataacctatttctcactatagatataggtttaactgaagttttggagttccataactacatatgtgagccaaattcccaatatacaatatgaaacatctggtataccgcaaatgctacttgtaaggctaaacacattcttattatcctgatgtttctctaaaaaatctaaaatccttagaaacttagggcatatgtcatccttatccccaagatatttcccctacttgggaattctgtaatgttgagttttaaattaatatgacttttagtgtctgtgttgagaagcaaatactctagtcttaatctcctttgtagtcttactagtttgctgaactgttctcagatctagatattccctattccgagagtaaaacgagaacaccaattcatactatttagcatcttattggaaaccatttctgtacactctgacaactgtttagccgcgcgagaacttgattaaattatatatttgatccataattcttgtaattaatcacatacacttgcaatagatattttagtacttgaattttagacagcagtaggtgtgggaatagtgcgaggtaattagatgttggctcgcgaaggctatcgtatagagttgcagaacaaaaaagtcggttgccagagcgagaagaagggtgaagacctcgttcctcgaatcctagatgaaagaagcttactaaaaccaattgaaaaattggaaaaaattgttctagacctaggaaattccacaaagtgtgcttacattgggaagaacctggatgaacaactgaaatagcagctaataagtctttcaagggaaaaccaggatcagctcgcctggagccatggagatatgattgggattgaccctaacattacctgccatcatttaaatgtcaatacaaattacctagcaaagagatagaaaagagacccttggattccgagagataagaggtactcaagcggcgtacctgaaggattgttttccatacctcggacctcgtggagtgctttggtatattaaatattgttttctttaggaaattttctgggattcatagtcaacgcgaggggcattgaagcaaatcctgggaaaatcaaagcttaattgaagcggtagtaggaaccgagctttataaattggctcgactgtactactgataaaaggcatgcatagttgtacaaatgcctcactgataaagaactactggaacgtgaaacatttgcgaccctactaccagtgataaaatgattgtaactcacatttctgataaagtgttttgaacttcagttatgaataaagttaatcattttttcttttcaagtaattacaaagtgttactctttaaaattacttgagaggcatatgtgtatgattaaccagaatttatctggaaatatacatgatatagtgcaaacccaccactttaaaatttttgaaatttttttaaagcttttgatcaaacctttatgacgagaaagggatcaaaccattataactctttgattaaaaacatgtcagacgagaaaggaaaatcaaaagttnnaaatgagatataactcataacttgtgtgcaaagttgaatattaacggctcgcactgtatagaaaagtattaaacgaggcatcaaggtgtcttgataaaagtacttaaacctannnatgaatagataatctaactattcatgcaagcaatcaaaaatatacaaagtgataagatcattaaaagtatattcaagtttgcttgaaagagattataactgttatcacgaggcagaattgacaaacaactcgtgcgtatagtagtctattaactactcaatattaaaggaatatacgagcaatggaaatttcctaaagtactttgtatgtgatcaaaatatgattatttaaattgtgaataaaacgcaagcaaacaattatgtattaaagttcaaacgtaaaagtacaaggcattaaataaagataagaaccaggttacccatccatggcaaatttgtatttacacaaaaaaaaaggtgccacaaggggca

SEQ ID NO: 37758 - DNA, 4731 bp, Cannabis sativa
aaatattcatttatcaaaaaataattatttatttccttaaatagaaaatcatttccatacatagaatattatttccataaatagaaaattcatttccaatattaaaatattctaatatctctatctttcatattggcctgactcattttagtaaagtttttaggtttcttttcaaaaaaaaaaaacatgtaaatgaattttattcatacatattaattataagactatgaaaagagtgttataaaaaaaaaagaaaagaaaagagttttatataagaataaataataaaagttaaaaaaaatgaaaaaacaaaagttatgtgtaataataataaaaatataattaatataattaataatgaaaagacattagatataataaaaaaattaataaaattagagaatgcaacattattttctcaaagttgttttttatatataaatataaatataaataattattaaattatcacagataacattttagttgcttttgagctaatccaccacctaaaacacaaaactcgtgggaacaagggtctacatcaatgaggtaatgcacaagatgggatttcataacagttggattgagactatacataggtgtttaagctccactagattttccttcatgttaaatggtaaagcagttggttatgttcaaccaacaagagggcttagacaaggtgaccactatcaccttatcttttcttgatttgttctgaaagattttccaagctgctacaatatgaaaaatcattgggaaatcttaggggactctaattaacacgacattcaccatcaatttctcatctcctttttgctgatgatagtctattattctgtgaagccaccaaaaattctgcattttctataaggaggattctagacacttaccataaagcatcaggacaaatgttgaacacaaataaagtggtaatgtctttctcaccgaacacttcacaagcagccaataacttgttccatcatattttgagaatgcctattgttgaatgtcatgaacgttatcttggacttcctgcttatgcgggtcgtgacaaaaaaatgtttagtgatgttaaagagcgaataaggtaaaaactccatgcatggaatgataaacttttctcaattgaaggaaaataggtacttttgaaagcagttgtacaatcaattcttacatatgctatgagctgtttccgattaccgattactttttgtaaccaattaaaatctatgatggtaaacttttagtggggtgcaaataaagatggttcaaggattcattggaaacaatgagaatcgctatgtaagtcaaagtttgaaggaggcatgagcttccgtttatttgttcattttaaccaggcattactcgctaaacaagcatggagaatttatgagatacctaactcgttgcttagccggctgctaaaacatcgttacttctcaaataatttctttttggaagctagccttggacactcaccttccatgacttggcaaggtattcattggggaagagaactactccttcaagggttgcgctttaaaattgggaatggtttcaatgtgctggctggtatggataaatggatttcaagtcataataacttcaaagtaatctcttatgttgaaccttcttcactcacagtggcacacttcattacagaaaaaagagaatggaatctgacactcctaatcaattttttctgccaattgatgtcgagagaattgtcaccataccgctgaccttctttccaactcaagatcgtttgatttggcaccacacaacaactggaatgtatacggttaattcaggcttccacttggcgggtaatattgatgaaagtaatgaaactttagtctccaacactcacacgacctagtggaaatatttttggcaactcaacttgccatcaaaaatcaaaatcttcgcttggaaagtgatgcaaactactctacctgtgacagcaacacttaagaaaaagaaaagtcattacttcagcatcttgttccatgcgtactaatgcttgggaatcaattgggcatgctttattcactttccatatagtgaagtcagtttggaagcaaacaaagttctctattgactatcgcaatgctcacaacatgtataatggtgactacttaatccacttatccactgtacatcctaaatcagatttagaattgataatatgcattatgtgggccatttagaatgaaagaaacaaggttctacatgggggagatcgaagagatggtatacatactttgacattttccagtacttacttggacaaattcatgagagctacaaatggtaacaaacaaccttctctctaagtcacctcgtcccatacgagtaaccaagatactatgaatggcacgctgcctctacggcaaccatatggtacaaattggagaccacctgattttttggagctaaaactgaatgttgatgcatcagtcaattcaacggataaagtattgggggtaggagtaatcgtttgaaatcaccaaggacatgttattgatgctttatcaaaatcggtgcaagggtgctttcgatcatatgaaatggaggctataacactttttcatagcattaattgggctctacaactacaacttcctattattcatattaaaaccgatgcgctgagagtttctacagctctaaactttacatctatggatttatttagttttagtgacttaataatagatgttctttgtcttttattctttttctccggagttattatttctcatgttaagagaaatgcaaaccatgctgcacatggtttagcaaaatatgctttggagtagatgcagatgtttgttggatgggtgatatttccaatcccattttctctgttgttgtaaacgattataatttataataacattgatcatttcaaaaaaaaaaaaaaaaattgattatttgtatttatgtgttgtgcttttaagcttgcgtattgtgtcatatttaatttatagtattgtgacgtatcgtgcccaaaaaatattaaaaatgagtatcatgggattcgaaccagatattttataatatatcatacaatcgaaccaactatttattatttataatatatttaattttatttaaaagcctaatgaatttttttattttttattttgggtcgccaaaaagtgtgtactcttgacacgggcctagtttgtctatgcctagggccggccctagccctaggactgcacatttagacctacaaacccaaatatcccgaccactcgcccggcccgctgccaaaaaagccgatcacctaaaaacccttgtagtcgggtcgagttcaacccgaaaaagactccaaacgggtttcgggttcatgtaaccttaattagtttttttctggtcggtttataacccgtaacccgaaatattaaaatgatatttttttattaaaaaattaatactttaaataattaattactaatttaatatcatggctatttgtattctgtagaggtctctacgtgtctatttgtattcttctgtagtaaatagtaatagtgtaactgaaatttttttaatcatattcaatttcaaaaaaaagctcttagcatgcctatttgtattcaccagtcgactcgactccagtcgtcacccacacccataaataacaagagttattatttaataaaccaatttgataaaaggctgtcgtgtgtttgaaaacatagaaaaatgggaagataatatattcaatttaatttcgcccataaattaaacattcgggctcagcccaataggacctgaactcgactatgtccaacccgaaaaagcccgacctgagacccgacgcacccgaacacccgaaaattgggttcggttgtgcatttccaagacccaaaaacccaaaaactcgaaaacccaacccgtgtgcaaccctatctagcccaaattcatattttttcttgccttgctcgtgtctctcgaactcatatcaattcgtcccgtgtcaaaaaatctgagtagcgtatttaatcacacattattattattattatttatcatcaacaattaacatggtaataatagtagaaaaaatatatataaattttcagacatagattattagacatataaatataaatatatttcattcaattatgaaaaataaagaaaacaaaaagaaccagaaaacttgcacccacctacctctcatcaagatctgttactcttttcactcttatttaagtcttaaaccaattcagccatttctgttttccaataaatccattttccagttttgtcagaattccaatcaaaggaaagaggaagagtaactgtgtagagagagacagagagacagagaggaaagctatagatgttgccgcctaggttttcctccattttcagcggaagtggtggtggagaaggaggagccagcgccagagcttcgaagagcagcgcggcccaggttttgcccactctgaaacttcaaactgataaggaagtgtatggccctggagatcccgtggtcgtcaccatcgagatcgggaatccttccgtcaatggtgattcggccttgtcgcttttggtcgaccgtttaagctttgagatcaaaggcattgagaagctggatacgcagtggtttgccacgcagaagcctgttccgggatcgaaacagagaagaggtaatttcggggttgtgattgattgaagaactgggttggtttttttttttttttt

SEQ ID NO: 37759 - DNA, 4189 bp, Cannabis sativa
  modified_base (42)..(50): a, c, t, g, unknown or other
agaaaatatttttaaaattattttgtttttttgttttttttnnnnnnnnntaaatatttataattatttttcaaaattaatattacgtgggccactaaaaagttgccatgtctataagtgtgtacacgtggacaatccactgtgacacttaacttgtcacttaactatgatttttgaacggaggggtacagagtaaaataaaatgcgagtttaggtaattttgccccccaaaaattaatttttgtggttaagtgttaaaaaatttaaagtcaggtagtttagccaccgatatcccatatataattaatatgtcaatatctattactgtaattaaaaatataaaaaatcttacaattgtactttaataaaatgtgtcaagaaaataaattatatatatatatcaatgcaacaaaaaaaaaatgtgagaataaaaaataaacaataattaaaatatgaaaaactaaacaaaagactataaataaattgttggtaaaatttacaataacaactatcgtcggaaaagtcattggagtagatatcaacggtgaaaagttgttagaaaagtcatggatgctgaaaaagtcaccaaaattgtcatcgttgttagaaaagtcaccgaaattagatgtcttagatctaaattaaaaaacaagggtattaaaaatgagcatgacattgtacaatttattagcaatatttattaaaaattattaaattgaattctataaaactcgttacttaatttactaataacaatataacacttaaaaggatgttaggcaacaataatatttattttaggatttctcattaaaaaagattcaaagttggcatgactatgagtagtgtgactgtgcatatttagtgtgtgcatatcataactttaaaaattaggagtgtgtgaggcataagtagttaagtacatgttgtttttgtgttgttgcaatttctttatttattttatttgatttttatttttttttattttttattaataaaacataccttcataaaactaaagtggtgatcacaccaccacccaaaagttcaaaaatacctaaaaacattagcatgggcttcccacaccagaagctagtgacaagggtttcttgtcaactaatgtgttgtactaattgcaagagtttgagcaaaataaaaaggaagagaaatgttgaggattcgatatgagtcaatttttattacaagcatgcaatcttcaatggaagtgtgcctccactgttgcatagaccgatttggcgtggctacaaacagttcatctagtaagaactttgcttgatgcaactagtttacaattatcctgaaaccttcgcacaatgtccaaattctttactgttcgagctttgtctcacaaatcgtcttctcgcctttgtcatgatgagattgtcttcaaagactttcactcgcgaaggtgatcgagttggacttcttgctcaatgcctatcccaactcgtgaaaacccaactattgtgaaaaagacattcttacttgttacattgattttaaacgaaaagttcacaatactctctgcctataaataccacttatatggtaggatttattctcttccatcttttgacttttcacattcgaacaaatattaccctgtctaacagatttatacatagtattatagttgttaatgtaaattttagatatgagacaagtaatataatcactcacatttttcaagataagttatcatgtcaataagaatcagactatcagtatggtttattagaaatgagtcaaagacagagaaaatacacttttctgtttctgtatctactttggatataatacttacaaagtacaaacaaacaacaaatgtctcacaaaatgacaccactccaaccatattctgtgctttcttgattgtggcacatacattgcatataagtgttattatgtcaacattgttaatctctcatcaaaatacacagaatttggtatcaaacaagaaaggtaaactgacctcccattgtggattggtagtgttatgtgttcttatcatcagcctagaaatcagtgtcaaaacaagataccataaccttggataccatggacctagcaaaagggatgtagctcaaactgtacctgtgtcatttgattacaagaccaaattaatacacaagttgttagttactatctatatctactaaccaaaatacacataaaagaaagaaacaagggaaaagaaaaagggtaatttaatttattaccagatcaaagcaccaaactctaaaataattgcaaagagtgtcaaaaacttgttatgaacctgcaaaacaagaagaataatagaatgaaatgatgatgatgatgatgaaaataagataataatgtatggtttcgtttggtacccgtattaaatcgtattgtatagtattatattcaactatattgtatatcgtttatttaaggacttctaaatttcgtttaattttactaatgcagcgattgtctctatatattaaatcatgcctcaaaattttaatatctaccaaattgtgctcccaaacattcacatgtaacaaatcgtgccccctaaacattcgtatatgtcagacttccattagtaaaattaaacgaaaatctttaaattcaacaattttaatagtttgggaaattattaacaaagagtcatgattcggtacatgtcaaaaatatcaaagtttgggcagcaaaaatcataattagccaataaggtaatatggtgtaataaactgagtcttaatatatgtaaaacttacatagagagcacaaaacaaggcaattataatactagcaaggtatatggccgtggcatagatacgaacagggtcaagcatcatggtcacctgtcgtttagggcctataagaaatcctgtgctgcaattagaaatgaaaatgaagtgaaaaacacaaactcattcattcattcaatccaaaacactgtaaggatcaaagctcagttcagctcagctcagatcagagcaagcagactaaccttaattacttaccttcctagcgcaagaagattaccaagagtaaatgcgattccaaacttgataggattaaagaagacaagcattgactgtcaaaatctcggttagttagttaatcactctcagtgtcagtatgagcagaaattggatttaaaaaatggatttaccagaagagtgcaggccaatccagaagccaaacaaattgcgaatccgtaaaatctctgagagaagatgagatctggttatggcgaaagtggattgaaatgaagaaagaaagaaagaaaggttaagtacctgagtggtggacaaggtgcaattgcgattgaaatcgtcaatgaaagaatcagattgttgagcagaggcttcttcttcgtcgacttccatgcctacaagcatcttcatcctctccactgcactgttcatcttctccattttttctccaaatttcacagactcaaacaaaagagagagagagaagactatttattaagacaagacaatctctcctacttcttaaaaattactctctttctaactaacagagtacgtattaagcaatccttcccaggcccaggcccaggcccaggcccaggcccaaaccccggcccaattaagtaagagttgcattattttgtttatttttaaaggattatttcatattttttaactaaaaaagaaaaaaaaatgaatgtatgaattataatttacctatatatatatatttttaatttttttaaatttacggtttgaattgctcctatagtttttatatgagttgatatgtgaattttagttgcgatttaaattgttctgttgattgctatgtagattttcgtaaaaatgtaaaaaaaaaaaactactgtgtaaaaataaaaaaaaaaataattttttttataataaaaatatgagctattattttcaatgttatttgcatgtccttttcttgttgtatattgtatttttttattattattttcgtgttatttttataaaattgtaatcaaaagaataaaaaaattgttaaattaaaatatatatattttgatagtatacatatttaaactcaaccaaaaatattttatgtaacaaacactatttttaaagcatatatcgtgatataagatgataaatttttgacacaaaatatagtaccaaaaaccttcccaggcccaggcccaggccca

SEQ ID NO: 37760 - DNA, 1545 bp, Cannabis sativa
aaaagtccttaaatttaacaaactcaataatttagagggaatttttaacggcaaaaaaaattcagggagcatgatttaatacatgtcaaagttcggggggaaaaattactaattagtaccaaatgtgacttaaaaaaacaaaaaactagttgaataaatgtaagctaaactcaagttaaattttttgaaaatagcttaccaaacaggtgcaagaagaacgactacaaaacccattcaaccttcttccctaaattgttttgtagctaattattacccaattccacttaatttttatgctacttattattgatttcaagttttaacaacaattatactcaatcatgtagtgagactaaaccccaaatagtctttattattatcattattttactttaatttggaagacatgctgtgacatctctttaaaatttgcatgtatgtattgggtccacccttataaattcatcaaagaacccaaaatccattgaccatccaaccatattttacctctcacttttcttgaccattttaacaagaaacaaacaagcctaaaaagaagaatctcatgtccattttctcccacagtagttcaaacaatcaatatctaacaacctcataatgaatttaaaagatagagaagttcaaaaaagataagttcaatatgacaatttatgtccatgttctcaacatgtttggaaatttgttgagatatatatatgagcatatagccattgagtcaacccaatgatgtttaatagagtatgtgttagaaccacaacaaaaagaacaattaagggaaaaaaaaaggtgagaatgacaatagccaagacaaactaattaaaagtactaaacgaacattttgactacaatccctaattagtgacaagacacaaaatgaatccaaagctaattaggcagttaatatgttgttttaaattacattgttctttttaattactattaattgttttgggtgggtttggaacattttttgctttatatgtcatcctttctttaaaaattttaacaatcatttaaatttgtctttcatgagtaataatttaattcttcaatcaaatgttgattataaaaatttcaataatccaaccttttcatttatgaaaattctatactaattcataacttatgatatgaattctatctatatgactaagaatttctcatatatcaatatggatatggataaaaagaataaagagtaaagtactaattataacctcatattacaactttttagttaatatttacgctcgaaatcacatgccaaaatatttttttttatagcggtatttgttatagttacagtatcatctctgtaaatttttgaaaaatttcgaataatttacaatgtcgaaaatagagtttttaatattttagtttaccgtgcgcgttcaaaaagtttaaaacgtatcttcagcactgtaaactattcgaaatttttcggaattttttctcatgtagctttattttggtaaaactttacttttttactctcacataaaaaaataaacaaaaaaggaaaac

SEQ ID NO: 37761 - DNA, 3103 bp, Cannabis sativa
aatttcaaattcaaaaaaaaaaaaaaaaaaaaaatcagattcgatctcatttctattcccgctctctactcttttaaaatactctcaaaagaagaacgaacaagaagaagatatctaatcagaatcaatggactcagatctctcgctcttcgaattcgcagccgaagatgattcccttctccaacaaccccttaaccccaatgcaatcgaaacccactccatccatcatcacactcctacttctcccgttttcatctgctctcctctccaaatccccacttccaatcccatttctacaggttagggttttcatctactttgaagttctacttctgattgattatccatttgatttgatttgattttattgttgttgtatgtgacagacggtattgaagaagatacgagtcgttcttcattgtgtagcgattgtactgtaaataaagagaacaaagaagaaggaatggaaccgaaacaaatcaaaaggaagggaaaaggaagtggttacaatttacgcaagagcttagcttgggatagtgctttctttactgaagaaggtattttttttttctttaaaatggggaactttgaccttattctttagatttgttcaattttgttttttgattgtttatttatgttgtaaggtgttcttaatcctgtggagttatctttgttaacaatccgggaagaagacacaagctccgcgagtggtgctgcttcatccaatcttagggacattgatgaaaatttgttcacggaattgcctgccactgcttcgggaaaatataggaaaaatggtggcagtagcttggtgccgaagaataattcaccggttagaaaaaatggtgctccttcttcggtggttagtttcaaagcttgaagtgtattcaattttcttttgtaaagctttaagttgctccagtttgacatatttcaattgggaaaaaaggtggtgattttaactttcttttgtaatgatcattaggctaaacggaaggtggtttcagcccatgatgtcattagaagttcttcaaaacgaactgattgtcctggacctgtggcttcatcttcatatcctttacaatatgtttcatagtttagagtgttgtttgtcttgattttaattcgaattttgtataacatttgaccttgacttatttatactctgaagaggcctgcgagtttgattacaacaaaaacatcatcaaaggattcaaaagtttctaagttaccagctccaaagataaatcctcgtgcgtccattaagacatccaagatttctacacttggtgcaagcgagtcgaaacggaatcagacaactttgccaggtactcctgttatgatcattttaaaattattgataaaaatgttgttttgttatgtttattagagtagatttataatctaatgttccaatttggtaattcatacagtagtaaatattcaaaaaccttctgtactcaagggctcctcaagcaatacaaagagcaggagtgcattaaacagtccaaaagttggtcctgcaggaaaatcaataactactaagacctctcttggacaagctaaaagaaatgtggtgagaatttttcattttattttgattttcttatattttcaataagctaagtgtttaggctagagcttagatcatagttaccttaacagttgaaggacatcaggttcttttaggggttcattatttataatttcttaaattgactagagtatggttcttttattgccatcaattttcttgggcaggctagctcagtaaagggttctataaatttacaacatcctttgaaaattgaagtgaacaatgctttagatgtgagcttccatacttcacttcctcctgctgttcttggatcaaatagtcatactagaggacccagaactgcaaacactctccccaaaaatacttaccatactggtcttaacaagcaacctactcaactcccaacagcaccaaaaccatcaggtttgcggaagccatctccatctcttggattctttgttcaggtatagtcacttgaatttaactctataaaatttaattagtattaatattacaaagaacaaaaaaacttcatgattgtgtcataatatattttttctttactggaagcagtcaaaactatcccctatgcagagtccactaaagatgacttctccaccatgcaatcctcctgagtctaacatttctaatttgaggaaatctggttcttcagcaaatccagtttctgaactaaggcctccacttgcttctagaagttcacttgaaaaagttagggactgttcacttgaaagaaatgttaagccctcattctcaagctctgaatccccggttttagtttcctctaatcccactttacatggagtagtggaatcaaactcacaagttactaataggcagatggaaaacatagtgcaatgcaatgatgctagttataaaggtataaaaattctgaaagaagagcttgatggttttgttggtgtggatgaactgtgtcctggacaagcaggaccacctaccactgcaataaaaattttcatagaagatgcagaattgcagacgaatgaatgcaatctcttactgaaagaaacctctcagatgggtaagtgtgaaattgatgcaaaggtaattgacagtagccaagaaagtagtgaactggaaatttctcagctcaaaacccgttctagctctgcaattgaagttactggtccctctcttaaaagtgatatttctgaccaccagcttgtagaagagagaccctttgatttatcacttaaagatcataaagtcattttgcaagccaatcctgtgtgcaaagctaatgaaacatttggggaacaaactgaaactatgcatagtggcccatttttcagcgacgaccagatgctacaagataatgcagcagataatagttcacatgttgaggactatgatgtggctgtaacagaaaattctcatgcttatcctcattttgggtctattgagctagaaaaagaggatcatgatgtctctccagagcttaaatcccaaaagggcgatatcaacgaaccatatggaaagcaaactgaaatgatgaattcctta

SEQ ID NO: 37762 - DNA, 2812 bp, Cannabis sativa
tactaggcgctcctccgtagtctcgcttttcaaattaccaaattaaccctcctttttctactactatattttaattttttatttaagtaatttacaatataaatatttaaatttaattgcaataatacttaaattatattttttgaactcttctataactacatgaccatcaaatattaagttattttttttgttagtatatttaaattaattttttttaaatttaatgacttggaccaatcaaaaattaccacgtgacaatttacttaatacttaaccgctaagatctataaaaattataaaattataacttagataatattatcgccaaaaattaaatttaaatatttatttataaagttaaacttaatatttatgctgcaaattactcttcttattaatacttaataagacacttcttaaactaattaaaatgaatcatgtattccttgggtttcaggaattaaaacaactttgtttaatttgttaagtatttttaatttaaataatttaaagtataataaataattaattttaattttaagttacaaataaatatttaaatttaatttttaacggtaataatacttaatttatatttttaaaaccgattattaaatgtgaaataaattgttacgtagtaatttttgattggtccaaataataatttttttttttttttaaaaaaatcaatttaaatatacttataaaaaaaataacacgtgaataatgacatcacatgtatacttacagaattcaagaatataacttaaatattactacggcaaaaaattaaatttaaatatttatttacaactataaattcaacttaaacatatacaaataatattttactttccattcattttcatatcttaaaattttattataagaacgcgaaaaacgacaaaagacgtctatttgggggcgaaaaatctcattatctagtgaaataatttttttttttttttttttggaggaaagtgaaataattactactattgttaatgatagaaagtataaagtgactttttccaaacaaaaaaaaagtcgaaagtgacattaacgagaaagaaataaaaacaaaagctctcgttatactgagttaaaaagattagttccctttacactgatgacttctaactagttcagtacatcttgtaattaatcttaccatcactaaacaaacttatcttctaaaataaacaaaaaaaattacagttaaagcccttcggcttctacctcctaccattaatataataataataataaaatatataggagattaatttttaaccgttttatccttggacatttaccatcgtaacagaattaaccaccacaaacgcacgtggctaatagtaggagtagtcacgtgaggatggcttgttgtaaccgaaatgccgtactttcgtggtcatggaggcagaaccagacctcaccgaaaaaactccatcccagatctcggtgaaagctcgaacaatgattccatggtgggaaggagcattaagctgtagaaaacagttaagaagctcacggagatcgtctttagagtaaatctcattctccagtatcatctgaagcatcgattgccggaaatccaagtacgggtcgtcggaatctttttccacggccacgccttcgccgccgactcgaccgaaacccttaacggtcgttctcggagagcttttgttgtcgtcggaggagaaaaaggtggaagaagttgtggtggtggtagtggtggtgtcttcttcttcttcttcttcttcgatgtcgttgagtttcttcgttagagaatatgagcttgagtattgtcgtttgggcttacgatgggctttgattttgggcttggattttgggtggaataagagggagagtttgggccgggtgcagctgcaaccgaggtcgactgaaactgtgttcaggaggagcttcttccttgttgtactactactactactagccattttagagagagaaagagagagagtgaaaaattgagagtcagatatgtatatatttatagatatagaaatatgtgtatatatagagagagaaagagagataggggtagggtgggtttgactaaaatgggtttaggggaaggttcttatatatagtctaaaaaaagtacaggctaaccaggggtaccctctatgctaaaatgactaacctgtgagcatttcctaaaacgacagtatgatcatggccgcgtaatcatacaaccacgtggtctcttacgctgggcccgacctgtgacccatgattataaaggtaaaatgcaaaaagggttttctgtgtaatttagaaaataaatggtttaattaattaattaaatttttggttactatatagtatatagttggaaattgggtacgtgaagaatgatcttgggatcagtaaaaaagaaaaaaactgtgttgatcagtttttctttgtttttgattttgattcggaaggtttcagatctataatttagtaatatctgatggttatcttatggccttttattatacgtaactgacaatataaaaatttagtcacacttgtcaattgaattatatattttctgaaaaatgaatagatcagctgcaccgtacacttacgtacaaaataaaattctttctaatatacattttagggttttttggtacagaaaattatgtagataattgtaaaaaatcgtgtttttacaaatactaataattatattaaatttcagtaaaaatgcaattgtaacaatagattgtaattttgttactgtagaacataaatttacagaatcaaaaatgatgtgatcaatgcatgatca

SEQ ID NO: 37763 - DNA, 7107 bp, Cannabis sativa
caataagcaatacctcaagaacccgccatagagaacgaggccagcgacttgggtcaacttcactaacagatgaaacagtacccatgaaccagttaaccctagaagaatcatcactctcaaaagccttcttaaacctcatcccataccaccaccgtcgtctcatcaccttattcaccgccgaagcctttacacaaaaagcttctgcattattagcattagggtaataaaccacttcaaataatttcccatctgcagcaagatttgcagcttcaataacagattcaggccttattttcccaacccttctattattcacaatcctcgattcttcaatctcacctccttcgttacaactcctcttcactctctttatcccaacagagacatcaccattgttagctctgcaaaacacaatcgaatctccagacacaagcttcttatcattcacaaatgtactccaaccagtagtcaataaatgtctccgaggagttcccctataaatatgcctaaatttccaaacatttccatgaacatccttagcaaaaagagtctgaaccggcggattcgcagcgtaatccaaaggcgggaaaatcgtctccccacattgtctcggaacagagaaaccaccaccattattagcatccgattgagtaagaatcttcaaaaaataactaggtttttccaaaccaccgccgccatcgttctcattcacattctcttcatcgccacccgattcatccaagtcctcttctccgcttgaaaccggaacaagactaatcttaacgaaaacctcatcagtagccgaatcagccttatactccacagccataactctacacaaaatctgcgacggaacttttcgatcaagaaaacgatcgacattgattccggcatgatcggcgtgaccttgaggaaaataaaacaccttagagttaacagaaggtacatgaaccaatcttccggcgcaagcgttccataactgaggatctacaaccacgttgctcctctctcctccttgatcaccaccttcgttcatctcaatcttctggttcctaaatcaaaacaaaaaaaaaaaaaacaaaaaaccagaaataatcaaaccaaacctaataacaatgataatatataaacagatcaaaatgtatatacgtaatcaagattgtatcacttcaaatcaaacataatcaacatgaaccttctttcttctgtatatatgtgagaattgaattggagagaaagtgaaagaaaattgcggctgagtatagtgtttggttggtaggaaagtgattttatatttatttatttaatttaatttaaataaataaataaatataatattattaaatgaagggaatattctgtagaagaaaacaatttgttgacttttgactaatctgacataattaattattggtcaaatactaatttaatgagtatattgtgggaatgtttagggtttacacttgacttgtattgaattttggtcttatataaatatatataaaaatatttatttatatatattaaagatttatccaatttgttcataatttattttttttcatacaatgatttgtgtagtttttttagttttaggtttatataattttgagtggaacatctcattttttttttcaagtgtaagattgagataatttaagtgtgtcataattatgtaagtgagaatttaggcatgtttactaataaggtaataggaattaaaggtatttgtttactttaatttattaaaattagccttatataactttaagtggaacacctcaatttttcaagtgttaagattgagacaatttaagtgtgtcataattattttaagtgagtatttaggcatgtttcaaaggtatttatttactttaatttattaaaattagccttatataattttaagtggaacacctcattcttttaagtgttaagattgagacaatttaagtgtgtcataattattttaagtgagaatttaagtatgtttagtaataagtaataggaattttttagtttaatttattaaaattaaccttagataattttaagtggaacacctcaatttttaagtgtaagattgagacaatttaagtgagaatttaggcatgtttcaaaggtatttatttactttaatttattaaaattagccttatgtagttttgagttgaacacctcatgtttttaagtgtaagattgagataatttaagtgtgtcttaattatttaagtaagaatttaggcatatttactactaagtaatagaaatcaaaagcatttatataatttaatttattaaaattagtcttatataatttgaagtggaaccacctcatttttttaagtgtaagatattgagacaatttacgtgtgtcttcattatttaagtgaaaatttaggcatataagtaataagaatcaaagtatttgtttacttgaatttattaaaattagaaaaggaagaattcgattaaataagagataaaagtaaggaaatacttttcctaccaattttctaaagaatgtcattaagagtaatgacttctatttatttttaggggagatttatttgtaccacaaaaacttataaatacactctattttaataatttttattttacataaaatttatatctttaatttttttagttcttttaattttttttcttccaattcatattcctaaaaaatatatctatcaagcaaaaataaattcatttcaaatattataacaaaaaagttaaaataaaaaattatatgaaattttattagaaaaaaaaaatatacatgattgaaaaaaattatgtaaataaaattagaataagtatgaaattataaaaaataatattagaaaaaaattaaaaaatattaaggtgatttttaaaaattattttaagcttaatttttttttaaatattagggtgtatttatattttgcggggtgggtgcaaataattctcttaaagattattttaatttttaaaattaaatatgtaatgacaacttttttctttaaatatatatgttttacaaaataactacaatatatattatagtttatctgaaaaagataattcagtcgatgtaaacattcaaattacgttttctaataaactaaacaaaataaattattattattctatttataaataattttagtaaacaacattatacaaatattgattctgattatttttaaaataaatattgattttaattattcttcactattttgttacatttctcaactaatttattctgattttgaatattgtataataaacataagtaagaatcacttttgtgttaccttatttgtaattgtacatttgagattaattgcatatcatttatgagtagaaaattatgtataattttagtgtgtcataattattatatttactataatattattattattgtttaaatattgaatatggttgaggggttagaattaaaagatattgtggtgttattatttagggtatattatgtcctttaaatagagggaaaaaacaatttcatgaagaaaaaaataaaggaaaaaataataaaatatttaaattttaaataaaacattttatctccttaataaagttttactaatcttaagatttctttttattaaaatatttgaatttaaaaaatttaaagcaataacataataaaattaatgtagactctaatatctaaatactaatcattgctttagaaacctacttattataaaattaaaatgtcatgacctttgtgtcttcatgttgttgggacttgcacattagttctatgtgttcaaattttttcataatttttgtatttcacattaggtcttcaccaatatatattttgtggataatttatttatttatttattttgcaatgtaggcatgtaagatattcatttgtattattgttgtttaaattataattatatataattttttttacatatatttaatacatatgaaaatatatagatattttttagagggctaaaataacttattattacttatagttgttttttactcctaagagtttttggcttatgcactttaatttgtatattataatgaaattgtttggaaatacaggaatttcatagtcttctttcacatttttgaaaaaatccaaagcttctaagtaagtttttctgtcatttatatcaatacctctcgagctaacttaaagaaatgattaacttcgactttcatttagagtaagtatatgtttatggtgtttttaggttatagatttttaggacattgtgttttgtttttctcaattaacatgatgagttccttccaaaataaagctctagataccatttatgagtaggggcgaatggtaagagtgtaaatggatcaagtgggatctcattcggctatgattcaacctgatctaaattatgtaaagatatgccttgctagatcagatacgcaggtgagatcagatccgacccaacttattcgaatcgaatttgatccgacccaaacttttttttttttcatatttaagtttataattttatatccattttaattttgtattagtattaattaatacaatattatatgtttgatattgacttgtattaatagattgtataaagttataatatatttttgagttcaaatcctgttcgggtcccgagttcgagtttgggttcgggttcaagccctaatcctgggtctcgggtttaggtccgggtctaggtctaggtctgggtctgagctcgggtggtttgggtctcgggtctgggtctaggtttgggtttgggtccgggtccaaattttggattccgagtccaggtctaggtccgggtccaagtttgggctaggtccgggtctgggtttggatctcaggcaggttcggtctaggtcctaggtcctagggggttcgggatccaagtcttaaattaattttttttaatatattgaaaccggatcggtttagatccaatccagaaaaatattaggcggggcggagcacatctcattcgagatcaattaagtatctgaatgttttggatcagaagtgatccgtcggatcggagctccgacccgctccaacttaatggatctttttgacatccgtaacgacaggcgttgtattagatcttacgaaaaataaattttttgagacccttataataagaatatatagtatgtttaaaaattattaaaaagttatgtatttttaatttttttttcttagtttgggctcctaagttagatggataaaacaataaaaagttcaaaaataaaaatgaaagaaaaatatgttttaattatgagcattgttattgggcaccagtagtacctaacacttttagatatgtcattttgtaattggttagcgatactccttaaaattattatattaaactatatgaaactcaatacttagttgaaccaatagcgattttaacacataggagggtattatataagcaccactggtacttttttagcatttttctttgtagctcggaattgtgtttaagtaatgttatttagggtatttactcttcaaagtgattaaggtgtagtggcagcttcaaataaaattaagtaataacaatagatcaagttagatttaagcttgaagaaaacgaaggtcttaatagattaaaatttgaagaaattatcaaaatatcaataccaattcaagataggttcatatttatcacttaaattttcatgaaatcgatcctcttttttgtattttttatttttatgaatgaatttattttgttagcactagtttagtaacttgcagggacgaacacactaacaatagtgtgggggctataactcccagtaaaaagaaattaatgttaaaaaaaaaatattttctatttagttaaataattatacaataaaacagtaaaaaatctccataaaataattataattttaatgtaaagtaaataataaatatttttataataacttagcctcacagaacaaaaattctaggtccgtcattggtaactcggtaacaaaaattccactttgggttaaatgattgaaatttatttaaaagccaactttttatagaagtgttaaaataattttataacatatttttaaaattacatgaaatatgctttttgtttcttctataagtttgataaatatggaattttctattttgagcattctttttataatttttttttaatatttcttgggatctttttccatctattttttgaattaatggttactatcacatcaactttaagaataattatttatcacatcaaacgattattgttaccaacttttattttattagtaatacaatagtaagtagttatcaccatattaattaatttgcaaaataactaattctacattaataacagcttatatatggaaatatttttaggtgagagcaatattttatattatttttgctctcacatgtaaaaatattagtttagattttttattggttgaattgagtggttgtatgtaaggtagcattgagattggacgggccttagaaaaaataaaattattgagtcttttatttaaaaaatatgtgatattttaatgggaaacttataaaaatactggaatttaggttaatttttacaaaaatactgttacacggaaaagttttcaaaaatatttataaaacaccagaccacaaaacagactaactcaaaacaacagtagaataactaaaaaacaccagtagaacaccagtgaaaacttaacatagtatactgcagtatgaaacttataaaaaaaatacagtaaaaaagtaaaaaacaccgcctggcagtatttttgtaaaacaaatggcaaaagttagtataccatgtaaattttcttatttttaatactaaaaatatacgtatattttaaagaaaaaatatttttttgggctctgaattgggccctaagcgcaggcctaccatgccttaacctaggtttgatcctaattatatggtattagcatgtgttgctgagtaaagtagtatttggtatacatttttttaaagaagattatattgtaatttttttttaaaaaaattatattataattttaccttcatcatcctcaaactcttttgtttctttttttttttt

SEQ ID NO: 37764 - DNA, 3745 bp, Cannabis sativa
tcaagaggtatatgttcttaacttgtattttatgttttgatttaatgtacacacatttggagatcctttgggctatggtataatgataatcagcaatacaaaactcttttgttgcgtatcttatttagtactgtaaaaccaacaacaactacctatactaagatggtagaaaaagcacttcgtgttaagagtgtcgttgaatttattaaggagccccgagggactcagggtggaagtggggtaactgcccctcttactactaactttggtaggggtggtagtgatatgacatttgatcaaaagaggaaggcttcaacaactctaattggttcaagttcaaacaagagatactgagggaaccaaggtagaggtggataacgaggctgctctggaggttgttatacttatccagaatgtcctcgctgcaagaaacatcacccaggagagtgtatcagaaaaacatgtttccaatgtgttctaatgtgatattcaagaaagactaccatcagttgaagaaagtagaacctaggaaagaggaaatagctattctagcctgagtgtttcctgttactcaggccaacactataactagtctgtcggtggtgacagttcaacttctcatcaatagctccttttattttgtattgtttaactctaaagctacacattcatttgtggcggttagagtagttgataaactggataagccttgcgataattttgaactagggtttggaaccctatttcctagagaggagttcccatctccaaaagacagattaggtctatgctggttagagtagatgataaggagttgagtgctgatctcgtagagctagaactaggaaaatttgacattattctagggatgaatttcctatgtaagtatgcgactagtattgattgtaagaggaaatagtgacttttcagcgtgagggcgaggagccattttttttgtaggatcgattcagggttcttgaattccagctatctcggtattaaaaactagagatttactacaagatggatgtgtaggatttttaaatgttgtgattaactccagcagactcgaaacacttgggcctgaggatgtcagagtagtaaaggaattcctggatgtgtttcccgaggagttgctatcaacgagaaattgactttgttattaatttggcacttggagtggatttggtttctaaggcaccttatcaaatggctccgacagaatttaaagaattgaaattacaacttcagtagatgcttgatctagagtttacccaacccagtgtatcaccctggggagcttcaattttatttgtaaagaagaaggatggatccttttgaatgtgttgactaccgtgaattgaacaaattgacgattaagaacaagtatctattgcttagaattgatgacttgtttgaagcaacttcaggggaaaataattttctccaaaattgaccttcgttcagattatcatcagttaaaaatctgagaggaagatatctcaaagactgcattttagactagatatggtcactatgaattcttagcgatgtcattcagattgacaaatactctaagagcctttatggactttatgaatagggtgttcaaagattttttcgataactgcgtcatagtgtttatcgatgatattcttgtatactctctgtcagaagtgaaacatgagctatactttcgaatggtattacaatgacttagagatcacaagctatatgctaaattcaagaaatacaaattttggttattgcaagtgtctttcttgggtcatattgtcgggaaagacataatctcagtcgatctaaggaaagttaagtcaattaaaaatttgctgagaccgaagatagtctctgaagtcaaaagtttcctgagataattagttggtactattgtcattttgtgaaagtattttctaagatatctctatgcctttgacaaaatttacaaaaaagaatcaacgattcttatgggatagaaaagtgtaaaattagttttcaagagttaagcaacaattgattacagctttagtgttggctttgatatcagatcaagagaaatttgtggtttattgtgatgccttcagacatggtctggggtgcgttctaatgcacattgtcagggtcattgcttatgcctctcgtcaattgaaggagtataagcaacgttacccaaacttagagctggcggtagtggtgtttgccaaaaaaaaattgacgacattatctcaatatatataccaaatacaaattatacagtaatgaaagaaaaaataacatgtttatgatcactaagagaacctaaatttccctccctccctagactagactagttacttcaatacatttgatttcaatttaggggcaatggtgatgattaaactcatttgatgaaaaaaattgatttttttttttatgataataagaataaagagatcaactatatagctatatatgtagggtcaaacttttatttattaattttttttccaaaaatatacatatgcatacatagagaaaaaagagaacctctataattggaagataataagcaaatcaaataaaatatattgatggatgtgacaagagaaaagcaacaaaagataatgcttacatatttttgtggctctcagacaaaattgttacaaccatatatatcatgaatttataatttctctaaacttatcgaaagatatgcaattgatctctatatatgtaaaaagacaagaaaaatggaccttttataacactttgttttttcccattcaataagttgctttcagatagccaataattgacagaacccattccacctgacaattgatttatcattttagttccattaattctataaatacataaatatttcaagcatgcatacacacaaaaaaaaagaaaaagttgagtttccataaaaattgaccttttctcttctctattttatttatttacaagtactcactacaaacaataagtactattgttacaatgatttatctttattgaaagcttacaaaacaagtgtatatagacaagttacttgattaatactaaagcagatgcagccttggatgaaatattttactacgacaaaaatggggttctaataatttatttagggatagtacttactcatgaaagtaatagatgttttctctctcatctatattatgggagaatgtaaattttggatgtttctaaacttggcgtctcacaaatatctaatatttttattggtataatttaatattaaattttatttattttactttaataataattatgaaaatatacacactacatatgcgagaatggaatttttttacattatggactttttttacaaattttcacttgttttttttttctagaaaaatgttgctttcacctataatagcgtcaaacaatattaatatatttttaaaaacaacactttttgtagttgtagaaataaatcgtgctacttttttttgtaataacaatgtcaaaataatatatttttaaaaacaacaaaaaaataattctgtatttttgtaagagaaaaaatctgtaaaaaaaatgtaagaaaaaaacaataaaattataaaactttgtcattttcatatatttatgaaataatccctaataattataaaaaatatccttaaatcattaatagggcattactttatggtgctagtgcctaatagtaattattttttttaaaattccacttatatgcatatataga

SEQ ID NO: 37765 - DNA, 2935 bp, Cannabis sativa
atctttgctgatgaaaacttcagttgttcttttttttttactatatatatttatttattattatggaagtgtattggatttgattgaataatatgcttaagctttccgtttcagatgctaatcagtcacacacaaatcatgaaatccctgttttgctttgatatatttttttccaagcggccttgatgtatgaatctgaagtgcaatcagttcggcaatgcatacaatgtgtttgagaaaataccggtgagagttttggctgccttggaattccgttggttgtggcccttgtgttgtggttgggttttggttgattagtccagttttcttgatttaagttcttatctcatcatcttttgatgaaaatgctgaaccgtttaatttctcatttctgtttcccttcacgtgtgacattgcaacaattctcttataaccgatgtagcagttttctctatcatttctcttctctatcttcacccgctacaactacaagctcgaactcagaccttgtcatatgcctaattaatacctacaaacttaccaaaatgcaagctctcgccatatctaatcgctatccattgatcaagtcacccaataagccccaattagttcacaaattttttctcgagcgaggattttctaaaacacatatacagtctatgatccttgtgtcatcccagatcatgttttctgatgttaacaagactctcagaccaaagattgaggtttttcagcagcttggaattgagggttttgagttgggtaagttcatttcaaagaatccaactgtattgactcgtagtttgaagaaaaagttagtaccctgtattgagattcttaagaatttttttggagataatggaaacaacaaagactttattcgaattttcagttgcagatggaatttatggaacccacaaaggttgttggccaactgtacttttctggagagttgtggaattgttggtcctcagctttctttaataatgaagaggcaacctcatattttcactctggaagattctaaactgaaagagcttgtttcaaaggtttcagatatgggttttaaaaaaggctctaaaatgtttccccatggtctctatgcagtcagtggaatcagtgatgaggcatgtaagaaaaagttggacttaatttgcagtttgggtttttctgaaggtgaatgtaaagagatgtttagaagatcaccacttctgtttagaacctcccctgagaaattgaaatttggagttgatttttacttgaacacagttaagcttaaaaggtcaaggttgattcacgcaccatggatattgatgtctagcatgaaaaaacgggtgattcctcgatacaaggttttacagcttttgaaatcgaaaaggttattcaagagagagccgagtttttactctatggtgttgcatacggaggctgagttcctgcaaaactttatattcaggtttaaagatgattcaaatgagctcttggaagcttacatgagtaatttgtcagattccagtgaccaagaagataagtcttgattcaagtatgattgcaacaaggcttctgattttagcgcacactagaatctgttaactcattaagtcttaacttttccccaccaagttgaagttgtttttggttcagttttgaacttttacatcatctaatttaatatgaacttgagtagttatgaatgcgtcaattttatgtatttgttccctgctgagaatatacaaattactttcatatgcggtgtttaatgtatgaatgacataatagaggatcagagaccattttcagattaccatgctcatgtctatatcctaaatcctattacattttttttaacagatagaagaaattccatatacaaatacatatcaacttttagagtgattttgctcttaaaaaaaatattagagtaattttgcagtgatcttattaaaattcacaatcatatttcttcagaaatactagaataatgtgtaatttttgttttgttttgtaaagttgttatatttggtttaggtttatttttgcgtgtttgatttcatttttgtcagttaggtgtgtattgaatgagcgagctttgtttgctgctcatttcaaggattcttggatttttgccagtggctatggtaatttgttgaaacttctctatgaaagaaaatttaggctcttccactttaagttactggtagaagagtctgtaagtggttttctttatttagggttttttttttttttttttcttttcatatactacgtaatatattataatgatgcaacaacacacatactaatactattacataaaaaagtacttactgccattacaaattaaaggtgacacaagcttcatattttacatgcatttgaaaactaatagtcaacagtatagtccattttgttgaagttgttatagagttgtaaaaatgttgtttgcttctcttactatttaaaattgttgattttatgttatttttaaattaaatatcaattgctaaaattcgaatattccttacaaaagtataaataacataattattacaataaatcaatacttggaaattgaaaatataatattaattcattttcaatttgctaaaaatataaacaaattgaaaaacaaaccataattttcaatatctcacacaaaatttataagtagatgtagtaactaaataaaagtttatgaaaaagtaaaaattcacttaaatattgctttttagcacatacaaccaaaactaaatacactattcaatcgttaaaatgagcgaagtggcttcaacgtgagactttgaagcatcttttagttcactttaatcatatgttaattttcttcaatataccaaaggaataaaactggacaacaatcattcaataaatcaagtttttacatttacctgcaacagaaaaaacaaaaccacaacca

SEQ ID NO: 37766 - DNA, 2151 bp, Cannabis sativa
tgaacaaataatgaggaaagaaatctcagttcgacatgttccaagtgttgatcaggttgctgacattctcacaaagtctctacctaaggaacgatttcattatcttgaaggtaaactcaaagtgatttgtatacattttcctttgagggggaatgataaccaataaacacgtgttagttttattggttagcttaatttgttatttcagttgatttcttgtaacagaatctgttattatagaattcatttgccttgtacaaattttactataaataaagtgttcctcctcaattttaaccaagctagcattcttggttatgaggcttttctctctttctctctctctctctctctctctcttattcattatttacactctattttagagtttttagaagtacattgttatcagcatgataggggctcaattgtgtattctcttactctatcaaggtcatataataataaaatgatattcatcgatacttctttgtgtatgcctctatgttatctatgtgatgcatgtttgttgcttttgttaggctattaaatgtcatttacttatgtatttatttatggattgtatgagatttatcattagaatgacttatattgtgtttatcatacttgtagttacactcgacatgtgaaatagcctgcccatgacattgtaaacgtcatgaaaatagttatttaatttgctattgaatcccattaatgttgcttttttatttttggcaacaagagatactatttgtatctaataataatgcacgtacaaatttggcctaaggagatttatccagacgtgggtcagggtgtgattgaccaattgaggatgtcttttcaaaaaagaaattgactagtctgcccatacaagtaccagggccacaagtatgtaccagagccccagaaagttctacctagtgtactgtacttttgggattaatacagatcaaagggatcctcacctccctaagaaaacgtgggtaagaaaacccatctaatacttttttaatgggtattattgaataggtcaaagacttgaatatcagtagtagatgcctctgaaggttaatcccaaagcgaaattaattgacaattcagcaaaaacggtcgcgtttggtcgtttacaccattcgataggggcaagttttgtaaattatgtggaaaatgaagggtttttcttaaagaaaaagcaagaagaaaagatcaacctaaagatcacgtggcctaaaacaaagcaatcaatgaataacgttaatgggcccacccgtgaactcacaataataaaattttatatttttttaaaaaaagaaaaataaaacttgggattcaaaaatccaaatccacacttgcactcatagatgtgggacccaacctcatacgttacttatattactattttaaaaggaaaaaaaaaaacaaagggtgggcgccaccacgttagtatcacgaggaaattactatctctccctgattatccgatgggattgtgacacgtgtctttattcgatgttttgtgtttgcatgtccacttgtgcactaccataaccagttaaccacttctctttgtttccgcgtttcccacgcgtatttctaacctctcctccacacctctattctatctcatctcatctctctcatttttctttttattattattttaattaataattatataaaaataaaaatatttattagattttctcttaataattctgccttgttatcgtttgaaatgatttttgtgctcccttttttcacacattactattatacgaaaattgaaaatttttgcaatacagctgtaatatgaatcttcacgtgtgtcgattttagtaggtgatattaaattatttcaaactttccaatgaattacccactcaattgttcttttaaatcctattcctctaccaaaattctaatttaaaatattttttcagagaatttagtatgtgtattagatatgaaaaaataataaaaagattggtaaatctactctactatttaaatagatgaaaaataaaaggatgaacaaataaaagtgtatcctaataatggtcgaattggagcatatgtgtttgtgttttatgattaagtgaatgtcccttgataagctgcaactgacatttttattaattaataatt

SEQ ID NO: 37767 - DNA, 5683 bp, Cannabis sativa
attggatgaccattggatgataattggatcggtttggtcggttatccattggatcggatgtcccatccaacaaccgatccgatctgattgaattgtcaaaatttacatctgatctgatctaattatgattggatatctgattctattagatcggttgggattgaatcggtcggttattgaattggataacgttctgcacactcctagctgctcgtgcatgaaacttgtacaccttagtcggcccgctaaaggtccgtccaggatcttgccaatacttgtgcaattctgtctttgtaggtctccgtgttgcctccgtgcaactatgggatttctaaggttggaaggttgcatgatactaacttgactggttggtgctgacctgtctccaatgtgtcttctactttttgccacgtggaggtgccaggtcaagtgggcaaaaattaagataacaagtaatattaagatttaattgactttatgggagggcccaaatttctcccaataatatccccattcccccaccatccccatttaggactctaatgattcatttcttgcctagaaggtctttcatataatataaattggttttggacaacaatacctctcccttggcacaacaatattgttttttttttttgctaaagttggcacaacaaaattgttagttaacacacttatgaagaaacaacggtacaaagaaatcaaaatcttctctaacaataaagaaattgtgtctagttcaattcttctcttgatactaagctcaacaaaaccaatgcatacttctaagttttcatagcaaatttgcactttcgtggagcttgttgaatatttttttctacaccaccaccattacatttttttagtgtagagcagtagtatcacttacttactaataatttagagtcttgaattctaatacatgttctcttcctttttcctacccttctagctcagtagcttactgccatcataattagaacaacaagaattagttggatgtgaagaaatgaaggtgacatggctgctgtgttggctgatgatttggcaatccttttctccaatatactgggaaaatatcattgctgaatattcactaaagtacaaattctgttatgcctttttagtgtattgttagcattgttttcagcaatattccttttgtttaatctactgccatctgtcccttgtatccaatggctgtaatcatttgtaaaaaaccttaaatagcaatgaattcactcatgctcattgagctgagatttatcatcatcctctgtatttgctttactttctcacttggtatcagagcacggttgtactccagtcatggcatctaatgaatctcagactccaggaagaacaccaggacaagcatcacaagccaatccaggttttgtgtcgacaggatcgttttctgcaagttctgcaacaaaagctactcccttcagcaacaccttaagtcagccattcaccatgaagctcgacagaagcaatttccctttgtggaaaataatggttttaaccattataagagtgcatcgtcttgagggatttctcaatggtctaaaaccatgtcccccagagtttcttccttcagaaagtactgaagctgaaatccttgttccaaatccggagtatgagctttggattacacatgaccaactcttaatgggttggctttttggataaatgacagtaggtattgcctcagaagtcattggctgcagatctgcagcaagtctttggacagctctagaagacctttatgaagctcattcgagagctaacatggaggatttgagaaccaaactgcaaacagtaagaaaaggatctcaatccatgacagattacttgaggcaaaagaggctttgggctgacactttagcacttgcaggggagccatatccagataatcttctcagaggtaatattttatctggtcttggtgctgagtatctaacaattattgttcctcttgaagctagaactactctctcgtggcaagaactttccagtacacttctcagcttcgacagcaaactggaaagactcacatccctctctaccaactctaagcagctggaaaacccctctgataacatgtcacagaagccatatggttcaggcttcaatccgaatcatggtcgaggaaggtttgggaataacttcaaccatggtcgaggacctgctggtgcatcgagaggaagtggctcgagaggcagaggaagaggaaggaacaacaattcgaaccacatgtcaagtatgggaaaatatgggcactctgctgcagtgtgctacaacagatacgatgagaatttcactggccagccacctaacagtgacacttctcatgacaaacaacagcaatatgccatgattgctactcctgaaacacttcacgatgaaggatggtatgctgacagtggtgccagcaaccatctaacatcagaagctgggaagatgaacaacaagagtgactatggtggtaaggagaaagtgaccataggtgatggcagcaaactatctatttctaaaattggtcatatcacactcaaaacacttactgattcacctttaattctcaaagatgttttacatgtgccttccattgctaagattctgctaagtgtatcaagattaacacatgacaacaatgtctcaattgaattctttgctagtttttgtgttgtgaaggatcaagcagggaaggtgatactgagaggagctcttatggatggtctctacaatttgggaacaaccaccacttcacctacttactgccgcagccaacacaatccttgttctttttctgttcaagttcagtcatctaaggatgtaatttctgcttccctaaaggatacctggcacaggaggctaggtcatccatctttacctgttttaaatcaagttttaaagttgtctaatgaaaagaattctgtcaatgataagctttgtttttgtgatgcatgccaacttggtaaatcccatgctttgccatttaatatctctcacagtagagccaaaactatacttgaaattatacatactgacctctggggtccagcaccattagcatcacacactaactacaaatattacattcacttcatagatgatcatagtaggttcacatggttgtttcccttgaagcaaaagtctgatgcccttgctgctttcatacagtttaaagctcttattgaaaaataaatttgaaaggaaaatcaaaatgttgagatgtgactggggaggagaatatgatgcattctctgacctagttatcaaaaatgggattgagtttcaacactcttgtcctaggacatcagctcaaaatggtagggccgagagaaaacacaggcatatagttgaaatgggcttgactctcttggctcaagctcatatgcctttaaaatattggtctgatgcttttcagacttcgatttttctcattaacaggctgccaactactgttttaaatgtcaaatcaccttatgaggtggtaaattctaaaataccagattataagcttttgaaaatatttggagcagcctgtttcctttgcattcgaccctaccaacaacataagtttcaatttcactccattaagtgtgtgaatttaggctatagtgaggttttcaaaggatacaaatgtcttaatccacatgggagaatctatatttctaggcatgtgattttcaatgagagtgaattcccttttgagcatggtttcctaaacaactataaaccagaaaatacagtcactctagatacaccacattcttggttcaatctgccctctatgatccaaaacacatccctcagctctcaaagaactcaaactgtacaccatactgaagatctcatctcagaatcccctactctgcaatctgtgaacaaccaggtcagtaatgagtttaattcagatgatacacctgttgttatctctactggtgtggatatgaatgcaggaaataccatgcctctatctcaagaacctgaacaagcagcttaacaacaaacagcacctgttgttcaccctatggtgactcgagccagagcaggtatttttaagccaaagatttactttggtcaggccagttttgatcaatccatccatgagcccctaacacttgaagctgctctgcaacataaaggatggaataaagccatgaaggatgagatctgggctttggagaagaataagacctgggtacttgtgcctttttcagatctgtacaatattgtgggatgtagatgggttcacaaaatcaaacttaatgctgatggttcactacaaaggctgaaatctgactgccaagggatttcatcaaaggccaggtgtggattttaatgaaactttcagtcctgtggtgaaagcaccaacagttagagttgttctaactctagctgtaactagagactgggaaattagacagcttgacataaacaatgctttcctcaatggcacacttgaggaggatgtttatatgatgcaaccacctggttttgaatcacaacaacatccaactcatgtgtgcaagctaaataaggcaatatacggcttgaaacaggcaccaagggtctggtttgacagattcaaaaacaccttgctgcaatggagctttgagaactcgaaggctgatacttgttttttcattttaattaaagaagccacactatgtcatcttgctgctgactgatctatctacgttgatgatataatcatcacgggcaacaattccacagaactcaatctgttcattgccaagctgaatcaagtcttctctcttaaagatctgggatccctcaactactttctcgggattgaggtgtttatagacactactggaatctaccttccacagggtaaatatatagccgaactcctacacaaggctgaaatgatcaatgtcaaaccaagtcctactcccatggtaacaggaaaacctctgtctttgactgatggtgagttgcttaactctcctacagcctacagaagcataattggggccctacaatatctcagccatactagaccagatatttccttcgctgtgaacaagttgagccagtttcttaaggccccaacaacagctcattggcatgctaccaaaagagtgctcagatatttgaaaggaacaatgcatcacggttatccacattgctccaggaactcacttaaatctgactggtttctcagatgccgactgggcatgttgcccagatgacaggaaatcgattggaggatattgtgtttttatgggagaaaccttgatatcttggtcctctaagaaacaacatgtggtggcacgatcaagcactgagtcagagtatagagcacttgctcagttggcctctgaattgtcttggttacaggaattactcaaagaaatgaaaatcttcctcactgctcaaccagtgatctggtgtgacaacttgaacgcgagtgcacttgcttctaaccctgtataccatgctaggaccaagcacatagagttagatgttcattttatcagagacaaagtgatgaacagaaggatggagattcgatacataccctctcatgaccaaattgcagattgtctaaccaagggactgtcaccttccagattccagtttttgatcgacaaacttcaagtgaaagaatcccctttttgtttgaggggtggtgtgaagaaat

SEQ ID NO: 37768 - DNA, 5688 bp, Cannabis sativa
  modified_base (4146)..(4146): a, c, t, g, unknown or other
  modified_base (4719)..(4719): a, c, t, g, unknown or other
  modified_base (5628)..(5628): a, c, t, g, unknown or other
agagagagagagagagataaatgagcaggaatagaggtgaacctttagtttctaggttagaactctcacatcttcagtagccagtcggtgttctaggcgaggcggagagaccgatcaacccaaaattagccacccatgaccatcgttccaaaatcggtgagacccacctggaaagataagtcatccattggtcgatgatgttcttccatctgggttgggaaatcggggccaagctcaccgtctatgtaaaagacgattcctcttgcacaccatctgcgtagaagacgattcctcttgagccgtctgttggcatgagagagaaggggttgtttaatagactttgacacaattttaggatttcaaggtgccttttaacttctcaaaaaaaaaaaaaaccttttatttatattacttttaattttttttagcaaattaaaaaaatattattttaacttttgatttaaccgagagaagtaatgtttataaattgatttttttttaatattctttgtgtataacgtcgctctatgtaagattggaaaagttataccagtcacgcgtggagtgacgtgcaaactaattattttttcacaaataattaaataattaaataacttttagtgacacttcatatgttttagagtcgtgcactttgggatataaagttaaatatttagtgttgaataatgcgtgtcactaaaaattatctctaaacatttattgaccctcacctttaagcgagtcactaaaggctatatttgtagtagtgtcaagagcttttttttttctttattaatctttcttttttatttgaaaagtctttctatttgtgagtattagggtttgaattaggaggacaaaaaggtctttttcatgcaatttcagctgtataaggccttgaaaatgctttgaaaagacaaattatgatgaataaaaatttgagaggttttcttcttgagtttttaaagagactattcaaacttatcgagggtatttcttgtggcattcaatctgacttatcaaatggaattctatcatcatttgtggcgttttccttataccaatgtccgtacttaactaagtattggatcgcagttcaacatcctaaagtcatgagttcttagtggctaccatattcggtgttgggtttcaccatagttattggtgtggtttgtatcatttggtatcagagcttaggatcatccggtttggtctatctttttttttttgtgtgtttttctattaaatttatcttcaattcgtgttctatattcatatttaattcgtgtcctatattcatgttctctgtttccttttgtagtttgaaactattagagtcacatattgatattgataatttcatttgtttcaaatcgtgctcttatttcaatagttttctttatttgtttgaaatttaaaaattaattctatagccacaatttaatattgttgatttctttgtttcaaattgtttcttgttttaatagtttccttatgagtttgaaaaatcttgtttctatggtttccttatttgtttcacaaatcttattttaattaatttcgaaaacaattctaaagtcacaaattttatttaatttatttccttaatttgttgtgtaatccgagattgttatagtgccacaaattatttaacctgtctcctcttaaaaataaaggaaaaggagaaggaaaattctagatgattcgaaaaaatagtctggaaacctctattaaaaattatattctattcttgtttcttatggtctagaggcttgtttgctaaaatcccacacaagtattccaaagtcagtgtttgtttggtttgtttgattagattcgctgcttgaattccctacatattactttttgataaattttaaaaaagcttaaagaagaatatgagtgaatagggtagaggtgtgagcttatttgagggtaaaagccatcaaagctgagtgaaacacgagtggacttgagtgacattttttttgagtgaaaacacgtgagggagtgtggtgatgaatttcttctataactgctctaaccatcttttgttgtagatttccaaccatgtcacaaaatatagacaaaaatacaagcaatgaaactccaccacctacgagtctaaatctacaaattcaagccttaatgggagagatgaggtggtagggaggagtgtgaacaaatacatgtaagattggatagggtagaagagagcacacaacggaggcctaggaggaataggggtaccaaagagacgaagagaatgaaagggattttgaaggcgtatttttttatgaagagtttgataggatattggcaggtaaccctagaaggtatggtcgggaatagagaagctaggaatcaggtagataattctttaggaaatatcaagatgaaaattccagcatgttagggaaagtgtgatcctgaagcataccttgagtgggagaagaagatggaatttatttctgattgtcacaactattctaaaatgaagaaggtaaaacttgttgccattgaattactaaacatgctattatttggtgggatcagttgtgcataaataggaggtagaatgaaattcgtgctattgacgcttagaaggctttgaagagggtgatgaggtggcattttgtaccacatcactattatcgagacctataacttaagctgcaaggtcttcgtcaaggttacaagagtactgttgatgagtattacaaggagatggagatggctttgattagagccaatgtggaagaggatcgagaggcaacaatggcaagatttttgaatggattgaactaagagtttgctaatacaattgaactacaccattatgtggaattagaaattttggtgcatatggaaatcaaagttgaaaggaaactcaagaagggtggttcgagttcaaagctaagactgagtccacacaatccaagtacagcaccttggaggttgaaatatccaatgaaagaaaaccaacctgcttcatcctatacacccaaaccagccacaacagccacaatccctcaaggaaaaataacccctatttcatcccatctagtgaggtaaagtatttcaaatgacaggggcgaagacacatagccaatgtccaaacaagagggttatggttattcaggaaaatgacgaggtagattttgaagatgaagatgacctagctgacatgccaccattggaagatgcttcaataaaagttgaagagtatgaggtagaatacggtgacatggctgcactagtcactagacaagccttaaactcacaagaaaaagaagaggaagaagaggtgcggcgtgagaacatttttcacactcgtttcatgtgaaagacaaggtatggagtgtgattattgatggaggtagtgtgattattaaaatgtggcaatacatattattatgtgaataatatattattatgtgtttagtaaataaattgtgtaatatatgattatttagtttacaaattgtaacctacactttgtaatatggagaggagttagaagattaattaattttgtaactttttttggttgatcacattttggtgtaataaaagagatgttatacaaaattgatgatatgattcaaaagttatgaaatatagttgttacaaaaaagattaatacttatttatataagagaaatgacgtgatttatgtgtgaattctaagtgtgatcacttaagacaatatataattagaataaaaagaaattttttgaagccttaataattaaaaaacagtagaaaaaaattacgaaaggtataaatgtaaataaaatttgtcaaaggataaatgtaaagttcttaaaaaaaaaaaaattgtttgtatttagtgtaaatttaaaaaaaaaaaatgaactagttagaggtatgttggacttaaagatttaataacattatgtatatacaaatactactccaagaaaagaaatgaccaattcaatatatatattatacacatatatatatatataggataatactatggtaggacctagcgaaagttccctaccggtagggaacttttttttttactgttgattttagatcttatagttattatgatgtaaggtatatactcttactataagactgcttgtatacaattaaaactttatacatatnataataatatttaataatatatttattataaaaaattaaataatattaataattaaaaaaataattagtttttatattttaattattattattattttctaaaattaatttaaattatttttatatagatatttatttttaaaaattcttctgatatatggtcgcttgaatgattttagatgctctttaattggaactgtatcaacttgcttctcttaaactcaatttttttggcaaaaaaaaaataataatatcaaaccgaattaattaatttgttttttattagtgacgtctcaaaagagcagccaaataacaaaataaaaaccattgaaaaaatagtcaataacacaagaactatgcacagcctaaaagtaagacaaagaaaagactaggtgtaaaaataaaaaaaaaaaaaaaaccattagtaaattatgaaaagccaaaaaataagaagccaaaaaaaaataagtttagaaaaaaaattcttttttaaaaataaataccaatataaaattaattcaaaataactttaaaaaaataattcaaaataaaaattaataaattttttaattnttaatattatttttttaaaaaatagatatcattaaatattattataatatgtataaagttttaatcgtatacaagcagtccagtctcatcgtatcgtaaggtaagagtattatatactttacatcataataaccacatgatctaaaatcaatggtcaataaaagttcaatacggtatgggacttttgctaagacctactataatattcttgccctgtatatataattaacattacatccaagattcttagtgatacaaggatttagcttcacttgtagatcgataagagtaacaagaagtcatgataaggtaatcatcacaaaaatattaaaaaatttaagtaggtataaggaggagtgtagaggaaaggaagatatattgggtttctctttttaaagatttttgatatcttaaataatttaatttattaatatttgaatataaatattggacttaattaaagacttaatgtctttcaattatgacacactgtcgtaagaataagaatacttaacattatgtatacaaatacgactccaagtgaccaattcaatatataattaacatacatccaagattcttagtgatacaaggatttagctacgtacacttgtagatctataagagtactaacaagaaatcatgataagataatcctaacaaataaatattaaaaaaaaaagtcggtataagtaggtataagtaggtataacaataaatcatggtcatatgcataacccaaattgtagtttcacactttatctccaaaaaaaaatcatcacaaaaaaaaaacaaaaatagtttggtggagaaaggttaataggactcgtaaaaatgaaataaaagtccattttttagtagtattggacacaatttgtacaattactgtttggaagtaactgtgtaatnactaggtagggtaattactagggtggtaattacacagtctagtaattacactatatttta

SEQ ID NO: 37769 - DNA, 3130 bp, Cannabis sativa
ttttttttgctatattattttggttttaaaatttgttttttaatttttttttttttttttttgatgaaaaagcttattgtaattaccatatgtcttatgaaaaaatattggaaattaacaacatatactttttctaacaactcccatttttgtgagtggtttcatcaataatgggagtgctcctaagctttacacctggctccctataattgactcacattgacgacttgtcttttttaaattaaattatcagaagaaataatttagaaaataggttaaaaaaaaaaattataggataaatatttaaatttaactttcttataaataaatattatatttttgaaatttttacaagtattaagtcaatgatcatgtattttaattggtccaccttattaaatttttatttttagtgaaacaatgtaaataattttttttttaatataatataattacattcaattttcatgaatattatagtacagtataattacactcaattttcatagaatcatgagaattgaaaattttcaattacttctaattatacaataaacgtgtaattctgtaattatacaaatatgtcaaattatataattatttttaattacacacaaatttaattacactcaattttttcaaacgtatggcatttaaagtgcaaattactaaaaaaaaatatctattctaatttttaaaacaaaattaaacgttagctcagcaaaataatgttccatagagaagggtattatttttttttatggttagttaaggttttaacgtatttgattaaataaaaagctaaaaaagaatctttgtaacctgaaatttgtttggtctgacaatatttatattttaattttgattttaataataataataataaaacataaaattattgaatggataaacttcaaagttgtatagattagaacaagtgtacttttaactctgcaaagtcaacatttcaattactagcaagtgatgttataaatataaatagttgaattagtgtatgtttataaatagttgattattgttgttgggagagtccaatagttaggcctagaataacttaaatgggcctacattatgttgtatttcaagtattgggtttataaaaattgctcatattgtctatgccccaaaattgtacctttttttatcgttaccattttatgggaatttttcccatattgttttttttctttctttatgataaccggttactagtatcaaaatagctatattaatattatatcactaataaagtaaaacattagtaatagtaatcacttattataccacatagatatttaaagagaaatgttagaagacaccattgatacctaacattatggctgcacacgggtccagttttcaggttttcggatatcatcgttaaataccaactagattgttattgtattgactttgaagttttacttttacgtatatacaagtgtacacaatgaccattcagttgatatttaatgataatatttaattgacgtctcaaatttaccaaaaaaaaattaaaggattttaccacaaacaaaataagtaagttaagtgtataaaaattaaatgagtcttttttaagagtatagtatagaataacttttacagtgctaaataggaaattttatcgaatgctctttgtggcgaggtggctgcgtattgcttagcacttgatatggtaaagtttaaagggcacaagttcattattgcggagatcgactatagagtggtgatcaattcttttagttgtttgtcatcttgttggaagattgagaactatttttctttttgctttaggttctctagttgttttgatagttgcgttttttatttgtatactgagaatttataattttgctgttcataatatgattaaatgagcttatactcacaaacaatttggtaatttgtatatttcttctattccaagagacttattttattaatgataactttttttttttaaataaaaatttggaaatacagtaatttagtaataaaaatatttgaacatctttaaaattaaaaattgaactagcaagcatgagctcaaaataaatacataaaaataaaaagtacatggaattttcaaaattggtcaaaacgcgtttttttttccctttttatgggacaagatcatttatattatatgcataatacataataattgcaaaattatatacccttaaaacaaagtaatcatattagaaaaatctaaaatcataaccactaaacttataatggtcttgtcaaatttacctcatacaataataaatggacaactagagttctatattaaaaaaaaataaataaataaaaaaaaaaaaacaactatggtgaaaattacgcaaaatataataattgtcataaatttgtcttttttttttagttatttttaattgttttatagttgatttataattatcgtgatattgatttctcgttatcttttagttgttattttacattttgctgaacaaagtgtatatttataattttaaaattttactaatgaattattataattaaaaattttagatcgtaaaattgtgaataaaacataaaagaataatatttttaaaatttccctaaaacatttatatgatttttttttaaaaaatttttacatcatcctttttatggtaagatcttggacataggcagactaaataaatagaggaaattagactctataccctttttatattgttctctttcatttttaccctcttttttaaaacatatcatttttacctatttttctaaacactttaccgattttacccctgtcacatcaatatactctccatgtgactcccttatatcagggtattttgggtacaatacatataaaaaaaagtatgtttcaattaaatataaaattagaggtagttttggttaattgataaataaaaaaggtatttctcagtatatccctatgtgcctaaggcccctagcttaggaagtcaaaaaatttatctaattttaaaaatacatattttttttattgattttaaaaaatatcaagactcaatttttttctttttctataacccactaaatttcaaaattgaccttaatattaattaaattacaccaaaccatccta

SEQ ID NO: 37770 - DNA, 4364 bp, Cannabis sativa
  modified_base (3264)..(3265): a, c, t, g, unknown or other
ttttattccattccattcctatttttattcccattcctattcctataatttcattcctctcaaccaaacgcctcctaggtgttgtaacagaattgtgtgggcaagtgttacaattactattgtggtttcaaaatatagagagggagagactatgaacaatggcttagaaagaaggaggagagcaatttttcagctttctaagtctaacattaactgtgcagaatgctctcctataacattctttatatagacaaatgaatagttatttttctccatttattaaataacaaaatatattaaaaaaataccaagggaaagtacaaccctagccgcctcatgcatagtggtattggactggatttttctcttttgcttgttttaaatccaatagacttaaaacattattatttatttatttctacaatattttataaattcttttatatttaaatactattttaattaaataatcataaataattacttaaacaaaaacataatataaatatttattattaattttgataacaaaatatctaattaataattaaactttcataatctctttcttctattttaccaacttagtagaatattcttaaaattgactacacaataatgtgaatattaattgattaaataataaattattgtaacataccgttaaatattttatatatactacaagaactatgggtccataaaattcaggctcccaataagattgatctaaaatttaacgaataagtttcctaacatattaattcttcatgacttcactatagacttcgaatttactcttaatttcatggaacaaatggtataccaaatatagatatgctatgaattttttattatttctatcataacaatcaatgaacctccatagacagtgtataatcaatatggactaaaattaccatttcagtaaagtaatttaatttttaaaatgagtgccttatcactaaatgcttcaaccaagctcaaagaaaattgtcattttacttctaacatagaagttatagatgtctatatctatgactaacaatcccactcaattatgctactgtactcctaacttgtaagcatgggctagactttagggtaagctggtaacgaacaagtcaaataactcaaataacataattagcttaaagcttaatcatatcaggattcaaattcagctaacttatgatcgactaagtgatattgagtgagaatatatatataacggtaagattgtgatatatattattctgtcaatattggtctagtctgatataaatctatatatctgattcaagtctattttaaatgtcttgaaaaatacataccactttgctaaagtgtaaatagactgtgttatcccaaattttgtctacctgatgtggcatgtccacgtaagccaagaatagagtacaggtagaatacaaccttgccagtagcaagatagggtctccataaaaggtatggtaaaatcgtcaagcagcagccaaaaggagtgaagcaagccctcaagagttgtaccaacattcttggccagctaagagaagcctataggccggccagggtgagcctataggccggccaagatctgggcacaagatggccagccaaaaagtgacatttgaataggccatagaatcatgtgaattagcaaataattaagaggtttaattattactatgtgattttgtgtctcttagtagaaattatggcttatttccagaaataggccatagaaaaatattttctaaattattactatgtgaatttttatgaatttcatgttttatgctcggtaacagtattggaatgcgacgtttggcctatagagtcaattagatatggttaagtactttagaaataatagggcattatgaatagatatttggtacattgggattgtgcggattattaggttagaccaaaatacccttaaagtggcatgttacttcatggtgaagcaaaagggtaaactagtaattttaccctagtttgtctttagtgacaaaatgatttttattaatattttaattatattagattatgctgaatagattttatcccataagtttattattacttaaaaataaaaaattagaaaaattggagaacttcttcttctctctctctctttctctctctcctttgggtcggtcacctagaactccaagaaaaacaatagttttttctttaattcagaccaaatttagagttgttgcagctaggattcatgatgtattgatggattgattcaaggttagccctaagttttcctttctctttggatttttaagatttaagctaggtttgaacatgtttttggtgagttatgttttattcgagttttggggtgattcagaattgttttcttaagttaattggagttagtagcagttgtttgtgcttgattttgttggctatggtagtgttgaaccaaggtttgagtttgtaaactcaaacttggacctttaatggtaaaatcgaattcagagagttatggctttactttttggttgaaatatgtttattgtgacttgtttaggagttctaaaaggtttaaattagtttaggatagaattgagaggtgtgtgaagtttttagtagttcttgcactgaaccagtcgactggttcagttttgcactgtggaatcggtcgaccggttcccctggcaacatgcttggaatctggttttctggttgggatccgatttatggattgtggtagttttgggaaccctagattttcatgttttagcgatacttagggtattgccatattacccatcgataggaaaactcttagttttgattttaggtccctgaaaagtgatttagcatatcacttatcaactttacgtatgttgtgacttaggggcctgtaaattgtcaagcagcagtttccactcagggttaccaacatacttacattcaaaattaaggtaagatcagtataattttatgcatatgtgattacatttttagtgtacatgtttatgaatgcctgttagattacattggaatagcggtatcaatatacatagagttatattggataccgatgaatgtatattggcttaagtactaattgacactatcacattggtacgactagagtaccgagtatgggctaattttagggtcaatagtgttgtcgcacgaacgttctagactcagtaccgtgtcagacgcagggaagggttatgatgttggggattattttactaggatctagaattactaccatgtatgttgtttaanntcctaaatatgaatttctaaaacagtggaatttaaacacatataaagttcaagaagccttacattggttgcagcggaattaaatgactccttccactcaaatctctaacccttgtttctttctatcgcatattaatatcaagatctgagtctgattctccttcagttgttggattcttcccagtcttacacactatgattgagtactaacttgctatgtgtgggcatgtactcaaccactaagagggacgaaattttttgaagaacactcaagggatttcgaaatggaagaagaagaaagaagaaggaggtctcaaaattctctagttgtctgacaatttgtaaagagaaatttgactaaatatgcttgcataacattaaattttttttccctaaacttataattaccaatatttgtgaactaggccaactttaatgttatccataaattaccctccccatttacatcacatcggaccaaaaatacataatacataaaaagcaattgggttcgatggggtccgttggcggcccagattctaccctttttttttttttttatgtttttgtacataaaaaagttagtttcaggtgaccatcagaccaccatcggaccatatctgctaccaattttttttttgtacataaaaaaagtagcatcacatcggaccaccatcggaccactatcggactaccatcagaccatatctgctaccaatttttttttttatgtttttgtacataaaaaaagtagcatcaggtgaccatcagaccatatcatcggaccaccatcggaccttcgtcttcaatctttactcattttaacaacaagatggcatcagaccaccatcagacctgacaaaaaaactaattttttgcccgaaactcaaatctagccatttttcgaccctaaatctaacatctactcacagataacaaacattaatcatacaatttattcctttgacaacatttcccatcataaatcaccaaaaaaaacaatgacaaaaataaaaaaaaaatgggccgaatagttaccttcgacatctcggaggtagtcaggtctcacggtggttgtctgtgtaggcggtgaggggtag

SEQ ID NO: 37771 - DNA, 4310 bp, Cannabis sativa
ttaatttaattaaattttagggttaacatccaataactccaattaaattaaattggatatccactcctaattgttacaaatacatcataatattgttattaaaataaaataaaattgaagtgtcacctctatttgatttttaacaggccttttctatttttatggtattttattttatttattttaatttttttatgagcttagatttgtcatattattgtaaatgtctttttaaatctcatatttaatattttaaagtttatttctatttgtgtaaagcataaacggaaaaaaatcaaatgtatcatattccaaaatccagtttttcatcaataaactaatcatattttttgtttttgatcaaaaatttgttttgattatataaaaataaaatttttatatataaatttttttattctaatctatgataatttcatcaagaaattaacttttctatcaaacaattagttttaattatataaaagtaaaatttatatgagtttttaaattttttatgatattttttttttatctataatgatttatcttatattcttaaacttttttataaaaaaatatcataatcaaatttacatgacatatatatcaaaatttttatttttttttatatatttttgtaaatagcccttaaatctattattgaattatttttccaataaatttcattttatggcaacaaattaatgatcacaatgtcgttcacctgttcctccatgctatcttaaattattaaaaagaacatggtctctataaaagagatcaacctttttgggtgtgtgtgagatatatgacaaaagggtcatttgctcttcatgtttgtgtcaagtttaggttattttttatgcaatgaattgtcgagcacctttgaaagttagatatgaaattaatgggtttcacaattattccaaccaacaagacattattaaccacatttatttgtttaaccaacttagagttgtgaaagtgaaactgaaaaccataatatatttcataagtacttttagttgattcagcaagaaaaagtactttaagttggtatttttcataattggaagtgcactacacgttattttacgtattaaaatattactaatgctattattatgctaatgctaactcccttcaaattaaagcaagtaacatacaaagcccattacacaaagcagaacagaacaaagcccataatgaagggctttcaaatgggctgggctgggctgggccgctattcaaatctcgctgcctagaagtgcgggacgcaccgcagcgcattataacagtatgtacacgtcagacagacacgtgatatcactcagtcgccattttttcgggacacgttagttcgtctaatctaattgtcagcaacgaataaacgataacgtcatctatcttatctctcatcaaactttcactatcgccactccaaaatgtaagcctgaaaagacaaaattaccctctaaatgtagcatttcaaagccttatatgtggatattttcgtcacttggttcaatggaagaggtgccccattgtccaaaccagactcctcctatggtttataaagctttacggaaaacgtacataactcttttttgtacagtgacaacaaaagattaggaagaagacaagttctgcctatgcatggcattttaccaaccaaaccaaaacaaaaccactgttcactaatatagacgcttcgttaccaaatacccatttcagagtatagtgtttttctttatcgggttcggaaaattcgaatgatcgatcaaacgaaacgcgtttagctcaaagactatttttttgctttctactgttttatatttggtttttgggaagtaagaaagagatggcggtgtcaaagatatggaggagaggagttcattacttgcagaaacggaacgccacaagtgttccttctgatttgttggaaaagggtcagaatcgcgttatcgatgcttctctaactctcattcgcgagagggcaaagctcaaggtaatatttgtataaacttttatgtttcgtaatgaaaattttgagatgggtttgttaaaataagcaggcagagtgagtgaatttatgtatcaaattttgattattagggagaattagtgcgtgctttagggggtgctgtagcatcgacctctcttcttggagttccaattggacataactcgtcgtttttacaagggcctgcttttgctcctcctcgcattagagaggccatctggtgtggtagcacaaactcagctactgaagaaggtaataactgaaaaccccttttaacagcatagctaaaattgattttctttttgggaattttcttaacatttctgatacccccattggagtattgatcaaaatgaatctggtttattttagtgtccccttctttttgggggttgagattttgatgttctatattgtggcaattcagggaaagaattgaaagacccgagggtactaactgatgtgggtgatgttcctgtccaagaaattcgtgattgcggtgtgagcgacgacaggttgatgagtgtcgttagtgagtctgtcaagcttgtaatggaagaggtaaggttggtgtaatcaaataagaagaatcaacatgtctttactttgtaatgaacgattttccaatggaggattataatgattatgtttctttgctcaaattttgttaattgaagataaactagtatgatggaaaggttggcttttggtttggtagataaatgatgaatcttgaaatcatgtctatatcttatacaggctccattgcgtccattagtgttaggtggtgaccactcaatttcatttcctgttgtaagagctgtctctgagaagcttgggggacctgtggatattcttcattttgacgcacatccagatatctatcatgctttcgaagggaacaaatattcacatgcatcatcttttgcccgaatcatggagggtggttatgcccggcgtcttttacaggtcaaatttgatatttcaaatgttccacatgtttgcattatcattagttaactatattgtttagtattgttcaagatataaagtgactgatataactgattatgtctttccctcttccgtttccagtaaaagctaacataagcataagctatagtattcatttttataaagcaatccattaagtttaatcacctgcagagatggtagttctgccatgcaaattgcaagagagctagataatattgtttgaattattgaaattgcaaagtttgattagtagttggattgtgaagcaattagttgcacttaatcttaacaactatgtaatgaaagaaaatgacacccgaagtagacatttttacttatattgtgaatggagtgccctagtttttattattctcaaggcaggttcatttctgattcttcaggtgggaattagatcaataacgtccgaagggcgtgaacaaggcaaaaaatttggtgttgagcaatatgaaatgcgaaccttctcaagagatcgtcactttctggaatatctggtatttctctatcttcacacttaaatgaaagtatactagattacaactcttaacaaatgtttctttgacagaaacttggggaaggtgtgaagggtgtgtacatatcaatagatgtagattctcttgatcctgcttttgctcctggagtgtctcacattgagcctggtggcctttcttttcgtgacattctcaatattctccacaacctcaaaggcgatgttgttggagcagatgtggtggaattcaatccacaacgagacactgttgatgggatgactgcaatggttgccgctaagcttgtgagagaattgactgcaaagatatcaaaataagaaatgccccacagattattgacatgaatgcggtctataaaactgaaacacaagttatttctcaatatttaggctatggctatggaggtggtcctgttgatctttaaaggttttgccatttcattgtcgtgtccatcttatacatgaataaacgagacttgtgcttttagctcagtgtaaagaaataaccattgatagaatcctaacagtcattattaggagtattgttggatcccctccatgtttttttctttctgaatgctctaaaattgaaggggttttctcatatatacccactttacataaatttgggaatttatattttcctccaaaaaatattggatctgtttacttttacaaccaaaatatgtaaacgtaaaacactaaatttttgatccacataatatgacattacttaaaaattatataaaatgtgaggaagttaat

SEQ ID NO: 37772 - DNA, 3456 bp, Cannabis sativa
  modified_base (1500)..(1507): a, c, t, g, unknown or other
  modified_base (3315)..(3325): a, c, t, g, unknown or other
tattattattattatttagaaaatcataacttatttgggtaatccattttaacctttgaataaaaattcatcaacttcaaggggaaaaaaatcatgagaactaagatagaaaatttaatcaccctaaaaataagtagaaaatgtgatgagaaagtaagaaaataggtgactaataattaataataggctcttttggaaaataaataactaataggccaaaatgtgtttcccttctccaaaattaatgataagctcagtcaaagaaaataaaaatcaattttgacacaatatttggatattctctctagtctattgtatgtttttgactaaatatactagcacttaattaattttttttttttaaaaaaatagaataataattttatgttttacaatatatataccaaaaaaatatcaattttttgctaaaaaaaataaataaaaagactttattatttatttatttggttaaaaaaaaaagaatataacttttgtttgtgtaaaattatataaacagaattaataaaaaaaatcactttaaattttgaaagataactaaaaatttgatgagtagttataaataaataagataatagtatcttaaaactttaacttgggttgctttaagtttaataagatggagtagttttcaaaataagatatataatttggcatttaattaagagtattgttattgggcatctgtagtgcttaataattttcataggtgacgttctacgattaattaacgatattttataaaattattttcttaaattatatgaaactcaatacttaattattacatcactgaaaaaaatactaagtaccaataataccttttaacaatttttttaattaaatataatttcaaagagaaaaaaaaaaggtaagagttttgtaagattattaataatttacgtcaaagtcaagtcattaagaaaatactttataatagaaatatatattgaaatcattagttgtgtggtgaaaaccttgtgtgaagatatgtttattcttagacactaggccgaacatattaactgacatgtaatacttgaaaaatctttatttgatgaagcttttctaaagtttcttaagtgtccaagtgatggaggaaattttaggacaaaggtctttaacaggaccgatcacataggctaagacagactagattcatgtttagggcgcacccaaccaaggggtccaaattaaagaaaaaaaagtcattttgaaaatttatatattttttagtgttttttttttaataaaaaatatacctactcttttaataagggtttaaatattttatttttttaagactcactaaagttcagggcaatcttggtctttgaacattggttaagcctgtgcactataaaaaataattatctttagtgataattttttagtgacaatataaattttttgtgactaaatgtgaatacaaaaagttatttgtgactaaaacatagtatttagatataagttgtcactaannnnnnnntagtcacaacaagtattatgactaaaaacgcatccgtagtgactaaattttgatttttgtgactaatacttttagtcactgactttttattagtctgaacataagaatgaaaatttataattttttttataataatggtatgttttcgagtgttcttttttttttcttaaattattttgtaatcttaataaatacatttatctatattttgtgtatatagttgtaatctaacctccatatcccctgttgagaaaatctccaacatatatatgaaaaggagaatctaagccataatatttaattagttattttattgactaaatcaaattattgaaattaatgtcgaaatatatatgatagtaaagataatgatgataagtattctattctattatattttatttcaagtgtttgccactacgtacccaataaatatatatataataatattaatatatatatatatatttatatgaataaaattcaatgggattcattttaaaacatataaatataatatttaagatattggattgatcagatacatcattgaccattatcaacagtctatgcacgcaatacatgtgtatttaatgtaattcaataatattgttaacattacaaaaaacttattagttactagtcatgtttatcactataaattggctataataataataataatttttattatttaagatttttgaaatatgtattataataccttatatacttttcaatttgttataaatagttcatgaattatttacaaaattgtaaattagttattttatcaaattttatgacatgtgacaaataaaataatgatataattactgcttagtcaattattacattaatgccacatatataattttacattaaaaaaataaaaatacaaattatgcattttaaaaagattattaaactaaaaattaattaataattaaaaaaattatgtaaaattaaatgttaaaaaaatttaaattattttttaaaaaattaaattatatatgtgacgttgcacatgctactgtgacaactactaaacagccatgtcatcattttgtttagcacgtgtaacaaaatttgacaaataaccaatttagaatactgtgaatagctcaagaactatttttatcgagctaaaaaatttagggttataataatacataagtcataatttaaggaggaaaatcttaaataacctaattttaatttatatagtaattgttaaatttaaataaaaattgttaaatatttaataccaataataacaaataattatctaacatgatatatttacatatattttatattactagttcatcttattttttttttttttgaagtgttattagcttattagataaaataatttatattattccatttataaaatagaccgatgctataaaattattagtttctaagataagagtccattatttcaaattagagaatgcttttacacttacctattttgggtatgtcttttatttttagagaggccaattatttggtttacattttagtctattaagttttgttattaaaagttagcgctatgtaaattggagtttcgtttgtcatgttctttgagtggacgagctattttctttgtaattgtttgcttttatcagtaaagtcttttacaaaaagagaaaaaaaaaacaaaagaaaaaaaaaaagaaaaagataagagtacaatggtgaacggctaaaagtaagttatctatagcaccaaataaaccaaatagatacaaaaatatttgtttgacgtggtggtaataataataataataatnnnnnnnnnnntaataataataataataaagggaattatccaaaattctattttttaactttttttttttaatttaccgttttgatttttaaagtggttgcaacgctagttgcaataggagtttctatacgatttttttgtt

SEQ ID NO: 37773 - DNA, 3444 bp, Cannabis sativa
aacaaatatataaaaatattatttttttttgaaatgggattataaatttttctaaaaattaaacatcaaaacaaaataaaatttcttcaaattaattttttccttcaattatttatttatttttttgaaagggtcttcttcttcatccaccatcatcaacacagaccacctccattgccattaccaccagccacctccatgattatagccaccacgcacccctaccacaaccatcacccttgaaatcataactattgcaattcattcctcaaatccaaataacaccaaagaaaccaaaacaactataaacttcaaacacaaaaaaggtttaattaaaagactcaaatctaaatcaatacaaaaaaaaaaaatatctaaattaaaagtctcaaatataaatcaagacctgaaaaacccaaatcaaagtcccaacaaaaaaataaataaataaaaaggaatgaaagagatctcaaccaggggtattgcgaccatgaatgccggtgagccaaacaaaggcggcaaacgaccattctgctactcgaatttgagaaccagggccggtcctaaggtttatgggaactaagggaaaatcaaattttgaggcctctatatatagtttaactattatgaaaataatagttctaatgcttagtgtaatggtaaaagttttacgaacttttaagagctcaaaagttcaatcttttataactacacataaaatatttttttaaaaaattaaaaagtagagtttgggaattaatcccataatctcttaatttaaagtaaaaccttttaccactacaccaaacaatttttgttatatttacttcttatttaatattttatttatatattaatattttttttttcacaatttcggggccctgagctttgggggcccaaggcacacgcctagcccacctaccctaaaggtcggtcctgccgagaactcccaaaagctccattcttccttgcctttctctcctttgcgatttttcgtcagacatgaacgatgcactaaatctccaggcaggaactccgccattgcttccctcttcgacttccccctccgacgttcgctactgggggttccccatgaacttccgtgtaggcaaccatctacaagtaaaaggatagtgttcacgtgattttcataaacttaatttaagaaaattattaattcaagtaaagaagagacgaaaaataataaatgaactccatatatttttacgtaattttgtagttaaatctacatactctacagttattatttctgagttttgattgtgtttacaattttgcaaagtttttgtaatcatagttgcctctccgttttctctttgagtgaatccttatttataggaatatgatggtgattactcaatcttatcttagtgaaaaattataattgatgggtagttaatgtccatgtttcacatataactaaatatttagataagtataaataactcttttatatttaaaatacaatgaagtggtttttaaagtgctatttgacttggtcagactatgttatttgtgagtagatgcattgctgctgtgtaatacgagacaatgcattgctgcctgtgtattatgaggaggttcatcaatggttgtgtattaataggtgattcatcactgttgtgtattatgagatgatttatcattggctgagtattacgaggtcactgactgtgtattacgaggtggttcatcactgattgtatattaggaggtgattcatcactgctatgtattatgaggtgattcatcacagactttgtattacgaggtgatttataactaactgtgtattacaaggtgattcatcattggttgtgtattacgaggtaattcatcactggttgtgtattacgaggtgcttcatcactgttttgtattacgaagtaattcatcactgattgtgtattacgaggtgattcatcattgttttgtattatgaggtgatgcatcactgactgtgtattacgaggtgatgcatcactgactgcgtaataagaggagatgttagatctttgtattacgagatgttgaatgtcttactaaaataacattccaacaacactgaaatacctaatttcacaaaccttgtgatctttatttagatgaggtcacctctcaagttgaaacccgagtttttttttgacttgtcccacaatgtatttgttgtggggatttattatctatgccatgtggcattcaattcagccttttcattaactagtctaaaaaaagggtataacaattgctccctaagttaattttttgtggtttgcacaaatctgacttattatacgttgcattcccattctttttggtactacaagcaactcgttttgtaacatacgagtttacaaaacgagttggttgttacttattcaaagtcatgtgtattacgagcatctctgttgtgtttctcatgattgatgcatggtagagtaggtactacgacataaaatatgggagtatgtactacgaccaaaagcatgagagtacgtactatgactagatgcattaggagtatgtactatgactaaaagtagggagtatgtactatgactagaagtagggagtatgtactacagcccgaagcattgggagtatgtactacgaccagatgcatgggagcatgtattatgaccaaatacatgtgagtgtgtattttgattagatgtattgggagtatgtactacgaccagaaacatgggagtatgtactacgactagaagcatgagagtatgtactacgaccagaagcatgggagtatgtactacgaccagaagcatgtgagtatgtactatgactggatgcatgagagtgttactatgaccagatgcatgggagcatgtactacgaccaaatgcatgagagtatgtactacgactagatgcataggagtgtgtactacgactagatgcatgagagtatgtactacgatcaaaagcagggagtatgtactacgactaaaagcattgagagtatgtactacaactaaatggatgggagtgtgtactacgactatggatgggagtttgtactatgatcagatacatgggagcatatcctacgaccagatgcatgaaagtttgcactacgaccaaaagcatgagcatatgtactacaactaaagacattaggagtatttattatgaccaggtatgtttattaaaacttataagcgttatgagctcgaattattacttaaaatttaattaataagtaatttgtaatacaaatactctaaatgacatatttatttatacgtataaacatgatgggctctgagtattacttaatacttaattcaaaaaataatttgtaatatatatgccctgacatgtttatttatacgtacaaacatgatggactcgtaggggtgggcatccgatccaatccaacctttttttcctcatccgatcc

SEQ ID NO: 37774 - DNA, 4005 bp, Cannabis sativa
attaatattcagcctataaagatttatgttttcgtactcagaaaacaacagataagaactgtttgtccatagatagatcaaaatcaaaccagaagtagtaaaactccatacaaccccttagcacccttagcacccttcatacatataaaatcttctagaaatttatcattttcacatgaatacaacagtacataaatttattctgataaattataatctcttcttaggattttacagtctctatataaacaacttaaccaactattaggaattaaaagttgataaaaaaaaaaaaactattaggaattaaaagctaaatgttttactgtgagtgtaacaacgaacctctctcctttcagatccttcatagaccatccagaggaaggaatgacataatgaccacctatagctaatctaatctttatctttgctttactagcagtaatatccaaacgagttgttccttcttttataagttgaaactaacagctagctatgtaaaatgtttaccttttaaaaagggaaatatttaggaacaaaggggcatatagttcaggatcatcagtaaccagtggggcatggttgatctccttccttgcatacttaagtccctgattgggtttaaaggacccgacgaatttctgaaataaaaaaacattgattacataattttcttttcttttattacgggtaaaatagcttcattaaacggctggaatcagccaaaatccaatacaatatagctaggaaaacccggccaccacacatatttataattataaaatagagctagtctaggaagactcaatgaaatttcatttttccatacatccaaaggaaatcaacaagagaagaaaagtaaaagaaaaaaatgatttgtatgatatacctgcaatcggaaaggtaccgttttatgaggagcagtaggaggagctgtgtggtttggcttggaacctacatcaatacttttccttctccttcttgataaagactttcttgtttgaacagaaactgcaggtatctttggctcaactgacactgagaaattagactcagcaggggaatttaacaaaacgttggggacagcttctaaaagttgaaactgttggacccttgattcattcactctattattagtcaactctatagtgacattgaagggttcatctaatgaaacggtaacaggaggagagaggaaccacttgtttagtggataaggaagtgtaagagtttggagcataacaccagttatggtcattaaagccccagcaaagaaaatttttctccaatcaattctgtacaaagcacaatgctggaaaatttgcctcatcagggcagaagcagggcgtcgtgataccattttcatctcattatgcttgcagatttttcttaagcaaactacaaggagaaaatgccaaaagaacaaccatttctatatggacttctcctctatgttttctaatttttgtatgcagttcactgcataccaagatagaaatatgaacctaattagcaattacaacataattagttcaactattattgtttcaaagtacaaactgagaccattactttaaaactagcccaatatgctaaaatcagttaaatttaaagactaagaaaaattagcaacgtcaaattgtatcaacaatagaatatgcagctgggtttctagtttctattcatcttaatacagcacctttattaagtggtccaactgtattaacctctccaaataaatgtttcattttcattaaatggaataacactttacttaagctaaaagtatgaaataaagcaactctgtaaaatttatgaccggagagctttatcgactatgtacagatccaatcaatactcaaactcgaatccatgagtgatacaagctttcattattctcggaattcaactcttataaactcaattttcaattattatttgatatcattcagatttcagaaccaaaactccattattacttaaaaaaaaatactcttaaaacatgtatgcattgaaataatatcagttttcattttaaaaaaatcaaaatcaaaataaaaaagaaataaaattctcataccagaatcgagtgacagtctgaagagatagctggagttgaagaagacgatggatcctgaagtggaaaggaaaatttgagaaagaagaaagaaaaagtggagagaatggagatttggatggagagaaagacggtaacagcttcggtatgaatagtattttacagcttctctttccttcactttctaattataccaaaccgacttttttttctttaattttttcatttattacggcgttaaaggcaatttctttgtattttaatttttttttttgttacggaataggtaaatgaattctacttttgtatttaaataccattctattttagttaaaaaaaaaatacatataccattttattttattattattattttttgtcatacataaatatattaaatttaattaatttaatttgttttgaaaatacataataattattttcttgatatatatggatgattataataaaaaaatcaactaattatctaaaaataaaaattatcatcaatgcatgattgtataattttaattagttgatttcttaagttttattttattgtataaataactataaaaataaagtaaaaattagtgatgctcattagaccacatctaatattttttaaatctatttagatcggtccaatccaattatatattagatgttggatttctccaacaaatccaatctaatgctatatactcaaccaaaccaatctaataaatcatttgattgtattggttttatcaaatggatataaattcttgtattgaatcagattcatctaatatttttgattcaatatttattggatcggattacatccatccaatattaattggattgattggctaaaaggttgtcgattctttcttcgttttcaattactaatatacatcatcaaatatacaactaaatactaatatacatcctcaaatattaaaacaaatagttaagataaggcagacaataataagctacaccatgtaaaacaatatattgactatattcataactcttgtgcagatcatcatgcttctattttccctaatcctgctccgggtttggtggaagtttggcaccctcctctctagaattagctcaaactaaacggtgatgtttaagtaggtctggatagcatgtgtactaaagtggtagctagaaaccatctcaatgaggtggtttgggttcaaacggatcgactagagtttttttatgctttacgtggagaagcaactgcctgccgcttggctctggaagcagctaatgtaatgattgtaatttcattattgtggactttagggtggttattaatactctcaatgggaaggagtttcgttgggtgcttgaggactactcttcttttttgtaatataggatccttccctcttttgttagttgtattttttctaatattaggagagcttgtaatttcgtagcccataatggggcaaaatgggcttttactcataagtagtatgattattttttgactacttccattcttaccaacttgttttgtgatgatcgtgtgattcaaacattttctatctatgcacgcttttattcaaaaaaaaaaaaaaacactaaaaattttactctctttttttctttatcttcctcgtagttcttaaggtaatagagtgaatatattaattcaagtttattggagtagtgaaagtggtgtattcatctacttgttagtcgttgtattcaaggaagtagttgatgatgtattctctaacaccaatggggaaaatctactttaaagaaagcatactttcttttcaattaatgattttgtatctcattattctatatttataaatttgttattcaattaataatatattattatgtttattttatcttctctattctctatatttttatctaatagagtctacacgtgtaatagattttgt

SEQ ID NO: 37775 - DNA, 4312 bp, Cannabis sativa
aaaaaaaaaaaaaaaaagagtggattagactaagtcaatggagtggccttagatcaagatatgcttatctgggtattgtggtagttggcaaatacattaatgggggacccacgattttcgttcttcacattgtggcgcacgttagcatgtacttcgttaacgtgcgcggttttctaacacctttgtttttaggttctgtattccatggatggagtggggtgagtgtgagatagagaaatgtttgattaatgattatgaaacgttgtcgtattgatgttggtttgttttgttttgtttaggtgggaaatttcatacactatctgtcaacttttctggctcgactggtggttggttttgtctcagcatggcggctagctctgctgagtgtggcggtgattcccggcattgcctttgccggaggattgtatgcctatacgctcaccggtttaacctccaaaagtcgacagtcttacgccaacgccggagttatcgccgagcaagtgagtctcaactttggttttaccaaaacaacaatctttcatttggtgtcgttttgttttgctgtgttttgttacttttgatattcggtttttcgaaattttgtgcagtaatttatctgtgtgtgaaatgatgagttttgacatgtgaaaccaaccacgcatgaaatgaaagttgtttttgttttgttccactaaactagcctctcttcctttcaatctttttgtttttttattttttggttaaggaatataatataagataatatagaaagaagaaaacttcacaagtgtacgaatggtttactgtttgggaaaatgacaatgatgattgtggtttaagcaaaacgactatttccttagttggatttggactcttttggcctaccctgaaagaattcaaatagtttaacttgacaactttcattctcttgttggtgatatcccatgtgccctgttagccaagttagttgtttttgtaccctattagaaataatctcacattgctaatgcttgaaaaaatagtaccatatataaaatgaatgagctacttctccagttgccaagttataattggacggttttcttattttgtttaggctattgcacaagtacggacagtctactcatatgtcggcgaaaccaaggccctcaattcctattccgacgccattcaaaatacattgaagctcggttacaaggctggaatggctaaaggtttgggattaggatgtacctatggtatcgcttgcatgtcatgggcccttgttttctggtatgcgggcgtgttcatcagaaatggccagagtgatggaggaaaagctttcactgcaatattctctgctattgttggtggcatgtaagaattcaagcttaggtttttatacatttgcattttcggtttgataaactgtcgattagcttactataataaatctaacaggagcttgggtcagtcattctcgaacctcggggcattcagcaaaggtaaaacagctggatacaagttgatggagattatcaaccaaaagccaaccataactcaagatacattagatggaaaatgcttggatgaggttaatggcaatatagaattcaaggaagtgtctttcagctacccatcaaggccagatgttttcatttttcgaaacttttcgatcttcttccctgctgggaagactgttgctgttgttggtggaagtggatcaggaaagagtactgtcgtgtctctcatcgaaagattctacgatcctaatcagggtaatgaagaaattaatcaattatgctgttgtggataaatcataaatgatggtggtacttattttaacttgttgtattgatgttttgtgttgggtgagcaggacaggttttgctggataatgtagacataaaaacgttgcaattgaaatggttacgcgatcagattgggctggtgaaccaagagcctgcactatttgcaaccaccattttggaaaatatactctacggaaagcctgatgcaacaatggctgaagttgaggctgcaacttgtgcagcaaatgctcatagtttcattactttgcttcctaatggttacaacactcaggcaagtattcgatataaaccttaaaacagttgtatcgttgtaggagtgaatgttaatcctgtgtactttttatttcgaaaaccaggtgggagagcgaggggtccaactctctggtggccaaaaacagagaatcgccatagcaagagctatgttgaaagatcccaaaatccttctcctcgatgaagcaaccagcgcgcttgatgcagggtcagagagcattgtccaagaggctctagacaggctcatgatcggaagaacaaccgtagttgttgctcatagattatccaccataagaaatgtcgatagtattgctgttatacaacaaggacttgttgtcgagacaggaacacatgaagaactaatctctaaagccggtgcctacgcttccttaattcgattccaagaaatggttagaaacaaggatttttcgaacccttctacacgtagatcacgatcatcaagactaagccattcgctgtccacaaaatcattgagtcttcgatcaggcagcttacgaaacctcagctactcatacagcactggtgctgatgggcgtatagagatgatttcaaatgctgagacagaacggaaaaaccctgctcctcaaggctatttcttccgccttctcacactaaatgcccccgaatggccttactccattatgggagccgtaggctctgtgttatcgggtttcattggcccaactttcgccattgtaatgagcaacatgattgaggttttctactacacaaattccgcctccatggagagaaagacaaaggaatatgtgttcatctatatcggtgcagggctttatgctgtggttgcatacttgatacaacattacttcttcagcattatgggagaaaatctcactacaagagttagaaggatgatgcttgcaggtataaaatattacacaaattgccaatttttgttctgataataacatatctcttatgattttgattttggttttttttttgttttagccatattgagaaatgaagttgggtggtttgatgaagaggaacataactcaagccttgtagcagctcgtttggctacagatgctgctgatgtgaaatcagccattgctgaaagaatatctgtaatacttcaaaacatgacatcactcctcacatctttcattgtcgctttcatagttgaatggagagtctctcttctcattctagctacatttccacttcttgtccttgccaactttgcccaggtaagctcactaccattatttctttttcattttctctctttttaatgtatggatgagtctattacacacaacaaagccttggtgcttttgaaaaatacaaactttattttctttatattatattattggttaaatgagctgaccaaaatgtccagcaaaggcatatggactagtgtcagttactcatatacataatatatatatgtatgtatatttcccctacgtgtgtcagttgttgcatctgcctttatagtctacttctttggaatctaaccctcaccacatctttagcattagtaaaacgacaaaagctctcaatcaaacgtggcaaatgtacttttgctctgcacgtgctttcttccggttcaagtgcattaaactcttcgagaatagccacttccaatattatattacattactataatcttttcttaaatcacagcaaagaaaaaaaagaagaatattgaaagattcgatgaccctctccactcatcaacttccataagtctccaatgtctttctttatttttctttttcctttttgtgggcacttgttcttgttgattatacctcgagtttactacccttttcatgattttttcttaaataatcagattcagtcaaactagagtctatctgggtgggtttaacctcctcttcttctagttatggcccaatcacagttcattttagttctgtgttaacattggtattaaacaccttacaaatagatagagatattctataatagttatcaaactatattatatgtaacataagtcttttaacaaagttggtagtgcatgagttcatttaaatagtgcatatagttttgttgagattggtgcatgagctttgattacattttttatctccattcaagaaacccatgtgagtatttaatcacaagaaattctggggcccgtgattacttaaatcatattttagtaccaaaatattattttacattaaaaggggtgtcaggtttggtaatgg

SEQ ID NO: 37776 - DNA, 2185 bp, Cannabis sativa
  modified_base (2144)..(2145): a, c, t, g, unknown or other
tatgttacatattaatttgttacatgtatttaatctacacattatattattgataaataatataacatacggactgccacaatttaaaaaccgtataatttaaaatatataaaaatgatttgtactatgatgagacaaggagggcctccaatcacttatggtgatggaccacagtactgtatataacgtcatctcaattgtcaaggcatttttagtccttatattggagtgtgtaattaaattcatcttataattatgcacttttcacgtgtagtaatcaattatcaaaacaacagtccaaatttaaacgtatgaatcttattttgaaaacgcaaggatcttgaccttgacgtacactgaatttagatgagtggtggacaatattatcacgtaccccacttgtgtgatcatcattattcttttttttttttgaaaataaagtgttgtaactttgctgcccataatgtggttaaatgggcgctgccctaaaatatttcaggtttcatggagatatcctcgataccaaagtgatcatcattattctctatcatatatgtatagaaagatgaataaatgaacatgaacaaaacttcattatatatcctgaatatacatatcaatatatgtgcatatatatgctactatttttctcttatcatttcaaccttttgtgtgatgttgaatcgattaatgtctaaactatggttgagagtattaatagcatgatcaaaacttcatcaattaatacttttattttttaatttttttattataaaaataaaagtaaaatttatattgtttgaaaaacaaaaatttattctataataaccacttttaattttttaatgttaaaaataataaataaaaatgtgcttaaaaaaaaaaaatgattcttagttacaaaattgaaaagtgaaaacagttttataaaatatgttttcagtaatatttttacttttctaattaaaaaaaaaatagaaatattataaaaaagtgttaccaaatgcaccttaaatctattcattgttgcgaaaattatgctacgctagtgcacctatcgttaacaaataataataacgaaagtaaagtatcattcctgtaaggactctaggtaaataccaatcaattgaattcttatttttatttggcaatcaaatagataaatttgaaaataaataaactaagcaaaaattaaataaaacaaacaaataaaaaatttgataatggatgtgaaattagggatatgacttcaattactttaattacacaattgttaatactaattaaccattcttctatccctatgtgatgacagattataaatcaacctaaactcttttcagatcataaagttcctaaattgcatgacaactattgtatctctgatataataacatagaatttgcattaagcaataatctaaaagttacataagctatgtaaatacttttgtatcacatcaaaatctatgttcattcatttagagtatcccaatattcacttttcagattttatattaggatcatcaattatggctaaggtgaccagtctcaaataggtattaagcacaaagataaataaatcacataagcaagaaagaagaaatgatcaaataatattaactcatggaataatctcaatcaatattcatcacattaatattatttattttagtttaatttgaatatatataaatattaatatattatttgtattattattatttttttattgttatttttaaactttacatttatttttctcaaattaatacatttctaactttttttatgtataaaaataggctaatcccgagacgggagaactttctagtgtcgtagacatttttcaaaagttccactacaagaacaataaattgcgtaatgaacacatcatgtaagtaattttacatctttaaaaaacttgttatatatttaatttcaattcaactcgaacagtttattaaaaaaatttgtaggccaaaatagttgagattcgtgaaattcaaccagcgttgactgatgttcccctacattacaatgtagaccccacccattttcccgcagacatacttgttatgacacaagtgttgggtgagctgtaatatcccaaaaaatatattgatattttaattggacatattnnattaaatatgtgattaagtgggtattagagtaggattata

SEQ ID NO: 37777 - DNA, 4187 bp, Cannabis sativa
cagatcgtatatttttagtgaggagaggatgatgttatgttcctcctgctgattttctttctattgtaatggttgaatcttcttattaataaagttatcattttccttccaaaaaaaaaaaaaaaaacaattctcttttcaaaatttccagccacgtgtaaattatgattacgtggcaaactgtacaggcttcaacccattttgctgagttgtcactatctaattggttcaactaacgaaacaaacgaaaatcacacgccaaaaaaattactacaaaaaaatcatttcattacaaaaaaaaaaaaatcaaaagttttgagaaaaaaaaaacaagggagagacgaagacccgccatggcaactcggaagagagcttcactaagctcaaccacagagccaccacagccaaaagagaacacacaaaagaaacccacttcagatgagtttcaaatttcaccacccaaatcagctgtaattctcgttctttcgcttttcttctttctcccttacttttacctgatcttccatcattacaagatcgagcaagagttgaagaattccattttgatcaatgcggctcttagccttattgggtatttcatcaccgttaaattgatccctgtggcttcgagatacgttttgagagctaatctctttggtcgtgatatcaataagaggggtactcctcaaggcgaagttaaagtgtgagtttttatcttaaataattttgatttgtttttatggttttgtgatccaaattgtgtattgggtctttttaaattttggatttttagtgagtaatgtaggctagatttggtttttgaattaacttaggtgtaagtttcagttccctgatcttattttctacctaatatttctaatcatgttttttttttttttttcaatctaattatattctgggaatgtgctaaaaatttcatctttattggcattttaccataatttcaattcactttcttttaagaaaaatctaggtgaattcaaagtttcatgtcaatttgaaacttactgttgttgtttgtttattttcctttctttctttattttcatataccaaagaggcttaattttatgatagattttcagaatagtatagatttaactgctcactcctacgatatttcttacatatgaaaatgattttgtgttttatttatttgatttaatagactataaagcattaagacagttataaggttattatcctaaattagttgcaactagtttgtttgtagttcaaatgtgaaacagttaatcatttggataatgtgtcatgtcatcaactcaatcaaatcccaaaagtgatcaatattaagttcatctatgtatgacattttatctgatttttgtgtacaattgaactaaaattcttatatactgtttttcatggccaattaacagaatgttttgtaggtggctattgatctttaccgttatattgctatgaacccgacatttattatcttgtgtgtgattctttcatcttgcttaacagtgtcacttgtgcttatcaggccagagtcattgggtgttgttgttggaactgtgttcttggtcttggcagtcgcgtttcagtattttttcaccgtagattctaatgtaagtaaattttttacacagctcacagacatttattttgttttatacttcataattggatgaaatgcttgcattaggctgaaaattgaaatataaaggtgtttgcctaagatgacacattttgtgcaatgagtgaagaaactaatgctaatagtagtaatgaagctcacttttggggaagacttggggtaaaaaaatgtagtcaattatgtgtatgatgttaaggtgtgcattcactttcacgtgtgagacgattcttctcgtcctgtaagggagaaaatgacgttttggtgacctctcacaaggatgagcggtaacctaatggcattgccatgcagaagttggatattataggtttcaaaatgtgatgaagaatgtgatcaacatgaaatgtataacagatagatagatagatagatatagaaaagaggatgactgaacaattttttttctttctatcttctttgctgataaaatcttccatggctcatgcagtgggtggttgagtacaatgcagcattagcgtccatttgttttatgctctttcttggatttctcgatgatgttctcgatctaccttggagggtgtgagtatttattataattaataataaaaaaattaccttttcgtatgctcatttcattttgcgggacatgtcttgtttcggtttatattttggtattaatgtaagattctcctggaaattgtgaagagcaggaaactaatactaccatcatttgctgctcttgttctgcttatggcctatgctggacatacaactattgttattccgaagccttttattccatatatcggtctggaggttatgcatctaggtatgtttcctgatgtggaagtaaaaatattccattattttcaactttctttctaatacatgatgattaacatctcaaactatcttccatctttgtatttggattgttagtcactggtttgataattaatttacctacttaatccttacgagcaagttttgatgtgtagggtggatatataaactatacatgttccttttggcggtcttttgtacgaactcgatcaatatacatgccggtataaatggtcttgaagtcgggcagacagtcgtcatctcagctgctgtaagtataaccgatttttaaaacatttgcggtttacaaaatacaactgttgcttaccgaacaatttatgatgcagattgtgattcataatatcatgcaaatcggggcttctacagattttgactataagcaggctcatgtattctctatttaccttgttcaaccgttactggcaacctcgttgggtttgctcgcttacaactggtaaactgctatggtattctgcttggaatattgtttgttcttcttgcatggatgtgtacttaaagatgacatttttcatggttttaggtatccttcttcggtttttgttggagatacttatacttactttgctggaatgactatggctgtagctgggattttaggacatttcaggtaatccttacctttcatattcctatattcaaatgttacagcttgtcttaccgatatagttttttacgaacgtacttatcaacgcgtatctcttactgtattttttctccaatttctgtttatgacagtgagacgctcctaattttctttcttcctcaagttgtgaacttcctcttatcacttcctcaggttttttatcccggtctctctatctttctcgccccctcaaccaccctatcttgttctacctctctcggtttaatcagaattctctgtatgtaagcattttaattttgctgctataaacatcttttgtcagcttgccggctacattccatgcccacgacaccgcttgcctcggtaattttcagtcaagactatgtttggaaccatatcattatgcaatgtctttttttaaaatccttcatttcattttttacttttcaggtatgatcctgtaacagataaactaactggtacaaaagacggaacactggttaacttctttcttagagtgttcggaagcatgtcagagaagtcactctgcatctatcttcttgttctccaggtgtgttactttctcctataaccatataacccgaaatactaattgggttcatttgaggccaagttttttcgatgatttatgtgtttttatttcattcaaacaggcgctcgcttgctgcttttgcttcttcctgagatacattctcgcgggttggtacaaataagagagctgagaacaaaaccgaaagcgattttatatatcttcgattcaggaaaacagaacaaagaagcttaacaagccaagatcatttgcttattgggttggtgttttcttctttacacaatttcctggttcagaaagtggagcttaatgccaggaaaatagaaatgatgatttttttttagaggttgagattatttaaaaatttcagaagaaatatgatacattgagattttattttgactatttaagttgagaaaagttgatgatcatttaaccattttggaatctaggataggatatgtcaaaacttgaaatcaaaatcaaatctaccatgtact

SEQ ID NO: 37778 - DNA, 5901 bp, Cannabis sativa
aaaaaatcgttaataatagagagaaaaaaaaaagagtaataattaatatgaaaattattatggagagttcatccacttctatactactactcataactacctttggtatctcaaagaattacacttcacgtcaacccaattaccaatggaccttccgatccgcaagttcagccttaaccttctcgcctggcttcaccgatctcgtcgccgtaagtatttctacatatatatatacactcaattatggtaaaattcagaattaggaactattatttctggggttcctttaataataaatgtttgaaccaatttgggtaatattgtttttgcattaaatttgtgtttttgtgatataattttcactttgtaacatgtcatattctgtacaagctgcctcactatatctggaaatatagttaattatcgcattatattaagaaactgtgaattttcgttttctgggattttgattttggttggaatatagtcatttgtgggaaatgtagttatgcgtgtacataattaagcactttatatgacataagaaggtgctggtgttttataatgcatgttatagtgagatattttggtttcaaattgtataactttttggcatttctgtttgactgtacatttgtagttgtttcagtttatgttagtaatatttctaattagtttaggatttcaattggatgtaagaacctatataagtggtgcacctgttaacagatcaaatggtttctcttgtaagagctgcaaaggagcctaatcttcaccctttttcttctctcccttaaccttctgcccataccatgtggtatcagagcaggcttgtctctggtttcttggctgctggtgacctgaaattgtcaccctccagccaaatttaagaggtctcttcggattctggtggagcagagctttaattatcattccacctcttatgatggcttataacaagcggttaaatccatcctaaagaccttgtctagtctggcagtgacggttgatatgtgccacgacaaaccagtagcaaatcttgctagagtagtcccctcaagttcatgtctcagttgagactaacaacaatggtgattactctcactacaaggacattgaagattgaagaagctgctagaatggttgcgcttactgctgccaaacatccgatgctagacttgaagctttaccatatgactctccaatcgagggcaagagtaaaacatcctggtgcaagataatagaaggggattcatgatttaattttgctaaaggacatcctggttggtgcttccaatgttgccaacaatgtgtccgatgttccttttgaatacaatatgaaggtaggcctatcccattttgatgatcaattacaaaatatgattttcttagattgattacataaactgtagaggctgtctttcattaggatattcatacagaaaatggagtaaattggtagcatataagagtcaaaaggggaagtagatgtatggtggcaagtggcaacagctccaagatttctgactgtttcattcctccatctgggtttttagcagatactttatatttaatatcaaaattgcttcctagttttgatgaaatctggccaattatgcacaagaattagctgattctcaaggtacatcagagggctaaagattttcataatcatttggtttcacttctgatttggagttctaatgagtaaattagcctacgattccaattggttaactacttatgtcagtgcctacatgagtgctgctccttcatgaattgattatatatattcagtttggtgaaattttcactcatatggctttttcagccatgcttactgaagtgtaaaaatttccctgtgccaataataatattttggcataagttgggagaggcatagaccctggagatattcttgcgacttgtgaaaacaagaaatattaatacattggagttccatttactttatatttagggtggagaaaattacatttggtttgtcattgcattgatgaaacatatctaaaggtcattatcaagttttgaaaacgttataaagaatttctaggcttagatatgtttacacggagtggctcgtttcaatacgtaaatttgtgcatttacatatccactgtactacttgaaaattttaactatagattatttctttgctgcaacagccaacacataaaatcattttatcccatttgttttcccattagtttggtttaaattaaaattttctgttagatgtttattgaaccaatctacttgaatatatctctaataagttgtcatttcagggcgtctatcatttatcaagcgctatgcatataaagatataaagagagcaacagatggttttcacagaattgtttatagcaataatcacagcgctgcatataaggcaaaatttcgagatggtgggattgtattagttaaagaaattacagacataaatcaagaaaaggaagtgttctacagagaagtccaactattggggcgtttgcatcaccgccacctccttactctccgtggtttttcttttggtcataagaagaggttcgatgctaatctctttgtcattcatgatattgcataagctaaactaacacgtatgttttgttgatgtgcttaaatctttgttcaaaagcaagtctttaatcttataaagactttgttaatcttataaagattaaatctttgttaatcttaaatggaaaaataaaaaataggctccaaatagtttatcactctgtgaatgttgcaagaggatgacactatgccattcttataaaggatctgaacacctattttcagagattgacattagttttactattttagcattgccatatttctgttaattttgttcttttacagattctttacttggatagttatgtggtgtcttgttcaatggcacactcttggtgtgatttgtagttatgttgcattacttatcacatggatgaagtaaagtactgagaatgtttcttttgtaatcttatttctttattttttttttcaatcaaagcttaaacattggaatgtttagtttgtacttacccttaaatacaagaaattgttctattttacattgtgataaataaaacaatttagatagatactgaagacttttaatgttttcctgtattttgtttgtggttctaatgattttctctttattggcccatctccttctttccctaaataacaagttgttggattcttgcatacacatgaattgcaaatggactgccctgtgatcatctttctcctcttctcttcttgtgtttttgaaactattcaattatcatctcactctttttagggaatttgaattctggctttgtcaaagtttcttttcttctcttaattggagtaagatgtttacttgtagtgatagaattgtaacgataagtcttgtgaactgatacattagcattgttgtgaattagaaaaaccttgaatagtttaatgagtatgctgttcattttaatatttggttagataaatgatggcacttattttttcatgtgtcctgttccagagtacatctatgtgtccgctaaatggattcttgaaccgtactatccacatcttaatatatagtataaatatacattctttaaaactgagatgttttctatggattgacagcatgtttaactatttaggctaaagtcgatctttgaaggagaatatattatttggtgcctgtcaaattaattataacttttgttcctattggcagattgttggtgtttgacaacgtagaaaatgggagcttgaaggagcatcttaatggtatatatgtatatatatttatacatttctagattttgtaattgtgtatgtgtaacacaaatttaactcttatcattggtttttgacagatcctcttagaactccccttaattggaggactaggctacaaatagctacgggagtagtagctgcattggtatgttatatacttgtaccattattctagtgacaaatgataacaagtcttatcatgcatacagaattctaaagttgataaaatatcaaataaacaaaactatggcatctgacttgaaataactgtggatgtactgaaaattttagaataattacacacctttgcctaatctgtaaggtgtaactttatcttcaaaaggtgtaggttcaggttgtgtcttcatgatgattctatgtctgaacctcctctttagcttttttttcctccctagagggaaggataattaaggttctcaagcaattttcaccaatttgcttgcattgattcgggatattttaacgtgtaggaacaatggtgaacctcattcactctcttctaaaaagaaaaatcaaaacatgtgagaagaaataattgtagaaggtttagttaaacagatactcaacaaatgtgtacaaagtttaagctgacatatttgtccaatttataacatttttgtgtcattaactctcaatctttccatatctaagcaggtgttatgatatgacaactttttttttctcttatgaacgttgagactatacaaatagtatgtctatgctgggttttgtttctctaacaatttaggctcaatgtactaatttttaacgctggatatcagagttttgtcttgttttgcattttaaatttgaccattgttattttgaatgcaggaatacttgcttctcttcaatgatccaccaatctaccatgtctccataaactcaagtaacatcatgctagacgagaatttcaacgcaaaggtagaatctttacattcctatacactcacacttctattgtagttcacttttcaaaatccaagttaaagcttccctattctttccacagctctctgatattggcattgttacttctactggagataatgaaacaatgcctcatacctcatgctcaaaaggtaggctcattttactcatcatattcataccgggcattttcggttaccctttttctctttattgtaacatttttggtttatctctgttcctgcattgtatttgtagatagtatggatcaggaatgtagtaacattatataccaacttggtgtgctgatcttggagctggttactggtcaatcctcagataatggtgatgctgatttggtgcaatggatccaggagtctcgattccgaaactccatccataacatgatagatcctgatctgggcaatacctatgataatagagagcttagaagtcttctggctgtagctaaattatgcattgtatctcgggaaaaaccaacgttttcagttctacaaatatttcggtattttcagaagaaggtagaaattccacagtgaataaatttaactctcaaagcaactctttttggaaattttatagtgatttttttttattcaattcattggttgtttcattctataatatttgtgtagtagactgtagacacaatagtgggatcttcatggaaacctgacaatattcaaagagaaaaaaagcagaaataataataataatatatgtatatttttttacgttatctgttattttctattaaaagcacatatttttttgttgaatataataatgtttattcttatcatttgcaaactattactttagtgcagcaattgaaaccgaatcagaagtatagtattttattactttagtgctttggaagtaattgagcatttagtctaattactagtaattacacagtaagagaattgatgagtataattgagacctttcaattatttcgtgtaaattatgtcagttaaacaagagaattatttagggtgtctttggaagtatcagtgtaattactaagtagtataattactagggtggtaattacacagtgtagtaattacgctatattttaaaatgcaaggtgtgtttgga

SEQ ID NO: 37779 - DNA, 3268 bp, Cannabis sativa
acctgagtccctcgagactcctgagtgcactccactgcaccctcagctcgtagtgacttccccaccatgtcagcataggtgattttgtcgtcaagaataatcataagatcatgtcttaagttcggatttaacccatccaagtacttttctttcttactagaatcggttggcacaattctcgaggcaaacatagccaatcgatcaaactgagttgtgtattcagctgggtaaattcttttctttttgcactcctgatcgcttcattgtagtactttgcgttgaacacttcctggaacttttcctaggtcatagtagtaacatcacaggtcagggacaccatattccactaaaccaaggcatcttcttgaagctaaaatgtggcacaagccagtctatcattgccagtgatacccgtgaaattaagaattcttgtaataacagtgagccactgctcagctttcataacatcgggacctcccagaaacactggaggtgcctgcttgcagaacctttcgtaaagtggtttcattcagtgcattgcagcaacctgtcttgcctgcacagtggggaaggggctagctgtatttctggagctggcattgcaggagcaccctgctgcatcaagcgtttgatttcttcctcttgctcattaatttttgcttccattgcttaaaacatgttttcctattcctgggcaacctgcggcaggttagcttctcccagaccgcgtgccttgcctatagggcctctgcctcaaccaagaacatttggaggaatttttactccctaaccgccactggatctgactgagttaccctgactccttgtgtttcgcctggcgtccatactattagaacagcctatgtaaccaagagctagtctagtcagatcgtgatcaagaatgatttactaattaccgcttatttggaaatttaaaagatgtgcctactcaactattaggctactaacatgcttctaatcaggttttcataaaacatactattaaaataaactagtattaaaataaactactaaagcaataaagggttactaaactctcagctgagctgaacactgataatgattgtacatgtcgtgacgatcttcaaaagacaacttggcagctctgatacaaaattgtaacaacctaatagtttaggcgtgttaacgtgatttttaacttaactgtgcagctcgttgctactcaacgaatttatttaaaatcgtgattaattaaaaattttcttgattaattataaacactaaaataatatacttatattaaactaggatcctgttttacaaaatatttacaaccatttcaagtgcaagtcacaatagtttgccgccaagcgactacataaaatatgcctcgctgtcccaaagactgtacgctccaagcctaatcgccccgacatgtacaatcctcatttgcttgatctcacggctgctcaaccttagccttgcccttacctatacatagaaatagaaaatgtggtcaaaaaacttagtaagaaaaatataaataataacatggaaataacccggattataatcaggtgcccatacacacagtcataaccctatccccgtgtccaacacgatgctgagtctagaacattcatacgacaatactatcgaccataatattatcctattcttattatgctagtcatactctagacatactgatgcaatagtatcgatcagtatctgagccaaacatacatctatcagtatcaaatataactctatgtatattgataccgatatcgatgtaatctaacaggcataaataatatgtacgcaaaacatgtaatcacatatgcatatcattatactaatcttacctcattatcaaatttaggtgtgtcagccaacctgagtggaatagctgccatcaaattataggcccctaaatcacattattcgtaaaactaataagtgacatgctaaatcacttctagggacttaaacttgaaattaaaagtttttcaatcgataaacaacaaggcagtaccctaaataagcaaggaatcaaccaaccaaagttctgaaactaacacaacttgacaacacaaaaaattcgagaagccaattaatgatcaggttaaccagttttacaaggcctgtaaaactggttaaccaatttgcatcaagtacccaaaaaatttcaataccttgtttagttcgtatccaaacaataccaaaccttctagacctgcttaatgtaccccaaagaacatatttcaagcaacaaaacaacctaacatgctcaaaataaaaaatttccattaatgaccaatgtttgagttctaaaactcaaaatttgtctaaaaaaaacaacaagccctgaaataacttcaaacaagcttattaaacatcaacataactccaggatacttcaataaaaacaaatcacaacaatagcaaccctaaatcacaatcatgcaaaattcaacaattcaaacttaagaaaacctggagaacaaagttagaaagttttaccaagcttgacacttcaacaaggaagcaagaaaagctctcaattgtaagagaaataaccctaattgttggacttttcctaggggttcgagagagagagagggaatgaagagagagagagagagatggtaactttgatcttttcttatatttttataaaaatgaaataaaaaaaaataaaataccattattaactcatcaaaataagattactaacttaattaaaatctcactaaagacaaaaatctcaaatggcaagaagactaattttcccttgcttaccccaaaagcaaccctaccacctaggggtagtttggtcaaatctaaaacctcaactattcccgacattctcaatgtctaactatcataccctgctatactaaaaatactaaaatgtgattctaatggcccaacaccgcgttcggatgttgtcgggcacaaaacatgtaataatataaaattctgaagacggcatataaaatgcattctaaattttaataaatctccataaaatgataaatcataaatatcatgcaagttgcataatcaaaccgtaattattttgtaatttccaaattaaagttaagcggcttttacataagagtttagaaaaccttacattagttgcagcggaatataatgactccttctgtccagatctctaacatttgttcatttctgccgtagagtattatcaagatctgagcctggatttttttcctttttgggtttggttaccaccgtcttactcactatgattgag

SEQ ID NO: 37780 - DNA, 3206 bp, Cannabis sativa
  modified_base (742)..(751): a, c, t, g, unknown or other
aggtaagtaatttatcttgggaaaggcatgaataaagatgtgatttttttaactggagctagttttacatacatttttataaagtgcattttggtttgggtttgtttattgtggtaaatctttgagtggaagattcttttgagtatatttcacaggtctgcctatggtatctgactggatttaaagtgagatttttgtgatgtaaacagtagcagtgatctttgtctgggttttttttctggattcaaagggttattgtaatagtatagtgaagaagagtggacatgggatggtggtaggatcctgtgtttggtgatgtgatgactgacaagaagttttatttcttttagctatgctagaacgataattgtctgtgatgctgtcttttgtgagttgtgaatacttttattgttattattattattattattagtggacatgttctgaaacaaataacaacattgccaactgacaaggaaccatattctataaaactacctgagattccatgcccttttgtcaaccttttgagtaagagagtctcttttgaggccatatcttatccagttttctcttccttaaaacatttttctccagaaatttgggaactcggttttagagttttagtacacaacacaatggcttttgcatgaaatgaataatgtacgagagttgtttctatggacctaattgtctatattctgttctcttgtctccccccctctatctctctctctctctnnnnnnnnnnctctctctctctctctctccacactaatgtaatgtatttttttgagttccaacaaatttcaacttgtgtatcggaagtattatcttttaatttgtaaaaaagaccccctttggaattctgatttagagaattcaatctaaatgtgatctttctcttgttaaaagaagtgttttgtgaatcagcaggtggggcagctaacgagaaactgccaacgtcaaatcccgaaattggtgctacatctcatgaaggaaagaagcgaagacgattagcattcgagggggacgaagaaaccagtttacagaatcagttgattgatgtgttggagaggaatggtaaggcagtggcttcccaccttgatgctcagaacactcatttccaactcgaccgagaacagaggaaaaaccattctgatagcttagtagctgttcttaacaagcttgcagatgcattggttagaatctctgagaagttgtagttgcagcagtcagaatctctgagaagttgtagtgtacataacacaagctcaccatttctctccgaggtgagtgaattctagtaagggcattcacatttcttctagtcttcttcttttacaatatatttttttatttatattacatgtcaccttctgtggcatattatcaccatgatagtgtccatacacagatactgatttttgcaagttataaaagggtttaccaatgaccacatttcttccgttaatatgtcaccacagtcgatagagaagtttcctttgtatgcctatgcgattgcacaggctattgacaatatattttgataaggcgactgatacagtttctggccaaattcattgctttcttaaaaagacttaataattcatttttgtcatcttctctcttccccgacttatgtatgcatactaatcgtgtgtgtgtgtaagagggagagagagagaggtaaccgtagcgtggggcctcttttctttcaaactgtttaagtatttcataatcaccaaagatctttaagcgttgaagttataatgtcataaagattttatgggccagttatgtctggtgtggtggtgagacaatctaaatgggcatatttaaattgtgaatgcatgtatattctataacgactaaaattggaaggtaaggtaatgtagggcttctccttttctcgcccaatttactcaaggattgagcttattcaacaaacctttttagtctttattcttttcttcaaagcaactggagtaaaggaagttttttttttgtaataaatattagaagacaaaatcgtggtcaagaatagtagcaacagaacgaccgatccattattgtcaccatatttaacaagaaacatatttcaacgattgtatatatttcaacaaacttgttgggtcaacaagcagaggtattcttatacataaccgtttaatgatccaataagtaaagctcgttgacattgttttatataacatgaaaaaaagttgctgagcaacaaaatgtaacatgcttcattcacccaacccagcaagcagtgtttttcttatcaagtatcagtcatctgaccttgacatttttcgatacctccgacctgcgttttggattgcaatgccttcatctgcagcctttatttcagtctcatcatcatcatcatcatcatcctcgactccactatttacactttggacttctgctattgcaatgccaactgggaattcaatttgtttgtcacctttcttgtgcttcacttcattgttgtcaatttctatgtctctactatcaccactagtcttttttttctttggaataaaagtcacagaatttggaagatcagctacaccaccagaactctccatatctgaccctgattctctattcaaactttcaacctcattatcattaacttcactagttgaagcaaagctataacatctgtacttagaggggtttactaaatagtcaggtactccaccacaagacttgttgttgttgttgttgttgttgtctgctgcatttttcggaaatgactcttctttgcattcattttcgaacccaacgtcgaacctaacccgtttaggtgacttcaaagcttcctcatgctcttttcttttcaaaatagagttaggcatagcttcaattttggtacactttgcatttgggtctgagactgagaccttgatatctacagaagaagccagactagaactaggggttttggattcagtttcagcttcatcttctttcagcctaagcttggcagctaggtgattggctcgtgggtcctttttgataccaagcacattgtcggaattcaaataagacccagtttcagtaacatctctcatatacaagcgatccccaacaccttctcttcctgaagctactttgtcaaactcatcttcctcttcctgaacccattttcaacagttcaaatataatttaaatcagaacccatatatgataat

SEQ ID NO: 37781 - DNA, 2361 bp, Cannabis sativa
tattacctactaatcctcttcaagtgcataaagttacaatacccaccacggttgcatgtattctcctcatattgcctgcaagtggcttcacggaagtctgtcactggtgagaagtccacaataatgggacgccctgtacattgattcccaaattagaaggagttaatagaattcaacatgatactacgcaaaagagaaggtccctgtaaagccaaaagagagaagtcaaactaaccagcataaaatcttccagtgagattcctcagtgcattagcggcgtgctcttcctctctaaattgaacataaacattacccacctgccaaaacaaataccaacatatgattaatccatttcagaaaaaaactgacccaaaaacaaaagaagtaactgtaaatatagcattaaacaaattccataccatgtggtcagctaggttgtcacagatgtttagactttcaatttctccatacttgctcaactcctgaaaaagatcttcatagaactcctacaaatcccacacacaactccacattatcagaacaagtaaaccaacaacttttttcatcattatcataaaaaattacattcgaaagatttctctgttgtgaacaaacaagtgttacattgtattatactatactttccaacgattgtatggatataaataagataattctaaacaattccattgtcaaccaaagggtactctatccttccatcactttgacatgtatgaatataaaaaacaatatttacattattatcattagtttgtaaatccaaatgggggactacattatttatagtaaaacaaaaagtagctccaaaagggattttcaatctcaaaaacacagagattattctcatctgtcaaagtttctaacttagtttcatcataaatttcaaaagggttttcttatattgtatctcgttaacctaaaatcaatctgtcgttttagtgatctttaggatgttatagacgtaaaaacaataaaattaccatgcaaattacaaaagccataaatcaccacccaataattagttaacctaagctactcattcagctcaattaagcatcaacttatactaaagaaaccctaattcaaccacaacccaaatctgacctatactgaaaaaccctaatcaaacaacagcaacacaaatcctaaaaaagcagtcttacccttttcaacaattgaatctacaacaacaaacacaaccctaaaatcaaaatcccaaaacaaaaattaacctcgaagtgtttctgcatctcgcgggggtcgataggctggccttgggcatcgacgccgggagtaatcatatcgggtctctgatacatattggagagtaaaagagtcgggctaatactgggtttggtatgtagcctagaacacctatctccatggcgacaagcaccaattttaaagtaaaaggggcagttaaccctatctttctccgtcccaaaaatggacgccaagtgctcagccattgttaactttcctcctcttcttcttcttctagagaagtagttgagctccaaaccctgagtctgtgaaaaaaggatcaaatttgtggaagaagaaggaaacagttgggtttttgtgtgatgatttttttatatgagaatacttagattagattagaagaaggttcgagaaagaaaggagtgatatctaaaaacgacatgtcgtattgagtgaaagcgtcgttttagttattatatataaataatgaagtggttggcataacaagtagctggtttgcccgagaggttaagggggtagacttaagatctactgcacataagtgcgcgtgggttcgaaccccacagccagcatttttttttttggttttttattgattttgtaaccatataaaaatgagctaattaggttattagacatgatatttgaaatgaaatatattgactatatgtagtgtcactaattgtgctagcatcctctaattttccatttggtcaactcatttaatgaagaaatcatataatttgtatgtataaattgcaaccgtaatgctgctaatttctcataattgataactatttggtaattatgtatgtaattcttaacaattgattatgtctagagttagtatttgtactaggggtgggcatcatccaatctaatataattgaaccgaaccgatccaatctaatctaattacaaaaagttggatatccaattacaattggattagatgctaaaagttggattctaattggattggatcagttattggatgttaatttcaatatccaattaaaaaccgatgcaatccaattatatttatatgtcaaaaaattatttatataacaaaaaatattgaaaaatataataaat

SEQ ID NO: 37782 - DNA, 3962 bp, Cannabis sativa
ggttcagtcaacgctttttgattggctgtctgtaatttttacgagccgtccggttcgtacgggaattggcgagtcgagttagccaactcctacatctaatttccaaaaaacgaaatgaaaaagttccgttgaattgttgggacatcaaaaatacagtaaatatgtgctgttttctatgatcgatacaacccatgtttgtgcatttaatacagataaaatataataattaaaaataagccaaatagttttgactttttttaaaaattgagctcagtattttaatatctttttggcaattattaaattctacgatacacatccataggcgttgttgtagtcattaaatataattgtaaatgttagtagtcacatgtggacctatcaaatatgtgtgtgacatatgtgtgagaagccaataaactaatttaaatgactttttgtgagtacaaagataagtaggtgcatgtgattttgtcccacaattattacggtttctcaacattttttattattatattaaagagtaattatctgggattaaaataaattgagaaaaaaaaagtaacagaacttttattttatcttatttgaatttgatctaacaacactccatattagtttaatacatttatagttatgatcgtgagattgctatatcaactagcacctcagttttctgactaactattctgttacaggagcgtattccgatcgacgaggtgtttgagcaactaaaatgttcgaaggagggtttgtcctcagaggaaggagccaacaggcttcagatctttggtcccaacaagctggaagagaagaaggttatatgtttttctaatgatcttatgaatagaatactatagtacaggctatatgtgatattatgattactgatcattactatgtttatttttttttcttcttcacaattaacaggaaagcaaggtgctgaagttcttggggttcatgtggaatcccttgtcatgggtcatggaggctgctgctctcatggcaattgttctcgcaaatggagatgggaggcctccggattggcaggactttgttggtattgtttgcttgcttgttatcaattcaaccatcagtttcatcgaagaaaacaatgctggaaacgcagctgctgctctcatggctggtcttgcgcccaagacaaaggtaatacaagcatgatgcatatgttacgatcccaagaattatatgttcgtctaattaagaaactggtgcttactcttcgtgaggtgccttaataatctctttcaattatttccaatcatttggatgaagatgatgctgtttaaggctttggtcccagatatacttagttctatttttgaatgagtggtattactccaattccttaagttttatatataaatatagagttgatggagatttcttgatataatctgattggtgattcatttctgttgattcattagccaatataaggaatagcatctcatattattatttgtgttatggtgatatctacaggtgcttagagatggtaaatggagtgagcaagaagctgcaattttagttccaggagacatcattagcattaaattgggagacattgtcccagctgatgcccgtcttcttgagggtgatcctttaaagattgaccaatctgctctcactggagaatcacttcctgtgaccaagagtcccggagatgaagttttctcgggttcaacttgcaaacaaggtgaaattgaagctgttgttattgcaactggtgtgcatactttctttggcaaggcagcgcatcttgttgacagcaccaaccaagtaggacacttccaaaaggttctcactgccattggaaacttctgtatctgttccatcgcagttggaatggtgattgaggttgtagttatgtacccaattcagcaccgcaaatacagagacggaattgacaatctcttagttctcttgattggaggtatcccaattgctatgcccactgtcttgtctgtgacaatggctattggctcccacaggctgtctcagcaaggtgccatcaccaagagaatgactgctattgaagaaatggctggtatggatgtcctttgcagtgacaagacagggacactgactctgaacaagcttagtgttgatataaacttgatcgaggtgtttgtaaaggatgctgacaaacaacatgtgatgctgcttgctgcaagggcatctagaactgagaaccaggatgccattgatgcagccattgtaggaatgctagctgacccaaaagaggtaaaagtagtttaagattcatactctagttaaccttgcgaatttgtactaccatgccatgataaaaacagtctaaaagtatttgaatatttttgcaggcaagggctggagttcgagagattcactttttgccgttcaaccctgttgacaagagaactgctttgacttacattgatgctagtggaaactggcacagagcaagcaagggtgcccctgagcaggtgagtcatcatattgtttccttagcccaaaattgtgcagtacaaaataattttaaaggttgtttcctaatcatgaccctttttcttaaacaattaatttaaacagatattgagtctatgcaactgcaaagaagacttcaaaagaaaagttcatgctgtcattgataagtttgctgaacgtgggcttcgttcgttggctgtttctagacaggtttatgaattgttcttgcttttttctattcttcgttaaatgtttgttacttcattatatgctcacctattgcctttatatcttcaggaagtgccggagaaaagcaaggagagtgctggcagtgcatggcagtttgttggtctattaccgctttttgaccctcctagacatgacagtgcagaaactatccgcagagcacttaaccttggtgttaatgttaaaatgattactggtaaatggaatcttctttttgttatgatgacttataaaaattgaatagtatttaagcatttgttgctatctgttatgtgcaggtgatcagcttgccattgcaaaagagactggccgtagacttggaatgggaacgaacatgtatccatcttcttccttacttggtcaagacaaagatgcaaacatagctgcaattcctgttgaagagttaattgagaaagcagatggatttgctggagtatttcccggtaaataatttaattatatggctagtttacaataattatctcttcacacactttcttgtttttgtttcaaattggaaattttcatgtctcataacattttaaaatctcctgttcagagcacaagtacgaaattgtgaagaagttgcaggagaggaagcacatttgtggaatgactggtgatggtgtcaatgatgcccctgccctaaagaaggcagatattggaattgctgttgctgatgccactgatgctgcacgaggtgcatctgacattgttctcactgaacctggattgagtgtcatcataagtgcagtgttgacaagcagagctattttccagaggatgaagaactacacagtttgtttctgcacattttcttttcaaattaatttttttacttcgtttttctttggatgaatgttcatgacttttttccccttattgtgtctttcttcagatctatgcagtttcgatcacaattcgtatagtggtaagtaaagagaaattaggaaacctatgtgatgatttatcatatatgagtccttgatgaattcatgtttttttaataaaattatgcagttcggattcatgttcattgcactgatatggaagtttgacttttctccattcatggttttgatcattgccatattaaatgatggtaagtgcttataaagtgcaaagtacaatactaatttttaactttatgatctatgtacttcatctatgatacaagtaagttataacactgtatatattccaattataaagggacaatcatg

SEQ ID NO: 37783 - DNA, 3048 bp, Cannabis sativa
gagagagagagagagagtacaaaacaaaacgatctaacaaattggggagctaaatctccaaaatttcagtataaaaaattgatcgtgtcaaactttaaaattcaaaaaatttagccacaaattacccacaataaaataagttgaccatataacaaatattgagtccatcaatgactcttaattaaatcaattagaatttctaataatattacctaaatattccaaccaggtggactaaaggaagcacttactcaatattatattctcctttaaaaaaaaacaaaaaaaacaaaaaaaaaaaaaacaaaagtacttctaactagtagtaaagttttataattttcaagatatttttcaaccctcaaaaagaattgtcacacgaaaaaaccaaatatgtcttctattaaaacatggatttaacagtacgtcaaaaaaaaaaaaaaaaaaaacatggatttaacaaacctactaaatgaagcaaacaaagtaaaaattacatttctacctaattaagtaatgatgagaaagggagagtaagagaggttgaatattagttttatttgtttttttctttttaataaaatgttaaatatgagtatttctaatggagaaatactttaatagtgtgtcaaaagactatacaaatttattttatagtaaatgttgtattaaatttgacacaatatttgtagtgatgaaaaatttacatcactataaatgtactctttttctatttactttaaattatttatattagtatattagtatatatttagtataatacaaaaatatggactatttatattatttttattattttatataataaaattaatgataaagttattttttttattttattaataatataacaaaataataaattttacatcaaattttctcataatgcattgaaataaaatactaaaaattaatacaaatatatcataatattattatttttttttaaataaatataacccaatgtttacatatcacaatgtcattttttttttgaatcaaagtgattttattcaaaagcttttagtagcatcaagctcacttaaaatacaatttgacatagaacaagtccctcaataaacacaataaacaaccttattagcagatcgttttacaaaagctaaagacacattatttaagaagaaattaaaacaccacaggtagcacaatgtcattttaatttagattttttttttttttttgaaagaaccccagttcgatagattaaaactaaaaggaattgggattcatagggggaaatccctcccctttgtagttctgcctactgtcttgagaaagaagagaggacttagccagttcatcaacaatagagatacattctcttttcgcaaaaacaacattacaacaataaaaagaagacagcaagtgcaatattaaggaaaaggaggctgataacttccaatccggagaacgtttcgcacggatgccctccaccaaggccttagaatccgagacaagagacacattgtcccattggttcgcagacgcccagtgcagacccagcagcatagcctgcaattcagcatcaagagccgaggaacaaagactgcttgaagtgcttatccaccattcatcggagcttttggataaggcgatcataccacaaccaaatttcccatccttaaacgatccatccactaaaatgcatctttcagtggtaagtcgagggaaggataagcgattggtctgcaagggaatcctttgtttagagtccaactccgcaatcatttcatggaatttgttgaagatttccatcctgacagtgtccacactgaaccgagagtcagtgttatgtacaagaatattcctgttcttccatatgcaatccatagtcacaccagagagaattagcattttggttatcagagggggatccaatgaggaacagagattgcttaagagatcagcaatgttgtccccgggtatttgatcaattctcacgggtaaggggccggaaaaccacagagccgaggcaaacttacagcgggcaaacagatggattggagattcagggaccgagagaaaaactggacaatcagtagagagacccagcctgtcacccgtgggaagaaccttcaaacaagccctccaaatcatcatgctcacacgcggatggattttcgagtcccaaatccaattccacaaaggatcaatagctccgaatcggctcttctgatccacccaataagctcctttaacactgaaatttctagtagtggattccttccaaataagggtatcactatcagagttcttggcaatcggaatctcagctagcctttttgcctaactcatcaccaaacagaaagcacaagtagccaatgttccaacatctatttctccggtacatcaagtcggccacacatctaagacatggagcttttggtctgatgctctccaccagatcacgaaattggtcatactcaagccagggtatccacggttgccaccagatatcgatgtcttcacctgaggtaatgatcgaacaagccccagcttgtatagtctttctagcattcagaatccctttccatataaaactgtaagtattcttctctttaactctccaaaaggagtctctcggatagtatttccctttgaagatgtggcaccatagtctgtccactttgttcgccagttgccaagctaatttggaaagcaaagcctgattgatatcttggaaacggcggaagcccaggccacctctttgtttagttagataggcaaaattctttcttgtagtaattttgtattttgtattgcttcccacatcccaatattttttgttaagtgatggctgaaactgatcattctttttttgggttctattttatgtagccaaaacctcatcttgacctgtcataatttctaaacaaactgaggtttttttttttcgggaaatttgcggcaaaagtccccaaaaagttcagtttgatacagataagtccccaacctccaaaaatagcggcaatagtcctcaaggtcagattttttatttgtccgttg

SEQ ID NO: 37784 - DNA, 2477 bp, Cannabis sativa
gttctaagaacataacaaatcaaggaggatgatcagaaattcacttcctccttaatatcctctaaatttattatattaataaatagttattcttttattttaataaaaaaatattaaattagtagcgcgaacagcggtaatattatctaatttaatataaatctctgtgtacagatagaatattgaagcgatttaaattcgtaacgttgttcagcatttttctagcattatacatgtacagtaccactaatgaaaatgaatttttttctgcattatatatatctgtaaccttttgaatatttaattgttttccaaaaatggaaagaaaacatcaaaattgataacatgcatggtcggtgggagattggtgcctagtaaaaagtaaactcaacatttctttttaaactaaagtaaactcaacattaaaaaataaaacattgtccaacttaacccctttttctgttcaaggaaattgatcatatatatatatatatacatatatacatacactttatgtataataaatattatattctcagttgtaaatacacttgatgtcacattcatgaaagtatatgcatcctagctacttaatcaaatatgttcgtcagataatcataattagtatgtgtgtatatatatatatatatatatatattaaaattatggtaattataaatcaaataataattaatcataataaattaaaatcttggaacagaagagtatatatataattatggcatgggatagatgtgtagtgagaggaacgtttgtctgagaatctagaaaagggaaagtgaaaaatagcccaaagataagggacttattatgatctcttttcatactacatcatcattctctcaataagaaccccccacccacaccacgccttattatttattaatttaatgctcaatgacagaaacctatcacatatattttcatccattactatatatagcttatagttcgtagtagtactactactactacatttactactatatactactacgtgtatacacacatatatataggagatcagcattatcagattaattagtagacttgcaataaatcatcaaaaataaaattatatatttatataaatgtctccggtgggattaccaccgggtttccgttttcatccaacggacgaagagctagttaactactacctcaagaggaaaatcaacggccaagaaatcgagctcgatattattcctgaagttgatctctacaaatgcgagccctgggagttggcaggtatgaatatacatatgaatttattttattttgtatgaaatatgtatacatgtatgaatttaattaagttttgatatatatatgtgtatctgcagaaaaatcgtttttgccgagtcgagatccggagtggtatttctttggacctcgggacaggaaataccctaatgggttcagaacaaatagagcgacgagagctgggtactggaagtcaacaggcaaagaccggagagtgacgtgtcagaatcgggctataggaatgaagaagaccttggtttactaccgtgggcgggcgccccaggggattagaactgattgggtcatgcatgagtatcgacttgatgacaaagactctgaagatcatacctctgcaattcaggtacattaattataacgtaacttaatttctactacgtacgtacccggccatgcattactgatgaacatatatatattaaactcggtgtatttatttattttattattattatcataataattaaactcgttttatttgcttaataattactagtgcactaatcgtaatattttgcatgtttatttcattaaattatttttttatctggacttaattcattaatcattttaggaattttttttttatttttacactttaaaatatattttttttacattttttgcaactctgcaacttaaattgcaacaaaaaaatcgtatagaaactattattgcaactagcgctgcaatgatcactttagaaactcaaaccgtaaattaaaaaaaaaaaattaaaaaaacaatatgaagtaatttcccatcattttaattagtcattttgattttatatttatgtgcatataatatatagtttattattggctagctatagcgaacccttttaatattgaataagtttttcttaatcattgaaacaatatatatataatataagaaacttctcaactatacattgaatattttatatgttttttcctttttgctgattatcattgattcattattatatgcgtgctgtacgctatatctctcattttaaagattttataacaattattccacttatttgtaattacatatatatcatataagattgtttgtaaatatactaaaatagcaatcccttctctttacgctttagcatttcacatttttaactgtagaattataacacgtgtcaccatttgacttggcaagcataaaggccggta

SEQ ID NO: 37785 - DNA, 2501 bp, Cannabis sativa
aaaaaaattgttcatccatgtttattattggaactccatactaattgtaccatgtttttttttaaatagtattgttcgtaccatgttttttttaaaatagtattattattcgtgacatgtcagttatctatttaatttacgatttgacacgtcatttaaaagatgagtctgacagattctgacaaattaacacgtattataagacgatcgatatgtcagatgacacgtagatttataactttttaaaaagcgtgccacgtcggattcactttatttaatatatgattgtaactgtaatagatattgtgttaactgaaatcctaacttacactttcttttttcttctttattttgaaaaaaatatatatttattttagtcaaatttgattagtaaagtgtaaactaaaaagtggagaaaaatcgtaaatttatttaataaaattgatttttgttttatgagtttgatatcatataattttgttgtattaattaatgaaattggcttttccagcttaagaaggacaaagtaaaaggatatttttagtgagatttatttttttattatttttatttttttggtcaataattttttggtgagatttagaagacactttctgactaagcttccatgtgcacttatatgcttcacatgcattagtacagatagacaaatatataattaaatttatttattaatttataaattaaattattatttattttaaaatacaaaagtatattttctttcaaaaataataataattaatacccacacgcaaacaaaaaaaaatgcagagtcataattataaatagggtaccctgcatatatatgaaaatccaagtaaatctagcttttgatatttttgtttttttgttttttttaaaagggaaatattttggatccatgtagttgtacttattagatctagaaaaattaattaacattttcacttttttagattgagacatttttattagacaaccattttggtaattattagtttaatgttaattttttaataattacaaattaaagtgactttgttttcaaaatttacaaacaagcccttttttaattcctaaaagttaaaagaatttaataaatggataaagtagggggacataattgaaaacaattattgatcgaggtcccatagttgactttgtcaaaattctaaaaagaaacaaaaataattaaaaaagtttggaatattgtgtaattttctgtctacaccatttgtcataaattattttatttatgtattttttaaaaaatatattaattattttataattttactatcttgatattttatgaattttattggtgtggtgggaaccatgcatgtggatgtggtatagatttttatatattaattatcgacgtcatataattaaaattattatattcgaataaaaaaatattcgaattttctggaaaatatgacgtcatatcattattccgtgttgacgtcatcagcttgaatcatgtggttgatgttgatgatttcattttttagtggcccaataaatacttcattaatattattattccaatttaattatttatttatttttacacaaataattatatattaatattatcatttattaacaataaaaaaagagagagagttttggcattattaaggtagaatagtcatagtgattagtgccaagatagatcaatttgtctttttataatttattattatttatttttatttttgttttgtttttttacctaaaattactataaacgtaacacttctttctataatgataatctgactattgaatgttatcaaatctcattaaaaaaataccgttttatttgaattggacattcacaaattatgcctaaattttctatttttatatatattttttatttaacaaatggttgtctattcatccatttcagaataaaataaaataaaatggttgtctattcattaatttcctattaaatagggatatgttcctatatacattaaatatatatatatttatatataaaaatattttatttgaaaataaatatatattatttttttacttggatagcatggcattgacgatactaacatgaatcacgaggtttaacactagtgggctcattgtggtccaattgtttaatataatgggcctcattttcataaaatcacttgggcctacataaatgtttccataccaacctgcacttgactatatttacataaattacattatttgagggttttattttcaccacaaaaaaacttatgaatatatcatattttaataatttttaagtcaaattttttcgcatagtcatgtacgttatatatttaaaatatcaaaaaaaattttaaaaattcaaagaaaaaattacacaataaaactaaagttcaaatagtgtattgcaagcgtgactataaaataatatgtgcacatattatttttttcaactaatcacatttatctaaatataagtccacttttatatatatatatatata

SEQ ID NO: 37786 - DNA, 2083 bp, Cannabis sativa
agagataggattaaaagaaagccaagtccaatctcagcctgtgaagagagtatgctgagagttgttatgtttgaatccacccaaacacaaagatcttccaagtacttcctgcaagcaaacaacattggttattcataatacaagtaagtttcttagaaaatccatagtaatgacaaatatcagcaggccttttgttcatgaagagaatgactcgtgccatgcatagtaaaatgaatcttcaatctttcagatcatgaataattaccaagaatccttacactgaaattacacctaagaatcctgaaatgttgtagaatatagcccaaagtccaaaattaaattataatcaacaaaatgttagtactttttgttctacctgtaaaaggaggatcgactgaagttgcgcctaaggaatttggtaacatgttcaagagctcgacataaaattggaatcagagcaactgcaacagatatcgaaacatcaatattgcacaatttggagatgactctaaagtggaaatatgaacctactaggacaatttgataatacgatataaaagaccaggtgctcacatttaaggcaaagttgtgatgagacaaaactaagacagtaaataaagtagataaaatcctttgtcgcaattatggactggaagtaaacttgcaaagctggtaggttccaagcccttggtttctgaaacaataaaaaacaagcatatgttaaagcaaacaataaacagtgtcattaaagaaatgcttacaaaggtgtcaaatgtaacacttaccccgtatagtgagtacaaagagtacagagaggaacatgctgttcccataaatgaaagacgatatgccctatgggaaagaaatttaggtactaatggaaaaataccaagcatagccacagcaaacacctgcagggtaagaaaagaaattataacaaaagtagacaaaaaaaaaaccaatatacagaatacaatacacaagtgctttgattacctatgtgaaacacctaaaaaaggaattagattcttcaacttctttgatatgtagtccatttaaaactattaatgggcaacatattaacaaatatggtttactcagttaactcaagcaatcaaaccatttcctactactacatcttattgttgtcagacattgacataccaatagcccatcacttttacactgaaaattttattaaaactagagaaaccatggacacaaaggctgctttcaaagataatatacataaaacattcacatattacacattgcgtataatgaaggaataattgtcttccccaacccactcatcacaaaagtaatggattggaataacatcagcaccaccttctatgcttcctcaaagaaaaagttctgctaattgagaaactcaaataagcaactttaaagtcaatggtctgagttggcagatccaaactcagactctgaaaaaaaaagaaactcaaataagcaaaaatgaaacatgctgcagcatatatccctgggacagttaaaattctacttaatttgtaacaactcggattctgtgtaagggagatgtatgacattttagtagatgcctaaaagatatacccatgcattgacagagaactgaatggtttgtcggtcccagcgtaacgaagttggggggcctgcagctggtgatgctcctgaaggttgggcagttgaccctacagaatcacagataacgattagaatcaataatcactagcaaattcaatttgatgattcagaaaaggattatcattgttgtgtctcaagctacagagattagattgggaggggaaactataaaagaatctctaccagtgctgcgaggacgaggttggacattaggttctggcctggatgacggtgaggcagatcttgctggctgagaagaactgccagaagacatcgcatctagactctctacctcaagatcaggatcctgtacatgtaaatattaacaggatcaaatagtcaatctaaaaacgatgccaaaaccaagagaaagctaaaattagatgtgaaatcaaaataaacgtgtgctatataaatttgtcttgttactgatgaa

SEQ ID NO: 37787 - DNA, 4729 bp, Cannabis sativa
  modified_base (337)..(343): a, c, t, g, unknown or other
  modified_base (4438)..(4465): a, c, t, g, unknown or other
ggataaaatacattgaggtgtagactgataaatttgtccctacttgatgtaaatcatttataaggatctttgattatttaaattaaaataatgaataattaatactgcatctatatttagaacatatagagtgttctatgtcatcaggagtacaattttgaatctatagtggagtcaggaggaattaataagataggaaatttacttggtaaattttgaatctacttattaggagctatataagcccatggtcccgacactagttgagataatattggcttgaagactcaattaattagttataattgaccgattagaattctaaattagactatgnnnnnnntatgaatttttactaagcaatggcctaattaagaaaaaagagagtatttagggtctattttgttaattaagacactttgcaaggtctaattaataaattagttaaataaaaaatttatttgaatattaattataattattaaatagatagatttgacatttaaaagattaaaattaaaatatgtcatttgtgaaagaaaagataagttgttaaataaatggcaaaattgaaacctttgggatccacttataggggcggccacttaaaggattattatgccattattttatcttttttaaattccatataatttaaatcctaaccctagaaggaatcttataaatagataatgataggctcttattttcataacttgataactcaaattcactttattagacaaagtaagagaggctcctattagattttgaaattccttccctttcttctttaaaattttcgaactctatagtgatagagtacttgcccactcaattcaagtcaatactcaatcatggtgtggaagattgtaaagaatttcatcatttaaagagattcaggttcaaatcttggtaatactctgcaacagaaaggaataaaggttagagatctgaatggaatgagccattatattctgttgccaccaatgtaaggttttctacaactttatatgtgtttatttcattattttaggaaattcatttaaggatgttagatcatagattataatcaacatatatgttagtaaatctagatccttgtaaaataagttctaacaattagtccattcaaacctcttcttgcttccttttagtaaattaaagaagggaatacacttatcagttgactttgagatgaacctactaagtgcaacgattcttctggttaggctttgcacgtattttatctgggatggtgaattcatgttttacaatgccttgatcttctctagattcacttcaattcctcttgagttgacaatgaatccaagaattttcttgattagaccccaaaggcacattttagaggattgggcttcattctatattcccacaggatgttgaagcattcctctaagtctttcatgtggtctttgcatttctttgacttgaccagcacgtcatcgacgtagacttctatattgttctcaattatgtcatgaaacatacggttgactagtctcttgtttgtagcacctgcattcttatgttcgaagggcattactatgtagcacgcataaatcaatatgttcttcatttgttgcgtgcatgctgatttagttgtagtcaaaataggcatccatgaatgtgaggagttcatggccgagtactttcacatccactagttaatcaattcgtggtaaaggaaaacaatgtttagggcatactttgtttaggtcagtgaagtagacgtaagttctccacttaccattcagtttaggtaccaaaacagggttggatacccaaactgggtagaaaaattccctaatgaagttgttctcccatagtctttcaacttcttccttgagagcgttggagcgctctttatcaaggagctcgtgtttctgttgcataggtcagaagtttgctttgtctatgttaaggtcatgacagattacctgggggtcgatcccaatcatgtcctcatgcgactaggcaaatatgtcttgatttctcttgaggcaagccatgacaatctcgatcaaaaccttcataaggtttgttccaatcttgacaaccttggtcgggtccattatgttgaggggaagttctttgagttcctcgtccgggccaactcccgagtcaatttccctaaaatggggatgaattttgtccccatcttcggtgcaccgtcaagtggttttaggtgctgtctccgtcttctccataatttaaactccaaaggtctttgtcgtctcttcgactttcacgagagaggtcttgttcgtccccctggtgccaagatagtagaaggggtcttgttcgtccacctcggtatcgaagcagtagaggaggtcgtcttgtttagagataatgaagtgttatagcactcgtgggcagttccttgattcccaaggagacaatcgataccagtcttcattgaaaacttgatggacaagtggtatcttgacgagatagctcaaaggtcgtatagggctggccttctgagcataatgttgtatggagacttcatatccactactatgaacgtggccatgatggtggtcttcattggagcagtgtcgactgtgagtggtagtttgatcttaccacatggagctattgcggctctgctaaaaccatacattaggtgctcgcatggcttcaggtcttcaagtgacaaacccatctggattaaggttttcttgattaagatgttcgaggatgctttgtcatcgatcatcactcttgtcaccatcatgttggctatctgcacctcaacaaccaagggatcattgtgagtgtagctttcatgataggagtcggagtctccgaatgtgatgggatcacactcgtagcgttgagactttggaggatacaggccaaaagagggtcaagggactcaatgatgaaaactaacgacttgagtatgaaaaatagggtttagaagatactgttaaaaatctcaccaaacagttagaagacattgtcaacgagtttaacaaaataaagtgaaaaattgaatatttcatctaaacttgatagcttataacttagttataagtataataaaatctaataagttaaaaaatattttatacttgaatatttaaataaatttaaatttttaacaaacattttttgttattatttatttaatttctcattttaaattatttaaactattaattaaataaataagtaaataaactaataattgaaaattcaaaacaaacttgtgacatatttatacaatgtcacacgcctgacaatgtacaatgcattgtaagtggcttgtggcactatgctgacacccaagaatatctcaattgtttgtttaaaataagaatgaacagtgtgagatagctatggtgtgtaaactgtgggtggattggatgggtaagaataaactggtgagaaagtggatgtatagtttcattaggtttgtcatatgagataattacatatgcgttattttattttctcttttaaatttttacatttttgtgtttaattttttttatatatttttacggtgatttataaaaaatatacaaaaaaataataagaaaattacataaaagtaacagaaaaataatattcaaacaacattaaaacaagaaaatttgacaaacaaataataaaaaatcaacaagaaattaacaagagtacaacataaaaatacattaaaagtctatattttctgtaaataaaatcataaaaatcataaaaatcattaaaatatttaaaatttcctacaaccgtatttttataattttttttttattatttttgtgtatttgtaaagtaatcccttgttatatcttcaacaataaagaaaagcccaaactagtagtaatatcacaccaatgctgaatgatttaatggctaatagtttgtgatatttgagtaaacgcacaattaattcaagtcaagatgaatttcgatgctacaatatttgaagctcggggacgatttaggttcaggtagttggtgagaaatcatgagtatcaacttgtggaaactcattcctattgttatgaaggtattgttactccaatggttattgaagttattggcattcgggagactcttagttagatcaggatgtggagttggagttaagtggtgctagagtctgatagtcttgttattgtccaggctatttatagtaattttacaatgttttctcttttagtgattgatcataaagggtatttttctcggtttattttatttattgttgctaacaagacggctcataattttgctagatcttttgtccttttccaaattgaatttttagtagaagtcaagttcctactgagttttgctaggtctcttgttaacaagacgcacataattttgttaaatttattctttatgctaatatttcattttaatgaagtttgataatttatttataataataatnnnnnnnnnnnnnnnnnnnnnnnnnnnnataataataataataatatttatctcaaaaaaatatgagttaatttaaaattaatttagtttctctaaaaaagatagctttattttattatataatagatttacataattatcttctaaataagataatatttgactctcatacaattattatttaataattaaatattattattttaactaattagttttattgtaaaaagtactaataattaattaaatagttaacataaaattaaataattattagttttaattattattt

SEQ ID NO: 37788 - DNA, 3114 bp, Cannabis sativa
taaaatttaatattaaattataccgatactaatatctcttttttctccctaataaaattatttaaacacatcatcgagcatgttctaagtttgtcattaccatcaccatcaccatactcctctgattcaattcagtagtttaagcctttttaagggctgtgattgaacttgagctcccgctgatggagtcataacgacggaaggtgtaagccaagatcaaacaagccgtaagcgtgacgatatcttttcccgcgcattgcttattggccacgctgggcacaccggtttgaggtccattggaccagtaaagataatctaacagacctttatctttcatgaaccggtccccgatgaacgactccggttccgagaatatttttgggtccctcataacaaggctttgaaacccgcataggagctcgcctttcttcacctcgaaggccgcgtcgtgcgagctgagccggaagtccttcctggccctggcgaattggagcggaacaggtggattgagccggagagtctcgtacacgaccgattgaacgagtggcatttctttgatcgagtcaaacgtcagagttgacccgccattttgtctgacttctttgaccagtctttgttgtagatcggttgtgtcactcgccacggtgcccagtaggctcggtagaaatatagagaatcccccgaaggcgttgaaacccaaaatgaagagaaggttgtgaatcgcttcttgtttactcagcccgaactcggtttcacctctcgctactatttctttacctgtaaaaggtaaccacaaataatttctcaaactattaatttttagtgtattattactcccaagtggaaattatttgcaaaatgacaaggggtgtctatgcaaaataaattttaaaaaagagttcattttgccaatgcattaatggggtcatgagtctaacacaacactatcaccgcaccaccatatttggttatttactcaaatcttcttttggtggagagaggtgaattgttagtgtgaacgatttggaagatatagttagaggacatgtatgattaggttccatttgtatatttggtggaatctggcatatcttaaccaaaccctttgcatgggctcgtcgtgcacttgtatgtatggtttggagagaatggtgtattaataacaatatattacttcctacatatctctaaattaatagtgcctaataccaattaatgcagctttatatgaccatgattgttcaacataaggtggggtgttagacactaaaaaaaacaatgcaatgcagcactatataaatatttgtgtggagagtagagatagtaattagcataattaactaaccatattcctctacaaaactggagaggttattgtagtcaccactgaccaagaaaaaaggataggcaaaagagtgaatgaaaagctcctcaagaggctgaaggatcccaatcttgatagtgggaaggagctggaaggctaaccatcggtcgagcatgatgtagccagactctgcaatcttgggggagttggaagggtcagcaccaattagacacttgaccaggaagttgaacaagaacttttgaagtggggctaagtaggatgaggatgatttctcagatacgtctttttctattgtgtcccacatcgtcgacagatttgatgtcagttctcccacccatatcttcgagctttgttttagtacatccattgcgaagttcttaacctgtacttcattgatttcaaccacttcatttataagcatctctatataaaatagctttattaagacattattataatatgactcaattcaaccaaaacactctgcgatctaattctaaagtttaaattgatatttcaatgaaccactaaacttaatgtacctgcaaaattatatgcttatgctttcatatatcatggccccgaattccttagggctcttttggtatataacgtaatggatgattggactggatattggatattatgattggtttactttgcgaaaaaaaaaaaaagatttatattatgtttggtttagaacaggactattgagtatacagtttattttaataaatttatttttattttttttattttttttttattttgtttgtcactaaagaataatgtgaaataaatatgtaataaaattaaaaattttaaaataaataattttcaataaatttaataactctagaaattaaataatatttacaaaattataatatataatttattattctgtaatttaaaattcatatattaataaacataacaaataaaaaagaaaatatattaatattttaaaattgaactactttattattttatagattaaaaatttcattatttttaaaaaatttaattattaaaatacatgtaatgcacatatatatatataaatattttaaatctaattaatggtagggaaaaaaatatcaacttgggatattttaatccaatatccaagagggataaattaaagtttaagataattgtttgggaaattatctcatatatatatatatatatatatatatttaaaatttacgatttatattgctctgatagtttctatgggttgttgtgtgatttttagttgcaatttaaattgttctgttagttgttatacgaattgctatgtaaattttcgtaaaaatataaaaaaaaaaataataataagtaaaaaaaaaaacctaatctttatcagatacctcaaactcaaacttaaaaatttccaaacatgagtatagatcatactatccaatctcacccatttattctatgtacacctactaaataatatgacctagctctcttagatgtaaaaataatttcttaggtaacaatataaaataaaaacaaaaaatctgaaataagccaaaaatttacattgatttttgttttcaaaattatgttttaaaaaataaaaacccatcaggttttgtaattttcaaaaacaaaaggtatttgtgttaaaattgctaattagtaattcaaaaaattaataaattattctgttataactaaggtggcgtttggtaatacttttttaattagttttttgtttttaaaagtgaaaaaatgaaaatatttttcaaaaacat

SEQ ID NO: 37789 - DNA, 4646 bp, Cannabis sativa
  modified_base (71)..(79): a, c, t, g, unknown or other
  modified_base (4613)..(4620): a, c, t, g, unknown or other
tgtgaaccatgcaacattagatgttatttctgatctatattaatatgcaaatctgattatattgaaatgannnnnnnnnagggcacaaaacccaacagtatacgtaaagcaatcaaattaaaaattaacatacacaattaacacaattagttacatataataactaaattgaaaactaattactttatataactaaatcaaaaactaattaagaaacaacaaaaaaagtacacctattaagaaaaacaaaaaaaaaaaaagagttatcatcatgcattcataaatatttaaaaattggtcgctagaaaaaaatattacatatgatataaaaattaagaataataatgtgtgtagacataaattacacataaacttattacattaatgtgacaagaaatttaaaccaattatcttcatttaagatggacccacctattaaaaatgatttactacgtatgtctatgtcaagtttgtgtgtaatttaaatgcgcatgtatcattactcaaaaactaaacattataaatatatgggaaaaatcaataaaaatataaaaaaaaaaaataccataaaaaatttaataaagaaaaattgccatatttttgtgagataattttattttcttccatatttcatgtaattttctcttattattacaatactatcatcttttctttcttctgtttttatatgttgtgttggaaaagattcccttatataccctaagttgcataatattattcacagggttccaaaattacagatatatttacacttacaacttacaacaaaaacaagatcaagtctaaagaagataaaacagttacaacagaaaaacagttacagaaaatatctctagggctttgccccagatcagaaatcacagatctataaaaggatatgtttttccttcttttttgagagaacaaaagtgagaacacaaaagagccagcttgtgagagttcctcctagagagtcacttgtgtgttcatgtaaagaaaaatagagagatttgttagtatcaaaaaagagaaaataagagtgaaatcaaaagttgtaaatcaaagattgtaacctattgttgatgaatggattcaagctctgaagaagcttgacggagaagtagccggtaactttgggcgaactccgagatcaaattggtgtctccatctttaccatttttgtttgtatttctcatcttaaatctctatattttctggtatttgtatttatgagtgtgtgtttgtgttcttgttattttcaggtttggtgtgttgagatttgggcgagaggttgtgagtttttatgggtttgtaaattcgggtagaacttgttttttggggcttattatttcgggtagaaaaagctgtaaaagaaaagaaaagaatagcttgaaggaaaaatagaacccttagaaccctagaacccgtgttaagtagaaggagaagataagagaacccattagaacaatataaccctagctgtcattagagtgagaagaagaagagagcttgaagaaaccctaacactaggtgcggctgtagagaaaataagaagagaaacgaaagctttggaaccctagaaaccctactgtgttcttgagagaagaagaagagaaagaaataaagaaaccataaccatagaatcttattttgtgctactgccatttctgtttgagaaagaaaagagtgtttgaaaagtttgaattttgaaaagaaagagtggttgacgtgtgtgtagtaaattagggtttgatacattaccttatatatattatggtttggcttattagggtttgtcttcttgttgagctacctgtgattgtgtgggccaaaccactattgtgaagaagagagtcatagtttgactcttgttttgactgaaccatatattaagatagaaaaggaattgaccttcgattggagagagaaacttggtttctcttgggctgattctcttttgggccaaacctttgcggttcaattggtgtgacttggcttcttgtgatgctgaaggttgttgggctgaaaaaggttgcaattgttatttttttaataataccaattttgttgtggacgcacaacaaagtaaaaaaaattgaaaaataccacttttgtatattgtattaattttgtttctttgaagttgtgttggacaaaagctgcagattttgataaaattctaatagtggtatcagagaaaattaatttccgcaaataaagactcaaattaataaattcaagaaccaagtctagaagatatcgaaaatcaagaacatgaagaatttgatcatcaagaacacgaagatggcaatcaagacttagttagctgcaggtcgattatatgttatgttttatgtttttcttacggagtctgttgactcacagattctatgttatgtgcaggtaaaggaaaaattgttgttcaacgacagtgagttttgatttggatgaagattgtacgtatcgagacagttcgacctaaagtgttggatcttcataacagttatcgctcacagttctgtagtcgctgtgcgacatcttttcattatgtacagttaaaaaattaaaaaaaaaaaaggatcccaaattttataaatataatacaatttatgtttatttattaaagtttaaattttatcactttatgataaactctttgtttagcaaaggttgcacagtaattatgaaaatcactgtggaacgcctaaactagtagggtctcttataaaattaacacatggatccaatccccgaggaaaggatgacctgttaacgactctcaaagagttaacctcgcttgatcagaacttgtgagatgatgtggccttgacagagtatagtcgcatactatcccttgcatagtcaaagacaagcaggaccaagaggattcaatacaagtcgtgtatgtatcaaaacatatgcggcgactaggtagtcctctccagtaactagtaaatatcgcttctttacataaagatcagtctgaatgattgatcgtgtttgacgactcgttagggactcgcatgtcccacgttttgaacaagtgagatgtacgtctatgtgatcttagttgaacgcagacattcaaacgataggcccatgagccacttagcagatacaaaatgcaccaaaagcctggaagcttgtgcgagaatacgaacagacaactcgcgctaagcaagttccatacgttgccacacttaaagcaagaacgaattaaattgttcttcatttattctttgacgtttattctgatttaatactctcatttattgtaaaatggttttaaaaccgatcagttatgtaaaactaaagggacacttgctttctatataaagcagtgattcaaatcaaataaaataagctgaaaatctttgcaacagtggactaaacaaaccaagatttgactgaaccactatattttctgtgtattcttgttattttttgctttttattctatttgatagtagccaattttttgagtactcgctactctaagtgagtattcgcaagttttatttgtgtgttcttactagcattaaatactcctacaaatttcggtgttgtccaaattcctcccacaacacctagtttaatttttttgtaattgaatatatagtgaaagctaattgtgtaattcaattagtgatagcccaaaaagacattctcacttttatataggttatagattatcaaatttcccttacaaagaaggaaaatttgacaatccatgcttaaattgggtgcatggtcttttagtatcccactttaaaatgcataggactttaatactccaaaactccttaaactccaaaatatcctccttactcaaatactctctcatttaactctctctctttctctcttccaactctcctctttctctaactcttaccaaatccaccagaataaacccacaaccaccatcatttgcctgcccatccctaaactggacgaagtcaatatctctaaaccctcaacaaaaacacactagaaacaacaaaaaaaaaaaatcgtgaaatccacccccaaaatcgcaaaaaaaaaggtatgtttctgaacttttgtgtgattttaaatgggtctttagatttgtgttgttgtttgtggttaattgcaagaaaatttatttggattaggtttgatttttgtgttttgggttgattttcattgatgtctgtccaactcctagttttttcacagattattgacatttagcgaaattgttcgcgaggtcttactatattgcaaggtcttcctagttatttgtcttttagcgacatttctctacatattagcgatttttgtcgacatagtttggttagactaggaagctctaacggttagcgacattattcgacataatttgcaacattttgcgatattagttaagttattggaagttaaaacccttggccacttgtagcgatatgttatcgatatcatttgcgattttgttatcttttgattatttttctttctgtcttgttgtagttagcgacatgtagcgatatgttgtcaacacattttgcaatattaatgtcttttgattgttgtttctttgccttgttgtagttagcgacatgtggtgactgttggaatttattttaccnnnnnnnnagatttactcacaagtatgttgttta

SEQ ID NO: 37790 - DNA, 4498 bp, Cannabis sativa
gagttcttattcttcccaacttgatacatgtcttcctttggtgtgctaaccgaatttcgggtataactcttttataattatttaaaaaaatatttaaaaaacacttacctattaagccacgggctctgacctccaaattttatggtgggatattttgggtcttcgacgagcttccacggaggacgcttccatggcagacatttgggcttccacggaggaccgggcgggttaagggctgcgagatctttgggcaaatgagagggatctacaggaagaaatagagggaagaagacggtggctctttttggatgggatgatgagagagatgtaaagagagaaataagtttttaagttttataaatttttgaattaaaataaatgggaataatttttttaggtataatgtggaattattaagataaaatggtataaatttattaagaaagtaatttttgtaatataaacttttttgtatgaatagtaaatgaaatttccgttatttatagctctactcaaaatataaataatactaaataaataaaagggtgagagaaagcaggtagaaaagaacaagactagcttggattaggtctttataatccccaaattcaccagagagagagagagataggaaatgtctgccatggcttccaagagtcaacgtcttctcttgaccattctactgatttggatctctatcgtctccacctccgcaaggccctgcaaaaccctattcgtttcctcttactcattctccctccgccaaccccaattccactcctcatcgggattcgtcaccattttcgccgaggtcacccaattccgtcgtgtcaatggtgaggcttggatcatagaagaagagcaccaagaacaagaacaagaacagcgacgacaataccaagaagaagcctcacgccaagtccaacccttacggaagatgcccctttttcccttgtccgcctccacctctccctacgatctcacctccctccgcgatcgcaccaaggatatcctcagcgttgtcgtcgctctcctcttcggcgttggctgcggggcactcactgccgccaccatgtacttagcctggtcgctcttctccactcgctaccaggacgacgccgatgacacaaccagcgccgttgtggacgatgatgggcttagccctaagaagatgggttacgttaagattcccaccgctgatgcgaaacaaaccgattggtaatttctatcagccctaattcgagtctggtaatcataaacgaatgatatttacagatgcttaaaactcttttttttttttcttaaatggtattgtcgttgataataagcaagtctttgtgtttgtattctggtctttacttgtcaactactctctatatgtatctatttgtatattcataggctgctactcttgaaatgtttatttattctgctttgttgaatttctgctctgtgagacgatgcttctggtaagaaattcttaaccttttaatataagcccgcctttattagaagattttttttttgggtaaagatctttattagaaaacttaattctaagcgtttcatgttgttatgcttcttggctaacttgaatgtgatttcccattgaacatgagtttcttatcatctaatagaagaatactaagggcttgtttggttacatttacgtaaataatcattgccaaccaagatctaaatcaattcattgattggttactctaatgaacttatggctgcatgcctaaaagtaggattcagccaatggtgactaaacagaaaagagcatatggtgtctaattaataattgaaacgttaacatgtcgcttaggtgtagtgaaagggaaagtctttgagaatgttgtcaatgtaattcttgtaggaaataagatggagtgaaccactttgaaaattataataagttcaaaaattgaatctatttattgatgatagctcaattggttggccatgtagtttggactaaggtatgaggggcgagtctttcatggatgcctacctaataattgttatagttttgtgatcccaaaataatggaatggaaggttaggctaggacagtttagtttgataagttctttcttgttagaattaattctacacaataggttagccgaaattcctcacagaaaccttattgaattgatgttcaaaattacaattcacaagcttttgagaggcttattctttcctattccaatattttgagaggattggggctctccacaatgagtgtcaactcttaccaattaaagagaacccctccccttatatactctaagtttaaggtatcctaaaataattgccacatcatcaactcaaccactaatacacataagctattaattaaaagtaaagacagtacaactaagcctaaagtctaacttaatgatggaccatttaggaggtctacacgtgtgcctgaacataacccaaagtatttgtattaatgaataatgactatattagtttctacatttttaagctattgttatgaataaactagttagtttgaacaactcttcacaccttgtagtgtgcttcctaaagagtatgggtgttaattctgagaatcaggaatgagttgttctaagtattatatatgtaatcacccttgttgaataaagtcaagtcatgtttttgttcaatctattggtttgattttcactgcaagaaaatcttttattctttggtttgattcattctctgactgggtcctgtcacttaacctggtggcttattaatactgcctcctaaaaccttcaacttgtcgtcaaggtggaagctcaaaatttgttgttcgatggtggagacatcttcccaagtagcttcaaaaactggaagagtgccacttaatcaagacctcctgtactcgaatttagcttaggttgatgttgtagtacgacttcaagcgctactctaagctccaaatctgagtgaaggatcacctcgtactgtggttgtttgatttccgacctaaaaagccatggtttgtagcttccaatccatatgtgtcatgcctaaggtagccattggagtcccatagtgatactcgcacttccaaattttagggttaagaagtaatcccaaatttctatcccttggaaatggaggttcaaatttttgcacatcccttcactcttcatagaaacaatttccaactgactgtaatgccaattttgaaactatttccttagaaataaagttatgggtggcactgggatcgatcaacatcaccacctcacaagagctgatttggtccaagagtttcatggtcttgtttgtaggtaagcctttcattgaatggaatgatacttctattgtttctttgatttctatgaaggttaacttggttgttttagctgccaaatccttggagctttgtatcgaactcaaatcctcaatcttgtcgaaaactatcaacaaattcatttctttttgtttacaatggtgccccaggaaccatttgtcatcacattgtaagcacaagccattctcccagttgagttggatatggttttcagtcaatcttttgacctcgcctattcgtttagtataggtgagtttatttggtgtgtatccttgtgtggtgcttgtaaagtgcatcatggtctgattgaagttggatgtttatttggcaatattgaaaggttgttagcaacaattcttctatgtcttaggcgatttccattgcttatccacattccttggtcattgtactcttaactcaactttgattgaaggtgctaatccattcagaagtgtacctaagctgaactttgggttctatgttgtggagtggagctaataatctcatgaagtttttcttatacttgcccattgatccttcttgttgattgacagaaattgatcataaagggaccccttttgtgtgtctcggaagtgtttcaacaccatccgcttcatttcttcccaactcaaaattgttcttttcttattctctcattggtaatgaagcaaggcatccagaaaaagaaatgctctctcgatctccttgctttcatcatagtggtaaaatgaaaaatacatctttgccatctccccatcaaaagttgacattttaagctttttcactgagtattcttgtcactggtgcaaattaatatctcttcgttcattgtgttcaggtgcagtccgagaaccttctccttattcctaggttgctccagcattagaattcttttcagctgccccttttctcgaaccttttcccacgttttctcctgtttcttgaacctttcttgatcgttcgtctctccaagaaactctgaaattgttcatgaaaccgctgttgcagatgtttgcccacttcttgaattgattccttcaccgaaggcaactccaacttcatcacttccatgtcctcctcgagtaaactagtttccacagatttccttagtgccattgtccgtagctcagcacaccaaattggtgagttctttgttggttagaatcaactt

SEQ ID NO: 37791 - DNA, 1877 bp, Cannabis sativa
aattgttttatttccattccattctatattacctcaaaccaaacgccacttaatatcttgtctttcaattttgcggtgcaatcatatcacatcttaacttaactgggtatgttattgttaagctttcacaattttggtttgtatattcataattatagaacgtgttttaggaggtccccaaaatatgttgacttggggaggtggtgattttgtgagtattaaaaatttactagtagtatgagattatttaaagatacgtattgtggtattattaaaaagatcaaacctcttggaccttgagaaggatcagcgccataatattgcacatgatcacttttcctcttcttcttcttcccaaaaactaaacaaatggcgatcaaagccaatataaaaacccctgctccaaccccaactcctattaccaactgcttcgttgagcttgacatctccgagctcgacgagctattcgaggatgaattcgaatgagacggcggagatttaatggctcgcggtggcggtggcggcgaagatgaagaagaatgagatggcgggggtggcgaaacaaactcactgggcggcgggttcgaaacattgttgttaggaggtggtggaggagatccatcgatggaggaagacggcggcggcggcggcaaagaaggaggtggcggtgatgatgttgttgcatttggagggggggaacttgtcggtggcggcggcggtgttgatgatgtaggcggtggtgttatcaccaacggtggcgaaggcaacaccggggacggcggtggagtggtggccgtggaatttgaatccggggagggagcagtcacagaagatgatgaggaagacatcatctaaagtttgggaaccaatattttctagttcacgaaccttcacctcccctgcaactgctcatctcaaagatttgatgtctctatatacatatatatatatatatatataatatgaaaatgttagaagctatagtaaataaaaaattaattatgattacaaaaatggaatattcattaaatcaaatatcagaataacagtagtaaaactaattttcttttgttgtattatgagttatttattttattatggggtaggggacaaaagaaatacctgaaagaagagaatgggaaagttggattaatcccaaactaaagagaagaagaaaggagagaaggttgttgttgttgttgttgttgttgttgcagaaagaaattcaacaatagatttgggattacagagttcctcctccaatgagactcctacaaactagggctctttctccttcaaaaactaatttcttaacttagtttaattttgttttatcttttactatttttttctataattagtctttcatttaccgcttataaattataaccacatacattagttaataattattttccaattaatgaaacaaactaactaattgccaattggtcaatgtagattcaattaaataaaattgtatagttaattttttttgttattttttaatgaaaaaaatggtgtaatagtatagcaagctaaagtaaccataataaccatcatgcaattctacctgtttataaggaaaatatcaaatgattttttgtaggaaaataattacctacatattattttttaatttttttttttaaatttaaggtttggatttctaaagtggtttcagggctagttgcaatacgagtttgatttcataaaaatgcaaaaaaagaaaaaaattattttaaagtgtaaaaatgaaaaaatctatttttttaattactttgttattatattaaccacttatttatctaaaaaaaaaatcacttatataatattgtatttatcttacattactcgtataacaagtcataatccca

SEQ ID NO: 37792 - DNA, 2490 bp, Cannabis sativa
taccttctggtactccaattcccaacaattctctaatctcctttttcctcacctcagcagtgttcttgctaaagaaaatagaagttttgagtttattgacttgttgtctagaccaatcacaaagcctctcaaggcgttgccagtagccttttgcttcttccaagatggccctacccactaagattaaatcatctgggaaaaaaatgtgggagagaataggacttctccgactcagtcggatgcccttgatatcaccatcccccattgcctcctttaaaggcccagacagaatttctacagcccaaataaaaaggtaaagggacagggggtttccctgacgaataccacaagacggagtgggggtggaaatacactagtcaacccacttgcgaaaaattgtcaaagccccataataagatagcacgtgatcaataaattttcaactaagcttacgtaagctttcacgagatcaatcttaatggcgaagaacccctccttaccctttttcctattgaaaaagtggataatttcttgaacaatcacattattatcttggatatttctaccaggcacaaggcagcttatgttgggcagatgagccttggtaagaaaggttgaactctgtaggcaatgatcttggatatgactttgtacgtcacattgcacaaggatataggcatgtaatgttgtggtctcttagggtttggatcttaggaataagaatgaggttcgtaaaattaatagctttgtgcatagagccagagttaaaaaaaatcaataattgcatcacaaatattttttttaaaaaaatgtttacattgattaagaaagacatattgtctttagtacacttattcttttattaaaaaactttacctttggatgaaaagtaactgtataattattaggtagtgtaattagtagttacacagtatagtaattacactctattttaaaatacaaggtgtgatagtgggaatctcgtgatctataaggaaaaaaatcgagtaagttgtacaattccacatcgcttggaaaggttaagtgtgatgattctaagatatgtaggaatgggactacacagttaaaaaatgcttgaattaattaaatatttgcaacccaatatttatatggggttggtaaaaatatactaaaccgaccgatatatacccctaatttattgttcaaagtcaaagatacccaccaacttaatctgaaaatgatatgcagcagaatgcctctggtttatatttgagcctcatcacccatatactcataaaccatcttaatcatcttatttattgtatacttgcaaaccttccaatttgattattctccctcctcatttgcaatttttttttttttggaccatttgaattattttctatgaaaatcagatttgactatttggatcattttgtatagaaagtattctcataatcctgcaacaaccctcacacaatatctaacatgattcttagttaaaatcgttttagagacattaatcccatcatgtcattgccttagctataaaatgtatacccttccataaaaatatatatgtatacctttttaaaataaataaatgaataaagtcatacgtgcacacaacttactgcaattgatattaaatttcccttatttaacccaaataaattataattgtccacttgggtcttgaaatatcacccattataaaatttaggatgaattgaattttattttcttaatataatttgtagacattcgtggcatgagtttcccaatttgtgttaaatatgtcactaacggctgaagtcattcattaaaaattctctctcttgtccttgttttgtcgaggtccactttagttggagcttactggtttttcatatgtttaaggtcattatgtgtcatttttgttacattttgtttattttttaaacaatttatttagaccactctcaatattttataggagatttattttgtatactagttttaatttttttaaaaaaatttacggtttaagttgctacagtaatttttatgtgaattttgattgcgatttaagttgttccgttaattgctatatgtattgctgtgtcaatttccgtaaaaatacaaataaaaattgctttaaaatgtaaaaatgaaaaaaaaaaaaatctattttatatctaacttatatattacacatataataatttttctatttttattctctatattatttaaatattatatttttattcattttcaatacttctctcatttttaataatatttaaatttccttgttcaacaaataatatccacagaatcagtttaccatttgggaatttggtttaccggttttagctgttttggtttttcatgttttatcgatataagctatctattgatagagacttctatttttaaatttaagttcccgaaaagtgatttagcatatcatttatcagttttatgtatgttgagaatcatgggattccatctcaaaaccaattg

SEQ ID NO: 37793 - DNA, 2199 bp, Cannabis sativa
tttttttattttttcattagattacaattagtttgatatttatattgagttagtaaaaatacactataatccgaccgatgtacaccactattggagaccatattagcacaactttcaagccaatattaacgaattaaagattatatcataataattaaactgataaaaaaaactaacaaaacgtcaaaataaaaataaatagtacatagtaaaatagtaaagagcaaatgtgctaattacctcaatattagatctcggccatttaaaaaaaaaatgtcatttctccagtgaatttctatttaattggtattgttcccttgagaactaagaccataaaccttatttgcagacactgcctgtcaaattttgccaataacatacagagaaacaagcacaacaaccaaaaatattctcccctaagggaagcaaacctgccccatttgaaaattaaggatcaaactatgatgtttcaattactcagaacaaatacatcatctcgcttgttgcaggtccgtaatgtgcataggttgcaggtggcatggccttgatgagcagcgactacagatagacaatgccttgagttcatctccgtacagggtttccaccatgagcagctgctggcggtgttgaagacccataaggcgcctggtttgtaggtgcaatatggccttgaggagcaaggccacctcttgactgtgggtcatagccaccgctaacctttgagggatcatagccaggtcctcctctttgcacattgtaaactggtcctctctgcatatcgtatccaggtctatgtgcatcataaccagatcctctctgtccatcataattacctcctctttgaacttgtgcctcataaccgtgtcccctttgtggatcataagcagggacacctgctgaatcatagccaggccctcttgatgcatcataacccggcctagcagaaacaggtgcagattgagctccagcataagttgaagttccagcatatgtcgaagttccagcagcaacagcagcactaggagcactgctaccagcagggggtgggacacgtccctgttacacaaaatgtgagagcaatgagtttgtttcttcttgttgcaaacagagtaaaagttgtttttctttctcggaagttagaaacacaaaaacttatttttaagtgcaagcagcattttcagttgggttcaaacccaaacaatacaatttcatttttatttttactattattcgattacataacttgtaccacattatgactttgctgtagaattagagacaaatgcaagcaattaagtattcttaccagatttcactaagcctaatgtcatcatgaaataaataagaaaaccatagttatacaatgccaccatcaaaagatatcaaagcaaattgtaaagacagaaatgtgtaagcgggagagaaaacggaagacaaaaaacctgggaagctccgtagccgtcttcatacgcattttgccccacaggatgaccagaagcctcattatcattggttccaggagtgataccgtaaggtgcacctgcatttggtggaaaattccactaatgatgagctgttgctacactataaaagatcttgaggaaaacatagagtaagacccataaagcctaaaggagaacataccaggtcttctatcagcataagtggggttcatcatcaactctccctgaagcttttccacttctcttgccatcgtcatatagttagtttccatcaactggagtgattcaagatgatcgttgtataatttcttttcacagtcataagtagccctgcaagatcaaaacatagaagattatggctttagataactaaaactaaattaaacaatcaactgaaactcaaagacgatattaaggcattttgatagatgattcattttggggaaataaagatctatagcacagaattttacatagaatgaaaatagaaagcataacattctacaatctatatatagagtatatccagtcagagtctacaatctgcatttgtcctagttcaaaggaagcaggaaaaaagaaaagatacttgaactagagcacatgggttaactcttaagaacaagtaatccatattgaaatcgcaacaaacctaaacaaaaggctgaacactaaacaaatgatattctatggcaaataaattaaagctccgcacaaggtatatttagatggcaca

SEQ ID NO: 37794 - DNA, 4427 bp, Cannabis sativa
gtattttctttgtggagattgtgttgtaggggccttgccgactaaagataaatatgcaggggagagtaatcaggagtgtgtgttgtgtggcttttgttgcgagtcggctgaccatttatttatgcagtgtcctttgtcgagagctttatggcttggtgcccctctgcctgtaaaatcgaatgaggtctctggcgagaatttgacgatgaaggtgctaactctagtgaagggtctgtctaaggacctgcgtcttcaggccatggtgagtttcgcggcagtgtgcgacacggtgtggaatcagagaaacgcaatcattcatggggggaagtgtggggatattcctagtctgctaaaggaagtgtggaggaaatttgttgaatttggaggggacaaggcaggagaggtctcggattccaggagtcatgtggtgacaaggcctttggttccgtatcaatttaataaaatggttatggtggatggtgcgtataaagaaagctggtgcggaatggcttgtacaatgattgacaaattcgattggacttgggattacgggtacttcagtaaggaaggttcctcaagccttgaggcagagatgagtgctattggtctagctgtggaggtaatcgttcagaaggagtgggttggtgtagtgattctctcggattgccaagtagcagtcacggcttttgataaaaggaaatgtccggattggaaattgactgataaatttctgcatattctggaccagatgtcgaaatgcagggactgcaaattagtgtttgttaagagagatttcctgacttttgttaatagcttggctgttcaagccaggaatgaaaggctatgtaagaccttttgtattggggaaggattgcctgtcaatcctagttttctggtttaatcaatgaactgatgttctctttcaaaaaaactaaaatacataattcaaacataaaaaatagagcgatgatgagagctagatgttatccctcgaaaaattgaaggaaattggtgtttaattttctttgaatacgggaaagaccataatatctcaacaccattttggaaactttacacggagacttgtacctcaccatcttagcccaatgggtcctcccaatggggtccttgcgccctcacttctaatggggtcctcacgcccttaccaccaattaggtcctcctaatgggattctcacgccctcactcccaatgggatcttctactacaagaaatatcacttttaccagcacagttctactttttctagcgtatttcgcaaactgtacagttctactattgcaccatgtgtaaggagagccatgaatcttctcttcatctattctggttctaccctttagctaaagcaatttggtttaagttagcttggggtattcagacagagatagtgaatgtttcttcttgggctcaatagatggattggtttaaactggatgtgaaccgtccttctaatgtgctttttgatgagtttatggttcatacgttatgtgttattgaagaaatctggaaagagagaaatagaaggtctaatgggaaaaaggaggacgatatggtgcgtattactgatctaattacccttaagattaaggatcatgtgatggtctcttcgaagagtcttccggttgttctgagttggaacccgccaccttcttcgtggaaatgttgcaattctgatattgcgatttccaattctgagagtgtgctgtctgttgtgcttcgtgatgaatggggcaatgttgtggcgattaaaacagctttgactcctgtgacaaatcccatgctggctgaggcgcttgctgtttgttcagcggcagacttggctgtttctatgggggtgactcatattttgttccaaagcgacaacctcagtgtagttaaatagtttgaagtgttgatctccccagttgcgaatttcagacttcagtttgcgaaggaaagattcacgcatttgtgttctaagttcattgattgggggatcactcatatctcaagaaagtgtaattacatggtgcataacgttgctagatgggcgactatgcataaggcgattggaagaatttgccttgatgtgctacctgcagctgttcttgatgatttaatggagtgggatccaagctctgcttctcctccgcacattcatttgttttagtttggttttcttgtttgtttgagctttgactcttgctttagtttgttgctttagttgtttgtttctgcttttggtttgttgttttggtgcttctgcacccccgccggttatataaaaaaaactaattcaatgtcgagataactaataacataatagaaaataataacaaatattttgggttattaaagaatcttttcaaccaaattattataaaaaattttacttttagtcacaacaaaatttgtgactaatagtaaaaaaaatgttatcaattataaattatcaaatgaaaaaaagaacacaatcgattacacatttaatgaaaaaatgtcattaaattattatcaattttcttactaaccaatggctagtacacttgtagttagaaattattgaagaaatataattatttagttggttgtcttctggttaagttatgaatatttacactttgttttattattgaatttgattatttagtaatagtacaagctcttagaaatttaaatattttgtcatctacttttagtgttgttgttgaggattgtaaataacttttctattttttcaatgatgtttctttacattttgtgaaaaaataaattgttcaccttatgactagagtgtctcatttatatgatgattatattttgtaaagtctaatctcctttgaatgttgctgacattgttcaggccaaattagtatatttaaatgaaatttccagctaaaaaaagttatgaatattaaatatttaaattttaaattatatatacaattttataaaaataataaatatttattatattagttattttcaacactaataaaatttatcaatttcaaatacataaaatgaaatggaaaaaagatttaattaatatatctatattttcctattgaatcaaataaaaaaaatatactaaatatttaatttattaatttgatagactacataaaagagtattgataagaatacattgttttaaatatatatgatataaattaaaaattaaatatgtataattatattattaattaaatataagtctaaaagtgaaaattcataataaattaaatatatgataaataatggcataagtactcaaagttttaagtttgtaagttgcataaatttatgtttatttttagtggcataagtatcctgtttcgtcaacacgcactctgttttaattttattaaaagaatatttagaagtaactgatactacatgtttctgtatagatctaatgatctagaatttgagtcttatatatatgtgtcttatttacgacaatataacagagtctgtactgataaaattagaaaaaataaattacagttctacaaacattgaatactatgcatctaaaaataaatattggatttatatcacttacaaatttaaaattttaaatacttataccgatatataagtgcaaatcccattcctccattcccatttcttaaaaaagaggaaattagaaaaataaacaagttaatcaagtctattccttattgttattgtctaatcttataagttaacacactattattagaaccatatattatgtcttatttaattttataaagtttttttttttttaataatctatcatcatagtacaattttaacataaggaaacagctctatcttagttgtcatttaaatacaaataaatttcatagggatgtgaaagtctttattaaattgattctcattaatcttttttattctgtaattaaaattaaaatacatctccacactatacatgtgctataattacaaactagctacctaattttatgttataaattataagcatatagatctatgaaattttcatttaaatatatatatattgtagtaataataataattaatcatattatgggttccatttaattactactataaataattaaattagtgaaagaatcagacattaaatcttttgaagattaatttaataggaaattaatattcattggtatgtacgtagaaatagaaattaatttagggtgtgtgtatggaaaactgtggtgtataatggaggtaattatataatttgatatatttattttattatttaattatattgtcgtaactgtctaattgaaagtaattaaggttttagttacactaattattaaggatcttgagcttaatttttttgataattttttttaatataactaacttgaagacaattcttaacacgaatagatacaaaaaatgtaaacaattttgtcataatac

SEQ ID NO: 37795 - DNA, 2492 bp, Cannabis sativa
  modified_base (2379)..(2379): a, c, t, g, unknown or other
actggtgcccaacctctaataatatgttatataagtacagataattagggccatttgtatctatttattaaacgtgctaagttatcttataaccatttgacaaaaactatacacaaaaaaagagaaaaaaaaacagccaaaaattctactaccttctttaatttggaatgtggaatggcaactagtatatctcaaaaatgagttagtgtttaaattaaccagctattgtcataaacaaaacaacaattggaccaaataaggagatcctagactatagcatttaaagaaacaaggaaaaacttgtgttgagtattgtaccaaaagtcaatccatcccttcagtgcttcctctgcaaatataccaagactatcatgttacatttcataaaaaaaatgacagataaaaaaagaaaattaggttgcacatcgacccagcagaaaccaaaagcataaaaaaaatttacactatcttgatgagacacaatttgccgaagcaacaatgaaccaacttcagaaatgaaaaatcaatggaacttttaccttgcgcctcttaagtcttcccattccactgctaccagtttcaaaaccttccattggaccagtttcgtcattctccatgggtaaacttttaacctcatcatagaaactgtctgtcaaaccaagcaacctgatggacacaaaattaaaaagggtaaagtataagtgaaattacagaccaataaaagataagaggaacatataaatctacaaatttcagttgtgcatacccatttcttgacttctttaagtgtttctctctcttcttttcctcctttgtaagaggtgcacgaataaagagctcttcttcacgtcgtgcacgttcctcccattttgccttgtatctgctcatttctgcactttcggttccaataacttctctaatctgtatttcaacaacaagatgtataaattttcaagccaaaactcacatccagtttcaccaataaaaattgtagtactaacctcttcaggtttaccctccaagctatccatcagctctctaacatacgtactttctctagcttgaagcagagtgtgtttctcccttctcaaggcatttcttgcttcctttgacatcttatcgtcttccatggatgtaggagcaaatttcggtggcttatatacaccatcctgtatcacaaagaaaaagtttagcaacagaaataaaataagaaacagtattataagaatccaatactccatttaattccatttcacctgagaaatttcatctgctttgccaacaagcatgtcagggtttggccgatatctcaacaaatcctctgtattctgagattgatctgcttccttttcacccaatcctacattatcagttccacctgcagcagcctttgtaagcttctggatttggtattggagctttttgtcaattggtcgaatctgttcaaaaccaacaaaatgaaaattgcctgaaaatgggaacacaaatcaatggacattgaaaaaaaaaaattcacagaaaactaacaccaaaaccttttccaaaaataatctaatctcaacgaggcttcgaacgacaggatgtccctcgatcgagaagcctttagccttgcaaagcaagtagtatacaagtgactgacaataatttagaagcagcaaatgttttgtttcaagataacttatcccttccgttgttggaaactgatccgccctcacctaatacacgttgcatcaaatagaaataattgatcaaaacaacaatcaatcaattatcccaaagaaaataataaatatagaagataagctattagtaggacaaaaacaaaaataagcaaagaatacaaaagaataagatctttcaagatggtctacatattcttatatgatactagaccaaatttttgaagtccataatctttagattagagggtttggaaactctagcaatatgctatgtaagtcctagcaaggaatcaaatcaaacccagatatcatgttatccaacaatggagttatcctgctaaactctacaatatttaaagtacataaactctacaatatttaaaacccagacatcatctacttttttttattgaggcgtccaaaaatatacattagattgcataacctgagattcgatcccaggacacccctgctacacacgcacaccctggtgccctcaaaggccatttgagctaacctcatgtttctctacactagccaggtcatcctgctaaactctaaagtggcgtttggttgggtaatgaaatggaatggaatggaaaagaaaaaattatcattctattccttcgcttggttgtatattaaagtactggaatttcattccaatagaatggcatttccaccattttggtggaangactattctattttgaaataaaaggaaagaacattccgcatgatgagaaaaaaattaacaattttatttttaatacattctaaattttatccaattcccattcccattcccat

SEQ ID NO: 37796 - DNA, 3141 bp, Cannabis sativa
caagtaatttcaacaaaaaataaccattgttagaaagggtttagcacaaatagagcaccatacttcaatggagtagattttccttattggaaaattagaatggaaactaaccttcaatatatggattatgatttgtggcatatagtgtctaatggtcattacattcccaaacatgttagaaatggtgtagaagttattaagatctatgaggcatatgataagaacgataagaaaatactttttaaaaatactagagctaaatatgcactcatatgtgatttggatagagatgtgtttaaaaatattgaacaggtctctaccgcatttgatatgtgaaaaatgcttgaaattactcatcaagaaactagtgctatgaaagagactaaaattcaattttattccactcaatatgagaacaccttaagtttttgttttaagcctttttcaggacacacaatagttgtacaaacgggaaaatcaaactgattaagttgtcttttttaataaaaatataaaaattattttgtaagatatatttaaaaaaaaaaaattattgctttatatatatatatatatattttaaaaaataaagtaaaagcattatccttaaatcacattctttaagaaaataaacaagttctcccatcccttatttttagtaaacaatggaatagaattgttactatacctatgatatttccattccaagtaactaaaaatgccataaattgaacattagtggattatatatacaaagacatatatatggtgtgatgatttaaaatcaattatttaatgaatgtaagaatccacacaacttaatagaaacttaatgagcctgtatcaatagataggaagttcctccagatcaaaataaataaataaataaataaaatatttaggaatgaagaatctcagtttctatcatgtaaagatcattttattcctcttaattaattaatagaatcatagcaaataagtccaataattattcttcagcagcagcagcagcagcacttgcagcacttaaatccactgatagatcaagctcctgattcatcaatcaaaaatattaattaagctaataagaaactcaaaataaacaagaatgaaacaatgatcaatttatttatttagttatatatatataaatatatattcatgagtttgatgagtagtatagtaaaagtaaaaaaagattattacctttccagtaatcttgctgtagagggcaaggacatcttttactgtggactcaaagtgagtagttgcatcatagctctgcaacaatcaattaggtcattcaatttacttaaaacagtctatgttaattacacataaataccacaaaacaagtgtataattattacaatgcttgatagttgatcttgtatcatatttgcaagaacaaattattataaaatcttatgttatgtttagttcggagtaatcaaggttggtcttgaaatttagtaggtcatataaaaaaaaatatttttttggcctttatttaaaaaaaatataatattttttaaaatcagtaaaaaaaaaattataattttaaaagggaacaaattttttgaaccaccaggttaagtgagctttaagcatatgtctaccccgtttatactcagggccgagtcttgaaataataaaagtagaagaatatgaatacgagctgaaataagattaaatgtagaataactcttttttttttcttcttatttttggaaggaattgacaaccaaaataatatgaaagccattctaatactttaaagaaattttttaatagcaaaataacttcttaaaaaaatttattagcaaaataaccatcttacacaaacataaaaggactattatagtgaccataatttaaattatggaaccataatagtcgcaccgtgtaaattcaatgaaaatcgattccttttcttttttaaaataaaagttaattattacttacagttgatatgaaacagttgtcgagttgaggatcgttagtgggtttgaatctatcataggtgtaataaaatatctcatctactggtccaagtagatcaactccaggcttcaattctagttctggattctcagtctctgcttctgttgaaacaaaagcaatatatttcccttttgcagccacattgtgagcataagaacaacaaaataggtacctatatatatatatgtatgtcaaattataagggttcagttcagaaaacatgtatgtaactatttagtagtatttaaactgaaggaaaggttattaattactgcattatccagtgttagagaaagatatatagttaacttacacatcagatttacgaccaagttgcttctgaggcagaataacttgggcagagtgagaatccatggtatttggaataggatggctcattatacatacgcacgagcaacttttccaacctttacaacctgttatacacatatgattaataggcaaggcaaataattcaaacacaatgtgtggtgttgattcagactccttagctgtttttactaggagaaattctttttctaatgatttaggatcatagttagaaaatgtagcaagtatgtatccaaatttccaatagtatctctaatacatatatattgggacatagctgtacatgaattagttgtgcatgctttttggatgaatgagcaacttgtttgactatatgactttttatttttgctttcaaaatgtatgatattatttagtttttaatgatattggtaattactctaaagaaagtcaaataattataccttatctggtaaatatgatggatcacacacaactttgttgcatttagctgtttctccctctgaggtcactccaattgcttttccatcactatcaaattctacctgcagtccaaaacacaaaattgtcataacaaaacactatatgagctagatgaacatccccacaaataagattaatgtaaggttccttaaagtctacaacacatataacatgtcaatttatatgtgacattacatatcaagctatcaaccacgaatcaagatcacctgtccaaatattatatcccatattatgtctaaccaatataatgatgacacattatttaatttatttttgtaaagtttatactctaaaactaac

SEQ ID NO: 37797 - DNA, 2824 bp, Cannabis sativa
  modified_base (891)..(891): a, c, t, g, unknown or other
  modified_base (2308)..(2309): a, c, t, g, unknown or other
  modified_base (2357)..(2364): a, c, t, g, unknown or other
atatttagtgaaactattaccctttaattctccttccttagtatccaaatataagtttggagaggaaattaaatcttcattacaaaacatcctattctgaacagaggaaaatgaggtctcttgcagcttcaaattgttcagatacacacttaagcgatcatgctctactcctgagagctcatcaagatccatttcgataattgccatcaaaaaagctctaagatgtgaatctcttaatggtaaagcatggatgaaatgttccactaaaaaccctcttgccatagtaagagttgctgatgataaatgtgtaaaaccctgttttattttatttttcatattaaaaccaaacaattacataaactttcaagtaatctaataatgtaattttcaagcacaagtacaaaaatatatattacctgaggaaaagaaacatcagatgtcaattcagatagagctgcatcaagttccttcaaagattcctggtgactgtccaagcagctcaaagttctcaagacctattattaacatagtaagtttcaatcacggtacatgttgtatttatacaacacaaactcaacaaacaaacaagaacttaatggatcaaacaacaagcaataaaaaccagaaaactgaaaaataaatgagacaagaatttttatacgggttttcagccaaacaaaggacctacttcctgttactcccttaagttgcttccttcataagagtccattttggtacaatatattatatcgtattgtatcttatagtattatattaaattatattatatttgatatttttatatagtaatatgtttctatattgtgatatatatcaaaatttcatatagttttatacaaaaatatgatatatattatatatatatatatntaaatttttttaatataattcaatctaatacggggtaccaaacaaattctaaaatgttgattacaatgctgagaaccagtcaagtgcatatccaagagccttacagaaaacccctcccaaaaagctcagctatagtttcaccaagaacactgatcttggacttcaggtttcccaagctctctctcactttacaatgctatcaactttcacttactctctcttaattcactctaaatttctacttacaaggctgaaaagaaaagactaaaacttgaactataacaaacttaaccgattctaaaccaacataacaagttcttactgtcaagttgttggaagctaattcctaaggattataattcatacagaaaattgaagcataccccaaatgaaaattcatatgaaagtataagaattcaatacaacaaaactaaaagaagaacaacaataaatgatagaaagttcttacattttcaaagaagaaagcccattgaaaagctttgttaatgttaatgggatcccagtgagcaatacgaccagaagattgatacccagatgtgagaatgagtatatctacgaacccttttatcagtttcatcaattcctccaatgaaatatctgggtggaaccatgatcccatcttcttcttcttctaaaattttcgcttagaagaaaaatcgcggccggctcgtattggagtctctgattttcccgccattcacttggaaaacgacgatagcttttatacgacatgtcgtacaataatcttagtagcattttttgataaacgacgataacttttatacgacatgtcgtatattttttataaacgacgatatcctttatacgacatgtcgtacataaagtgcaaaaaaataacttttaaaatccctattttgtcatttttattttacataaattgctatgttattctactagcatctacaaatggttaataatttttttaaattattattaaagtaaaataagtgatattaaattatagatatgatacatgagctatttttcacatatcctaatatatttaaaatgaaatatattatatattgaggtataataattaaaataagaaaatataaaagttttattacagtaaaaattaaaataaatgtatatgattatggaaaactagcttctttggcacttataaagggtaaatattatttttgataatgtgttttgtaaaaattattgattagacttcctgttttgttaaatgataaaatagatcctatattttttaaaatggtacaaataggactctaagttcaattttttattattttattttttaatataaccaactttaagacaattactaatacgaacagacacaaactgtaatcagttttataataaaatctcttgatctgattattattattaagttttattnngacaaaaaattagttcagggtcctgtttgtacaattttagaaaatacnnnnnnnnttttgtcatttaacaaaacaggaggtctaatttataacttttacataacacatggtctaaaatggtatttaccatttaaaagtgctagtaatttacaatatcaaacataaaatttacatatttggttgtacgtgaaactattttttcatatacgcatagtaaataactgtttaaactttatttttaatatcgtaacaattcataattttctaaaaatttatgaagtggttttaataattgcagcgtaagcgatcatacaaaaaaaaaaaatagattaaattttttttgtaaatgtgaaaacaggcataaaatctaccaaaacaacctttctttttagccaaaaaaaattacattttattaaatcaaatcagctaccaagatagcttccaaaccagcatggacaaaaccctcgtgggaaacacagtcaggaatagaactagaagaacgagtcaaaaagtta

SEQ ID NO: 37798 - DNA, 3012 bp, Cannabis sativa
tttttttttaaaaaaaaacagtgtgcgtacaatgagtaacataaagaatattgagccaatgaagcacatttcactcagtcaaatatttgggaatgcatatttttatggttgaaagacatgctaccttcatcaatgccatctttttcccaacatatatccaggtaacgcaaggccttcctatactttttaagagccatcttaaagtcttgtttctgtatccaataaattgtttttgttaacaaaacataaacatagaaagagaagtaaaaatccaaacattcatttccactaaatgcactttgatttgtttcaatagacttcaattgaagattactataatgatgtataaactcaattcatcataacagaatatgaaaatcaacttaaaaattaagaacacaagtaaagaaaggcaagtattaaataccttgtatgagtcattaccaaaggccttaactgcttcaacggcagtcatccaccatgacaagtcactaggactctcatcgagatcagctggccagtcaggatatatgtcaccatcattgaaaaaattacagattccatcatcctccccctcgggaatctccccacagtctgcaatgatggcctcagcagttgggcaatctccctcaccaattgtaatgtgctcaattgaccgtacgacccccattcctttagttaccttcccaaaaacaacatgcttcccatccaaatgagaagtacgagttgttgtgatgaaaaactgagagccatttgtgtctggaccagagttagccattgacaacatccccttcctttcatgtttcacttcgaaattctcatcttcaaatttcaagccgtagatagattctcccccagtaccatctcccgctgaaatatccccacactgaaccataaagcccttgataactctatgaaaacgaactccctataccaacaacataaataagagtagaatcaagaaaggcaccataactgaagcgcaagtagctatagccatttgaaaagcacaagagaatcactttatcacattcctcatatgaaaccattaacactacgccaggacaagaccaaaatacaaagataacttaatccatttagattaaagatatcccattatctcattactaaattctactaagcaaaacatcgatatatcataaaagcagtgtagaacaactataagaacaagaagtgattttaaaaaaaaaaattaaaacttcacaactttaaaacatgaaaccattgtcacctctatcgaaatcaatagagttcattaccaaaaaaaaaaccaaatattctacttttaagaaaaataaaaaaagacaccactttataattaaaacactagaacaatcaaataccctgatgttaataatatgatcaaataaaaagctaaacgaatataaccagtcagacagtggtctgtctggtctggtctcttcatcatcaagggcatcaccgtcttttcctcacccctaaaacgaaaaaactaaatccgtacattgtggtcaatgacaacgcaaaaaaatgtaagttgcaaaaacaaggaggggtttttaagttcatacgggcattctcgatttcttctcctcctatcaagaacaagaaaaatgaacccttttttttttcttttaccaaaaccatcataaacccagatgcaaacttgcttataaacacataacatgtacatatggattatataggtctcttatataaaaggaaaccttgtagtggagtgggacaccagtgttgggaccaatgcccttctctccggtacaaagagccctgaaattttcggcggttttgggcaccacatcgtcatatagctccaccactatcctgccttcgagctctcctccgatactaatatcaagaaaacaccttgtcttccccattatatgcagctctgctttctctctccttgcatataagtatatataggcaaaggggtatatacgtttgaggaggaggtttctagagtcttcttggtgaagttgtgtttcgttatagtgagaaacaagagacagaagtaactattcagaaccctattaagtcatccccaccaccctatttatttcgaaatgcctctctctctccctcttctactacctctctctctcccaatctgccaattttttcaaagtctcgcaaatctgaccgtacaccgtatactttttattttattcataccctttgtcctcttctgtattttactttttactccattgcttgtgtgagacataataatttggtggaaaaaaagaataaagtaggagtattgctataacacaatctctaatgttaggaggttaaatttaaaaatatattatttatttatttattttttgaatgaaaataatttttattagaaagaaatatccgctaatacaaaagactgaagagtaaagggaatatcacttgacgacctgaccaataacaagcaccacgtgccatacagtgcgcagctttgttagcagaccgattaacataaccaataaaaacattacttaaaaaagataaaagaacttgacaatctttaacaaataaacttaaaatagaaggcatagataccgaactaagaatagcttgaacaactaaaatacagtgtgtctctaaaatgacatttgacttgttattcctctttatccaactaagtgattctttgacactgagaacttctacaatttcgggtcggcagctgacagaagaaatagttgaaaacgcctccatcactcggccatcgcagtcccgtgctacaaaacccgtgcctatctcatttgtggcttcaaagaccgccccatccacattaatttttaactgaccagcagccggtttggaccagtaatctcttgtgtcaatgcgatttgaaaccagagacactgcgcccagccgcttagattgagcactcgtccattggcgaagagtggtacgagctaaccaaataacatcagcaacactacagcttctaccattccaaagcatatcattccgagccttccaaattgccca

SEQ ID NO: 37799 - DNA, 2241 bp, Cannabis sativa
gtcaatgtatgtaatatataatgcaaattaataattaatttcaggtttttggacaaagcttgcatcaaaagccaagatgggacgatgagtagtagtactactagcagtaacagaaaagagtctccatggagattatgcagtgttagtcaagtgaatcaagtgaagatattgctgtcagtgattcctatcttcgcttgcacaatcattttcaacaccattttagctcagctccaaactttctcagtccaacaagggagcatgatggacacccgtctcaccaaatccttccacattcccccagcctccctccagtccatcccatacatcatgctcatcttcgtggtccctctctacgacgctttcttcgtcccattcatccgccgtttcaccggccacccctccgggatctcgcccttgcagcgaattggatttggcctcttcttcgcgaccttttccatggtttcggctgccctaatggagaagaaaagaagggactctgccaccaaatcaaatgaaataatctctatcttttggatcactccacaattcttgatcttcggaatatctgagatgtttacagctgtaggtctcattgagttcttctacaaacaatccatgaaagggatgcaagctttcttgacagccataacctattgttcatactcatttggattctatttgagctcccttttggtgtctattgttaataagatcacttcaaggtcctctgatgggggttggttgggtgataataatctcaacaaggacaggcttgacctcttctattggctacttgcagcactgagtttccttaactttctcaattatctcttttggtctagatggttctctcgtgacgattattcatcttcatcgtcttcaactactggccaccagaacatggaacaggatcacctcaataaaattcattgcttcaactcctcaaaactcgatgctgctcaattaggcgaacagaatataccataactacttctgctgcttaattattaattattatatatttatatctagcagggtgtagcctgaaatatatattatataattaagttgctgaaaaaaaaaatcatatacaaaaaaaggaaaaattatctaattgtttccataaaatgtatagaaataatataagctagctagctgtatgtgttatacagcaccataatattagtgatatatatgagaaagtggcatggatttcatctagatctcttaatttgaatatccttaatttagacaaatatatatttcgccccaatttctttgaattaaaacatattggaaagctaactaaatatatattatttgtgtaattgctagttcttttataaacaatatttctaagtcatgtgttacaatatattggaacaataatattgtagcatatctgaataaataatagaatgaccaactttttgaggaccaagcagtttgtgtgtgttgatttgaaaaagataagtctatgggaatttccggtataataataaattaaagctatacatatataataatgtatatatgttattatatataattagaagattcattgcactaaaatataataagttgaaaaacttgacatatatatatgtggatggctgtggatgatccccctttgattaagggtaggcgtctttccatcactttgttgttgggaggcataaaataaggatttgtaagtgcttcctattgctagtgcgttcttacttgaataaagttggtgctttcatgaaaatcttactgcactgacgtgatgcatgaatttggtataaatatatatatatagatacgaaattataaaattagctatactcacaacttttttacgaaaaaataaatttaattattaacgaagtcaaaaagtaaaagtaatttccaaaaagagagatatatatagtaactgattaagaagaaaaactagaataaatgttatatgctattcatcccatttgaagcttctcagctcttacctttctacgaagagacatgtctgggacatgtcttctatgttggaggtaggacccctttctcacccatttgcaattccttcttaaagtaatggaaaacttgcataaatgtagtgttggctaaaagattggcatttttaagatagagggggtcccccacacaaacctctcaacactatcatacaaatatatacatatatatatacactaaatagcatcaatttaaatccacacatatccctgttaatacataaaggcc

SEQ ID NO: 37800 - DNA, 4875 bp, Cannabis sativa
attggattggatcgtgcagattggattggatcggatacttagtgaacacccctaagattaccacactttttttttcgataaatctcaaccacacttttaatggaagcaaaataataaaatagtcattattgtaatgaccataaccaaacttttcaattcaaaattatataacatattaaagtggcgtttagtaacatttgtattttttttaattttttattcacaaaaatgaaagtaaaatttgtgttttcaaaattttatttataaaaataaaaatgtgttctataactacctttatttttaaatttaaaaaatagaaaacaaaagtgtgttctataactttcactttcattttcattttcattttatgattttatttaagtcgggtccacgtccggccgggtctgggttgggactgtggtccgagtccaggaatggggatggggtcagagttcggggcccaaggtctaagttaaagtcggagtccaaaatattgattaagaaataaaaaatgtttacaaaaattttgaaaatattttttttttatttttaaaattttgattctaaattaaaaaaatgaaaacagttttataaaacatgtttatagaaaatatttttacttttctaattaaaaaaatagaaaattaattaaaaaagtattaccaaaacacaccctaaattaagattttaagattaaagtaaaagtttaaaaaacacttaatataaattctaaaattttctaagcaatgtacatagttgaaaaaaattacccatagtttttcttaatttttcatatcacaaaataaaattttccaattcaaatttatgaaaataataatacaagttgagtcagtttcatatggagatgaactctctaatgtgcccagtttgtgaagatgaattagagactcatgatcccacttttttcaaatgtatcatgtcttgaaaagtcatggacttgatctttgctaggatgagattcagaggttggcccttagattttgttggctggactgactggattgcttcgaaaggtcaaaaccagattcagaggtttaatatcacaattctaacagcagtgatttataacttttggctcaacaaaaataggtgtacttttaatggatattctatatcagtattggtgttgtaaatgatgtaaagaatattataaagtatagattacaaatagttaacaatagaataatgacaaagttggagatagattatttgttaagtttgcaatgtatttagaaataagcaagcataactgacgaaattttctcaacttcccaaaaccccgagcattccagcctataacattcatggcgaatggcgagcttatggagcaacacccaccagaccagcatcgacgtctacaacagaatgtggagaagagtcctcagtcacaaaggcagcatcagagttcaaagcttcaagcacatgttcagagattttagtcatatccataccaacaggttcaacatattcagggccagagttatcattgtgtgattatgtgcaacattgtttcagaatcgaacgaagagagttaccatattgaatgtgttgcctcttttaaatttagggttcatggggtttagtaattgtggatggagtagtggttttggagagtattgtatcagtttcagtagggatcacggtagtggtactgagaggaacatatgtaggtggcatggtagtgtttgggaaggtttcctagggagcaataaggattttgctgccaagtcggctttgggaaaaggtagcaggggagatggtcatttatttagttgggtggatatgggaagggagggtagagggtgaaagaatttgagatagagcatggttgagacagaggggccaagctacattttgaccagtttgctctctcgagacacgaccctgtccaagacgtggtagcggatccccctttatcaaagaaccataaatagggagtttgggaagagaaaggttaataaagaacaggaagtgagaattttttttttaactaatttcacaactttaacctcattacaatcttcaattaatacataattatacaataaacttggggaactcattcgacatcaaaatcccaaaggttcccaaaattaagtctctcctaattaattaaattcccaacacacaaaaacaacttcaaccttacacaatttacataataaaaacttaattatacatacatataatattgtctaaacagattgtcccttcttgttgttgtctaatgatgacgaagagctattttcccaaaacttataatgcaaactcctcatctccaacatcttctcaatttcttcaataggaagtcctttagtttcaggcacacaaacaagaacaaagattagggccacaactgaaatgaccccaaatatgaaaaaggtccaagaggtcccaatggcttgagtcatggacaagaatgattgggccacaattagatttgaaatccagttagctgtggctgcaattccaccacatacaccacgaaatcttagtgggtatatctctgaattgacaatccatggaactgtccccattcctggtgagaaaaatattatgtacaaggcaagtgccacaagtgctagccatcctaatttgcttgggcaaccccttgtgtaccatagtctctcttcttgtttgcacatctccttaacgttgtcgtttgataccaaacatgctcccggaagtaactgaaagttatgaaaaatattttaattaataaatttatagttattcattcttttaacatgtcagaaacatctctaaaaaaaaataaacataattcaaaatttcaaaggaaaaagctaaacacgccacaccatgagaaacgcaggtcttgtgttaagacagactagactcatatctaaagtccacctagcttaggggctcgcaaatttttcttccttttaacatgctaggctcggtcttggattacgcctagggtccacccaacttagtggtccgcaattttttttctctttataaatacacatcttttttggtaatttatcacatacctcttaaataatgaccaaataatttaaattttttctaagtttcataaaatcttagagtcagtatatctattagtgtaagttaatatttaatcacgtatattttattataataatgaaatgtatagaaaaatgataactatttataaattattaccttttttgggcattataaatttcctaatagtaatcctctaatacaaatgagaagaaaagctaggctagtttatttttagagcattaatatgtaatattcataatgttcaaattaactatgtttattatttgcaatttagtatatagtcatatatatatataatctattttaaatgaaatatgtgtggtctaatactaaattacactaaagtcatgtaaaatggtatgggatgattgacttccttttaacaagttgctagtgtttaaatgaaaatttttaatgatgttatgatcactaaaatagaattccattattccattgtatgaagtagtaaataatatactataaaccaaattctaaaaacgacagaagataccttgtcgtttggagaagcacaaaatccacaatccggcttagaagccttcaaacacttcatacaatcccaagttccagcaccaaaaccagcagagccataatccgggcaagtaaagttcccgaaatgggaggtggcggcgacactcaccgcgggagaatgagaagtagtttcatgaaaaacagcagacaaaaggccaagtgagacaataacaccacacaaactaataaccaaaagcttcttcctcccagtcctatcaataaaataaatgctgacaaccgatcccaaggcgttgagtcccgccgtgacaagggaaaggagtagcgcggtttggttggaggcaattcccgcgagctgaactatggtggggctgtagtacatgacagtgtttatgcctacaaattgttgagcaatttgtaggcctacgccggctaataagccgcgtctcactgtttttgttttcaatagttgtgtaatgttgattttctcatctaatcctttttgttgttgttctgcctctattgactcttttagaacttgcatttcggtttctacttcctcagctgtgtagatttttagtaaaattgcttttgcttcttcttctctgccctgtatatttacacacatatataaaattattagtaactataatacttccacactatgaaattatatgttatatttgctagaattggaaattaataagttgtaataacaagctaattaattcataatttcatattcttatagctattaatataggagaattttcatttttatggttttcttttatgcaaagtttacaaaattttcattacatggtaccccaattaaatgctccagcgattttgagttaggcatttcaatattatgatagttggattcaggttcagaaatcacataagtatacagctaagttttctctcgccccaagtgttattatttgggtagcacctccaactagttcgttaaagttaaatgtggatgctactattagtggtgaaaatgacactattggtttaggggccttggttcgtgattctgatggctttccgttgggatgttttgctaaatctttgactagttttttctcccctaaagaagctgaagcattggctatttcttatgttttaaacttgtgtttggaattaggcttttttgtttcttttgtggagagtgatgttgaaatcattatcaattcagtcaactcttctttagaatgtgtttcccaaagggatagtattgttagatctattaggtccttgttatctgtttttccgagtgcatgtcttcttcatgtgatgcgaaat

SEQ ID NO: 37801 - DNA, 4804 bp, Cannabis sativa
ttcctttcaaaaaaaaaaatatatatatatatatatatatatactgtattttttttaacgattaataaatttgtaattagcctctagaaaatgatcttttcttgctccatactcaccatctccttaattgatccattcctctttattttaccaaacatggcttaaaagttaaaagaaacaattattgaaaaccaactttaataatcaggaggatagtggtggaagaaacactgggggtccattctttattataataaagttaaaatgtgtgggcatgcacctgatgctaaagcaaattaaaatagttttaatgcataaaaagaaaaagaatctatgcatcactatccaacaaaacaaaatatatagaaccacataataatgcatcaagtgcttgatttctagctactttttaatttttagtgtgtagtgcaagtgaccagaatctttgaacttcatttggctctcctactcctaattaattagcaaatattgatttcacaacacttctacttgtcctgaaaaacagtactctcctaatctctttctggcaataccataaacaagatatatatatatatagctaaatatatacaagaggtaaaagaatcttccatttgatgatataatcattactgggttggtaagctttaagatgttacatatatataattatctgtgtttttacgtaattattatagcgaactacttcatttttctgcagatattctttcaaaagtttggcacatatagaaatcaacacacaaaagcaccttacctttgggaacaaagcgatccacatactaattaattagggtatgctttttctattaatatttatctacttatcatgcatgcatgatgcattataacactaattaaatatattataaataactatatatttcgtacgtgtatatatatatatatatttcagattgtacgtaataagaacctgaagccatgtcggtggcagaagctatggtctccagccttacgcagtgcgtttacactgctcttgtgaaccacgcccagttcgctctcgaattcacaggccaattcgagcaaatgaagacacggcttgatctcacgaaggcttttctcaccgacaccgaaaatctcaagcgcaaaaatgaagttgccaaaacagctctcactaagctccgagaagtgcttttcgaagccgataacatactcaccgattgcctagtcagagacgagtaccgcaaaagaggagtttgctttggctattcactcgaggatccctttttcttgcaccaaacagggaagaagttaagagacataaattctaaaatggagcagattgagaagactttgggaagttttctcaaagccccggaaagcattcacggcgatgaaacatacccaattagacgtttcacttctcaagattttaatcccacagagataattgggatggaagaagatgtaaagaagatcaaaggttggatctttgacacaaacgaggcgcttcaacaggtggccattatagggatggggggattggggaaaaccacgatcgcccagaaaatatttcacgatactgaagtgcttgctcgttttgataagatgatttgggtccctgtttcgaggggttataatgaggagacactggtgaggtccatgttggagagattagggaaacatgtttctgggattggtagtgcttctcaattgttgggagaagttcaacttgttcttgctgacaaggcttgtcttattgtaatggacgatgtttggcaagtgaatgtggagtggtggaccaacttgtgctctgtttttcccaaaagagatgggaaaaagagtactataataataacaactagaaatgaaggggttgctagtgatatgggggtagagagttcaagaattcacaaaccggaacctttaaatgacgaacacagttggactttgttttctaagtttgccttttcttcaaggaagggaatttgttcggatcccaatttggagaaattgggcaaggatatcactgaaaagtgtggggggttgcctctagccattaagaccattggggctctgttagcagcaaagattgatcatccccatgaatggagggatatttccaagaattttcattctcaattgacaacaggagggaaaagtagctcagttatggcttctttgcaattaagttatgatgaactcccagctcgtttgaagcaatgcctattgtgcttttccatttatcctgaagattacgagattagagcagagcaactcatacattggtggattggggaaggccttattcagggcaagagttcaaagtcagcctatgaaattggttgtgaatatttgtctgagcttatcaaaagatgccttgttgaagtggtcaagcaaaggtgttacgatggaagagtccacaactgcaaaatgcatgatatggtgcgagaactgatcataacaaatgctgaagaagaggcattttgccatttcgattcgcagggcattcaaacaccgaatccaggttctcgatggttaggcttcaccatgcaaatgaataagaattcatcattgagacacgtaccaaagctcaggactgtgttagtatttaattcaagttgctgtagtgctgacttcaagaactttggggtacttcggtccctaagggtattggatttctctaacgtccgacttgaagagatcgatgtggatgatctctttaaatggatcagttctctaaaacgtctagcttctctaaatctcacaggagttcaaagcttagaaactattccaccttcaattcgaaagcttcgaaaccttcaattgttagttttatctggttgtagtaagctgaaaagattaaaccagtcaattatcactttgaggaagttgattgtgttggacataggattttgccctcttgagttcctacctcgtggattcgacaagctttgttaccttcaagaactcactggattcaaggttactaatcagtctaaaaagaactgctgtcaatttcaagagctcaggggactatcccaactaagagttttgaggatgagcatcagtgatgaaacagaaatcttagaaagtgaaatgaacatcctgtgtgagctaaaggaactcaagattttatccattgatgctgaaaattgcaggagaaacaagaaggaaatcttagggatgattgataggctagcacctcctccaagcttgcaagagttgtatcttaggaactatcacagggaaagtcttcccatctgggttaatccaggaacgctctctgaattgcagtatctttgcgttgagaaaagtgatatccataacttgagtcttgagactgaagataagaattgtaataaacgatggaagattgaaggcctgtgtttgaagttcttaactcggatagacatggagtggaatgagttacaaaatgatatgccttcgttacgccacctggagattagccattgttacgagttgaaaaatttcccatgctctgttaagagccccggattctggtccaaaaagtaattaaggaaacttgtgggaatcttgaaaggtgatatttgattgctacttattcgtgtgtgcatgtagtattcaaaattctacattattgtgttatattttattattactatttatgctagacagactcagatatttgtgagatgagatactagaacgttggtgtgtttcaaataaaatattgttcaagtgtgctattttccttcttttcatgttttgtggagtgtactgtttcagcttgctgttgtctcatttctatttcagagatgtatctgtatttaactgaaaataataataataataattataaaattaaatacaggtatggtaatataatatttactctattttcttttttatctgaggtaatatttactctttagttatattgttaaactccttaaaaaggattaagttcataatccactcttatgattgagtgctatatatagtaactaggaatattactataatcccctcacgaaaattttctcttaattaaaagtaaatatatatatatatatgataggctagttttagttgcattttataattagaagtatatttcaattgattatttctcttgttttctatttgtttcaagtttaaatttaaaaataagtagaaacatgttaaatagatgaattatcatagaatttggaattctaggattaagtggttaaaaattttaagtttgtgatgttcaacagctccgtttgtgatcgaaatttaaatttgaagcttcaagcgaattttcgactatgatgcgttcactttgaagaaaaatattgtgaataaaaattctagatctctactttaactttccaaaatatttcgaatcgttcaatttcaagcaatattgaaagagttatgaccaaaacattatcagtcatcgcattaagaagctcgctaccaaaaatcaagcttcaagtgtcgtggcccgcctcttttaaattgtgagaaaattagagttttatcttttttttagctatataaaagattctttttcaacacttttcagtatacaattaaggatggacgaaagttgaagcaaaagacagctttagagacttttgtcaacattttaatttcaacgagtccttttcttctactctagttctatgttcttagttaattgttatcggatatttttaattataaagagtaacaagattttttatttagaaagttaatggagattgtttgacattttattcttgttttaattagtgtgatttaattctttctcaattttttatgtgcattgtaacgtccccgcttcaagcctcca

SEQ ID NO: 37802 - DNA, 5103 bp, Cannabis sativa
gatttgatccaatggctaataatagaatatccatttatgggtaatacccattaagagcatgcccatacatatatatatatataaataatttacaacaacaacaacaagaggagagtgaaagaattaggaattattttataaatacccaaaaatgataaaaaaaaaaatctacaaaaaacaaattattatcaaaaaaataaaaaaataaagggaggagtatgctctgctagggctctgactcagagaactctctggcacaatggcaggttggggccgtccacgcaaggcgtcttctccggcgaacaaactgacgactggaacgaagacacatggaaaacggaagattacaattaagaagaagggtccgtcttcttcagatttggtgctcaaaaccaaatccatggctgcgattttgggggcagatgcgttatcagtatcagaagcggacgacgacgaagaagaagtgattgaggcgaaggtagctcagacggtagaagaggaggttgaagttgtctctccaagatctacagttaggcaatttgtggttgaacaggaggcaaggtctgatttcttgaattttttagctgcaacaaagagatgtgaacaacaggtgcattctggtaaaactcctacacctccaattttacatgaatcaaccatgaagtcaaaatcagtgatacagaatttaagtggtaaatctgacgattccaaaattgaaaaagaatagaatataaaggtgaagatagaaatggaagacattgaagatgaaatcctttactggcaatctgcaatggtctgttatgtattgagagctaatcccccaataggagcctttactggttttgcaaggagaatttggaaggaaaagggaataggtaaggtgggtttattgaagccaggaatattcattgtaagatttcatgaccctagtgcaagagatgaaattatgggaggaggctacctgttctttgacaaaaagcctattattgtgaaacaatgggatccagggggttgaataattctcagctggaacccaataatgtttcaagtaaatatacagttttgctcgagacaactgatacatgtagaagtaagggctggaaaggaaaattttcaagtgtcatttgtgtatggcatgaatgaagaaaaagagagagaggagttatggaaagaactgatgaatctggcacaacgaattaatgaaccatggattatgatgggtgatttcaatgaagtgctaacagctgaagaaagaaaaggggaaagagtaaagcttcacaaaacaaaacaatttcaggaatgtgcagagtattgtagaatggaagacatcaaattttcaggtaatttctacacctggtttaacaaactgaacaaagaaggaaggatatggtcaaaaatagatagaattatggggaatcaaatgtggctacagaaatataattcggcagaggcagtgttcttaccagaaggaaactttgatcatagtccaggtgttctaatggtgcatccagaagttctggtagtaagaactcctttcaagtattttcggatgtggaagaatggacctgagttccaagagaagctgagacacagttggcagcaaccaatcgaagggaccttgatatactgtcttactcaaaagctaaaaagagtaaaaatggtgctcaaagatattaatagactggaattttctggcattcaaagaagagatgaacaggctatgcaagagcttttggagtgtcaacaagaacttcagaaatctcctttaagtggtgaattaatagaaagagaaatccaagctaggaaagagtatcaaagaatttacaaagcaatgctttcttttcttcgtcaaacaaccaaggtgcaatggctcaaagatggagacgagaacactgcaatatttcatgcctcaatccgagctagaagagcagccaatagaatatattccatcaccgacatggagggttgctggacggatcaaccagaagaggtgagtaaggctttcctgaactattataatgacttgttgggcactaaaatggagagaagaagacttgtgataccaagcattataaagcaagggcagattataacagagcaacacaagaagatgttgatggcagagatcactccagcagaggttaaacaagcaatttttgcaattcctggagacaaagctccaggtcctgacggattcagcaactttttctttcaagataactgggaattagtaggaaggaaagtaacagaagcagtgactgattttttgaagacaaagaaattattgaaggaactcaactcaacactactcacactagtgccgaaaaagaaatgccgtgcaaatgtaagtgaatatagaccaattgcatgttgtaatgtcatttacaaagtagctactaaaataatctgctctagattgagaacagtattgccagacccaatagcgcaaaattagagcggatttgtgcaagggagatacattaattgcctacaacatcatggtttgtcaagatcttgtgaagcattatggaagagccaatgctagggcaaactggatgattgaattggatattaggaaagcatatgacacggtggaatgggactttatagaagaagtgttgcaagcatttgaatttcctgcagacttcatccaattagtcatgtgctgcataaggacacctcgttttagtctaatgattaatggagagatgcaaggctattttggagctaaaagaggacttcgtcaaggagatccaatgtcccctcttatcttcatacttggcatggaatatctataaaggattatggacaaaattgggagtaagaatgatttcaagtatcatgaaagatgtcagaatctgaagttaaaccatttgtgttttgcagatgatgtactactgttctgccaaggagatttctgatccatctacctacttttacaatcttgaaggagattatagctatatgtcgatcatttctttggaaagggaaggctgaatacaatggctcgggggatatagcttgggataacttgtgtagatcaaggaaagaaagaggattgggatttagaaatctactgtattggaactaggcagcacttggaaagtatgtatgggaagtagcgacaaaacaggataacctttgggttaaatgggtacacagtgtctatataaaaggtgctagctggtgggactatacaagcactaatcaaagcagctggtattggcgacaaattgttcaagtgaaagaggagatcaaaggaaaaatcagtccacaacaatttgttttgaacaaatatactattcaccagggatacaagtggttaacaccacactttgaaagcaaaacatggtctggagaggtatggggaaggtttctcattcccaaacacctattctttgtttggttggctgtcctgaattgattacaaacgaaggacaggttaatacgattcaatattgtgactgataaaagatgcatgatatgtgatcaagcagatgaaagctcgaaccatttgttttttgaatgtcacttcagcaggaactgtatagaagctgtcaaaggatggctttgatagaaaactactgccacaacactccctcagctactgaaatcagtaaggaggatcaagataacaaagtttcagaagcaggtattggccactgctcttgctgctgcaatatatcagatttggaaatgtaggaatgaggctttgtggagcaaaaaggtcagctcaattccaacggtggtttaccgattaaaaaaagaagtaaagctgagaatagaatcaattttaccaaagaaagtgaagcaaatagatagagaatggtttgaatacttgtaaaaatatatagtatagcttgtgcaagttgtatagcaggtgcaatgatcatgcatttattataaggtgctgtaggattgtaaaaaaacatgttttgaggtatatatatggctaaatttcacaaaaaagaaaaatctacaaaaatatagatttacagttttttttaactttttcacgaattatatttttatttttacaaaaatatggatcgaaaaaaaatattgttttcactttgttgctacatgaaaacaattttaaaaaaaaaaaaaaatgtaagtagaagaacaacgtttgtgagaaaaaatccttaaaaaatcaattttagatattttgtttaaattttacaaagaattatatgtattatatttatgcattttatttaggttagacttggaagtaacaccaaaaaagagttagattgacttatctaattaatttaagtaaatatttaattttaaatttatgctacattgaatattttcaaggaaaattaaatacacaataagctaatcgtgtcaattacatgtttgaataaaacacgcagtctaattattcaacaaggtaaacatgtcgtttcatatatggcatgttaactaaacgatttatattttaggtttattaatacgttcaataatattgtatcatatcttaattgcagccttaagttggaccttaggaaaaataaattttttggagccctaaatataagaatagatgatattttctctttgtttgggttcgggctgggtgagccctaggcacgtcctatagttcgcgtcaataaaaaaaaaggacataattagtatagaatataataaattaacaaattatatgaatcaaataaaaaaaaaagcaaattatataaataaaatatatacatataataagctaattgtgtcaatcacatgcatgtttgaataacacacagcgcgatctaattattcaacaggttaagcatgtcatatcatatatcacctaataactaaacgagttatgtttagatttattgacacgttcaatattgtatcgtatcttaatcacgactttaagttgtattgggtcttaagaaaaataaatttttaaagtcttcattataagaataaatattatttttaaaaattattgaaaaatatgtatattttttaaaataattttttctctatttggattccttataggtcgccttgcttaatcgtgtcgattaaaggaagacataattagtatagaatataattaatattagcaaattatataaatctcat

SEQ ID NO: 37803 - DNA, 4502 bp, Cannabis sativa
cggaaggtaaccggtaacaattgaacttaaacctggtctgcaatgtacaatttatcagtttcaaaatagtaacaaaatagtaaccaaaatattctcaaaacttacataaactgtacagccatagctggaggaaaccatgtcttgagcttttcgaatttcgctattccttgaacagcagttactggaataacaaagaaaatggtaagaactgaggctgcaacaacagctccaagtttgcatagcgacgataatctacttggaatcgtcaaatttcgccacgagacatctcttggctctggagccatgctactaatccaaagaagtggattcgaatgctgctgagattgagccactagcgctgcagcaacccgcgtcttgaaagtaacgaatgcaacgggaaattcctacgaaaacacacagtataactatgtaacgtcatttcacaaatagaatatgagtgaaataaatgaaaattatgagtaatcctattagagtttagcactgactcgaagagtgagacccaatactggagacatgaataattcaccttttgtttaagagtattttcgcattgtaattgatgaatcttgagacgaagacactcgagcttttcctcgagcaaagctaatcgttctttctcgcgttcagattctttcaagaggaaaattcccctcttagtttgtctagcaatggatctctctttcaaatcatcaatctttcttgcaatcaattttgcctgactctacacataatatgatctgtagtaagagacatcaaaattcaaaccaacaacatgaaatgtttgcattgtaatgttgagtttatgatcaaagtcataccactaagtcttcaacatcttttccagtgtataaaatctgataagaaaggtaatcatgagggtaatgtttagagaagaagtgatcagcacaacaggcatgagcattgtgtacattacaaaaagggatttccctaatcaaaacagtgaattgatcgggacgatgccttatgtgtcgaagttgttgaattcttatgatcaaaatttcattatattcctgaaaaaagaaaaagtaagaaatcagccttgttaaacttcgtttaagaaaacttctacttttgcttatatctaaaagtataaacttgtagagtttaaaagccgagttgaaagtgctttagaatcgaaaactcttctttaaaaatctttaccagtttctctaaggaagcatttttgaacttggagagaatgaacaacgattgaagctattttagtttcaataacatatattgttataatgattgaaatagcatgataaccttaattgtcacaatttttaaggagagccaagatttttcgaagtataagaaaggcaaacctacatttttctttcaaattcggaaagctataaattcttataagaaaaacttaaccaaacgaggcctatatttgagagttcaaagtcgaaaaacaaggtacataatgtgacattcaccatatataaaaaacttaagccaaacaaggtctatatccgattttgagagtatttccgataaatgtgacaatcaccttaaggagtaaacataaaaattcaacataagacaaacttagccaaacgaggtctatattcaaactcgaaagtagttcaaaatcgaaaaacaagacataaaatatgacataattcaccttatgcagtagatttataccattaaggcattaaccattgcagtagatataaaagttcaacataagaaaaacttagccaaacaaggtctacattcgaattcaaaagtagttcaaaatcgaaaaacaaggtacaaaatgtgacattcaccttattcagtagacataaaaatttaacataagaaaaacttagccaaacaaggtctacaactaggtagagaatgtgacataagagaaacttagccaaacgagaccaatattcgagagttcaaagtcgaaaaacaaggtacacaatgtaacattcaccattgcagtagacataaaagttcaacataagaaaaacttaccgaaacatgggatctacattcgaattcgagagtagttcaaaatcgaaaaaaataaggtacaaaatgtgacattcaccttttccagtagacacaaaaattcaacacaacacaaacttaaccaaacaaggtctatattcaaattcaaaactagttcaaattccaaaaaaaaaatgacataaaatgtaacataattcaccttatgaagtagatacaatccataaagagatataaaccataaacaagcaaagtgtatccaaagcctgtacacaatcaaaaaacacaactataaaacattattacatagaaaaaaaaaacagaggaaataatcaaaagagtgatgaaacattacttgttagaacctcttgaaatatttgatatagtgaataaatccatagagtgatgattattactagtcatggaatttttaacatgaccattataattaacaggaagaagtatgacaatcccaatgagagaacaaacgacaaagaatttgataccaaatttaaagagtctaataacaacaagagcatcaagaccacttgtgaggagtatttcagtttctgaaacatgaaaggctttactaatccaagacacagaaggaagaaaacgacaagattggttttggtgatgaaacgactcgtcgtttgagagtgagaggcgtttagcgtagtagataggtgcttttgaaggttgttttttgaggatggagaagagtgagaggactaccatggctaatcctatgttaatggatgctgaagctattagactttctgggttcattgagaaaagtgttgttgatgatgaattgagggtgatgatgattgtggtttaaggtatgaaactaatgtgaaacgaaaactgttgttgtgtatttttgtgttgttgaggttaggcggtttcgagtgtttttgagaggtgtgaggggacacgtggcgtgtttagagggtgagagaggtttatttatatgtttgcaagcgcatgctaccttaatatagaggtgatgtgatgtaattgtaagttacatatttttgctacttataacttatctcattatcatccttaactaaacttacgttttttgttttgtttttagggaaaaaacaaaagacaacgcacatggattacaatgaaaagggaaaaagaattcatgtaagggagaaaaaatgtggttgacagaaaagtgaaactagaacttgagattggtctggttaaagaatttgctgggacatgttgaaccgggatctccttacgcatcactttgttccgaaggtcaatttcaatatgtttcgtgagagaataaagaacaggatttgcaaatagatgcatgacactcatgttatcacaccaaaagagaggagtggaagaaagttgttgcaattcagagagcagagattgaatccaacttaattcaatgaccactgcagcaaggctgcgatactctgtctctgttaaagatcttgaaatagtagattacttctttgattgccagcagattaagttaccacctagaaagatgcaataactagttgttgagtgcggatcatcaagattaagttacttctttgataatcttaacccactgtttattggagaactatgagttttgacaccttgcaacttgactttgcataatatatcttgaatatacttttgctgagatagaaaaatttcttatgttgtttaagacaaatttggaactcagggctgtgattaagatggtgacttgatgagaatcacttctagtgattagaatatcatccacataaatgagaatgtagatgacacatggctgtgagaagagtaaacaacgaatggtcaaccttggtaggggtgaatccgtgttgaagaagaacagtggagagcttttcaaaccaagctctgtgagcttgtttgagactataaatggccttatgcaacttgcacactttgttgggatgattaggatcaacaaaacctggaggttgcaccatgtaaatgtcttcacgaagatcaccattgaagaaggaattattgacatctaattgccttacataccatcctttggagaaagctatggtgagaacaactcggattgtgacaggtttcactactgggctaaaagttttatgaaaatcaaacccagcttgttggtaacccagcttgttggtaatacttctttgcgaccaatcttgcttttaatttgttgattgatccatctgagttttctttaattctaaaaacccacttgcaacctattaattctctgttaggaggaagattcaccaaggtctagttcttatttttcttcaaggcattgtttttatcagacattgcagcatgctattttgcatccttgagagcacttttgatagaagcagggataagagaggccatgagaacttcaggtttttgaatgcttgatttttctcgagttgtcatagaatgcttattgaccacaccaacaacatgtgcattagtagagacagtgccaacagatg

SEQ ID NO: 37804 - DNA, 3845 bp, Cannabis sativa
  modified_base (1782)..(1783): a, c, t, g, unknown or other
tttaaaaatgctaaattgaagatcaaaattatgttaaaaaataaaggtcaaaattttcactgaaataaatgtgtttctaacaaatcctctctgtcagctgatgagtggtaacacctgtaaattgtgtaaaattctaggataatctaagaaataaataggatcgccacttgtcgagcaatggtggatcacagttgtggtagtgggtcccattctccattttgtaaatgtcactttcagaaacatgcccaaagggtacacatgtatggccatcagctaacaacgtggagacacttccatttaatgaacacattaagaaataaataaataaataataataataataataatagaaggcatggagcataagctaaagaagaccccatccagtaccagcaaaagattataagcactatgattgggcttggtaggtgcaattcggagcccacaactaaattcaaaaaggagttttttaatcgtattatgtggacctgggatccattttcatatcagattcagaggttagagattacgattataaaagaaaagtgggtttataagtcttacttactagggtaaactaagcaattgcttaggataaactagccaatataacccgaggctattttaatttttcttaatattataataaaaaataattatttaatgatatattatataataaatagtaatttaaaataattgtaatataaaataatattaaaattatattatctaattacatattatcatcaataatttatttattaaacataaaacttaataaaaggaaaaaaaaaaattaaatctatttaccctattttaattattattgtttgaaagaaaaattcattagtgtgtaatagtatttgtttattaagatatgtaaaatttatactactaatgtggaatagaattttaaatttcattttttttaaaaaaataaataaatatataaggtgatgaattagagtgtttattattattatttaagtaagcacactctttactctttctcataagtattatttttatatcatcatcatttaaacttgttatcatcattatatttcctgttgttgtcattgtatcacacctattgtcatcaccttatctccaccgttctcactgtatttcactcattctcaccacatctcattcgttgtcaccgctaaatcttattcattgtcatcatcgtattttaattgtagtcaccattgttgttctttctaaatctcaatcttaatcttaagttctatcccaaattataaatattttcattaacatatctttaagatctaaaaacgactataatagtcccttaatcatacatcatcaaaaacaaaaattcaaacttatcacttaaataatgtgtttaatacctcatctagtctagaattaaaaatatttaaaaatgttaaatacattattatttttttacactttatatcacatcatttttatctcaatatatactaaataatttacaaatttaaattatatatatactcacactaatcaaaattcactataaaaatataattaataataaataaataataaagtaatatttaattcattatcctaaaaaccattcaaaccaaataattcttttaaaataaactatttattttatatattaaaaaaagaactatatatgtattagagttaatcctacattgctaatgtatggaaataaattgtcatatttttaagatgaacgagctactcctctcattgccaattggttttgagataaaacctcattcatcttatctcaaattnnaacatggtatcagagccacttgtgttctgtggtgagatcaaagtggtaccagttcaaaaaagaagagccaaactaaaaaactttcgctgttttttctttaacctccatttggacctttcggccaatgtgtgctattttccaatattggggtctttcacttatttcaaaatctacaaatttctcgacgtgtacacccataaaattcctaatatttggcattatggtattctttcaaatgtcacgtccggccttgtgatctcttaaagatggttcgttatacccacacttttcaggcccaaacgtaaagagagtgtattagagttagtctcacattgctaaagtgtggaaataaattatcatatataacatgaatgagctactactctcattgccaattggtttgaagatagaatatcattcatcttatctcaaatttactactctcattgccaattggtttgaagatagaatatcattcatcttatctcaaattttaaaattatgtaataaatctttaaaaaaaataaagtatgagtatggaagataatttaattgttatttttatttttattttttaaaaatatgagagatatattagttcatataactaatatttaataattttgtaatgtataatattaattagttttattgaactaaatcaggtatgcaacgaaatagtaatttatgattatcaacgtactacatcctcaagatcaccatatgtatatatattaaatctgaaaaaatagacaaaaaaaaaaaaaaaaattacctctttgaagcctatcagggtattcttgtttcttttcttatgttatatccttggatgatgaaatagaactcacactgtagtcttccagatcgtccatcatacacaagaaccactactagaaaaattagttccagtgacccatgctagtgactccaatactgtttagtgacacttcactgcgcgtcactaatgagggagactggaaagtcagtttttagtgacccttcaacttgtgtcactaaatccttttacagtcactcattactcgtcactgtaagtgtttagagtcaggtttagtcaaagtgaaaaagtattagcaacccacaaaaagcgtgactatgtttttttttattattttttattattattctgtagatatagtgacccacaaaagggccactatatttgattttttttttaaaaaaaaatatatgtatttaaattttttaattcaaattttctatattataaaagttataaatagtaatttaattaattatattaatagttaaatataataataattttaattaattaaaaataaatttcaattataaactttaataacctaaatctcagagatgatttaataaccacaatacaaaactttgaataaaagtgagttaatggatatgaacataaaattaaaataaacacaaaacaatttatcatttctcgatcgacaaaaaaaattgaaacagaaaaagtctaatagggcttggtaattaattctgataaagtttaagaagtgcagagacaataggatccttcttgagttgaggacctcctctgccactggaatcattccccgaatcgggtaatccttagcccgactttcaattctcttcaatatcatgggccaattttctactaaattcttctttgcggtattgtaagacctccattgaaactcctcccacaataatatattgatttttctagacacattaaaactcaaaatcttcctcattgccataaataaatagaaggccaaatatcgctttggttcttcaagattaaccaatcagtaatacttcaaatccttttaaaacactcctttaagaaaacttccctgcaaatgataactcaatattcagattgaagcagattgtaaaaccctaatccataacactcttcaaataagccactaaaattccaaaaagaaaaaaatgaaatcagtgaagtgcatctcactaggaaccttataaacatcaattacctatgtggatacatggctttttctagaaagaatggtgaaacaaaacttgcaaaaaaaaaaaagaaaaa

SEQ ID NO: 37805 - DNA, 3741 bp, Cannabis sativa
taaatttaaaatatatttgaacttccaagttacgactggacttattaggaaaagaaatagaaaatctcttaaacaatcttcttgaagtttataattaacattgctcagattctcaaacttctctaatttatattccacattcacccaatagtgtaaaagacaaagaatattacctgcccgcttgaaccaagaaaataatggtctaaaggatctgtagctatatcaaatcgtttgaaagagcaattgtcaaactctttacactctgaagcatcaggctcttcagttctcaaagtacataaaatttctgcagcctccctcatttccgaggtacctatgccagcatgttcctctccttttctatgatgagtctcggattcacagccatcaaccacaatagatttctgagaactggcatcataactacaatctctatcctcaggggtctccaacacatcttcctgctgaacttcaatttcaacttcacctttggactccaaaccaattggatctgaacttttttgtcctcgtgaaaataatccgttggccaatctgctaacaaacctaaatgcagccaaaggaacggagaaggctggatttctaccagaatcactctctctgctcatctcatcttctccagaaatcaaccgtgagatagtatccatctcatcttcctgaaataccaatgactgcatcattcatctcatcaaagatagatttgtaacaaaagattcaccaagtacatatttaatactttaatctctattaatattatagccttaaaatgaagtattagttagaggcacaaggcaagacctgccattttgggggaaagaactcgcctttgatggtcgggttatttaagataaaaacctattttaccctcttactaagaacagccccgcctaagccccttccccaaaacagaaagagaacatctataggattagtgaatggcaacgcgcctcaaccaggagtgtaagtcgttctagtagtttaaattttttttaatcagaaacgaacctctttaatattctcaagagcatcatccattccatcatcatcatcatcattaactgtttcccaactagcagcatcatcactaacctcacttgcatcagcaatagagtcgtcgtcatctcggccaactacataaattgcttgaggtccaacctaccaatagatcaaacaaataaacaattagataatcaacactaaaatattacaggatacaatgatacattatggaattgcctccataaaattgctgaagagtcacaaaagtgaatcaagaataaaagtaactcataacttcactatctcaaacgcaattgctcaaaagtgtccgcactttattttacttattttattcagagcaacaaaaaagagtatccaaatgataactggcagaagcattccacgagttcgtactgtttcactcacacttactgagtattattattaacatcatattgttcacctctttcacttataatttatcccacttaaagtagctttagattctttaatccctaaactaataactcatctatcaatagagatgtgaaactataacattctaggtgactataataaataaatttcttgcaaaaaagagggagagtaatgtagcatttatgccattatttccataaatccaaatcataggattgataatgagaaattagaaagaaaaaaaacagttcaaaataaaaaggacaaaatttacactaagaagctaggaaatgaaaataccgtgtaaaccatcccatctgcccatgtaactttgatgtcaccatccttgagaccagttatattcccaacccaagagagatctgagaaatctgcacaagctgtgtcagtagatgtgtcatcaacatcatcatatcctgagcaactttctagatcttggacatcattcctcccattttgttgctttggttcctccctatcagataccctttctacagaaacggatactggagacagtctaacaacaacatccccatagcaatagtcataatcctgatgcccctcaagctcatatacactcacaatctcatctttgtcaaactctctaggatcttctggtctacaaacagattttagccaccttacacaagctgtcttctctttagcattaacactcttcacaactccaacacgcctagcttcacaggcatcttcaatgtcatcagaggccttctccaccacatactgttcagcaacaaaatcatgatcgcccggactatcaattggaattaagtttgttgaagtcaatccacgctctattgtaccatcttgccatgctacgtcaacttttgtcctggtattgactatcaaaacagctctttcaaagctttcctccttctttcgtgccttcttatctcttttgaccacaacttttcggatctttttacgatgaagaggccaggtttcatgaataggctcctttgaaattgacaacgaactagcacaagagctagattcatttaatccattacttggattattttcattgcttccaaccaatggagcaaccacatcaagatccaaggattcattattaccatttgattcttctggagcactaccttctgaatcacacccactacccatttgagttgattctaattcactgttgacaggatcatgaagccctaatcttgacagatctttgtccaaaggtagtgttgatgaggagaaaagacaccagtcacctaattgccaattggcatgtgcaaagcaagataacagtttcaagttcttaggactttgctcttcagcaggggaagttgaagaatctggcccatagcctgcagatgctatccagtacataaaaactgatccaactgtgacctttgtcacagtgccttctaaccgattaggtttccacaagccagagagccacctagaattcttgaaaacagtggatgagcttgctttcacgcgctgaccagggtagtagggaaaatgtccatcatcaaggatattcttcgagagtggtttgagacgttgtggctcagctctcataaccttacacatggaaccatcatcaaacaacactgtaacattatctaaaatgtcatcaattcttcccagccagggaccaagaacagcataatctccaacagtgaaatccctcacacgtttaagttctttagaggacacatctttaacaattgaaccatcatgagctagcaaatcaacaaacatattcacatccacaacaacacccacctgtccagaagggtctgaagcagcagcaacataatccccatgtaaaaatcctcgatcaataactgttaacccattaatactttgcattgactcagtttgatctatccaaagtactcgaacctggtcggcaggaagtgggccactctccaaattacctctattactattagtatctttatcatcactctcgttcagatttgaactctcatcaccaacttctccctcattttcaccatcgtcatcgttgtcatcaacttcatcttcatcatcaccgtcgtcatcatcatcagtgatactgctatcagagtccgaatcaccagcaacttctgtcacaaccccaatcataccagtttctcttcttacaacatcttgtctatagatatatggaacagtgttagtattattgacagcatctcctgtggtttttgcatccttcctttcactgacaatgtttagatcagttaaagaatcattctggtccaaagaatcataatcttgtgtact

SEQ ID NO: 37806 - DNA, 3192 bp, Cannabis sativa
aaaaaaaaatagatttccaattaataaagaagcagaacagagccatgtgcttatgatgctctatctaaccagacttttttaattagactaattactttctgttgaagcaacataaggtaatttttttgtggttaaagaggggattttgactctacttactaaccctttttattggggaaataaataaattaattaatattgtaaattctattctacccaatgatttttaatagaaaaactctctctttatgtttttgtaagtggtaagtggcaagtgccctgagtcagaaggaaatctaataagagttgagttaattacgagcaatgctgaggtccccactctccatcatattaaataatgcccaataataataattatgagggaattaattaaaaaggtttattaaataaatataaattaactcaaattaattctctcactactgaaatttaaactacacctaaaaaatatatatattgagtgagagacttacatatcaaccatagaagcaatttcttctggattttcaactgcgtgttcattattccaagtatcttcatcattattatcatccaaactgaaaatataaagagaaaaataattaaaaaccaatcaattaaatcaaattaatccaagtaaaaatccaattcccacatatcttatcttactaaaaaaaataaataaattgaaaataatcacgttagaacgtgaacatttaaagcttgttttaatttaataatatgctttttattaagtgaaattaatagtaaaaaaaacactttatagtccagacagtcaccgtcctgtcagtgtagagaaagtgcttttaagtttactgcatcaaaaagaccaaaataacctaacttattatttttttttttgattaattataaaaaaaaaagtcaaaagaaattaatatcttcactgtatataacttttttcactcgaaacagagcaatgagtcagaccggaaagaataacgaaattaacgattcggattgttcagatccgatctgacggccaggattgtacgtgcaaaattacagaccaaactaataagtttatttatctgacggttagaattgcatttggccacgtggacggtatagatcagaagtaaaaatagcatgatcttagttaaaaaaatggagaataaaaccaacctttccaccattgatgaattcttcaaactctgcaactcttgggctactaatttcctgcattaattaaaatgaatgaaaattcaaaattcacacttaatgtatctcactgactcatccaaattcacatgatatcatttacgtaccttgactgtacaacttcatcatttttctgtgttgttgaagctttcacactaacaattagaataagaagaaagatcgtgaatgaacaaagagaaaaacatctcaaagaaatcgccattgttgtcactcaattatgagtttaacgttaatttgattcactatcttcaattataaatggactctgtttttttcgtcctctgaaaattgattgaatgaagaaagaaagaaaataaaaaacggaagaagctgaaaatgggagtcaagaaaaaactctaatggcgctttgtttttatagctaaaaatggaacgttttcagtggggtcacctaaataaatttgcctaactttgattaaaactaaccctttttatttttaacttaaccagagttaagttaaaaaactctttaaccccagtgctaataacgtttaacaaccttttatcaccttcctaaccgccgctaactgactctctctctctctcaccgcttttttttttttaaataattaaaaattaaaaaaaaaattctgaatttctgagtgagtttaccaatccgacgtgtcaaaatatgtgtcggttcgtcacgtgccagatcctcttcttctgacaactcttcgaacctcaaaatcataactgcacctctcttcattggttatctgattctctacgtggagtggggaccacaatgtccacgtcagctctaactcgctttgtgtgtgagccacgtagccacgtggacgacgttgaagagtaactaaaaacaattctcttttttttttttaattttccggtaaatgtacgtatttgtccggtttacagatctgtcggcaattgacacgtgtcgtttcgatgagtacggtttagctcagttctctacaatgctaccggttattccggtgtgtgtccgtactggaatctaaatattaattttaattttatttttagacttttcccgctatttatttaccgggtaattttttattaaataacattaaaactattccatttcacatttcaatgcatctcccttattataattattttgtttttttaacttttgcaaatgattttctttattatttttaaaaattattacttatttattgtgtcattatttggctaaccgtaacatatgaataatgagaattgggaattgattgaatggtatttatggaagtaaagtttatttatgttttgattaaatcatcatagatggctaggtgagtaatgatgatgaaagccattatataatatataatatatatatatatatgaaccaaatttataatgtgactctgtttttacgaggaagatgatgagcatgaaatgtgaaaaaaccaatcaataaaagaggttaaaggcttcatagctttctcgtatgttatttttggtcggtacctttactaaaagtgtgaaaaaaagctattaatattgtagtatagtccaatttttttaaaaaaataaaaaattgatgtcaatggttttgattgtacgattaattttgtttttatgtggtctaagagattattgctaaacaaaatagtgagacgattttaataattaaaatttcattttaaattctatagttaattaatcatctttcaaactagtctaatctttcttataattaagctaaatagacatcaacaatgttttcatatatctaataatggaaactatttattttttaaataatatataagcattgtcctttatatatctatgaataagaatattgctaacctatcttttgaaattacaattttacctccgaactatagcatttgtgaaattataataatattattttaattgcattatattaattattattataataatattattttaattgcattatattagttattattataataatattatttt

SEQ ID NO: 37807 - DNA, 2606 bp, Cannabis sativa
  modified_base (2553)..(2555): a, c, t, g, unknown or other
taattgtgagaattctttagcactcatataatatgtgcaatatcaaaaaccatttccatacacaaatatactacatattattgtaagtatataaatatggatcttaacaaaaatattcttattactttaaagaagagaacaactcggatagtagtggaaacataccttactttataaatagtgataattttaatttatctaataaagatgattttatggtaattttagataatgttctttcaagaaaaatacaagacttgagtttctctaattttctccttcaggagggaagatgaatatagagtgactcttatttattagggatcactaccaatatataatttcaaagttaggttattaattttaattatttctaatttagctcttcaataaaaaaaaaatatcacttattaaggtatttatacatttaattcattacactttaatacctaatgcccacaattactaaaatgatcactttatttgggtcaaacttcaaatagcaatacaccaatacatattacatatgaacacatactgagaattttaatctaataatcttccacttgggctacatatttttttttatagtgtgtaaccttataagctcttaaattttactattataattataggtatttcaaaccaatttcgttcattgattatactaacatatgatcaaagttatttttgccatatttagtatggctaaatccatcaatgatcatgtatatcaatataaacaaatgagatagatcaatcatgaatgcatagtgttaggtattagtttatattattttcaaatcatgagtgttttaattagttttagtttcatttaattctattttacgctttagtttgttaatattgttagatttagctaataaagaggaaagtgaatgagttgaaaaaaatggtgcaaaatcaaagatttaattgcaattgtgtagctagcgtgccaaaagaggagttcttgaaataattgagaagtttcggtgcaaccgaagcctttgaagttgaagaattaaagacgttggagtagtgccatggcctaaaaattcaatgccaaggtgttcctatgaaaaaaaatggacaacaaggttgataatggaaagaaataggtgggccatgacatggcattagaaggaagcttgccactgcccagaaattgagcacccgggtcgcggcactgaaaagagcatgttacgacatgctcttttaaaaatggtgtcaacattgagtgattttggacacggaccgtagcacactattacaaaaaagactttttgtttcagttggcgtaatagacgttataaccgtagacgcaaatactaatttttttgcttcggttatgaaccgacgctaatttattttttgcttcgattatgaatcgaagtaaaaaagaaaggtttttgcttcggttcataaccgaagtaaaaaattagtgcacgttggtttaactccccaatatggtgatcgtaactatcaccaccaacctggtcgatatagtgatggtgttggaaaggaagactccgaagagtcattagaaaacccttcctcaaaagactctgatgaaaatgaagttttgtttgaggatgaagatgagattgctgctcggagcatttggtgatccttaaagagcaatccaagcaaggtcacacgtaatttgactgtgcaaagagagaagccaaaaggtctctacgtgaccagaagtccccacgcggacttggggtgcaaatattatcccaaaaattaccttaataacgtggcatagaatgatgtgacatgtggcaagcatagaagaggttagacgaatgtgagatccttggtaaggttctctagaaggagttggtcggtcgtatagatgacactgagctgcccagcatcaggcatgagctagacggagtatgacagccaacattctaaccaactaaaaactcagcacagaaaggatatccgaccaaagaccctggcgagagaaatatccagattcattccaacaacttatttccttgtaaataggtcaatcaacactcctataatagagggattgcgacaatcatggaagattgaggatttcacgggatgactcaatcaaacattaaattatttattttattaaatataaatgttctacatatttttctctataaatagtagagtacattcactatttaggacctaattctttattctcaaaagagctattacatagttaaattatctgtaaaatttagagataataaaaaactcacttcatcaagttcatgtgtcgtttatagttctccaaaaaattcaactaaaagagaagtaggtcattaccgattaagagaccaaatttctataatctttatgtgtcgtttatagttctgtttattttgtatatttaaacagttataattgttgttttattgactccacgtcgttaaaaaaaaaaaacagaaaaaaagaaatcaacaacactgatgcacattttccaaaaaaaaaatattaaattggattaatattgacttttttgataaataaatgtgtcgtttggtaacacttttgttnnntaattttttaatcacaaaatgaatttaaaaatttttgtttttgaaaaataa

SEQ ID NO: 37808 - DNA, 1809 bp, Cannabis sativa
atgcatttataaataaaattgaaaaagatttttgaacgttggagaaagtatttgacttaccattattatctatcaaatcattaaccagtgaacttggtgtaattatagctgtaaatatacactaatcttctgcaccattatcactgttaacaaattctgagaacgatttatttgctgaacttaccgcttttattatcttcataaaaaataagatttataattattcaatttagttattagctgttagagaatggacttctcttacaccagtttcatttacacgtagaagttacaaaaataacagacacaaaatgcagagagtagagataaaaaatcagcaagaataacaataaagatcacaccaattaaaattatagtttcaacacaaataacttgagcttaatcagggcagagtcagaatgaaagttaggaaggagccaaactatattgtaaatttaagtataaaaaatctcaatatttttattaaattcataattaaaattaaaatacagatgatctttcttgcatatcacgaaaatcatcaataagtgaatttatactaaattttttgacaatttctctttcaataaacacgagcaaacaatcacttaaaaattcatcttctatcttattgcgaagtgtagtctttactatattcatagctgaaaaagatcgttctgtggtagctgtagaaactggaaatgtaagaataagagttatcactttatacacaattgaaaaaaaaatctgtttttctagtttttacaccactgacataaatcagaaatggttgccaaaacattaaatatagatgttattttctatcttaatgataaataatatatctatagaaataattaaaataaaacataattcaatcgctttatttataaaaatagtggctcatgtaataggtatgaaatgagagaagaagaaaaaaatggtaatacctaattatttataagagaagaagaagagaaaataatacataattatctattttgaaggtcttttaaatttttaaattttcactttttttttattattataaaaaaattaaaagaaatatgtgtcttagaaaataattgcctattaaaaaaaggaaacaaatattttttttttttttttgagaatacatatatatataatataaattgggtttatttataatatctatttttttattttttgaaaaaaaaaaaattatttaactttaagtgggggccaccatatagtatataataataaaaataaattatataaatgaaataatataggatatagaaactttggaggggccatggcctctgtagaggtccatatacgtccgcccctgagcctaatcctcttttactctcataaaacgatattctctccactgtatgaacattgtttacaccaaagtagtcctaataacgtggacattaatattttatacgtggcaagaaatatgatatttcggagttgaatactcccgagtcatagcaagtcgacctgagaagggtccttaaccctgccctcaagttgaattcaggaattctgaaatggaagttcggactttgataactcattttcaactcactatctttcagtattatgtaccgtgaagatatggagcaaacaaatccaagccccgagagctaaaaatacatgaacctgcaacccaaaaatcaacctgggcacttatggtttcacccagcacctaggttgatgttgtgaaaattatatacgcaagtatacgcagtcacacaagtaataaagtgataagtaagatcgtctccacagggattgtaaacaaagtttgatgta

SEQ ID NO: 37809 - DNA, 3166 bp, Cannabis sativa
  modified_base (1149)..(1158): a, c, t, g, unknown or other
ttattacattgaaaatagaaagggcaggaaatcatcataatctacatgaaaatggatcctttaatttgtaattttactctggcctatcgttgcatttatatgtcattacttcgtaaaactaagcaacaaccatatgcataaaacatcacaggattatcatattatgctccatatttttcatttatttatttatttgagactggaagtagttcgcatacatacccttacggctcgccaatgatctaaacattcccggtgcacatacttcgatgtgcccttgcacttacaaggagctataaagtccctacctgagaaataaattaacgaacactaattactccacccttaggagcctcaattcaactgttgttagatagaaatattgtttcttttttcttttttcaaaattccacatgaactgattaaacttaattaattccaagccaagacagactcaataaattggcttagttgactaagctttcattaacattatctatccaaacaaactagcagaaacaacaaaattgtatactacactgttcccttatttttcatcaactatcctttcaagcaacaattaaccaattaagtatcactttctcttttttttttttttttttttgataaattattaaattttaagaacaccataatgagaaagataaagacctaaaacacaatggaatagaagaagaagagagaaaagaataattggcagttaaaataattaccgtctgtttcaagacaaattcggcactggatttgttcgccgggtcctgcctcgaggtcgatctcgttgggatcagtgatcggagacggtgggatgagaggcgaatcgtcggagtgatccgccataaaagtgggaggaaagaagaagattaaaagtaaaagagaaatggaagaaatgggttgtctttgttagactgcattaaagaaaaccctaattcccaattctatcaaagggaagagaatttcaatgcctagcctgagaacggtggagtggaatgggattcgagaacgtcaacgtatttcaatttctttttcgtaccaaacgccaatttgttttttattttttttcctttttcattttacagtttagtcctctattattattattattggagtaattattattattattattannnnnnnnnntattattattattatttgttttttaaaatttttgttcacttgacgtggtatgtctacatagataaaattagaatcacgtggaatacattctgtcaataattaaacaaagtcatcttgcgtagcatatcaattgtttaagggttctaaggtaatcaagcaaggtcaagcaaagagaaaatggctagccaagggagtttggtcagccagtcctaaaaatagagctggtcgactagcacgtgcagatagctttgaaaagagctaaatgaatggtggggtccacaaagaactttctggaagattctcaagctaaatttcaattacgggtgagatccaacaacccaaagatatgcatattccctcaagatagtatccaacattttaggaatttaagtattcttttttgtaatttaaatataagagaaagagttatttttcttaattttgagggggtatttacctatttgaattatgatctttcgtaagccctacactatataaagtgcattaggcaagatggaaaaggacttgaattttaagtcacgcatgctcatagcccttctaatccctacacactcctctatgcttccaagacacttagtttattttcttcacaaagtctcacaagctctgaatctgtaacactcaattctctatactgtaatattgaagagagccatagctagaaactataaggttcaagtctgtaatctgcgtggtattatctcaagaataaatacaactaaaagaggagtaggtcattactcgttcatcaagggggttgaacctttataaattcatgtgttactttcatcatttattattattattatttatacgtggtgaaaatcaacaattaataaggctccgttgttagttgaccaaattctaagttaatattttagtgctttcattgagagctttatttgattttcatccatctcattctgatcaatcaccatggttctaacccgaagaaccacttcctcaggtcttccttgggatcctatgacaatcgatcctgatctcatgttcctcccaccacagaaggccctactaattcggctaataccgtcaaccctacaaatcctacaaatcctgccgaccctagtaaccttgatgatcctgctaactcgacaaatcctaatggtcaacccttgccacccaggacaaacccaccagtaatgcctcaaatagaaggccctatcaacatggaataacctccacagagcacaactagggttattccacggtactacgcaggagaagagggccaggaatcggtgaaccatctattagtgagcctcacttggaccttagggatgatattgagttagctaggctcagagaggttgtacgccaagccactcaaacaggagaagaggaaccatgcgctgctggttgcgatgctttcacccagcagagatgcaatttcctaaggtagatggatgaccagaaggccatcctgcgagcccatcaggtggagttgaactgccgtaatcgagaagtcaatgacctaatgaggcagtttaatgagataactaccagaaggggtcaaaatctcataagagaccctctacaaggaaggcttattgataggtcaggcaggtagaaaatagacaaacagtccaacaaggtcccttaaacacgaggatagaccttcccctgcctgaagacgatcaaatcttcccagatagaccatatggcaagaacaaccagttcctagcactaggaggtgttggaggacgagaagacaactctgggtaagaaacattgccaattggctaggccctagctggatagcataataattctctcccctaaaatattcaagaacaatttgttctaagacctagggatcttatttttgacagattaggtcctaggataggagaaaacgcacaatacaacaataacttgaggagggagaactggagtgactttgttccacctctagataatggtttctggtaggtggatcctccaaacccaagtggttgggaggaccaac

SEQ ID NO: 37810 - DNA, 3034 bp, Cannabis sativa
  modified_base (2398)..(2398): a, c, t, g, unknown or other
  modified_base (2822)..(2834): a, c, t, g, unknown or other
cctataccctaaaaaaaatacaaaaaaaaaaaacttgtttctttgctctcaatgaaagcaccaaaatgttgatctcgcttctagccaacgatagccagtctaaattaaagcaattagataaaataattaataaaatgcaaggactgtaaataaagaaaaatctagagtttctagaggtctggccctgtgattatcataatagcctactcctctttaggttgtattgacatatgagacaaagaacaaagtattctctctctaaagctctcacaattgacctctgagtagttcttttttcgattactatttctctctttagtgttctctctgatcattataggggctcaatacatatgaatgggttcccttaatctttaagaaataaagtaggaaattaatatgtttccataattataatagaggaattgggaaagttcaagctgattgcccttattctctaaacatatgagtcaatcccatgaaaataaggattatttcttatcatgtaagcttggagatatcatcgatcactgctgaaatttccaactcacattccctggccgatgcaagcgagatgatcatacaattgggctggtcggatgtccctcaaatactctatttggacatctcgctatgtatgtacaacttcgaccttcatatcaatccttgtgggctactaggggtgaagccatctgcttaggttgtaggacacgcgtcctccaactagatgccccatcatagtgcaaaaaataggataacaatgtgattagtaacatttagtacaattttgtagatatgacattcctgaagagtgccatagttcttaatcttaagtgaaagacaaataaggacctcatgacttcctcttcttcaaaccttcttttgaggagtaagagtaatgatattgagacttcgatcattgacttctcaaagaagcaacaaaaggttgctcatgataaggggaaaaagcctacagtggaggtagctatgaaagctcttgctttgatggctttctaggaacgctatgtaagcaacaaattctctgtcaagcttaagggtactctagttgaggacatttgggatcgtttctctaaccatatgattcagggaattattatgtactcgtaagctatcattgtgactcaataggcactaaagtactgcgagcttgttaaaaagaaaaatcaccttttgcaagatgggatcaaataagctttgatcttgatgtccagtaaggacaaggccatttaagatgtgggtaaccagattaacttcttgaaggaaaaattcttacaattacaaatgagttaaaggataagaaggagaaagatgctgggtatgaagtggagaagaaatcatatgaccaggcggtgaatgattatatctaaaccactttaaccaacgtccctaactttgactttgccgtttttggtcaagaagtagttgagatggcaaatgctttgtgtactatatctccaattaaatcccaaggcttagtaggaactctttttcttgaaaatattgctgctacagctaaggtcacaaaaaacattgagaaagtcacaataatgctaatgctcttggtacataaatatttttttacactgttggttagctatacatggttctcatgattgtgtatatttatttcaaaaaacaagtggccttgtgcctttttatttcaccacatatctcgaatcttgaacatcttttctattcgaggacttatttagtaagataattttctacgtatttttcatctttttgcttgcgcaattatgaataaaactttgtgcatttctttttcttttgattattttagtacgatttgtaacttggtgtaaactttaaagataactctttaaatagtgtaattctaggaacatcttagtgttcattaagtgaaaaataaccaagtaaataaatgtgcaagaatgttttgaaaaattttgcaaataatcagtagtacatattattaatataggggtacatgtatcctccctatacttagggaattgaaactctgaaattgattatgtatatacatttgagttctatgaataataaaactttggatgttcagcattccaagctctgtcaaaaactgaaccattgatatcaaagagtcagtaagtcacagtaattattttcttagcaattaggaatggaccttcccagttattgtcgaaaatcccgtgtgccaggttgcaagtatttggcaagactttgcaaagtactaattcttctactcgcagactcaattctgtaacttttgagttaaaataacgcattgtgcattgttgataggtcgtgactttgacttgggcttgatctcattttttgtcaatcaagtctaaaatgagacgtttgttgggaatattttacgaggatctagatntactaacaagtatgttgattaaaatcctaaatataaatatctctaaaacaatgaaattaaacacataagggattagaaaaccttacatttgttgcaacaaaatttaatgactccttccattcaagatctctagcccttaattcctttctgtcatagagcattatcgagatctgaacctggatctctttccctccttcgggtttggttaccaccgtctaactcactatgattgagtacttgacttactatgtgtgggaatggtactctatcactaagggttccaatatggtgaagaacaatgaaggaggctgaaatcactctataaggaactctctcatctactagttttctggcagagaaaactagatttgatttggttgaagtgaacagttagataacatgagagcatcatgttccttttatnnnnnnnnnnnnngggcttagggctgaattatatggattaaaaaagaataaaatattgggcaaaaatcaacactagggccggccacataaaggaccattctctagttacaattttgtcacattatttaaaccatatattcttctttcaataataccatattttctaattgaatcttataaatgccaaaactatttatttaataattataatta

SEQ ID NO: 37811 - DNA, 2620 bp, Cannabis sativa
attcataatttattcaaataacctctcataaggatgccaaaacaacaatcattaataggtcaaaagtgaaactataaagtgttcacatttaatgttatgaacaaaaaatagaacaaacctcaatcaaaagtacatactttcttcaccatatggcttataatttccactcttctttaatcaaaagaataatacctattcacagcatttaattgttcaatgcattaatttattacattatctcattttgttgaattcgcggaaagcaaaactcatttgtctaatcgaaaacatttcgagagagtaaccaaaaagaaaatgtaacaaggtagtggaaccaataccctttgaccttgtattatgttcaccgaaaccctaagagataccgacttgtcaagaaggagcgtacgaaggagcggggagaaaaggaaacggtgcaatggaggcatatgcaactggtggccgcccttgtgtgcccctgttctttctccgatctacatttctattttcttggaaggaggctgcaagttctgttgttgtatctaacttgctatctgcggtgcaatgttggtcgttatcagtagtgagacggtggaaaagaattcctgacatgaaaacgggaagatataggagactggcgtaaaacatctttcttgctttgggaatagtacggtctcgatagaaggagaatgctgttgcggttatggcaagagtgaggagtgtggattcaaggcaaaaccatttggaagttacgccccctgcaatcaaattcagaaatgcaaagtaattatagagttcattcagataacatgtgataataaaataaatttggttttgctaaaataatcgggcacaaatgctcggtctgcttttagcacaaagattgtaaattctctaacaggcaaacaatggctgataaagacaatcaaccatgacaagtcaatgatgccaaaatatagagattaatattagataatagtattgagggaagaaagaagatagaaatgctgctttgaaattctgactcacaatcataggctaagtaccccaaagggatcagatagatgcagttccttaaagccacagcggcagttcttttacccgaagcatcggcaaaagagagcatcctaaacctgaaagacaaaaagaacataaacttcagatgaacgatgaatctagatttgcaagggtgctcatctagaccaaataatttatgtagatagccaaattaattacaaattcccaatgagaatatataggaagtacaaaggatttgaatcgattcaaaccagttttttttaagtccctaatgcatgcaatgaaagacatttcctacgtagaaatttaaggcctttcaagaaattttatatgtactattctaaaatattgaatctcagattacagcatatccataccctccggcagcatagtcattgcgacacatgtatgcaagtgccataaaatgtggtaattgccaaaagtagagagcagctggaagaatcatcgagttaagtgagacctggcctgaagcagcagcccacctggaaaccaaaacaaaatgtatcagccatccatgcctcaaaaattacagcaaaaaacttgaatcaaatatttgacaaaagctttccaaaagaaaaagaagccaaagaacttacccaagaagtggtgggatagcaccaacaacagcccccacccaagtattcactgggtgaatctgttttagtggggtatacacaaatgcatacaggatcaaattagatgcggcgagaccagctgccaatgcattagtctgcaacaaccttgtcatgaggactccccattagtaatgtttcaaatatacttttttgtcaagaaaacattcagaaaagtgtgagtattatatatggccaccttgctcgccaataatgcagtgccaaataaacccatggaggatgcccaaaagactgcatgaggtattgtaatacgccccgaaggtagtggcctttgcatcgttctcttcatttttgcatcattattcttctcaaacaccttagcaagcaacaaaatgaaaatattcagtacaggatagtgacagcagccacccgagcaagctaataaaacaactaaagtgcaaacctgatttaaggtactggcagatgctgcaaccatcatggtaccagcacatgtgtagcaaagtcccggtaagtctatagcagtgccgcttccaagaacaaacccagttccagtagttgcaacaaccagcatgctggaaataagaatgaaacaaaagtgtgtcatgagtaaaataatacacgaaaaggatattgcgcaagcccaaatacataaataaatcactaaaaagggaatatttactttgaacacaaagctatagaaatctttaaaggcatatgagagcaccaagcagaggtaaaattgtgagttgttattgcgacgttgtcacaagactccgtccactagtatgcttaacaaaagagaaagaactccttgacagaagttaagcaccaaactactatagatcaatgttatgtttttctttttttcctaaaatgattataagtgcatgtaagtttaaaaaagagtatttcagtaaatgaaggaatatttgcatcttggtgatcatatt

SEQ ID NO: 37812 - DNA, 3875 bp, Cannabis sativa
tctctctctctctctcttcttgtatatttggtgaaaagatttagagtttagcacttacagaatttcattggggtttatgaagattcggaggagtcagcatgcattcattaatcctgctgtgacaattattctacggatgggagctggtgggcatggtgtacctcctctaggaagccctgatggttagtgacgaccaacgagttctaaaaatccatgaaatatctttcattcttttagtttaaattaacaaagaattagccttttaatctgttaccactgttgtcattttgttttggcattttcaggtagagtaagatacaaatttgcttcattttggaacaggaatcacgctttaagagctttactgcgtgcagcaaagaatttccatgcaatgctagaagctgagaagaaggtttacttacattattactttttatcctgcattttttaggatcaagaaaaaaagaagagagagtgattgtaatgtgttgtttccggtggtatttaggagaatgtagaatcagcacttcgggcacatagcagttctattaaaggggataaaagtcaggctactattcctgaagatattgttcctgagacaggaaagcttcaatcttttattaaagacgaatgtcttactggtatatacaatgtatgtatcagccggtttctgtgcctcctagtttttattctttaatttatctttattgttaaacactaatagagagcttcttcttcttcctcttcctttttttcccttttcaggatgttttcccttgcacagcagagaagttctttaacttattattaaatgatgattcaagttttacaaatgattatcgttcagcgcgaaaggatactaatctaactgtaagtctaaaacgcctacagtccttgcacatttatgtttgctaacatgcattgttctactatatagctaaggatacagtttgataaccatgccaattcttggtttcattatagactgaattgttttctgtattttaacttatggaggtggtatatcaagtagaatatggtttgaaaggagataacaggtagtcattgagttgatacttattgaaagaaaaagttattgggcttctgctcaaagaatttcttaaaattttgtgtttatgtggactccacaacctgtaagaccctatgcggggaatttttcaaagatattttctgtcaatttttttcttgttgcatggctcttagttttttctcattgtaaatgagactctttgttagttcaatgatgcttctattgatgtataactgtgctccaactgggttattgttctcagatgggacagtggcatactgcagatgaatatgatggtcaagttagagaaataaaattcagatccctctgtacgagtcccatgtgccctccagatacagccatgacagagtatcagcattctgttttatcatctgacaggaaaaagctggtaattagatcattaatgttgttattgtacaatgccgggttctgtttctggattattattatttatgtctctacatattctaaaaatattgtctcttttcttaggtgtttgaaactgtgcagcaggcacatgatgttccatttgggtcttgttttgaggtatgtaatatcttataacattatttaactagtaggattatatgtctgagaaacttcctggtttttcatttgctctgttgagatagatggagatcttctgtcaaattatgtgtccaattcgtgaataagtgccatagtattttatcatttacgctaaagaaaatctcaagtaattctattgccattgtttttcttattttctcataactatgagttgttgtgcctcgtagatccattgtaggtggtgtgtggagactaatgctgaaaattcgtgtacaatagatataaaagtgggtaagtattcagttttttcgcatgtccatttttgtggtaaaatttttgaagtttcctgtaataattctgtctaaacatgtaactatgtgtttcattctttcttcctctttttgaaacaatttgaatatgttatggaattatgttggttaccatctgctccattaactttttttcaggagcacattttaagaaatggtgtgtgatgcaatccaaaataagggcaggtgccattaatgaggtaagctcaactctgatcaacttgagtgtttttttttttggctttgagctccctgtgaaagttggaattgaaaatgatgaaaaaaaaaatctgtgttttacttgctgtatttagtacaagaaagaggtggagatgatgctgaatatggcccgtttacacattgagtcaatttctagtggtggtggtgagactcagaataacaataactcttctttgccttcctctgtaacccaataatctatctagtctgtggaataaacttataagtataaattgattcaatattatattcttatagagaaattttgtggttatagtaattaaatccgattaaattgtaatttcgccctgtttctctataggaggagtagtggtgtttcctttttatattaattgtaactataacttcaatattcaggcacttgtaattgtaagtatatattagagcactcatctatgttttgaaggacaactgaaacaaaataaaggtaaatgaaaataagtgagatcaatggatgactgtgtaaccttatctttgaatggtgtgaaaatagagaaaaactgtttccttttcgcacaaatgttataaagaacaaacttgaaagaactcgtatcaaaaaaccaaaacttcacaacctttttgaacgtatggtagtttagtttagtcgaaaagaatgacagcaacaggtgtggtttgtgaattctgggatgccctcttgatgtcgaaaagaagggagacaatatagagcaagtgacaatggtaatggccttgttatcactgtaagcaaacaagcagagtctctaagttagtatgttctattttctgcattttgagactaatgtgttttgggttatatatggtttcagttgtttgtagttttgctcatacagaaagctcctgtgatgataacaagattgactggaatggtgccggaatcttctctctccaatgtgtatgttgaactgaacaatttttttcttttcttgttagaatatttctgttcattaacacgagctgatcttagataacagagtgagcttttataataacagatttgataaattaacaagaaggaactttttttatcttcttttgtgcccttcatgcttctatattatttataattttgtaagtattaatcctaaattccacatcagaaatcaatagaaaatataaaattagaagttgaattcatgagaaagccttttccctttgaagtttctattttaagaaatatagaaatgtagaacttattttaagaaggattatgttaatctgatgaaaaatcatagaataattgaagttgttggaagtgaagtgttttgctttttttaataatccaaaacaagccaaacttgagtatgtgcgtgtatgttaggtaaattgagctttgtaaaaactttgtgtgttagttctaaccaaaccaaaagctgataaaagtactactttttgagtacacaacatatcatcatgaatgggttatatgggttgaagtaaatatgtaataaaagagtttaaccctttaaaatcaaaaccattgaatcatgtgtttttgtaccccaaatatttccgtactaataaggatctacctaattatataaaccaatacatgtgacactctttgcactcaaccaaggtttgactaagtctactcatagttttacattgtaataatgatcaaactatgctaaattttatttatttttgcttaaagacaagaatgt

SEQ ID NO: 37813 - DNA, 3518 bp, Cannabis sativa
aaaaactactaattaagaaatgataattaagaagagaagaaaatgtttaaattaaaaataatgaactcaactcacatagcccaactattggaggcaacttcgctagtttagcatagttaataccctgaaataataataataataataatgatcatcaaagaattaataaaataaattaattaaacacaatttattatataagtaattaataagtaggtacctgtgggatggccaaactagaaagggtgatgccagcaatgagatcagatctaaagaggatgaaattgtaattaggcaaccattgtaagatatagaagaagctccgaatagctctgtacagtttctcccgaactgtaaggtttttgaaactgaaaagaggatcatccgggaagaatatctcaaacaatttgtgcttaagtttctcaccacttgaaaagaatggtggtaaaatcactgggtggatcatcctttctaatactacttgttgcccgccctccatatttatcctcatcatcatcctattcctatcatcttcttcatcactattgttattttctcttatttgatctaataatactcctttcttcttataatcacgatcatcatgatgatcatgatcattactaccgactggtattttcattcttctacctttttctcttttaatttgtttatttatttatgaatatatattagtcagttcgatcaagtgatatacgtatatagctaggaggaatatatgttagaaaaggaaattatatattaattaaagtatcattatatgatcagacaacagagaggaactacttggcttaattaatacttggttgagaaaataattaattgagaagagagattagaaagatatgtggtatagtatagacatgcagttataatagtacttggttaagagttaattcttatttgggggaaaaagcttcatctgcatggtttttatatgaatatatgtatacgtactccaagacacgtgcatatatggaaagcattatacttatatggtaacgtggtgtgcatattcattaaatatatgatttgttcttatctgaaattatactaatttcattgttttttttttattattattattttgtacggttggggaatatttttgaccagagaaataaatgcctgatttctacaaaggcttttcaaagtgttttaggacgagatccgtttatttagaaagcattagtagtgttttaaggtttcttattttatatttttatttttaatttaattaaggcgagtttaagttaattatgaatcatatcgaagaagattctaaaatgattatgctagaaaataaatataaaactaaaaaagccaacagacatataaccggagctactaattcttttgtgttttattttatttatttaagaatattggttataaattgttattattatttaccgaaattttcagaaactaactaaacaagatcttaagaaataaataaagcaataataaagaagacaaaaattttaatgtgatttaatcgttaatgaaccctagttcacgagtgatgagtatattgaccttgaaagacttatatgatattttatagtaatagttacaagaataccctaactctacctagaagaagaaagcttagaggaaattcaacagagctttggctatctatctttcgctctcccatttgaaggaaaatgaagagatatttataggctaaggtgcgggtatagacatgcccatgacatgcttggatttttccaataagtctactattggggtaaaatacttgtaaagaattgactacccagaaggtttttgctcatgtggaaaggcagttggacaatggggactattgttggcacatgacacgtgtcaccaaaaatttttaccttgaaaagaagacgcctagacaaaccatcaagcgaaaaggtggggtgtgcgcactaccatggtctaacgcaggggacaagatctgatcctatgtcagaaaaaggaataaccgtggctgggacgatttgggtctctcttcacattagacgttggacttcttttaggcagttagtgtccgtgttggactctttgggtgccttccaggtgtcggagggacacatgtggagcttgactttcttcgagttctagagagacagtaaggcttctgggtctcaaatggcaatatgttgcgggacaagtctttgtgcagcccttaggctcaatctattcccgatttttgtatagcttctctgcaaaccctggctaattaaggagacttaattagtgatcctttaaatcgatactactcacttttatgacacattcctctattcgaaaacacaaataacatttacccccaagcttttgtgaatcttgagtggcagaagcttgcaaccttttttcgaaccattgaaatataatgtgacacatagggacttttgagaatatcgaagtatcctttctatctggccttaagcaactaaaaggtcgaaaaattctctacagggtataacttgcagtttacgcgtctagtttctttaatgagtatgtagacaatacgcgtttgctgagagcgtgttttccatggaaaaccctactggcattagggtcattgacgtgataactctttaatgcacactgcgctcgaggcatgtaatgatgaaaagcgagtgctttgatcgaggcgagggaaattaaatgccatcttttcacttccttaaccgttagatcgctttgagtcctttgagaatgagatttgggccgtcaattttcaaattgtgtggattgatctcgattatagatagacacgaaataagccatcttcctctttttaccatctcacgttttcaaaattttttcattctcaacatcctcgaactagagccaaagcccagaccgagtaactttaaagtttctcaaaccattaccagtgaatgcgcgaaagctttgacactctcataaatttcttgctacgaatcaggacacgacatttcccacatgctttgcctcttgaccttgacaccattcacccccagccagacaaagggttcattgcagaagtagtctttgatcgcattatcgactgggcaaaaggtttttgaatcaccatcaacgatcattctcctcttttgagtcgtatcacaagtatgaatttcaaaactggtcaatattcttgattttatgctaggataaaattgtatttttgagctttactctgaattcccccgcatgcgactgcctagagaaaaaatttaggatggtgtggtagtgaatcgattagagtggataatgttgaatcatgagcgtatttgcatgtttctggaaaattggtgatagaatatgaactgagcttgagtgggaaatttttgtgagactttgggttaatttcgcctcggtctgcccatctggagttgttagggctctaaatgttctattcatttttctttgtagaatttacgtggagtatgggttttttaaaccttttatgataaatatggcataattaactatggacactttatatggctttt

SEQ ID NO: 37814 - DNA, 2210 bp, Cannabis sativa
aaaaaaaaaaaaaaataagagagtgagatatttttcaaccaaaattaagcttcaaataaaataaatttagcagcagccatattagttgtatgcttaatacaagtaacatttactttattaaaaaaatgataaaaatatctacaattaaatcttaaaaaaaaaatattactaaggaaggtggtttcaaaatattttatttaattaaaaccatcaaagcatctatctctaattgtacaatgggtacttgcttctgaattagggcccaacttaaattatgaaaaattgctttaggctttagcctctaataatgggcactgaaagagcagcaataacctgaccgcaagtgtctcgatcggatatgtcctaactccaatattttcttgttagcatttaaggctgcatccacattcaatttgaggtcacctatagctggtggtttctatggcaccggtacaataactggcagagagagaaccttggacttggagttgcattctgcccatagaccacctgatttttttccgcccaaattgaccaaaggatacatataattagttccatctctaccttcaagtaaatagtagagaggtgcaccaaatagtcatctttgcgcatggaggatgattttatcccaatcaaacacctgagagcaacatcaaacagtatttttagcaaaatagtcttgattgaataacaacatccatttcaatctaagaatattgcactttgtctcctgtcttggtgtaaagaaatttgattttattgttggactttcaagcaggcgagttagaaattaaagttaataatcgatcataccctaattagttatgattattatttaaagaagatcatataaatctatattatattaatttgaacaatatgaattatttgtcaagtcaaataaaaattaatccaacctcgttccatgatgcggcatgatcttatgtatctttattcatgacttgatttggttttaagataattaattagttgaaattttgaaatgggtccacgacattgtaatatgcaatatttaaaaatatattcattgacatgcccaccttataaattcttgaacatcataacttaaattgcagttcataactaatattgattgttccatgctaaatctcttatttaattggatgaagatagtgctggaagtagtaattatcatgtctattaagggccgaccctaggggcaaccaaataaaacattattttttaaaaaaccattattttataccaaaaaactttttaatgattacagaaatattattatattatataaatgtattaaatattatcaaaatatccaattttccttagccccatactcacagaccggccctgggtcactgatgaacagaaatagcatattgttaaacaatcatttatcaattgtattattggaagtggaaaccataatatggatttctttttggaatttttatacaatatacctaaaatagtacttttttatttttatatttttattatttttactaactttatttttttacaggttcttacatttttactattactgtatgtatgaacaaacatttacctaaacgttgcttatgttgctttcatgacttgaaaacaatagaaaaacaactttaaaaaaaatccgtaaaatattaaaaaaaaaaattatttttgtaaactttttgtcatttttcagtatttatgaaaatatcctattaattttctaaacaaatagatgatcttctacagtaacctgtgtgactagcccaacccatccaaaatctaaggcccaatggccgacgaatgacacacactactgtcactcttgtgatttggtcatgattatcaccctttgagacttgataaattacaccccattaatgacctatttttctctctgaaaactatttaattaggacaggccgattctatttctttcctccatagccatatattgtgctctggacaatctctagcatagacttcgtaatgataatgttcacgaacaattaatgctacgtgtacacaagacaagaataaatatatatatttatatctattccctctgcactacagtaagagatcatttactgtacaagcaatatgtcattttttggtagctgctttccttctaagtatctacaccatactagttcttgtactactgactactgaagctatatatcaactatatcaagagtcctcctttaattaat

SEQ ID NO: 37815 - DNA, 9239 bp, Cannabis sativa
aaaaaatctatttgaaagcatttatgtgagtcctaagtaacaatagaatggaataacatctatatatgtataaatgagaggaatactcactctaaatacttttatctatttctttcttaattatctcattattttaattttttattaggtttatatatattttttaactaattcacttattttttaattttttttattaaatatacaataatattttattaattaattaaaaaataaaattttattgcaaaaaaaaaaaaaaaaaaactatgcaagtaactattaatttattattattattattatgataattaaatatatatacctaataaatatctattataattaaatatatatacttaattattttcttaaaatacataactctaaacctaattattttttgtaagtccctctctcttttctttccctctcttgtgttcctttatatgattagtatatattgattcaagttttacatatatttttaacaacaacaattgaatttttatatgtatattaatttatgtattgattaatatttatattattttgatatctattgttaacagagtatcaaattacctattgtttgaaaataaacttctattcttttggtaagatggaatgatacatgtataaattctacacagaagtgtgaattaattattattattagtacctttaatggaggttatgattttgtagatatttattttattgttttgtttatgtgttctttattatttttaaaatttgggtagtttagatttgtgaataatatgttacatatcatcaattctcatattttagtgtataaagtgattaatttattttacagatatgatgtcatcaatcggcatagagtattaatttgacttagaattgaatttatttttcctttgatacagattttagacacacctttgtcgatatacagggcattttttgatctttggcttagtgtttgacatcaacctataaatgaagatcaactcaatttgaaagtaggtttgtagaaaagagatggtgccccaaagctttttatttattcatctatatggtagggtttctatttctatttttttttttcttatttatatattttttaatttgattaattgaattgtacattatattttgaaaaacctagcttgatttgataattttgctcccattttaatttttactcaaaaaaaaaataataaataaaaaataaataaccaacccaattataaaatgaaaagatcataaatattaaattaataataaagtgccagcatattactaatataatgaaattatttaaagatgatgatcacacttatttcataaacctaagtctccaaattcaaaaccgaatttgaatcattaaatctaaaattatttcaaacctctatctattatctacattttttttttattttctctaacaaaataaaatattcgtacttataaaaaataatgtggcaagcctctaataacaaagtaatttttttaagttattatttattatagtaataaatttttatatttaattttttttgtattaaaaaaatttaaaataaccacacgaaaaagtaaaactcaaaatatctttaaccaatctaaaatttaaaatatttataaatagatttgtatgtaatatatttttatgttaacctcttaattttctcttgcaggttgtttacagtctttaatgttgccgagagaagcattgaagcatctgtataattacataattttttggagtaatattgcattatttttttaaaattatattataattttgtaattcatgtatgatatttgacatgtaagtatttttttttaattctatttttagatggcagagactatggattcttcaattttaattctcttttttactataacaattgaagatatctctttatttgctttctttatgggataaaaaattatatgctggattttttataatttttatttattttgtgagttaaaaaaagaaagtttagtagtatttaccgagttttttgacatctaaatatttttagagcttaagaaagtaatgaaagaataagtattaaaataacaaacaagagacttttacgtggttcaggcgttaactatccttagtccacgagtccattttattaggctcatcgttcggtgggtttttatacaaatacaaatacaaatacaatggacttttctcctattccaccgtgatcctcttgaagaagaggaagcttattaggaatattctggaattaataatagggttacagaaatgtgtttgcttagaatgatgaagattaagtcttcgatctgaaggtaaaggtccgaaaaaagatccctcctttgtgcttccttttgggtatttataggccagcttcatcgcatgggctatcttgggtggatcttttcagggatgaaatcccaccgttggattggtaggtggcctattttccatgtggcttctatggttgtcagattgtaccagttgtacaagcttggcttcggacgcgtgtcaccttagggccattcttatttgaacttccttcatcccaagctgttggattatttagcccaatacacaaggacacgcatgctctgcatggtggcatggtgtgggagacaacctttgacaccgtacacacagaagctcggtcactgggtccatagcctaacacacgtggactgagcttctgcgggtcaaaggcgtaccccagactagtgtatcctggtttgagaagatccgcactcttgtcaggagcaaatggcctcatctctcagagtggaatgagagattggttcacagacacctttcacatggctggcacttggggagacctttcctgcggggtaagtgccttcatcctcctggggcactatgtgaggcaattgggcggcttaatgactccttggccttctccaattagtatctatgtgtcatgcttgcgaaaatgcggatgacatttacaccaagctttcgggacataccatgattcaggagcttgcagtatctcattttgaaaaaatttcgcacacgtgggacttaggacagggtctttaatgcactacgtcatctgccgtcaaaccacagtgtcattattagggtggcataatttcttctattttcttgtcaggattttaaagactgacttctcgattttgcgcgcgttttgggcgtgtgttctgtgtgaagctcaaaacaatagcaattggatttgagctgactctccatttgccgaatactttcttcgatgcatgtaatgatgggagtcgactgttgggaagcaagataccttcttagctccttgctcctccattcgttagatgccttttgggcgagtgaagtgaagtgtctgcttctcctggaaggtgccctttcctggtatcccataagtatctccagcaaccgttccatttttcactttgcacgctgaactagatgtatattaatagatggataaacacttggcattggggattattaacggggaatcgggatctcattacggaaaagaggcaagcccgtataaaggtttagatccaatcatttttcccatgttttattgggcataatcgtggggattaggacataactctcgttgtttaaggctaataggttggcgagaataaattgaagtgggggattcggcgcttctaccaaactcaagggaagtggaaaaccaaagatgaaaaacttttgtgttatactttttctcttcaaacaaacctctctctgatctccaaccccattttatcctgatattggaagccacgttagaagatgagtggatcgagaattttaatacactctaaaaccacgaggagaaactgatttcgcgaaagcagactaagaataatggatgctatgaacaagcatattcagtgacaactaagtatattcctaattcttctctgtcaggggtttcaagagtataataggctttgcaagttgtctttttaattcttgaaaagtgttctcgcattcctccgtccatttaaactttttattacctcaaaggatgttaaagaaaggaacacacttgtatgttgattttgaaatgaatttgtagagtgcggctatccgaccagtcaagctttggacttcctttgtctttgttggcgatttcatatctaggagggcttgtattttttgtggattagcctctattccccgagcattgacaataaaaccaagaaacttacccgagctgaccccaaaggaacactttaagggattgagtttcatgttatattttctgaggactttgaagcattcatccagatcctctatgtgcccccaactttcttggatttgacgagcatatcatccacatatacctccatattttgtccgatctggtctttaaatattttttactagtctttggtaggtagctccagcattcttcagaccgaacgacattactttgtaatagtacagacccatatctgtttgaaaacttgtatgttcttggtctggtggatacattatgatttgattataccccgaataggcatccatgaagcttatgatttcatgtcttactgttgcatccatgagctaatcgattcttcgaagtggaaaaatagtccttgggacacgccttgttgaggtcggtaaaatcaatacatactcgtcatttttttgttcagcttgggtactggtacagggttagccacccaagccaggtagaaagcttcaatgatgaacttgtttgcgtgtagtctttctacctcttctcttaatgcttgcacctattttttttccagtagtcttctcttttgttggacaggacgaaagtttgggtcaatttttagggcattagacatcatagtggggtcaatatagactatatcctcatgtgaccaggcaaaaatgtctaggtttgctctcaaaaattttattaaagttaattttatttcgagcaacaaacccttaccaattttgagtttcctggacgagatatttgggtcgatttccactttttctagcacttccactagccctacatttatgtttgtttccccaagtaggggatccatgtcttcgccccgccttaggcgacttcctattgggcaatgctttttcccttgcctaaactctggccaaaggtattttccttcttgaccttagttagagcaaggttgtagcattaccatgcaattctctggtttcctttgagacatcctaccccattctttgttgggaacttgacgcacaggtggaaaactgatgtaacaacttttaagtcatataggttcggtcggcctaacatgacattaaaagctgaacggacatcaattataaagaattgtgccatcacaggtatactcctcggagcttgtctaatagtgaggggcaggcgaatttgtcccagaggtgcaatgctttggccggagaatccgtatacaagctgggtgtaggggattggatctttaagttggagtcctatcttctcataagttgttttgaatagaatatttgaggaagctccattgtctatcatagtttgtgccactgtcctattttcaatttgcacttccacgtccagtgtatcattttacgggaaatggacgtgactggcatctgcctttgtaaatgttattgttggctcccctacccgtggtattttttgttttctctattgcacaaccaagaatgtttcattttgtttgtattataagcctgagcatacttttctcgagcttttcccgagtctccaacaagatgtggacccccaataatgacctgtaaatgcccgtccactaatggaggcatcaactagttctgattattgtctacttgggcggcccttcggttctggttggccttgacatacttatgtaaatgcgggttattctttctgatcaaaaacttaatttctcactttagaatattacatttgtttgtgtcgtggtcgtaatctgcatgacaatggtagaacttggatgtatctcacttactttacatcctttttcatgggagatggttttttgtacgacaccatagattgagttgtcgcatagattgtccctaggtcgtctgtcaaaattgagaaggcagtaaaatttgaggcattttccttggggtgttgttcggcattgccagtgaatttatcgttcttttcattaccctacctattaccgttgttaaacctcttcccttttgaatttgacctactggggtattatggattctgaatggatgttcctaccgaggtgacacgttgttggcttttcttttgtcccacaaaatccacacaccgaatagcctcctcgagcttaatgaacccatctgctcaatctacaaattcagccattgatcccacgatcaaccttttgatgtccttccacaactcttcgagtggctcaatggcccaactattgcggccagccttccttcttcggtcagccccttcacttttgtagcttcagtcataaacccgttgatgtaagctcacatgggttctcctggcattcgctttacttcgaccaagtcttcaaggtatgaaggaagttaacgagatgaggaaaactgcgcgtggaactctgatgagaaggcattccatgagttaaaccttcttggaggaaacttgaaataccactgttgggcggcctctgcgagtgtgacaggaaagatcctacaccatacatcacctcttaccccttgcaagtccatctgaatctcaaaatacttcaagtttgataaaggatcttctcttcctgtatacattttctaggttggcattttgaactttgggggtaattcaaggacttcaattttaaggtagaagggtgatcagcgtgcctggtcgagttcgagatcagtgagttttgggtcggtcaggccttgtaccatgcttttaagttgatccaattgtgcttgcacaaatggatgaacatgttcagcttgttgaccgacctatgtcacattgggatctctttgaactgaatcttggcctcgaatgcctagtcgaacaaatggtggaacatattgtttgtccaggccccttctacgatttaggtcggtcctgaggtcatgtgcagcactcaacttatcaaatactgaagtaccaagtggccttggtgtctaacttgtttggccgataggttggccaaaaattttagtaggggtgaagttggtgtgtataactccacccaaaggacggtctggcaggatctggatgtctaccatttggcccatagattggacctgtggctgtggttttgacagctgaccactgtgagtttgtgcggtatgcccagacgcatacgcttctgacccacctaggggaataccgaacgcagtagtcagttattgattggcaacttggtaggcccttcttatcagtatagtagcctacctagtgcgatcatcaatgggttcctgttgagcccttagagtttccatctcccggtctctccattttataaattgacattttcgttcgtcaaatgcaacgtttatagctgcatggagatcctcctgaccatgctgcaaagcattattatgaccttgcatgagcctaagggctgctcagaggttctggattatagtgttatccctaaatggcctctgagcattagttgtagacgggaccttagtgttgggaatggattgatcagccaccgaactggtgtttctagtttcttgtatgcctggtgtgatcccaaccagaggggaagtccttcgtggaccatagtaggtggttgtgtattaacctgcttagggtgtgtccctagtggtcctctcgtgtttccaggagtttgcacgttgggatctgtcaccatcgggttgccctgattagcaaggcctctacggatttgtacaaccatcttattttcctgccaaaactttaagacaaagaacttgtgttttttctctcaatgaaagcaccaaatgttgacctcacttttagccaacgatagtgagtcaaataataagcaattgaataatataattaaaagagaacaaaaatgataaggtaaagtgaacaccagattttaaagaggttcagccccgtgattgtggtaatagcctactccccttgtattgtattgacttaagagaaggaataaaatgttcttcctctttgaaagctcttacaactaatctttgagtaattctctttgatcgatatatttctctctagagtgtatctctctgaagcaattcttttgatccctttcatagtgaggcttggtcactatttataggggcttaatgcatgagggatggttttctttttgcttacaatgcataaaataggaaattacaatgattacataattacaatatatgaaataggaaactaaagcaggttgccatatttctctaactcaatcccatgattatagggattgtctttgtatctgggcataacgagatcattctaaagttattatctcttgtaagttgctcgtcataacaagcttctacttggtcggatgtcttctctacaactctgctcgagtaatcgacaattatagatgctgacgaattatgtgcagcctgtcgctcagtcctatcaccacgtcaatgtgcaaaaaactagataacagaacccttttgaacaaagtgagatgtttacttcttagttcggggttgggaaagccttattggggagaaactttagctactgctagttatcttgttaataggagtcctagtatagtcatagacttgaagacaccttatgagatgtggtatgtgaagataccaaacctgaaacacttaagagtgtttagatgtgcatcatatgtacatcaattcgatgataaacttgatgctagatctgtcaaaggcacatttctaggatatcgtataggcataaaatgttatagattctgcataaaacagaatgggaaacctaaggtgattatttctcgaaatgttgtgtttaatgaaaatgattttcctcactagaaagtcgagaaaggtagtgtgttaccagatgtagattcatctagtaagagggaagatttggcagagtttgaaatcgagcttaaaggatttgaaccaaatgagaagaatgacaacatagacacagctccaaatgaaactgaagaacaaccagatctgtctaactaccagcttcctagagatagaactagaagagaaattcatataccagcagggtttgcagaagctgatctgattgcctgtgctttgccaatagatctttcatgtgacataccagaaccattgagtatagaagaggctttaaatggaaagtaca

SEQ ID NO: 37816 - DNA, 1152 bp, Cannabis sativa
gggggggggtgttgggcatgcggggtccatgagcgcgggggaccaggcgcgcaggaggccaggtgcgttgggagctgggcaactgtaggggaaaaagaggaataaaatggggctcacatacattttatctttttgtgaactttcctttaagttcattctgagattttttctctttaaattatatggcctctaaataatatacctagtaaatgtttaggggtcaacaattgtcacctagtctaaatgagtactttcaagtactctttttgactatcttgttgagctacctttgggctattcttaaagtaccccttttagtgactcgtctaatgggatagattgaggtgttgatgagacaattaatagagttgatgggtggtgcacgaactcctaggtggacgtgtggcgctttcctacccattgattcattgatcatccaaaggcccatatttatccttcctttctataaataggtttctctaactcttcatttcttcctcacatcattcttttccaattcttcttccttgctaccttactcttatgatttcttcttctacccaagaagcacttgaagttctttgaagctttgagagtttaaggttgcaagttttattcttggcaatgtcatctttcaaggtctttttcttcatttctttgttttttttaataagtgcatatatatatacctattatctgtattttgtacaagatatgacacgtggtattttaatggaaaaggctcaattaatcttttgtgagttagagacctttaaggatgcacaaacattaaaaggtctccccaagcttaaacccatccaaggagaagaaacacgaaagcttacttatagcaagacttgctcccccagaagggggataggaattgcctctcccaaactcgaaagggcctagtagaaaagctcaattcagacggctccccaaatgctcatcaaagaaacctgtcgtggatgtcgacccttatggattttcatggacgttgaattttctcacaagctaggtcaccaagcgacagttacactttcttgatagaatatgatctttttctcaacgatcaagcatggtagtgttgggttttatgccttaaataaaactctatttcaatataatctattttattcaacatcaataaag

SEQ ID NO: 37817 - DNA, 2962 bp, Cannabis sativa
tgactattggagaatgtgtgcttaattattggtatattttaagtagtttgggcaagtataaaagtattgcagagccattggtacaaacaataaatcagatcagatatatatcccaataaaacaaatgaagaaaagggcttctttgcgaagattaaattagatatatagagaattcagtattggtggtggtggtggtggtgctagtacattcttccatcttcacaaaatgcttaatccacacaaaattatccacagtaaacctacagatgcaatagttccattcaaagaagaaaaagaaaagaaaagaaaaaccgaaccatcttgaatcgcagtccttcaaaaaaggaaggagtgtgtcttcaccctcgatgcctatgcctcggaaaaattgaaaatttagaagtagggactgtaacgcataggcattctcattctcggaacctttctgcaacaacaaccataagagaaaacaatttgtagaacgtaaagatactgattaaaatgttttaataaaaaatgtcgagggcaatgtttataaatgcatacccatatccataggggttgtatatgaatggagtgaacgggttaggaccccttgaacggaagccacccatggccggatttgctctacgaccacggaactgcttcattccaggtatattcgttcttttagcagaaacctaagacaattaaaagagcttgttcagttgaatacatggttccaatacttgatgtgcagagtataaaaggaagaaaaaaatacaatgtattgatgtaaacctttaattggcggccgtgtagttcagattcattcaaaagaattgcctcttgaacagcttctacttcgacaaattccacataagcataaccctttggttggccaaacttgtctgtgcgaattgtgactctgtttactgtcccacatgactgaaaatgttgctgcacttcttcaggggtacatgcataatccacctgcagatgccaatcaagtcttattagctccaaatcttaaattaagaagccaaccaccatgatttccagggtaacaaagataaaaaaacaaataagcaagcagatcaacatttccataagaaatggagaattaattatggccaatgtggtttaatgatttaagatgttaagcaataaacagcagcagcctcacccgcattcaattcataagaaatgttcttgaatcttgatagcaaactatggaccaaaaatatatgtttatgacttatgaagtttgaaaaaagacgtaatgtaaaccaaccatgatgtgttcagaaactagcatggattgccagtcatacgttggtaattaagttatttgtttgcagtaaaaaaaaagtcactgcaacggaaaattcctgtgtgtccagagtttggaacttggaagaaagaaagaccagagacccctcaccatatgcaaaaacaatgtaactacaaatcccataagctttgaccaccatcaaaagctccagcctttgcaagtgagaaagtcttcaacacatatgttgccttaattgactgatcatggttgagaaaccttcatttgaatctatccctttctttcctcttggcataaaaacctgagtcagtttctgagggctcacattgtagtttaaacctatgaattttctattccctctacaagataaactgtacgattcgtctcctagttttatcttctgactcttttctaatatagatcattgttttatactttcatactttttctcaaatatacaccaatactcttaacatcatatttctttttattcatttctgttcttttcccaacctcacctatttttttttctttaatgaaaaacctcccctaaatttctttctttttagtaacattcttcccctaccatatctgatctatgcaatataattcccacacaagcgttagtttattcgaaaactcatttgaagcccgacctgccaatatattcaaacacaagaatatgagatatcaaaccagattctaaagtgaagggaattactgtttagctgcaaaataatcagctatttcaaaaccacaaaagtggaagaaaattggctagtatagccaaatgaaagagaataaggttgctactagacatatttgaaataaaatactaagaggtagctatcacacagcataaataaaacattttaatggtaaatccccaaaacaaacttaagtcataagactcataatttgcagaaatgacttgaactgagtaatgatatgatcctgaaaaccttcattagagacgtgactataaattgtagcagccagccaaaatcaacatggatagccgaaacacacaaggacagccaattatgtggcacgcttaaataaaaatgagttatcctttgctaaagatggggaagttttgaaatccaaatcatggaagacctaaccaacttacacataaacatgaggatatcctcaaaatatatatttctattataaaataaatataataaatcgtgaaaaggaagcttttgtagagaaaatttattgatatccttattgcttattccaattatttccatggcccggcctggtgcaccttttcagttagctccatagttttaaaaggcttttgaggcgtacacctccaaacgcgcctcggaacgaggcgttcaagaaacgcctctgaggcttagcctcagtcactgtccatgaggcttacgactcggccttgtgaggcgtacgccttgaggcttaagcctctgaggcgtgtgaggcttacgcctcagctaattgagttgttttaggccttttttaaagagtttcattgggctttttttaaagagtttcagtgtgagtttgagtgagctttttcaaaacttttcttgggttattttgagttttattttgtaaattttgaaagccaaaaactaaataaaaaaccctaaacattcatcactttccctcatcctccataacttgccttgcacaata

SEQ ID NO: 37818 - DNA, 4366 bp, Cannabis sativa
  modified_base (51)..(54): a, c, t, g, unknown or other
  modified_base (3714)..(3717): a, c, t, g, unknown or other
  modified_base (4328)..(4328): a, c, t, g, unknown or other
atgcaacataaaatgttaattctgatctttattaataagtaaatatgattnnnntgaaatgagttttatttagggcagaaaacccaacagaagaatactggcaacaacgttcccgtgtcacatggcttcggcttggagataaaattactcgatattttcatcgtatcgcttccatgaggcgtcaaaccaacaaaattatttctctccaacgctcagatggctccatggctaatgatactccttctattctggcaaccatttagcattatttttcccaacttttccaaagccaattatctgaggatgatatcatcgaatctgttttatcgggcattaccgagtgtctaaaggaggatgaaattgagcttctccaggccactttttttgaggctaaaattaagagagctacgttccaacttgcgaatgagaaagcgcccgggttagatggcttcattggttgttttttccaaaagaattggcacttgctaggtaaagacattatcattgcagcccaaagctttcttaatggagatgtagacatagcgactatcaacgagacgctcattgttcttatccctaaaaaacctaaccctgagcagatcacggactatcgtcctattagcctctgttccactttctacaaaatcatatctcgggttctggtcaatcggctcaaaccaattcttagtagcataatctccccttcccaaagtgctttccttcccaaccgtctcatttctgataatatcatcattggttaggaggtcatgcattctctttcccaccgtaattcgggacagcttggatggatggcactgaagcttgacatggccaaggcttttgatcgggttgagtgggtttttatccatcgagtaatggagaagttttcttttcctcagcgcttcattgaccttgtccttgcctgtgtctcttctgcaactttttccttctccattaaccaacaggttcttggacacattaagccttcccgaggaattcgggaaggggatccgctgtccccttacttatttcttttatgctctgaaggcctatcaactctcattcaccttaaaactcaacagccccagccccacagacattcacttggaataaaaatctccaggagagccccagctatttcttaccttttctttgctgatgatagcctcctttttagccctgcttcccccgaagctgggactaccatcaagacaattctcactgattatagctcagcctttggtcaaatggttaattttaccaaatcagccttgttcttttcgccaaataccactaatgagatcaaaaacaatgttgctactatccttggcatccctgttagagatagttttgacaaatatttaggccttcctcaaacttttggcagaacaaaaaaggaggcatttaactacatcagggatcgggttttgtctcaccttaataaatggaattccaagattttttctaaagggggtaaagaagtcctcttgaaatctgttgtccaagccaacccctcctacgttatggcttgtttcaagctccctgcctcttttcattataagcttgaatccatgatggcccgattttggtgcggcggaacggagcacaatcgtaaaatccattggaaacaatggtctttcctctgtcgttcaaaattccatggaggccttgggttttgctcaatgaaagctttcaatcaggcgatgttggctaaacaagcttggcggcttctttaggatcctcactctcttgtagccactttactcaaatcccgttattttccacactctagtttccttgatgctggaaagggccataggccttctcttgtttggactagtatcactagtatcacgtggggcgaagaagttctccagtcaggtcttcgaagatcaattggtgattgtaccacaatctccatttttaacgatgcctggattccaggatatggtaaattacattaccttagacatcactcagctgcaaatatgacagtgtcatatcttctcacccctaccaaggattggaaccttgcccttattcaagccacttttcgtgaagatgtatctcaagctattttgaccatacctctttccaatcttcctacacctgatgcatattattggtcctttacatctcatggcacctacacggtaaactctggctaccaccaagcccatcgtcagatccaccaacatgaaccaacaccttcagataacaatacttcccacacatggtggaagtagttgtatggacacttcttttacctccaaagctgaaacactttctttggcgtgtctgacatgatatccttcctaccaaccacaccctttttaaacggaaaactctttcttctccacattgtggctggtgttactatcatgatgagaccctagagcatgctctattcagatgtcctgttgtccaggaggtgtgggaattaactagttttattgattttattgaaaaacatatttcactcacttgctttgatttattatacattgctgccaccacttttactgctggaaattatcactactttgtatgtttgttgtggaagatttggaactgcaggaacagttggctacatgctggtttatcttctcttcctgttcaggtactacatgaggtacaagactatatagaccaataccaaagctgcaatatacgttgttctacaacaagatcacctcaggatatttcattgatctcccatggacatgcatcatttgttcccaattcctctctttagctctcggtggatgctgcacaagatgttcaacaacacaaaatggggttcggcatgtccattcaaacaaacaaaggagaagttcttttaaatttggccatgccttggagtggaattcatccacctctgttaatggaagctcatgctttatactttgctctttcttggtgtcatgctcattccttttatccggatagcattgtctcggactgtaaggttctagtggattatatttgtaataatgatactcacaatctgcatcttaatagctctgtaattgaaatcaaaagcttgctatcttatttccctaaagcttttattagctatatccaaagaggggcaaatgaagctgcccattgtttacctaggaaagctttaggcctagatcaagaagctttatggaagagttgctccttacacttgtaatttgtatcctgtactttttttattttttctaatagatatagacttttcctcaaaaaaaaaaattcttaaaaaaaataaaagatactaatacaataatattattatataatataatataatagttttcaacacatgcagctgcaaaagttttatacaattagttttctttaaattttgattggcataatttatttccttataccatgaggtaaaaatagggatattggcggctaaaccacctgaagtttacggtttgtaacacccttaaccacaaaaaccaaatttttggcagctaaactacctaaaccctagttccgttttgctctgcatacttccatccaaaaattacagttaagtgccacggtggactgtccacgtgtacacacttgtacacatggcaaatttttagtggtccacgtaattttagttttaaaaaataattataaatattaaaaaaacagattaaaaagaatttaatttttttaaaatttttttttcctctttttctttttctttcttctcgacagaagcccccnnnncctaacccttcttcttcttcttcctctcgacagaaaccttgacagagtagcctctgagcatgagcttgcagactacaaggcgtccaatgcgagaagtgggcccaacgacgagaactgtggtgttctgggcaccaggaatggcaaactcgcacatgggtccttccctaatgagaagagcatcgagtgcagccctctggtctgctctgctagtgctcgaaatctggcccagtccagagaacttatgccaaacctcatcgaacagctgacgggatcggcgacccagtctgacaagattcacatcctcaagatccagacgaagctactgcttttgatgctcttcttgagcaacaacactagtagtaggagtagttgttgtagaagaagaagaagaagaaggaagggtctattgagtttggtcatgattttaggtttcttcttgtcgtttttgttcttgattctcttcttgttattgggtggtttattattaccagaagtgtccggagaagaataagaagtggtagctctggggactaaaatagaatggtgggctctatggctatggctgtgggttctgtcgataaggaagagaaagaaaaaaaaaagagaaaaanaaaaaagaaaagaaaaaggaaaaaggaaaaaggaaaaa

SEQ ID NO: 37819 - DNA, 2229 bp, Cannabis sativa
aaattccagagggctccaaagaagttcgccactttctggactcaccgacgacgacgaagaagaagaagaagatgggtaagaaaaagaaagtgatcctacttctgttggtgattgaagattcatcccagcctcctcttgcaccctctccataatagtttcttccttgaaacattggctgttcttatccttttcaacctttagctcattttttagtttgaataattctccctgcattaattctcctactctttcagtgcttgaatcaagtttcagcctcaaacattctgatactccattgaaggcgtaaagagaagctgagaattttctttcatacttcattctcttcatggcctctccaataatagtttcttcatcctcatacttttctgtctccattggcttaaccatctcttccgcaatctcgaaaggatcacagtagtagccaggaaatgaatgcaatgagtctacaaacctgagatccacacctcctatctgatcaaactcttctttattctcttctttacattgatttaccccatcaaatctagcaccatgattattagtactactctcattagtcccaacaaggctccattcaaaactctcatccatgtaatcagctgtagttatatcactaatgttgttactcgaaacatcattatgttccttcatcctacaatattcttgctcattgaacaaattatcaaacagggtatcttccctatgatcttcctctgcatgctgatcttgttggatacagggaaaattgaaagccattgaaccacgaacattgttattgttattactcaagttatgattattactgatatttctagctttgagcctaagaaggagaagattgactattcttgagggaagagctggctttgcatgaggaggagtgcaaggccagaagttggttcgagtattagctcctcggagcaaacaagctgcttcatcataagctcttgcagcctcctcagctgtgtcataagtccccagccacactcttatcttctgtatggtgtctttgatctcagccacccatctcccggatggccgctgccttacaccgacatatctctttcgtgtcctaccaactccattcaaagcaacagctgctgctgctgctgctgttgctgaagttgtctcattgttccaacccttgtttccaactgacatttcattactgctttctctctcttcttcctcttgatcacttccttttctctttctaaccatttttttcttacttaatgaagtatatctattatttattacactctcatgcattgactttaagtttctctactggctataagcctgtatgtgttgagagctgttagttaaatctgttacttgctttgccaagtatttataagaatgagtaaaatagacattaatgataaattatcttgaatgtaagagaagatttgataagggtttaaatggcttgtaactacatctttgtactattgttttttaagttcggcaatgttatgatactaaatctgatatcatgacatttctcactcaaattctcactttccaggaaggtgaagttgtctgaccaagtcagtcttttaattcttctcaaatcagttactacacttcttttagctatgaccaattagaggacaccatgtggatatgccatattgttctaaactttaaaatgtcacttaaaagaaaatggtaacagtggaaatatacaagaagaacacttggacattgtagaaatcaaatatgtaaaaatgacatattgtcctattagcttattttcacctttgattattaagttcgttaataccaaaacaaaaagcaagatttgcgattgtgactcactaatgagtccgcaggccccaagcaacaaacactataatttgtttgtttattatttcattgaacttatcaaatggctgctaattaactatgatccactcatatgaaagtaataaataaatataatcttggcttacaaaaaatctgagaaagagacgaaacaaccgaaatgtacgtttttactgtcgtcttttcaagcattgaaaccaccactttcaatattatgtactgctagcttaaaaaatataattaatatgcttacattatccaaaaaaaatttcccctaaatgcaaagttattaaaattggtaatatataaccattttaccaattttcctaaactacccctctcatttggaatcaacctctctcatcctctctcttcgtc

SEQ ID NO: 37820 - DNA, 2272 bp, Cannabis sativa
  modified_base (1780)..(1786): a, c, t, g, unknown or other
aatttttttaggcatagttgtatgtatgcacatgttttttggaagagctagtgaaatacaaagacaaagaaagacatttatatgtgcctcgcgagtatccattattaatagtcactatttcatacatacatacatgtgagtcagtcacagtactcaaacaaaagcatcttaaaaccatgtcttttatgatgagcatgaatccttctccctcctcgccaccgccaccgttatcgtcgccgtcggaatcttcctcaacgccgtcaacactgccagtccgtacgatcccgggaagctacggatggccgttactggggcccatctcggaccggttagactacttctggttccaaggcccagatacgtttttcagaaaaagagtggagaaatacaagagcaccgtgttccgtaccaacatacccccgacctttcctttcttcagcgttaatccgaacattgtggccgtgctggactgtaaatcattttctcatcttttcgacatggaaattgtcgagaaaaagaatgttcttgttggagatttcatgcccagtgtcaattacactggtgatattagggttggagcttatctcgacacttctgaaccacaacacgctaaggtaattaatttcctctcaaaaattatatttaacaaattaatcaaaatctttgattgcttattgtgttaattttggatgatttgaactgggtttttatatattattaagatagtcttcaataatttattgcaacatataattttaagaagacagaaagagagagtgagatgtatataataatgtctagaaaaaaaaaaggactaggattatataataagatatttagatatttaaaaaacaaatctgagattgattcttatttattattttgaaaggagcaaatctgagattgattgaataattgggatcagagccaatggagtttcttaacactaagttatgattcacatttttttttattatattattatttttttgggatagcgatttacatgtttattaaattaattgtggtgttttttttttttttcgaaatcaattaattgtggtgttagttcagagttctcacttctcttacatattaataaatggcttaatataagtcaaaataaataaatggcttattaaattttacataagaccgaggttagattttttttttctttgaatataaaggaaaagactaaaaggcccaaatgtgtaacacgattggtgtactattccaatcaaatgaacaagtggacgatcttggtcacacgtacgggcaaatgcaaatgcaatcaaatagctccattcgaaatttcgtatgtatgagattctgaggggagaattacttttgccacattattttgggaccattctcttatactaaacaccaattgtccttttcctatcagatggctttcctaagaaccaatgaaattatgtgacttttttggtttaataaagagtaaatactattttagacattatgttttgtaaaagttattaaatgaacgatctgttttgttaaatgataaaatacaccttatattttttaaaatggtaaaaataggatcttcagctcaattttcaacaattttattttttaatataactaactttaacacaatttctaacacgagtagatttagagaatataatcagctttgtcataacatctctagatcagattattattaagttttattttgataaaaaaatcagttcatggtcctatttgtacaattttagaaaatatagagtctattttgtcatttaacaannnnnnnggtccaattgataacttttataaaacacagattctaaaataatatttaccttttaataaatatatagcctagaactaagactagcaacacataaatataggtatctagcattgttttagaaaataatattacgaaaacatagaggcttttaaattgtattttcagttaaaagtaagaatggaaaaaaaaatttgtcattttaaagaatttaatggtgtttggctcaagtttttaaaattatttttatttttttttctttttttttttctaaaaaaaaaatcaataccctacaccatattatgacatgaacttatcctgcctcaaaaacaaaattataaatgaagagtcgtttgaaaatctctacataaaaatgaggttttgaaatctctcgacctgtgatacacttctcagggtatccgagtcgttgattcggtcatttaaagacttgtcctctgccgtttcgagttttctctttggcttcgttct

SEQ ID NO: 37821 - DNA, 4915 bp, Cannabis sativa
  modified_base (2145)..(2151): a, c, t, g, unknown or other
  modified_base (2936)..(2936): a, c, t, g, unknown or other
aatgggtttggtcctttggaattccaaggcaatatgttgtggaaacatgcgaacccttcattttcactaaggaaactacacatgtcatgaatcatttggttcattcgtgtatgtgtcatgaatccttttaccaatatatcatccacataagcttccatgttttttcccaagacatctttgaacattttatttactaaacgttgatatgttgctctggcatttttgagcccaaagggcatcaccaggtatcagtacacacctttttttgtttgaaagttggtgtgttcttgatccgctacatgcatttgatatgattgtattcgaagtatgtgtccatctaacttaaaagttcatttctagatatggcgtccaccatttggtcaatctgtggaagcaaaaaacagccctttagacatgccctgttgaggtctataaagttgatgcacatcctccaggtcccatttaactttggagccaaagttggattggaaagtcataccagatataaagcttccctaaggaactccatagaagtcaatttctcaacttgttcctttacaactttcgagcgtaccaaatctattggtcttcgcttttgtcggattggatttgtgtctaagtctatgttcaaagcatggccaattacatggggactgattcccattatatatgcatggctccatgccaagataccttggttctttgtcacttttgacacaatttattcttttactgttagaggcaggttccttcctactttaacgactttagtgagatccatttctctaatgcagacttcttccacatcctccaatggctagatcattctctcaactcccactcagggatccaattcgtcttcttcccagactaccccatgtgctggctagacaggtgctttgggatttggtacataagtgctggatggaaattattgctttgaaatctaccagaacgggtcatcctataatggcattttaggcggttggataatccgccacgataaatgtgcaatatttaaatgtagaggaagtattgcttccaactatatcaccattcaaagtaatttagagttagatcttctccatgggtagtagagaatctctgttgaagtcttgaagctggatcgagtaaggcacgaggttcgctttaattaacccaatggcctggaaagcgattttaaataggaagttgactgaactcccattatccaccaaaatctgagatactcttttgctagcgacctgagccttgatcaccaatgggtcattgtgggagaagtacacgtgtctaacatcttcttttatgaaggtaattggcagatttaacatccacaacctctgtgctagtgtctgtactactagagcacacatttctcctccttcctactcaagctcattaagatacttcttttgagcgttcctagtgcttccaacaatatgttgccctctggaaatagttgcaacatgaccatccacctaaggtggagcgacacttgggggatatggattccctagtctgggatcttgtgcatttttaggtgtctagccgtttaggaccctctgaggggcatgcattcctggatcttgttggtaaaccaccctaaggaggatttattgctccacactgtctgagaaattccaactgtccctaggctaccctctatcccgtatagataatcaggatccttactcattcggagagatgtccattcttgatcaaattctccatttcatccttcaaataatcacactcatttcttgtatgcccgacatcaccatggtattcacaccttttttttggatctcttttgtttttatctcctttgtacatttgaggtgacttcctgtaatgaaccgtgtagcagcaatcagttggcttggtaaacattctcatgaatgtctactaggttggtatgttcaggatactgggcttcataccctttccttactttcttcggagcttcacttcgactttgactctttccacttctcttgcctcgagactgccttacgcctgactttagaacttctgtttgttggtgttagaatttatgtcctgaaaagcctataaagatatttatgattattaatgaagagtaaaaattttgatttatgcaagaatattaaattattaatatttatnnnnnnntaatttatatataaatatcaaaatatttattatttatatatgaggttgtgactagttgtacagagaactaagatcacttagctatgaataaaacagtcagcaatatattaaagttatgaaatctttaatcaatggttgttagtacggttcattaatgcatgttcttcggttcaagtaatcttggtttagattactaatgtagtatgacatcgaagtgaaggtgttgtatataatagaaattatatatgacaaggaatgatatgaatgaagttatctttatctaacatgttgtttactatgaagacctaattcatatcataacaatgatcaatagtagatcggcctaaatcctgagtagtcatgaactcgtgttcatgttattagtttctttaatttactcgttgaagtttcttagagaagatgattcttataacttcttttttaggaatctaataatgtgatggttgggaacatgatctaaaattatggaatcctgacctttctaacagatcaaatgttagttctctttaagtgttaattttagaaatgtaaagttgtgcacaaatttagatgggatctaaattatacttccactagtgaattaatggtactaaaggataaagaggtaattataagggtaaaataataaaatgaccaaaactaattacgaaccaacacatagatggttaatcactagaattgattatatcgatggacactacagttaaactcagtaaatataattctataattactaatagttcaatttcatatttatagtggantaatcatggaattaataaacaaaaattatttggttgatgagactcaataaataatctagttcattggagctcaaaattataggtccatggtcctcaaatcaccaccttgaaacaatgtcgagggaaggataaagagttgtataatgttgttcggttagcaaaatagtaattatttatttttgtaataaataaataatttttcaaattaattaaataggaaaaagacaaaagttgttaagataaaatttgtcaagacaatatttattgagaaaaaagttgttatgacaaaagacatcactcttgtcctaaataagacattgtaggcgtctacctctattgtagggtgtccttattggttttatctttttcttaattaattaattagttaatttaattagataaatttgaaaagtagttaaaaatatttcaaagtagttgagatattctcttaagtaattgagagattccttcataaatgtcgtaaaccaaatttggttatatatatttatttaaataattaaatatgacttaattaataaggatttaactactacaaatagaagtctgatttgagaaattagataataatattcaataggaattttcaaaattacatgagaaaaagaaaatagttttctctctcaaaattattctgattaatgtgttgcaaattttaacaagaaagactatcctaatagcccacactattccatgtgtgtggtggatcaatttggaagataatggtgcgagttaatttgcatcatccttattatttggattaaagaatacaacatatgagaagttttgaggataccctaatagtcactaagaggcatatattcttaacttatattttatgttcagatttaatgtatacacatctagagatctattggctatgatataatgataatcagataatatgaactcttctattgtgtacctgatttaataccataaaaaccaactgttggtttgtctgtgtctattcaggagtgacattgcatccgatttatgtcactccaaaattggagaaatttttctgtgaaggtgaataccatgaggcagcgggtccatagatagttagagttgtatactaggttttgcgaggtatgatagacggaatcgaaagatgcagtgcatatgcaaaattactgacattgattgaaggtgtcgaagccaccccaaaagcttgagtataagcatcttccaaattaataaaaccttgggcccttgttaaaaaatcttacaaagtcataatccttgttgtaatttttcctagggtcattctcatgaccttcctactcatctttgtctatggagtcatcatcaacgtgttgtttgttgtgttggtccccacgatgcggatgactacctacctctaatgcttccctgcccctacgacacccgcctcaacatttgtcgggggagctggttctcattgttgttggcagcattatctctaccttatagagcaggtggtttgaccattgcttttcgggttgcaaccattgttgtaaatgacaactatggtaaaatttcttctagttcttaatgaaatcaccaaaatatttcctgagattttttgaaaactgattaaaaaatagattaagcttaaagaagaataaattaaggataatgctacaagaattttatgtcgttggggcattaatgagctttagtccacgagtcaattattaagcttgaaaaggtagagagtattttttttacataagaatgctcttgccaaagttcaagaaccctatgttgagattttatgccctaaataaaactcatttcaatataatcttattttctatcactagaagattaaaagtcatttatgtttacatgtaagattcatgtttgtggttctaatatataatttatgttaaatccaaaatatatagttattcaaaattacaatgatgtcatcacagtagaaagtaattatgattatatgcttcaaagtttttagt

SEQ ID NO: 37822 - DNA, 1810 bp, Cannabis sativa
tcttttctgcaggaagatggtgaagattcgggaaggggactgcggatggggaaacggctgcttcgctccctttgtctagtttttggctgtatcttggttgcctctctggtgtgatatctgtttaacttgttgatgcatattttccatagaatgataatgtcttctgtttttctagtaaattagtttgccagtgccccttgggtgataacagatcagcttttagtgttagcataccagatatattgtagtggacttctatatttagtagattgtctataatcatgtcagaaacatctttagtatagcttatcttgtgctcatcgttatgtactaacctcctcatttatagttaatagtttcatgtgtgtgtttgtatctgcaggcatatactggtattttgaatttgatcgaatatgtgggcggttacattcccgcaattctttacaataaccaggtattttcatttccttcttggcatgaactctcacttcgtattataaaatgtaagaatcctacatttttatatttcattatttacattttatctgtctgcttctaaatctactcttagacaaagacactcacaatcatgttggtcgtggaaaattgttgcatgcaattagttgtgaaaactagtttatcaaaatgattttgattgtaaactataaaataatggagctgactatttttcagctgtatgtgcttccctacaacttgttgataatgtttaccaatgtaggaacttctgatcacctcatcaactgccgttatgctctccattatggcctcctactatagataatacattctaaacaacttagggagagaccgagacagctcttaccatggacggaataccagctttcttctcacttaattttcacttaaattttgtcaaatgaggtttcaatcatttttccaatctgtgtaaattattattattatttagagttattgggatataaatactttataatttagcgtttatatttttctacatccaaacttttttgtggcggtaaaataactgacattatattttccttgtgctaacaaggcagattgtgataacaaggcaggttgtgatattatattatttgtccacctaattttgtttaacaataattgaaatattatttaattaaaataaataaaaaaatgttactttcttcttttcttttttttttttttttgacaatgaataaatttattgaaaaaagagcatgctaaactaaagtagaaaactaaacatcatggagaaattataggatgactcaaaatatactactctataagtatatgttctcattttaaaatttgtacagaaataattattttatactatttatcacttaaattattttttattatatacaattttcaaagtttttacacttttaataataaatatatatatatatatattttaaaattaataagtatatccatatctctatattatatattagtattgttaaaattatttttattttaatgttatgtctatattttgagttattatgggttgatggtatacatattttattatacagtatattttttttattgtataatattttattattcttagatgatatgtatttaattattttattatgtgtaatagtagtataaattttgttagcataatatatatattttgtaagggataaaagtaatctcgagagtataaaaataattggtaggaataacataaaacacactgtttcattaaaatgagaagttgagtagcagactagagttgaaagagcgaatcagagctcagatatcaagaggaacgaagcttaaa

SEQ ID NO: 37823 - DNA, 4200 bp, Cannabis sativa
  modified_base (4140)..(4145): a, c, t, g, unknown or other
cagaaacgacttcgctagatcttgttacttacttgggtgccccattgttcaagtaacactaccctatcctgggatgcagggccctgggattgttttcttcatgccacgtgtaaaaaatagtgtcaatgtcatcaagccaatttttttagtaaataggttccatggcatcaaagctcaaactaataaagtcacgagctcatataccataaaattgaggggcaattgtaagagataaaaataatcctaagggtaaataagtaattcgaggaagttaaaatgagcagaaagggctgatattgaaatatgggacataaagagaaacacaccattccattaaagaaaggaagcagagcaataagcttaaagacgaaagagcatcgctctgtataaagagagacgcagagtagagcagagctcgagaaagaatagaatgacgctttaaagagctctgaaggcagagaaaaagaggcgcgatgagcaacaaacaagatttaatacacatggacaaactagaattgaaaaagagaaggaagcaatgattcctttctacctataaatagaagatcccttccgttaaaatacaaatgaattcttgatcacaccagattggttgaaactctataggaatacaccatcaaatttgtacttgaactcatgaagcaaatgacctagacctaattgagagaattgtgagaaaaattatgtaaactgattgagaatataattcgactaaatcgaatctggtacaaagaattcaaattcttattaataatttattgtagagttaattttcggcattaacaatattaaactaactaaaactagtccaaatcaaatatgctggcattaaagttacaacattagcactaagcatatatttccttcaaatttgtcataaactagtatttatgtattttctgactcaactctcaattgagactatattagcataacattagtattatccatacatttttttaataaatgaataataaataatacaggggaattttcattttctctatccagagttatatgttagttagttgggggataatttttatcaaaaaaaaaaaaaaaaaacatccaagaaaataatttaaaaggaccatcaatatttcaagcaattatccagtttattggtcgagtattgaaacaaggtcagtaataaaagggagtgctacaatacttggcacttggcagtttgaccaacttgatgcataaagtttaaaacaatcaaaacttggttccctccgtaatcactattattgctttgatgaaccaatcaagtaattaaagtaaaactggatagtgggtccccccagacgttgaaaatccacatcacctttctcatcttaaaagtagtggaccagatcccttcttccaagattacattacatattcgaacgttaacctttaatttttggtcccatctatttaaattaatctctttcgtttatcatacacctccttcaaactagccgttacacttactgatcctcactctctcctaatctcaaaacctccatcttttcctctgtcatactctaatggcagcgtctttggagataccctcgccttcccatctccacaaggtgtctactttatctcttttctctctcctttatcaaacttaccacgcaatataatttttcactaaacaaatttatttgctttttgcaggaatcacctcacttggtaatgggttctcctaatttcagtccctcctcagacaggcgattctggagtaccctccatggccgagtagacgcgcttctcgacgatcataactccaaaatctcatccgggaaacttcccccaaatcatgatcgccccataaaggtgaatttttctttttttttttcttaagttcatggtgctaaaattgaaccagatgggaactttatttcttattttttcttttaatttaatttgatagagctataaagattctggacgttcaaagcgattaaaggatgactcattgcttttgatgagagggtttgactcggttgctcacactctgtctcaactatctaaccatttggacaatgctcttcaggttgggatttaatttttggtggtgccatcattttggtacattatatttatttaattgaagttcaatcatgtatatataaggaactaatgaaaaagttcttctttcttctttctacagggagctaatgatcttgctaaaccacccaccttaacagaaatatttcacagtagcttaaaggagtcagccagtaacaaagatgaagttgtaggaaaacaagaaaatgagttagatcccaacaaaggattgaaaagaaaatacgaaaccagccattgctcagaggatcaagaagaggggccaagagatgaaaaggagcaggatccgaaagatggaaagctgaataaagccaaaaatgttgggtcttgtatctctttatttatatatgttcaaatgttgggccaacagattttatcgaagctaaaattggttgttatttgttgcaaccttgttaacagctagcagttaccatggcaacaaaagcagcttcacttgcgagggaaatgaagttaataaaatcagatttatgtttcatgcaagagcggtgctcgctgctggaagaggagaacagaagactaagagatggatttgccaaagggataagacctgacgaagatgatctggtataatgattacttatgttaatgtttgaaaagaatatataatatcattatggttacttattgtttaacaaaaaatggtgatttgggtttggtaggtgagacttcaattggagacattgctagctgaaaaatccagattggcaaatgaaaatgcaaatcttgtaagggaaaaccaatgcctgaatcagcttgtggagtaccaccaactggcttctgaagatttttcttcatatgaacaagttgtacaaggaatgtgcttagacttctcgtctccgccccggctcgtgccaggagatcatgagcagtcaactgatgaggatcatggcgattcagaatgcttccaaacacctgccggtaaacattttggcttcgccacccctgatctcgatgagtgtgaaaaccacactgaaggggcagcagcaacagtaccgtaattgaattggttgacattttgagttgtgaatgctgtaatggggttcatctttttgcaaaaaattttcactgggttcggaaataaatgctacaatgtaaattttcttctatatagttcatatgagatagtaggccacttttcaatttcaagcaatgaagctaataaatttatccccaaagttggggttaggttaattaattctcttcacagagacaaataaacaaacacattatcgacaatacaaaattacacccaaatcgagaatcatcgtcgatctccactaccgtcgcgttccttctcaaccagttgcttctgcttctcaacgagtttatctatagccgactgtacagcatcacgaccgccgatgagcaaccgggtcacaatttcgggatccgtttcgaagcgggcgagctcgaattccctccgggcgttctctctgaggacatcgcgccacagaacgcccttggagtcgggccacatgaaaaatcgggtagttcggaggatgtctcggtagagactgagtgcctctcggcgcgtgctggtcaatcgcctccgcctcaagagctcgtcttcttcttcgtcgtggagatgggatttgtctttcttcactacatgtcggtctatgagctcctccagcgtgtcgggtccttcgtgcaaaagacgacgggtaaggttagatacgacggcgttttggggaataagctttaaagggaggcgtagcttcgtgctcatattttccacttcgatcgattttgcaaaggaaaggattgtgttggtcaggtggggaggaggactctagtctagatctcaattgtgggtcataaacttgggctgtttagctgcatataaatcaaccacacatataccacatttcttgtggaaattacaacattacatatggtaatatgttatttttgttgtaggattcatttgtaattttcttaaaaaacattttctatttcaatttatgttattttcttgaatttttttaggttattaaaaattttcttgaactattgagattgttnnnnnnaaagacttttatctaattttactaaagtaaatctaacgtagatacactcaaaaaa

SEQ ID NO: 37824 - DNA, 4576 bp, Cannabis sativa
attcattcattcacagtttagtttcatttttttttttactgagttaataatcgaaacctttcattcattttttttcttactgtaagtatgacgggggcagtgatggttgagtccggcggtagcagcggcggtgactttcccgcaaaacttacgaaacaagtgatcgtgtgcagcataatcgctgcatgcggcggcctgatgttcggctatgacatcggcatttcgggtattaaaattattaatatcattgattaagtggtctggttatcctgattgtattcgaaatttaaatataatttatttttgtttgatttattaggtggggtgacatcgatggacgattttttaattaaattttttccaatcgtgtatgctaaaaagcacgaagtgaaagaaaataactattgcaaatacgataatcagtatttgcaattgttcacttcgtcgctttatttagcggccattttggcttcttttatagcttcgataacttgtaaggctttcgggcgaaaggtgaccattcaagctgcgtcggtgttcttcgtcaccggttcggttttgaatgcggctgccaaagatctcggaatgttgattgctggaaggatttgtctcggaatcggtgttggatttggcaatcaggtaatttattataccatttaatttttcatatcaataaagatattcattaatgttgttatatatttttatttattataatgatattttgttatattatatatggttaggtcggaaaaaaaaatcatattttttttggatgagattcaaaaaatatttttttataattcattaaatttcaggatcggatcttatatatagtgaacccggttgtttatatttattttttaaattaaaaataattttatttatataatatgatttttaatttatattcttcggtaaatagaattatacattcatatttttgtgtgaactataatatgatattacgtttaaaattaatgtgttcatactaattaatctgatttggaatatgacaaatttttcttcatggattaattaataaataataatgatataaattatacattactctaaataatacattattgataatatatttttacttcgttgttatatatatgtttatttattatatcttattataattttgttatatttataataattttaattgggatattttgttatatagtgaatccgtttaatgttgttttttatttttatttattttttaattaaaaatatatacgtatattatacttttcaatttatatatattcttcagtaaatggaacttattaatgttgttatatattcatattttgtgtgaattataatatgatattaggctcatattcttcataataattttttttttataatttttttggttcaacataatatgagtcttattttacatttttttataatatttttcaggcagttccactatttatatctgaaattgcaccaacaagatatcgaggagctctcaacatctgttttcaattattaattacagttggaattttgttggccaatttcgtaaattatggtacatcacgaatccatccatacggatggagaatctcattgggaggagctggagtccccgctctaatattactggtgggatctttactgattgtagagactccaaccagtcttatcgagcgaggtcacattgaagaaggtttaaaaattttaagaaaaattcgaggagtggaagatgttcaaaaagaatatgaaatgatcacacatgccactgaattagcttctcaagagaagcattcttatagaaaactaatgcatcgttccaacagacctcaacttttggtaaccgtggcactacaaatttttcaacaattcacaggaattaacgtaattatgttttatgctcctgtactatttcaaaccatcggtttcgggagtgatgcatcccttttgtcatcggcggtcacaggtagtgtgaatgtagcgtcaacttttgttgcaaatattattgttgataaggccggaagaaagagtttactgattgaagcagctgttcaaatgttcattgcacaggtaaattagataacatttatttattttaatttaatatataatatgaaaaatattaactaaaattatttatatatttgcagtctataatgggtggtatactcgcaaaatatctcacagctacaagtacaatgccggataaatacgcatggatagtattaatcttaatttgtatttttgtatctggatttgcatggtcatggggtcctcttggatggttgattccaagtgaaatattcccattggaggttcgaaatgcaggattcttctttgcggtgtccacgaacatgctgtttacttttcttatcgctcaagctttcttaactatgttgtgccatatgcaatcgggaatattcttcttttttgccgcttgggttctcgttatgttcttgtttgccatttttcttctgccggaaacgaaaggaattccaattgatgaaatggttgacagagtatggaagaagcattggtattggaagaaatattacaatgatgaacaagccgcaacaaaataatttatttagtttttttgtagttaacttatttagtttttagtttggtgttttttctgaattgaattttgaattttgaatttttggattaattttggaattttggttcaatattttaggaaaacaattttggtttaaattttagtattttttatgggtttccttctaatttttatatagtattatatttgtgtttttctcaaaaaactaatgtgggacttgattttggcactatatattgtgctattaaactaatagtaacaacaattcaataagtattgtgtttatttatattgtatataaaattttgggtttatttatcctatattaaaatttaggatagaaagtattgtgctatcgagcatatacatttatactttagtttctgttttttttttttttttttgttatttttgttcaacactccttaaatctcaaatgaagaaacaattaataatataatttttaaatttagatttaatttcgatttataataattttgatcattttatgttttttcttaaagatttttatagttattgccattgaagaattcaatatttatataatgttaatttgtatcatatgactcagaatgagtgtagaatgaagttgttgcaatgatttgttggtctttagattttgctcaaaaatacaaaaataattctttactaagttttagtaattagtttaatgttgatgctcttatgtttcaagataagagtaagtttggggttgggtgtgttgctcaagatcacattggggttgttttgggtgttatgtggttgacccgattatggttgagagaatgggaattaaggaaccgttgagttggatcatgggtcgtggctggtgcaatgtgattgtagagtccgatagtcttgtgagttttcaagcgatatcgagaacaatttgtatggtctctcaatttagtttttaggttgaagatcatcgtttatttttatctgagttgtttattatttctttacgttttgttaaacgctctattaatggtgttgcttattatattgcaaaaatatctcattatcattcccggtgtaatttggatttagatgatatcattcagagtgtaatttaattttttaaaaaagtacacaaaattaaaaatgtatatctagatataaaaagtagcaattatatataaatttcaattgttttattttacataattacataaaaaaaatattattacatagtaactaagatttatattctttggtaaatagaattatacattcatatttttaagtgaactataatatgatattacgtttaaaattaatgtgttcatcatactaattaatctgatttggaatttgacaaatttttcttcatggattaaatgatgatataaattatacattactctaaataatatagtacactgataatatatttttacttcattgattaattattgttgttatatatgtttatttattatatcttattataattttgttatatttgtaataattttaactgggatattttgtaactgaatagttaatctcttataattcttttttttttattctgtaattggtactatgtttattttttttttaattatttcagaaaaggtaactatatatattaattatatagtgaacccgtttaaagttgtttttatttttatttattttttaattaaatatatatacgtatattatagttttcaatttatatatattcttcagtaaatgaaacttattaatgttgttatatattcatattgtgtgtgaattataatatgatataaggcttattcttcataataattttttttcgaatgttataatttttttggccatctttcaacataatatgagtcttattttacattttttttataatattttttcaggcagttttattattattatttttttttttgaaaagaatgtattttattcaaaaacaaacactacacaaggtcaggcttctctgcatttaaaatggcagcagcacaagag

SEQ ID NO: 37825 - DNA, 3031 bp, Cannabis sativa
  modified_base (49)..(69): a, c, t, g, unknown or other
aacattaaatgttatttctgatctatatcaataagtaaatctgattatnnnnnnnnnnnnnnnnnnnnnggcataaaacccaacacccaacacagctcatgctaaagagcattaaatatttgtcggtgatgttagttttgtatagggagcttggttggtctctgcctactccttataagattgggtacattttttagttgaattttaggccaaagcagagcagaaccggctatttctcttttagccagcttggtcaccaatggctgggtgacaccaattgcaaggccatgtcaaaagtaggaaagtatgccaaaaaatactttatggcacaaggccttcatgggattgtgaaccacgagtttcagttggtgcctctcttcaaacgttctatccctactttggagataagggatagagcaaatcacatcctttctttgttgactgaacaaagaaatattgtccgattgttagtgtggaaaacttttggatgcatggtttgtaccccttgctcctggggtggaaagagttccagctacttgtgtggcctactctagagatgggcaaggtcctgacttggatgatgaagaagcacctttgtcccatattatacaaaatctagagagggcagagagagagagctctccgtaggcgcctatcccacgggagtcaaactagtgacgcctccctttgcatcgagcctagaggctcaacttctagtagacctacacgccttatacccatagttaggggcaaggtcaaagctgtagttgtgagctctaacacttcttttctgacaatgatggtatttgatagtttatagcaccatacttttatccttgtgttgaatattattgaatgcattctgactttgcttctttgtttttgcagacatgtcttccaaaatgagaggtctcgtaggcgggcctgttgatgagcccgctagatgagtgagggccaaggtggcagacctctcgcagtggagatgctaatggacactcaatgcctcctcctccacccgagcctatacctgccaagaaacctatagttcagcctgccggccaatgtactaggaggcccgataaaagggcggggtcagttgctggtaacaaggctgctgagtcagccacacaacatatagaaagggccatccctttcttggatgaggcactgtaggagttgggtgatggtgtgcttgataggttatactctgccggtttttgggacctttctctagtgagttgtgcttccaactttgttcatctattttgcattgtataagctggccagccatggtgtagttttaatgtggctggctggccttgggcattcatgtaggttttggccagccatggcaatcctaaggaaggagtgggtgacctgaattagctatttaatactgatattatttttctttattttcaggccttcatgaagttgagttcagcccatgacagctctagagggtcttcagacactttccaagagcgtgtgaaggtcttggaggcatctgttgccgcaaaggattaggctaatgccgagttggaggcccttctacagagaagttgagaatgtctcaagaatggagactatgcttaatatcaggaacaccgacaatattaaccaagtttctctcatctctgggttgcagacaaatcttgagaagcacaagaaggagttataggagactcttgatggccaacaggccactaaggagtattatcttgattcgttctccaaacttgcctacgtgtttcgcctgcacaaccccaaagctgagttatcatacatggacagtccaaccttcgtaagaaaacactggctcctcggagggcattgtttgagaacgggatggagatggaccagactactgcttatcgaaagaggtgttggctaacccaccaatggaggaggtggccgactaggatgttgcccaccatgccagcaagtatagtggtgatggggccagcctggactttgtagatctcgacttggcggctctgaattcagctcctactgcccctacacacatgtaggttgaattctaattagtactcagcattatggttgtattgtatagactttaattttcatgttctgcgtagcctatggcatcttagcttaggaacattactcactttgcattccgtgtggcctatggtcttttccaaactgtaggacctatgtggccaggagcctttttagaacactattttcatgtctatgtgacctggagcctttttagaacattcctttatttttagccccaggatcttcatgttggtatcttaggccatgagccctttgtttttgacactagtagtatttgatcatgtttctttgttatcatggattgtgaccgaccaggcgatctttaatcctggctatcttcttagggccttgactagtaagggtctagatttactttttcaagccgaagtatgcctgcacgacttagaggcaggtttagtagcttatgctaagtgttaaaatttctctgcataagttctttgtccaagtttgaggcattgtatagtatggttgcccccaagtgaccatgcagacaagtctcttggtcactttctattccccaagtttcatagactgtgcctgggtactgtcttgcaagggtaccatagtacgcacgtagaactaataaaataactctaaaaagttaatttgtgagagaatggttcatagacacaataaatagaatatataaatatgcaattatttattaattggtctttgttgttgtgcaacatacataaatggaatctacaagcctatatttaacaaatttaacttctagataccaggtggctacccctgcgtgcctacaaaaatagaggccactattgaagaacagtgggagaccatgcccaagaagggtcgtgggtgctagcgcttgttgtactctaatgttgggcagatagaacggctacattggaggagttctgtaagctggtcatatgtagtatttgcagaggtgctctttattcgaatatcatggtaggagaatgagctccatgtt

SEQ ID NO: 37826 - DNA, 2118 bp, Cannabis sativa
atctaaaatcctggtaaaatatttccaacaccaatatggtgctttctccttttgatctttttaggcaaagtctaagcttgaatttttatgaaattttatccttcctttgccgaagctgaagctggcctcataaaaattcgacttgactctctcatgcacgatgtttttcttgcaagaaagatcactgggggtatggcacgtcttcaatccttcttctggaatgtaaggactgcttgaaatatgtcttactctacttgaaatatgtcttgcaagcggagtctaagcttgagtttttatgcaacttttgccttcctttatggaagccgaagcttgcctcataaaaattcaacatgactctcctgcaccgtgtaatgttttacccctctatattttgcaagcgaagtcagtgtccagatctctcgtgcactttagcctttcctaggtgagagctgaaagttttccatcacgaaatttagcacgacttttgcttacaaacacggacctcagtgtgtgagaattgactgtggaaaggtgcaggcccagcttttcttccgggaaaccagaagcctgccatgccacaaaagcctatgcattcccttatgggatctgtatcatggagggatcaattggggccagctatacaattgggttctcgcccaccaacccacgattttttctcaaggaaactaaaaagtggccaattacgcttttaagagactcccctccaagtaatcattgaaagggagggcatggcttgtaaaaacagtatgcttccttgagaaagagagaaccacactcaaacctcctccataagaactagaaaaggacacaagttaggctccaagaaaatgaccaagaatttgactccgaaattcccaactcatttacggggtaaatgttatccgcatttttgtaagcatgacacttggattttaatcaagaaaagccaaggattcattagctgccaaactatcccgactgatgcttcgggaagacaaaggcaccaaatttgcgagaaaagtctccgtaaaggtgagttccccgacttccagctacacggagggtatctttgagccaaggtgtccccctattccaggaactaaatccatcgactcccacaacaagcatgggttttcacagaagggccaatacatttcaagacacactaaatcaggctacccctttggcctatggaagcctcacctaaacgtgtcagcctatagatctagtgagattatctcgcacgatatgctattatacatagcatgcgtgtccttgtgtacttgagcaaatgatccaacgactagggataaagggaaattcaattaggagaagccctgaggtgacacgcatttgaggcccaactcgtatgatatgccgcccttaaatgccatatgggaaatatgccacctaccaatccaacggtcaaattttaccccaacgatgatccatccaaggtagaacatgcaaagaagttggcctataaataccctaaaaaagcataatacgatgaccttctcctttgaaaaaaagacccattcttgatcatcccaaacaaacacatttttgtaaccctactatcaactccagaatattcctactaagcttcctcttctccaagaggaacacgggggaaaggaattctagtccattatatctttatttgtataaacagtttccagccaaagagcctactaaatggactcgtggactaagaataattaacacctgaaccacataaaatctcttatttattattttgctatgtacttcattattactttcttaagctctaaaaatatttagttgttgaattactcggtaaacacaagagattggacatactaaagcagatttaactccatgtcctatctagttgcaaggtttcaacattgatgccctaatgcccatgggtaaaatccaagtgccaatcatcctcaagggagataacaaagggagtgcattcaaacattcaaccttcatggtagttgactatcttacagcttataatgccatactatgctgactaactctagttgactttggcaccgtgacttccattcaacatttatgtatgaagtgttggaaattattttaccaggatctgagatctactca

SEQ ID NO: 37827 - DNA, 3154 bp, Cannabis sativa
acaggacatgtcctagatctatagaaggattcaagtgatgagatatatagttggttttatgatttattccaacctaatattattcgttataatcattcaaatctgattacaatggctatttttcactctaacgtgtttctataattatttctctctactttagggaatttccgtatagatatacacatatttttgattgataataggaataaattctttaaagaactttacacaacattattttaatataataaagaacatggacatattttgcaattgtttttcttgatcgatttttaaaatattcctgatcatatcatgaagtatagaattagtagtgtgttttcgggtgaagaatattaaataaattacagaaatttcttttggggattatatttatattatatgttcgtcaaaggtagtagtacaagtagtgttatatgtatgttgataatagtacaaaagaatcaaaaagcaaagtacaatatattatgaatagtttaattaaagtggagaaaagaggtagtggtgttatgaaaaggggatacccataatctaggagagcaagaagttggtcgttttcttgtatgcaggcgggggaacaaatatagatgtttgtaaacaaaatatgtacaaacttaaacttacaaaaaaattcaatatataatatattcatatcaaatatggtccccatgtgtcttcttttcttattttatatattcttctttcaaaagtacccaataactcaaatattaaaatggttgtgaacagctttttgtaaataattcaggtatatattgtaaggtggatttgattgatattgtggtagtggaatcttattgtgtaaaaaattgggtcagttaaattttcttttttgttcgtattcggctgttttgttctcatgtgtgtaatattcattaatgctatatcctcaaaaggattatttattgagctttgtttttggtttaatattaatatgcagtattgatttgatgtagacatatttcgaaaaaaaaatacatatttttaataataagcttataattcttaaatccctcttaaagacagtggtggttaagtctgttagacttgattagcttatgcgcagttagcaattagcttactgattattatgtctattattagtttgttatcttgtaattgacaaataagagttttatgttctatactcaatgtaatcattattactctttaatgaaattagttagttcatcgatatctcttttctttaatcttcacgtggtatcaaagctttctctcatcttttaaatgtgttagagaattctacattattaatgtgtagaataataatagaatatataagatgattgggctactcctcccattactaattagttttgagatagaatctgattcaccttatcccgaattctaatatggtatctgagtaaaaaacaaacaaacaaagaaaaacctctaactactattcgacccaaaaaaataataataaaaaaagccgatgaaatttgagccaaatatgatgtgtggaacgataatagaatatataagatgattgggctactcctctcgttgccaattagttttgaaatggaacctcactcaccttctctcaaattctaataaaaggagatttcggtaacaaacaatggtgatcttcaagattaaagctcaaactagaaacgagcaagatgttcctcttctgcgatcataccctatttcgtttactcattcattaaacttgatgaacacaattatcttccatggaagcatcaagttcgtgcatcgatcaaaggaagttgtttacacaagtatcttgatgcttctcaaactcctttcaagttctgaaaggttgtaaatgaagcaacaaacttgatcaatctagcctatgaagattgggagcaacaagataatctactcatttcttggttactatcatccatgtccgagaagacaactagtcgaatgattggttgtgacactacacctatggagctatctcaatgagtactacactgctctcaacacaacaacttttgtatatacaaaactcaattgtgaaatacaaaaatgattggctctctaaatgattatctgttaaatatcaagggcatcattgatcatctaacaaccatttgacaaaaacagactgctcaagatcatatagaagaaatttttaatggtctactacttgagtataatgtgttcgtgaattttgttacaaaaaagacaagatgattgtactattgcagagatagaagcattcctcatggctctatctgtttgaattgaaaagaatgtcaaatctctcgtcatttccaaaggtgaagttagtctttcccacaataagccttctttttctaattcatgtatcagttttccctccaattctcaaatttcctttagcagcaatcatgcccctattgggctagtaatggttatttggtcagctggctatttcaagaggtggtcctagcttcgggcgtgttcactatcatcctaaccctacatgtcgcagtggcccctaatctggcagtggaaatcgtatcatatatgctcaaaaaccccaatgtcaactatttcacaagcttgggcacatagtgaaacaatataggtttaacaagtctttggttttaccacggtcctttgctcaattcactgaaatgcaagcttatttagcctctccttgatcagtcgctaatgaaaattggtatcctaactctggagccactcaccaactaacacataacagctcaaatcttgatgctagcagctcttacttaggccaagaaaaaatctttgtgggcaatgtcacagggatttccattgaaaatactggtaactcttcctttatttcatcttttcaatctaaaacactgactcctaagaacatgttacatgttccctctattactaaaaacttattgagtgtctctcaattttcccaagataacactatctttttttgagtttcgtcgtttgtcctgttatgtccaggatcaggtaaccaagaagatcatatttgttgggaagcttgacaaagtcttgtacaagtttgattcaaacaatctcagccatctggtttctaactcactcaatattgatttgattgatgtgattctacttgagattcaaagctaattcaatgatctat

SEQ ID NO: 37828 - DNA, 5699 bp, Cannabis sativa
atcaaagtacatgatgctttgagcgatttcagacgaaaccgagttaactatccatgacatgaccatattgttacaatgaagccaagaattgagaagattattaccagcatcaggtcgtggaagagatccatcgatgaaggcaattttgttcttcacagccaatgccatagagatgttgcgcttccatgattgatagttggtaccattaaggacgatggagataagaactaagccaggatgatcacgtgaactgagaaagaaaagtctggatacatcttcattggcattacgatcgagatgagattgtcaaggttgagttgcgataagttcgtcaattcttggagattgatgatcggcatcgtcaaaggcattctgagatcatgttctagaagtggtgttttgttgagcagttgccaaagtattagccattagagcggaagtagcatcaggatgaacttctaatgagagattctcatttgtagatggaggaacaacatcttgagatcgtgtgaaaagtattgccatagaagttgtgggcaagttttcttctgatatcatatgagagaaagagactaagatatttgaaagaatggtatctcattcaatgaatcaaggtctgaatacaagagccatatatataggcaatacatgaattatttaaaaggactaaccatcgtaacaacctaaccaaaaagtagaaatcccaacaaaaaaaataaaatagactattaaataatccttataaaaggcaattaaaacataaggatctagagcaacgatggaagaatatatgcttggatgatgaggaagaaaatgaggttgtttataaagatgaggaggtcgaagatatagagtttgatgataaatggtgcctcgtcggtcgactgttgacagggaaagtctccgattttgcgatatttcaaaacataatggcggatttgtggaaacccggaaaaggtatgtatgtcaagattctagagcaaaatcggtttttatttcaatttttttcacgaaatcgatattcagcgagttcttacggggagtccatggacatacgatcggaaacaattgatcttagagaggctgaagaaaggtggcaatccaagaacaattgctctcaatagtcttgatttatgggtgcaaattcatgacttacaagctggtttcaagacagccaaggcagtccaacaagcagccaattatattggccaatttattgaaaccgatccgaataatttccaaggcgtttggcgtgagtatttacgggttcgagttcggcttactgtggatgttcctctcaaaagacgaataaagttccgaaagaagggcggtgatgctttctatgacaatttcaagtatgagaaactccctacattttgctttatttgtggtattatgggacactcgaaacgtttttgtgctcgcctatacgataccccgattgaggaaattgaaaaatcatacagtttggagatgaaagcacctacacggaggcaaaatttcttgactgcttctccatggctgagaacgcgattaccagacaacaacacagctccggttgcacctcaatccgatccacaatcacctccatctgcatttactgctgctccaacagacacagctggcacggggggatcgactggaccaagaatcacgcaacagagaggggctgttatacagccggtcatatcccactattataggaaagtttctaaccaattagaatcttccttaaatgaccccactattattttgcaagataatacaaccacttttatgtcagatttgcaattggaattagttgacttaaaaagaaagagattggaaattaattcccaatcagccactaatattaataattccaaggaagtgatttttgaagatgagcccaatgatgagcccaatgattttcttgatgaagatgttgttggcctcccaaaaaacgctggtatggtgggtcctggtttccaggcccaccaattgaaatgagtaccatcagttggaattgccgtgggcttgggaacccacgggccttacaattccttcaagacatttgtgttgaaaagaagttttttatttctttgtgagatcttatgtaagaaagaagtggtggaccgtgtgaaagctaagttgggctttgatagttgtttcactgttgaagcccaaggaaggaaaggtggtctagcttttttctggaaaaatattgatgaagcccgatcgcttagtttctccaacaaccatattgacttggaaatttctcttcccggtaaacttccatggcgcatgactggtttttatggtgaaccacaacgtgctcttcgtcaaacaacttgggatttactccgatctatagctgatgagtcgcctcttccatggtgcatccttggcaattttaataatgtcacaacacagaatgatgtacaaggtggccgaccctaccctgataacttgatcaacgacttcaatcgtgctcttcacgactgccaacttggagagcttgagttacatgggtacggttttacctgggaaagaggacgtgggattgctgctcacattgagatcagcttagacaaagcctttgcaaaatatgattggttttctctatttcttgatgctaaattatcaaattttgattactcatcctctgatcacacaccattatttcttgagctggaaaccgtgtctaatatccatgcaattcgtttgtttcgctacgaaaatgcttggtctcgtgagcctctttgtgccgagcttgttaaaagctgttggaatgaaaatagtcattttactcttgctgaaaaattgaagcattgtagccttatgttatctgaatgggggtttgagattactggtaattttaaaaaaaggctgaagcaaagtaagaggaagatggcaaagctgaaagtggatagcagtagctcccatgatcatgatttttctgctgagcaatgtaattatttcgagatcttagctcaacaggaaatctattggaagcaacagtctaaacaattttggcttcatgcgggtgacaaaaacagcaagtattttcatgcaaccgctagttcccgtcaacgaagcaaccaaatagtccaactgaaaaactctgacgatacgtgggtcaattggtcttcgggtcttgatcaggttattactgattattttcttgctctttatactactgatgatattgactgtaattctgtggtgcatggcatatctccctcggtcactgatgatcacaatgaagctcttttacaaccggttacgcctgaagaaataagacaagcagtgtttcaaatgcatccggataaagctcctggtcccgatggcatgggtccaggcttttaccagcaccactgggatgttgttggccctgatattgtgaagcttattaccaattttttcgagactaaaattttgcctctggaccttaatgaaaccaaccttgtgctgattctgaaaaagaaaaatttctccacaatgggtgatctgcgtcctatcgctctatgcaatgtctcttacaagattgtggctaaagtccttgcaaatagaatgagaaacatgattgatcagattatctctcccactcagagtgcgttcattcctggtaggcttatctctgacaatattatggtggcgtttgaaatcatgcattatcttaagcagaaaagaagagggcagaaaggcttcatggctttgaaacttgatatgagtaaagcttacgacagggttgaatggggttacttgactgcgattatgtctcgtatgggttttgctagcaaatggattcatcttgttctgaaatgtgtcacttcggtaagatactctgttatccatagcggtcacataatgggtcctattactccttctcgaggtatccgccagggtgatcctttgtcaacttatttgtttatcatctgcgccgaggggttttcttccttgatcagaagatatgaagctgacaggattattcagggatgtcgtgtggctaatggggctccctcggtaactcatatgctctttgctgatgatagttacttattttgccaagcgactcaaaatgctgctgatagcatgaatagacttcttcattcttttgagcttgcttcaggtcagcgtgttaatgcttccaagtcctcaatattcttcagccctaatactaatggtgcggttaaagctcagattttttccactctcggaatgcctgaagctactgatggttctttctacttagggttgccgaatattattcttggctttctcaagaacaagattattgctcggttgaatagttgggatggtaaattcctctctcgtgcaggcaaagagattcttctgaagacagtcattcaatccattccaacttatgccatgagtgtttttctgattccactgaaaaatctgtaatgatattgaaaagcttatggcaaggttttggtggaaaacgaagagtgctaatggtcagggaatcatttggaagtcatgggatcggttggcggttcacaaagatttggggggaatggggtttcgtcatcttcatgactttaattaaccttgctatgcttgctaagcaaggatggcagttgctatgttctgagtcatctcttgctagccaggtgtttaaagctaaatattattctcgttcagactttctcacagctgaaactgggagtaatcctagctttgtctggcgcagtatctggagtgctcaaggtttagttcgctcgggtgttagaagaattattggcacaggaacgactacaagtattctttctcatccttggcttcctaataaagataatccttttgtgacttccactactccggggctcaatcatcatacggttcaatctctctttgatgttcatactcgcagctgggatgtctctcttgttcgcgatatgtttaatggtagggattcaactctaatattgagcattcctctcagcttctctgctactaatgatcattgggcatgggttggtgaaaaaactggccacttttccgtcaaatctgcttacaacttgcttcaaactcagaagagtaacagacctggagataacaattctagtttttggcggaaactttggcacctcaagataccacccaaagtgaagaactttatgtggcgcgcagtatctgatgtgctacccacttgtcttcaacttgtttcaaaaggggtaagtgtttctcccatgtgccctgtttgtcatcatacggctgaaactgctacacacatcttactcaactgctcttttgcgctagctggctggcaaaaagctgatttggttccttatgctaattttgttgggactattggacactttcttcatcttgtgttcactagtttcaacgatgatatttcttgtcgtgtcgtgatgttgtgctggtcactttggaaggcaagaaatacgttagtttgggacaaaaaagtttcttctccgccttaggttgtctcttcagcttggactattcttgatcactggactaaagctcaagataaaatgagtttgttatctccttctacgctagatgttggtaacaactttgagcattggactaaacccgctgataatacgatcaagatcaaagttgatgggactacctttgagactgaaaatgcatatgggtatggtattgtggcatgtgactcggaaggtaatgtcattgatttcgtggccaaatactttcatgggtcc

SEQ ID NO: 37829 - DNA, 2234 bp, Cannabis sativa
caacattttcagttcagggggggacaatgaattcttcagggggcaaaaatcctaattatcctaatgtgatattaattacgtctaatttaagagttgaggcgaaaaaaaataatagtaattgttgaccccgaaagatttgtgaagtgaaaatatggaggacataaccaaagaaaaggaagaaaggaaagcaagaggtgtgaggtagagtctcacggttgcgacctgcactgttagggctagaaggccacaagaggcgaggagcctcgttttccatgcatgtgtcactttgctagagacatagcggccttgtgtcacaccagcgctcaaatagaacaaggggaaccttgttagttttgtgtcgcaccattctaacttagcgagacaagggtcttgttagagtccacttttgccacctctcttcgatccaaacaaaatgagattctcgctaagacatcgtttctcaccataaaacgatctcaagagatgataattcttccaacaacttaaggtttcaacaaagtctcgggtcaaacttagtaaaaaatctacaagagaaatgggaggcacgcttaagcaaggacagacgaatcggtgagctcagccataaaacttacaacatttgaggcaaagtaatggacgtacataaggtacgaagtagtgggagcatgatctcgtgtggcagtatgacttgacactcgatcaccactacttgccccccactaccttgtctcttgtctggtccctataggagaccacttaaggaatcaaaattgtaatcaagagccatgagagtcccttataaatacccttccatctcaacaaaaaaggaagggcttgaaaccttgtaagaaaaataactatgattcaaatacaagatcttcttcttacttaagatttattctttaaccagatttatgttactattattgcacctatattagctcatacttaacccccctacttaatgaataacttgaggtttgttgtccttaacttcgttgacgagtttccactattaatagtttggcattgtctgtaggaaagacaaaattcagctacgtttttctaaatcaaaacatccaatttttggtataagtgtattctcgccatcccaatgactgcaaaagaaacttggtcaccaacgctcccgtccctaccactctagcatcaaccgctagaagaaatccaatagagaatgtccaagctcacactacgaaaattctaccatcggagcagaatagcgagagctcacagtacatgtacgtgtaggtcgatcaataaatatattataacccgacaaaactgactgacgtacacccttaattattgcacctatattagcccatacttaatctttgtaattaacaagtaattcaagatttttggtcaataatttcgttgaggagtttttatcgttaataataatatatttaatttaataaattaaatttcgaatagaataaaattgttaaatagacatttgtactacctgtacctcaaagccacataagaaaattgttttgaaaaataaaatataactaaatagaatttttgtaataattgtgataattatgcaataatttttactgcaaaaaaaattcaagatgcaaaaatctataaagaacttagagggaaaaaatatctatttattttgaaaacaaaaagaaagtgtacttgaaaaattacattgaagcccctactcacgggagaaaaataaattttaaaactaaaattaaaagattttatgatttttgccccataaagtgtgacctatgtataattgtgcttcttgagtttttcaacccattaaaaaaatttgttacaattttcttttttttcaaatcggggcttgagcgatgagtggccgcctaaacaaccatgtcattatttcatttgtcacatgtcataaaacttgacaaaatgataacttttcaacattgtgaatagtttagagactattttaatatattgagggacacaataatacataatgcataagtcataatggaagatggaatatgcatgataattctggcttttggagaaagttttggtacttgaaacttcctcctaaagttaagactttgctttggagggctgttaccaattgtcttccgactctagtctctcttcaaactaagcgggttcatgtttacagtatttgttctttgtgtaattttgaacccgaaaccacttttcatattatggttggttgttcttttaccaaagcttgt

SEQ ID NO: 37830 - DNA, 5692 bp, Cannabis sativa
gttgaagcgtttccttgcttactttgtgatgtatcttgtagagttcttacggggagactagcatgactcctgctccggctctctttgcatgtgttccatccctacatgggtagtttagctcatctttaaaatcatcgtggatggttttagcttctgcttgagtttccattccaggagcaataggcgtctcttcccgaaccatgagcattgtctaaaccgagacattgtagcatctccttacacttttctagtcacctctgattaccccaacacatctgttgttgtagaggaactccatacataagtgtcgtattgaagttgttgctctaaattccactacgactgggcgtcctagtattgggttgtatgtcgtggggcagtccactactacaaaagtacaatgcttgaaggcacaaatattattttctcctttatgagtgacaagtagctggattttctccattgacatcaaggcatccccattaaagccttgcaactagatagggcaaggtgacaagtccgccttagtgatcccactcgcctaaaaggaaaatttgaacaatatgttcacagagctttcgttatccaccaagatcttgaaaactctcttgtttgttatctgggcttcaatgaccaaatggtaataatggggaaaatgcacttgttgggcgtcctcttctgtgaaagtgatcggcagactcattgtctgaagatgctgggtcggtgattgtactaatgcacatgttttcccctctctttctaactccctcaggtaccttttctaggagtttttggtgcctctcgcaaggtgcagtccactagatatcgttgttacatttccattaactggtggtggagctagccttaggggatataggtttcctggtcctggagccacaatagttaccgcaaccaaagttggaggagcagggagtgttggaagcttcattcctaggactttagggtgaccaaccccctgcggaggatttatggtaccttgctgtccgggaacaaacatttgttcatgaacaaccccttgtcggagatatatgacggggattcagaaccatttccccagatggcctgctctaaccatttctatttcatctttcaggtgcttgtaatcatcagtggagtgtcccacttctccatgataatcacacctttggttcgggtctctcttgaaatttccccctgagatgtctgtgggtgtttccataatggaccatattgttggtcactttataaagaattctcgcgagtgtccaccaatctagagtattcagtgtatcttggctcatattctttcttggctttcttggaatattgctctgagatcgactcatgtcttgtttaggaacatcctctttcgattgtccaagagccacattacatccgatttgtgttgctttgtacccaaagaaatgggtttgagtaggtgcatgcaccaacatggggggtcccataaatcataagagtatatagagttctgggaacaagagtggatgaggaaaatttgagagtggaggtttctggggctcgtgtcggagggattccaaatgcttgttaatatgcatcctctaagctaataaagccttatgcctaagccataaactggaacagtgtctcaccctccttctttgcatttgcccccattacaaagatcctactacgagtccagactgtagggccatgagtttcatgttctcgttcactttggacttagttttcgcttccatcattcattgaatgaaacttttcaggctttctcctgcttgctgtttgatgttggtgatggatcccatctcaagttcctagtcacgggcgactataaattacttccagaagatggattgcaaatccttccaagaatgaatggatctgggagacatttccaccaatcctcaacaaacttggtgagagtcaaggaaaagcataaacacttggcgtcatcacttaccctcgccatttgcatcatcttgttatatttggccaggtgagtcttcagatctatgcgcccatcatataactcgatttgggacattttgaagttctctgggagtggattttctatgatcctcctaacgcaaggctttgagtcttcatcttcagaatcagttagggtcccactttactttcagaccaacttagtttgtgttcttccaacctctctgtatcactgttcgggagatcccttccatggaccttatcattcaagttgctcctgaggtcattaccacgtggcctcgccttctcactttttgcttttttgtatttcgtgtctaaacgcctcttgaggtccacagtggaccaattgtcatcagaatactgtccctctgccccaacatcctggtttactgaattactagggcagtccttccttcccttgggttttgttatttttgtaccagcctcctttggcatcacaaggcctttttgggcagaatgacatccaagcctagaggtgttggccttcttatgtgcctgagaaggcctgttgacttgattcatattcttctgaggaggttcaagagcatgagagttcttaaagtcacccacttttgttttccttttgtcctttgtgggagcaggttccaacattagcaaagttttccttggtatttcctctgacgcactccagcaaagggtcattgttagaaccttcatcatctagatctctgaactttgtctcaccggcaagccatcattttctccatcttatgagaaaacttctcttgacgggctaacttttgttttgttttgagtagctcattggacactcggaccacctcggggtcatgatcatagtgatagacgtgtttgtaatatccatctttgacataatcgtctttattttcatgctcttcatagttctcagcatccctatcatcaccaacgtgatcatgcacgttgtctaagttatcctcttgatcattcacgttggacgtatccttgcctttcacaccggtcggttgagtgtgccttggagagaggggatctacatcttatatgaccgtctcaaggtgaccttgaaaattctttttgagaatcatctttcgagtgaacaccatcgcattagctatggtttacatctttctttagctctcaatgaaagcactaaaatatttaccgagattttaagaaactagatattttaggagctaaagaaataataatttgcagaaattaagagaggaagattttttacgtggttcaagtgttaataaatattagtccatgagtcagtctattagcctcaaagggaatattgatgtgtttacaatattttgcaggaaaccctaactctttacccttaatttattttcaaagaagaaaaagatcaagggcaatctcagcagagttttagctatgtgtttttggcttgacccctttgcatgagaataaaggggtatttataggctaagtggcgggtatggacaaacccatcacccacctaagatttctatattaatcccactgttggagtaaattacatgcaatgtagagctctctagttgatcccgtgggtagcattatgcccgtgtgtgtagcagctggataatggggaccattttgtaccacttggacacgtgtcacataaaagtttaacctttgaaatcaagggatgcgtatcattcaaagcttgttcctttataagctaaagtctgtagtgtccatgtggtaaaaggatggtggtggtgcatgcactaccatgctcagatgtaggagacaagatcagattctgccaggaaataactgtcactttgatggcctgttgtgtggaaaaagtcaatatctgcgatacacagtgagggtcaatgtccactaggtccttcaaatataagcttggtgatactccaagcaaacttccctgtttgattcttccaggttcgggagacaagcttccttttctgccatctgaatttgggaagctaaggtagtcgtggataggcttttacgtgccccttcattttggaagattcttggttcgaggatacctttcagtgacagagcaattttaaaggacttcaagtaatagacgattaattttaccttctttaataaatgtcatgtgtcatacctcgtagaaacgcagataacaaccatgggtaagggaaaatggtggttttacaactaagaacaataggaatgttatgttttaggaaaatactttcccttgtttacctaatggaactcctagtacaagaaaagaagatactaaccttgcaggtacaaaagttcagacagattctgttcaggtagaacaaaatgaagatacacatgaaatggttcagatggaaccaactcagactcaataacctgacaacattgttcaggtggaagaacttgacactcaacaagagatcagggatgaaggcacacaagaggacctgacatattaacaattggcaagggatagggctaagatgactcaaaaacctaatcaaaagtacaatggtaacatctggtgtgaagagttggcctatgcactagtaacaaacttggaaatagacaacatggaacctaagacctatgaagaagcggttaaggggaggaattccaaggaatggaataatgcaatgcatgagagatgggatctcttaagaagaatagatcaaatggatgtcaccactacctttctacatggggaactagaggaagagatacatgacccaactagaagggtatgtagagaaagggaaagaaaaccatatttgtaagttgattaagtcccggtatggaattaaacagcccctaaggcaatagaacaaaaggtttgacacctttatgatgaaacaagagttctcaagaagctactatgatactattttttactataaaggcactaatgtcaatagtgtcatctacttgttgttatatgtagatggcatgttaaatatctttaaggaaaggtctaaggttgatggaatgataaggttactaaagactgtacttgagatgaaagacctagcgatagcttctaagacctaagaattactacaaagagggaccagaagcttggggaagtgttcttagcccaagaaaactatattaaaaaaatcatagaggaattctctatgaatggatcaaaaacaacttctcaatctattactagctagtaaagactaattaaggatcaatgtcctaagatagaagtagaaaataaagccatgaggaaggtcccttctactcaagtttagttggaataataatgtacctaatggtttatacaagaccagacttggcttttgctattagtaccttgagcaagtacatgtctaatcctgagaaaattcattggctaacaatgaaatgggtttttagatacctagctagaacaactaagattggcctagcctacaaacaacagaagaacaacaccgctattgaaggctatagtgatgctggaggtagggatagtagaaagtctacatcatcctatattatcgtgcttggaggaaactgtgtgagttagaaactctaacttgtagttgcttttgtcaactacagaatctgagtatatatcaactatagaggcaataaagaaagctatatggatgaaaggattattagaagaaataattactgaaagaggtacctagagtctactcagattgttagagttgtgttcatctatgtagaagcccagtgttccatgacagaactaaacatgtagagataaagtaacttt

SEQ ID NO: 37831 - DNA, 5068 bp, Cannabis sativa
ttttgaaaatagcaaaaaagaaagaaaaaaaaaacttttggaacaactttaatatggtagcactagacttaaaatgatataaaataaataaatttgaatcacatatttaattcctatagtatgaagtatttatcaaatatagaataagtttgttttcatattagggaaaacaaaaagtttcaatccaaaacaaaggacaaaaaaataaaataaaataatatttatcaataaataagcagattcaagatgataaaatattttttttctccatcttataggatagtattaaaagaatgaaaaaataaatataataaaattatattgttcaaataaaatagtaaatggtaaaaaatgtattaacttttatagtatagtaataaacaacaagaaaatagttaaaaaaataacaataaaaaaatatccaaaaatacatttatagtagaagtgttactttagcctctatatttttggaagcatcattttatttaatattttaaaaaattataatttttttttaaaaaaaaatatagctatatgagatatttatctttttttttaattctttatatgagttatttataatattgaggcaaaaaggcatgcgtgctttccttgagctcttccatggcgaagaaaaaaagggttatccgaaaaaagattcccacgagtttggtgacgcttaatcaggagacggacctccatttgatctaagaggaaggcactgagaataaccaggaagaagagttccatgaaccatgtgaagaggaggtcaagctcattgcgaggaggagaaacaaagcacttcgatctcaagcagttgggcagaggaggtcgataaagcagattttcaggctagtgctatggatttgtggagcaaattcaaatcgaaccaggtacttactccctcaacccgattatcctttactaaagcccttaaagttggagatcaactggttgcaaaaattgacattgcagaggtggaggttgaagcttcttactggaaaaattgggagtttcaaggtgtttaaaggctttgttaaaagggtctggggaaaattgggagttgagaaagttgctagaatgcattcaaggttcacattggtgaattttagagatgaagctactcggtacttaatccttgaaatgggagtgattcattttgacaaaaaaccggttgttctccagccatggacaatagacatggactctgcccgaatggtataatcagtgccagtttggattcgacttaacagtttggggttacgatattgggataagaataatctcagcgccttagtgagcaagattggcaaacccattatggttgaaaaagttatgttaaatagatcggtggtgaaatttgctcgagttcttgtggatgttgagattttggatgagtctcctaaaatcatttcccttatcaatgagaggaaatacttggtggagcaagcagtggagtatgaatggctcccatctaaatgttcggtgtatgctcaattaggccatattgtggtgaattgtaacaaagagaaaggggtcaattggaagaggaaaagcaaagtagggaaagaggtaacaattgacaagggaacggataatactatacctactgctgacctagatcatcttgagcaaaaaggggtcaacagggaagttgaagtggaagatggtgttgtggccttcgatcagggaaacaaagataaaatgcagaatgttcatttggctgataggcaagatggtggtcttgataaagcaactgctagcgattagataacccctaggaagaaagggctgagagcttctaatgtggctgaggcaggggtacttcccaacaaaacttgtagcagcaatggatatgcggtcttacaagaggccattaaagaggtaatggctcccactcacacccatgctcttgatggaagtttgtaatatgttagggtggaatgagaggggcatgaataaaagagaaaagcaaaaagctattctcgatgtttgtaggttgaataaagttgggtttggagccttatttgagacaaaggtgaaacatgaaaatgtacaagagatgtttgagaataatttttacaattgggattactattatagtaatgtcatttcaggtagaattttggttttgtggcaatctaagtttgttcaagtggagataattttagagaatgtgcaacttgtttattgtaagatcaaggtgtgtggtcaaaaagagttgttcttagctactgtagtatatggcaacaactctaaggaggaaaggaagaagctttgggagaaattaacaaatattggtgaggcgaactttccttggatcatcttaggaaattttaatgctatgttctctttccaagatagaaatggggggagacaaatccaagccaaaaacattgaggatgcgtaaaattggctagccttaggccaagttgaggagtaagtgttcaggagccttcttcacttggttaaacaagcacaaggttgctaaccatattttttccaagcttgatagggtcgttatgaatgagaaatgaatggatatttttcctaaaactgatgcttattttaaatggtataacgcttctaatcatagtttctgtataatccgtagtcatgagcataataatgtgggatataagcccttagattttgcaactattgggttgattatcctaactataagcaaataattatgaggatctggtgtaacccagtaaggagcacggagcttgagggagtagtgcaccgactatttcgtgtaaaacatgctttaaaaaatttcagtaggtgcgaggtgggagatattgcaatgaaatatcatgctgccaaagagagctacaacagaattcaaggtgaagcaaccttgaatcctactgaattacactcacagcaagctgcttcaaaccagttgcagcagctacacctgcttctgaaaagttattctaattttgtaacttagtagagcaggataacttgggtcaagttcaacgacaaaatctcaagttacttccatactgccatgagaaagaggaagcttgaaaacaaaataattacgttctctaagggagataaaattgaagatgattttgacaaggtgacaaagcattttatctctcattttgaacaatttatgggaagtagaagttgtgctaccatcataatagataaatagagaataaaacaagatacttgtttcaatctagagcaacaagtgaatctaatcatgccttttagtaagagtgatgtgaagaaagcaatttttagcatacactcctctaaaagccctagattagatggctttggatcgtgtttcttcaaagacctttggaggaaaattggagatgatatttttagggaagttattgacttctttcaaacggttgcttgcctaagagcttgaatgaaacagtgatatcactcataccaaaggtggcagacccgaaatcagcaagtgactacaagctgattgcctgctgtaatatagtctacaaatgtatttcgaaaataatttgtacaaggctcttgaaagtgcttcctactcttgttcaaagtaaccaaggggcttttgtgaaaaacagacttcttgctcacatcattatgatttttcaagatctcctcaaaggttactcaaggaaaaacatctcaacgagatgtattatgaagattgatctaagtaaggcttatgttactgttgattggcattttgtagaagatttgctgaagctcctttgttttccttctcgtttcattagctggataatgacctatatgaagggaactagtttcaacctccttatgaatgacaatatacatggtaagttcaactgagagacaggtcttcgacaagggaatcctatgtcccctctcctttttgtgttgacaatggagtatcttaccagactcatagccagttcacagaaaagaaggggtttgggtttcaccccttatgtaaatacctaaagcttactaacttgtgttttgttgatgactttatcatcttttgcaaaggtaatctcaaatcggttagtctcttaaatgaagcctttttgaaattttgccaagctacaggtgtcactgcaacaagtcaaaatcttatatttactttggtggggttaaagatgaagctcaagctcagattcttgagttagtcaaaatggaagaaggctcatttctacttaaatacttaggggtgaatctctgacctacaaaatggaagaccacagattgaggagtgattctggttaagataaacaagaacctcaactagtgggctagtaggaaactttcatttgtaggtcgtccttaactgatacactctgtcttactcgaagttggaaatctttggatgagtatctttactcttccaagtaaaataacagctgccattgataataactaccgggattttttatggagaaccaaagggaattggagcaagctccatctagcttcgtgggagaaggtttgtcttcccaaaaagtttgggggagttgggtttcaagaaggaaaaaagtggaacaaggctttgatggccaagttcctttgggccatagctagcaaacaagatagcctatgggtgaagtggataaactcaatatatcttaagaagcatagtatatggagcattcccatcaagcaagacatgagttggtacttcaaaaaacttttgaaactttaatgcgtactaatgaggcaattttgattcaagctgaaaagggtggtaagtttcgagccaaatatttctacctcccttattaaggctcaagtagtgaagtataatggacttatttggaataaacttattactcgaaaacataaattcctcttttggcaggtttgtagccttcaactccttaatcgggacttattaagcaaattcttgcgtctcccctttgagctttgccctgtttgtgactctgacaaagaattgcataaccacctccttattgaatgtattttctcgagaaaagtttttgaaggaatcagcaggtggcttggacaagttttatggctgaatgctattaatagcgtccaacagtggtgtttacgaggccctcttgacttc

SEQ ID NO: 37832 - DNA, 3551 bp, Cannabis sativa
ttttttgcagctctttcctctgaattctatgtgggatctggatatacatttgcaaccaaggcgtgttggaccttcacattaaaaggtcagatatttaatttttgacgtcttggtataagctcacatattttctatatgttttccttagctttgatggatgcagagcatcaccaatggtttggcttacacttggtactttgcatgtgtatctatatacacatttggaaattttgatccatatggcctcaccatttgtgaaagaaatctgggtttttgatatgcgacattggggtatgtatgtatctaagcttttgatttgacttttctgaatccttgaatttcttaagagtaacgagtaacctacgaatttggactagaaccccgttgtatactcatttgcaaggaagaagttggttttctgaaatttatccactgccgtgacctttggtttgatgctcttgatgcaatgtcagttgtttctcggtataaggtcaaatattttgttcttggttgaactcattatccataaattatgattcatgcagagcaaggcatcgtatgtttgaactcatttgccttttggtaccagacatttggtttttatcattaattactgttattgcccctcaacttgctattctccgccaactgctgatttacaacatctttatatgtgggaagcttgattggtgtcttatttataatcctttgaaaaattagtgggacttctgaacaagctcttttttaagtatgttttcgtgataatgtactgggtctatgagtttcaatgtttgatcatattctagttttggtgtggactacttattaggatgtgatagtctgcatttctctctgatatgtcaaaatgtcaaatgctcagggaagttataaatatttatagaaaaactggtgaattgacatttggttggtggtgatgtcctcttcggtcagactctatttcaagagggtggtgatattcttttatatattctttgatcgttctatttctgaatggctttgttgaacgtatttggtatgtttggtttgcgacagttggtgacacagtcatgttatttgatcaatcacttttggtgatacacacctgacttttgaagttgtcttgtgatttttatctggattcaatttctctggagcacatttgctgtttgaagctgtttcgtgattttgaaagcttacatcttacaagaaatgtacccatgctttcatagtaattttgtatttgggttctgtttgttatgaatctctaatttgaactcttactgctcgtcatgtaactcattacgttttcctgataatgtttattctctaaatgtatctttaacttcaatatagacttaattctgtcttgtttttctgttgttgatggtatagattttgtaagatgtttgttgactttttgtgtgttgataactggtgtttaataaactgacttctactaaatatatagctactgtttactgactttttatacttggctagtcacacgttatataataacatattttgctgtaaatattttatgaatttataatacttagcaaactcttgatttaatttgaagtctaaacaaatgttaatccgagaaataaaccaacaataatcaagctatgcaatgttgaccctagaaaaaaaaaagctatgcaattcaaaaaatttcatttgccttatgttataatgttgaccatatgttatatgcaacaaaaacgggtttttttatctctgtcgccacttaagtttctaaacatgtcatatgtaattaatttattattcaataattaagaattctcttgaatatatatttatatatataaatgcatacacgtatatacatacatatgaattttcttatacggctaatgtcaattttttaattttttccttgttggcattattgataaaatacttgtaaaattcaatttgatcattttatacctggctttaatggaatttttttttttaaatgtattgagagaacatccttgatcttacattttatttattttcttcttccgaggctctttgtaggtgatggaaaatggctcaaggttatcttagcatctgcatttgtttgataattcaaagaacttgacttgcttcaatattcctttcctcaagcgccttggtagggtgttatcttaccttctcactacttcttccttatacttggatgagtggtttagtttttcttttttgttttttttttcccttgaattttcttgtgtttggacttcgaacttgcagttcttaggagaagcaatcgtgatttcagagttaatattggaatttgtacaagctacctattctgggaaaaacaggaatgctagttttatattacctcatttttaaattggctctcccccaataaagcagtatttattttgtgaaaagcaagaatattagttttatattcttctccacttttaaattctctctctctctctctgctcgtattttctcattaggcagttgcgtcaattttttttatcagcactcatttggcttttgactgggtagacctctagtaaactacctaaagctttcttgtgatcatggtgttcccttctcaatcttatcttgtatgtaactttttctttgatttccttttgttaatttcgtggaacccttatgatttggagttttcttaaatcttttgttttaggtctcgaaatttctttggtgtgctggagaggaggtttgacaagtcattaaatcttaatttaggcctttaatttttcttcaagctttttatctttctttagtttcttttcacatatatgcaagctgctgtttgtgctttttttggttaatttcaggcactttggctgcagtttacaaggtttaggaagatgattcgttcagtaatttgtgtggcgtttcttggtctaagtatatttgaagctagacttatttttgtattattttttcttaagttttatttatgtctccatcctgaacttttctgtttgtacgtgtatttttttttatcatgttcatgcatagtttttaattattcaggctcttggtatgtctttggccgcaaccattcttgtgtctgtctaagcagcttcaaccttgtgtggtggtctctaatcttatattttcttgtcatagctttttctagatttgtttgattgtgtcatatctttgttacatattggtttttatgcattggtcttccaaggtatagtttttttgtatctatttgttatgcatcatggagattcatatttgttctactgacctatttcgttgtgtcaaatttttgtctgttttgcctggtcttttcatcttgcttaatttgcgactcatttttctgattactttcataatgttgatatacattagtttcaggttatggtcataggacctttttaactggatatggattggcactcttactgtgcctttctatgaatgtcttcggcaacctttacttttattttgtttatactacttttttagggtgtttttttgaagtcaagttattcaaaattgtagcttcatcattttgggtttgacattacatgtct

SEQ ID NO: 37833 - DNA, 3614 bp, Cannabis sativa
ttttttagggtttaaatttttggtttagggaaaaaattttaagattttctaagtatagaaaatcaaatttccctttatttattggaggaacatggttggaatagagtaattgcgactggtgattttttttaaaaaaaaagaaccacaccatatgattttcataacaacaagatgactgcttgagatgcgttgttaaaagatcaaaacaacgacaaggcaattaagtagatatgaagaaaatggctacactaaattattttcttgataagataacttgtagagatgaattgttaaatatgtgtcattaggtactttaaggtacctattacaagaaatgatattttgagagtttgtgattttttttataatatatgtggcccgcaacattaaattacaccaataatatgatgatatatatttttttttttgataacaataatatgatgatatctattatctatttatgtgttggaaacatttctcattattaaataaacatatatcatcgtagatgtagagccgaatatcctaaccatcaagactacaacgtattttgcagctgaatgggtttcacaatatatcacaattcacaatagtttgaaagttaatcaattctattgtcttctcatgttcactcatttattagagattgtgagttttataaaataaaataacaaaaataatgggaagaaggccaaaaaaaactgaacatacatcatgtcaagtttcaaccatcaaatattataaacacaacacatacaacaaataaatcatatctatatacagtatacttcaaatgttgattcatcctttttctctgcatctacaaaaaaaccagcttctcatcaagttttacaaaattatattgataagatacaacatttcaaaactttacacaaagttctcacactcattattattagtcaaatatttcccagtgctgagttactttggtagaagattgcattggtggtgatggagcacttaggcttccaagccctgactcaaaagtctcccattttgtactcactgacactgctgcatttttagtgttgttacctgagaaatttgagtttcttgccttaagattgtcaagtgtatccacaaaactctgtactcgtcgaacctaaacatatgaagaaattagaaaagaaaaaaaaagtaaataaataaatatggtaaaaactttggtttcttgaagtttgaactttcctaacttgttttgtaccaatgtcagataaattgtcttgtactggttagagggtcattggattcccatctatacaccacacaatatgaatatatgaaatgattataaggtcccactaatacagttctacttactttctttgtttcctcaaaataagatacaaatgacaatcgaagtcttagtgaggagggatctaatctaaattgattgtacttccattacattatttatagtaaactaatctctgtacttctccaactttggcctccttaacataccctttttactctttagaaacacactgatttttcagagcaaaattaagcatacaaattaacaaaacttaattcgtttaactatcactgacctcaattcgtctctgggctctggcttctccatcagcctgaatagtgtctaatttaaggagctgcatcataagcaactctatcaaaacaacaaactccttatctgcaagtttggtaccactacgcatcattgtctcaagagtcataacctaacaaatttgtcaccattaacatcattaacaacaaagataagactaatataatataaatattaatggtggtaataaaacctgttgtgagagcttgtcaacctctgctctaacttgggcaacggcttcataagcttttaaaaggccttcatttttctttaactcttgaagtttcttctctttgctagctgggtcttcaagtagtataatcttggacatgtcttttactccaaccatgtcgaaacattcattgtcttccttttcttttcctctaaacaacaacctctgctccttgggttgcaacccagtctcaggggctagaaccctttttaaatcacctttcataattatgttaatcaaagtaagaaagatactcatgagaagcaaaacttaaaaggagatgataataaaattacaccatatatcagacaaaaaaaaagatacattttttaagtaggcagaatacccactgaaaatgggtaaaaattacataaacccagatgtaatcatgatgaatggaaaaaattaccaaaagtatattgagcaggtacattaatatcatggtgataagaaccatgagaaaccttgatcttgatcatagcaccagaagaggcatcatcatccccaatgtctctcttctgaacaagcataccacctggtctaagctcccaatctatgattttatcaaaaccttttgtgagagtggtatttttagttttaatggatcttttcattctagaccaagtaagtacctcaaaaaataccatgaataatagaatgatgaaattaatttggaaatgtgagaaaggtgagagaggtaagagaagcctatctgtgattaattagagaaggcttgagtcagactcatcaaaccaaactaaagtaactttcaggacatggacttctcaacagactatagaggtagcggttgttcggttgtgacttgggacttggaaaaaagaaaaaagaaaaaaaatcaaagaaaaaaggcccatttttgtagaaagagactcaaattacttgtttaggagtcttaatagttaagagatttgctttgggttttttagaatgtagaaaatactatgccgactatgtcgtattatgttgtatatataatgtttgaaattttttcaattaattaatttctttattttataagtaattaataagagaaatgctacatggtaccagtagtgtctagcactctcttacgtgtcaatattattattggtccaactaagtatcgattcacatataatttaatataataaattttaggaaatattgctagccaatcgtaacacaacatgtaaaaaaagtgctaggcaccacttgtgttttatagcaatgctcaattaataaatactaattaattaaaatgagattggaaacatccttactagtttaggcttagcgacggtgtggcacgtagctaccatgcaatacctaatcctcatgtaatttctaacaactattttaacttattttgcttaatgaattatttatttagttctaaataaaaatatgagaaatttggaacataatgcctcttcaatattttttttcattgttacaaattattcctggtatgaattatgaagattgtgttatttttatcctacatgtctaataaaaaattaatttgcacaatagaaactgacgtggaaataacacactactataacgtggaattggcgtgaaattaaagtttaataaagtgggtaggggtgtgcataaattgatcaaatcgaatgagaaccgaccaatccaattacaatcgaccgtcaaacattggaaatccaattgtgatcggatctgattggaagttatttttaaatatccaattggatcggatcggatggtggatggagtgtctaaaaatccaataca

SEQ ID NO: 37834 - DNA, 3272 bp, Cannabis sativa
agctaactacgattttaaggtttctagtgtttggaggagtcttgtttggagaaaagaaattcctcttaaagtaataagatggtggataggggatggcaatgttgatgtgttgaaggatatttggatcccaatacccaaagaatttagaatttattataaattgccgcttcctcaaggtctgaaagtttattagggttgtgcttaatgaggaagatgctagaattattctcagcttgcctagtgaagatatggtattttttaaagaatgaagagtatagcatgagaagcaattatcgagttaacatgaaccaaaccatgacaattgagagtttggatactatgaaaaccaaagcactgtggatttccatttggaagatgagagtgccacctgaaattaaatatttttttttttggaaattattccacttgtggctgccaactaacgatgccctattttgcaggaaaatatcaatcaatgggaattattttagatgtaaaaaatggaattgttgaagatgtgatgcatgcaatttagaggtgtccgttcagtgccaaggtttggaagtacactacctaccggatagaaataaaatgatgtaaagagagagagattccttgtccttcatctcccatatgcgaagttactgcaacagtgatgatttccatttatttttaattatatcctgtaagctttggtatgtgagaaataaatttaagcatggtgagaaagagcctttggccaaggatgtggtggaggtgctcacaacactgttacaactacaacgagacaaatttcaagaagaatagtgccaacaagagaaaatctacaaagtgagttccaccccgactggctattgtggatgtagctcatgattcttctaaagatcgatacagtacagttgctatcgcgggagatgaaggtggtaattacttacgaagaaatgggaaattttttgacaagccttatgatagcctcacgactgagttaatggcgataagagagaggctggtattggggagatatagatctcaatttgaatgcctttactattgagtctgattgtgctcttactatgtttcttctcctctctccttctagtgggtactgtggggacttatatgggcttttatggagcattcgaaacatcattcctagtcaaggctttgctggttttatttctaattttagagaagctaactttgttgcccattttataaccaaggatactctaaaaattggagttagagttatcaagaacaggaagctcccctttgaagtaaagtatgctatctttgaagatttgcctttttcattgtaagtcgtctccttttatacaaattaaattttcaaaaaaaaaaaaaaaaaaaaaaccgtgaaatacggtagcacaatagttgagctagtttatataaataatgctacttctataaccacatatattcatgtctggaaggaaatataataaacaaaaataaaaaaaacaaagacttcattgaggctctagaactatctagggtatatctcgttttacatttgtgatgattaacacttctctctttcttttccttttctacccttctttaattactttgtatttaatgtttgatacacatgtctctccacactattctcatttattaggttcttagaaatttcttggtcttcatggcttctcccatctcatccttcatttaattatcatcgattgcatttcttggaggatttgggcaattattaggtctattagcagaggatctcgcctaaggaaactccagctctgataccatgttaggagatttgtatcttcgtgacattgttgcaaagtaaagaaaagcatgaacagagaaagagagaagaaacagagcaaagaaaagagagagaaatgatagagaaagatgatgaagacaaagaagagtcttattattgaatagggaatctgatacaggttatatacaaagatgcaaaagtaagagagagagagagagagagacagttgagaatcagctgaaaaattatagaaacataacagtatttgacagctaatctaactaactctaaccactataaccgattcccttaacagttggtattcagatctattgttcatcataatcaaactatgctttctaagcagccttggaggtttatatgattctcttctttctaggttgcttaaagtcaaatactttaagaataatactttttttcaggcttccaagggtcacttttcttctttaacttaaagaagcttattatggggaagagacttatttaagcaagtgctgatttgaaaagtgagaaatggtaaatctatctctacccttaacccgtgttggatccctgctattagatttcttaagtataaacataattttcctcctcctgatgatattgttccctcctttattaatgaaaaaggttgttgagatttggaaaagttaagtaattatttcactaacgatgtggttaatgctattcttcaggttacaatcgatccttagatgaccgtctcattggggacatcattcttctaggtgctttactgttaattctacttacaatttggctaaatcctcttcttcttctccttattcttctaaccttgcctacattaagtgttagtggaagtttgtttggactattataaatacctcttaaaattaagcattttatattgaaatccttttatcatattcttccttatactttgaatctttacaagaaaaatgccattgtaaacccattttattctttatgttttgataaagtagaatttgttactcatgccctcttaaagtgttccagagtcaaatttatatggagggatactatattaatatttcatcaattctataatatgaataagtattgtgacattaaagaattttcattgagaggttttgacaatcttaagaacgatgattttcgtttattttttggtatggcttgggcagtttggaataattgtagggaaatttgaaaatatatacttaaaatactttaaaattttttccctaaatccataataccctatattccccatatatgactacaataccatattccccgtaataccccctctcatttgaaattccaaacccaaaccgtgcctctctcttcctctcgcccaaacccacggtgaacccatcccaaacccatcaaattacacccacggtgacgacggtggatcaatctcaaactgacagtgacgacggtggacatttcgtacaaacgcacggtgacggcgtcgtgcatcttcagtcgacgcaat

SEQ ID NO: 37835 - DNA, 2879 bp, Cannabis sativa
actattgttttagtaagtttgataacatttgattaaggtgggagttacctttaagggcctggagttgtgtagtttcgaacacttttctgcccaaaatggttttgaatgagttatacctaccgtggtagatctaggtgatgagagtcggaaggatagttccagatagggttgtacaaggattttcgtaaaccgcccaactcgaataatccgcccaaatcaaaccgaaaaaactgataaaagatacaaactgaaataacccgaaaaaattctaaatcgctcaatcagttaattaagcgggttgaaaatagacccaacccgcccaattaaaccgaccaaaccaatttaaccccacttttagccttttttttaagttcagtttttcactttaagtcttttattattattataacataaatataataataatatatattgaaaaacactaaaggaaatgaccttgacgagtgacgagacctctcatctcattcactgtctctctcttcatctcagcctctcatgttatctctcgtatctatctatgtttttcatagtcacactcacacccaaagtattttcatttcagttgaaaaaaaaaaaaaactcttagctcggtttgggcgagttaacccgaccaaatcgaccaactcgtcggtcgggttaaattttttttttttaaattgggcaggttggacgtagaattttgcaacccgatctttacgttgggttaaaaaatatgtagtataaaccgaccgacgtacagtcctagttccagatactaattgcgaacaggcttcgagttattagtaccagataatagattgtccggttagttgtggcttagccggtagaaattgaatctgcgagatcccagatgcgtgtcattagggaatagtttggggaaacccggttgtgaggttccgggaaggaagattccaaaagggaggacttccgaacatgagcttctggatatgtctccaagcaaggatttccgtataagattttcggatgggtttactcagttttgttttaagtcttaacgcgaatttgattgaattatttacccatcattactattgtgacatagggcccggatcatcaagggtttcccattttcgttagctagaagacttgaaattggacttgagataagaaaagtacagttgtacccctttgaatacattaaaggtgatacggttattatcgtatgtgcagaagagttattactctccaaaaactgttgtagggtggtatgtgcagaagagttattactctccagaacccgttgtagggtggtatgtgcggaagagttattactctccaaaacccattgtagggtggtatgtgcggaagagttattactctccaaaacccattgtagggtggtatgttcggaagagttattactctgtagaactcattgtatggtactatgtgcggaagagttttactctccgaaaactcgttgtagggtaaaaaagttgtctcattaggcaacggattaaaggttgttttattggacaactgagagtaatggttactttattaagtaatgaaatgctttgtctcattacgcaaataatcattatcatgagatatctgaaagattatttaatgttatataattattgtgatactacttttcttgttgagtttttgtgactcacaggtgctatatggtgcaagtaaagggaaaggcataataggacaaccatgagacctagatcttctctggcaagtgtacatatcaactcttccagctagtttcaccgaagttgtcaagagaaatttaatggcacttttgaattaaatatcttgatgtaaagatattatggaactattttgtaattaagggaatcccgaacctaaaagttgtttagccgaattatatacatagtaaataagaatttttaataagtcacactttcttttatatacagttggtttattattataaactaatttaaaagcgcgcacacacggcgtccctatgggatagggtattacaaagggttaccaaaatcaaaagaggtcgacactatacttgtggtaatggattgtttgagtaaatacagccattttattccacttcggcatccattcacagctaaaactatggctgaagcctttttccaacttgtggtaaagctccatagggagccccgcaccattatttcagaacgcgaccgtgtgttcctcagtcattcttgggctgaactgtttcaactccaagggatagaactcgagcatagcacggtgtatcatctagaaaccaatggacacatcgaggtagtcaatcattgcttggaaacttatgtttgttgctttgcttcagagaaacctaaagtgtggtctaagtggctgtcgtgggttgaatattggcacagcacttctctccacacctctttgggttgttcaccttccaaggtgctttatggtcatgatccccttgctcttgttcgctacactactaggtctagacagtagtagcaatggattaacttttagaggatcaagatgcctttctcgatgatttgaagatgcacttgttgcgtgcccagcaaaaaatgaaaaacattgttgattcttctcgccggtcatgtggagttccaagaaggtgacttggtttttgtcaagttgcccttatcgacaaaagacccttgctcgtcgtaaaaacgagaagttggctgctcgtttttataggccctttaaggtactctgccagattggcaaaatggcttatcagttgcccctaccttggttctccacccggtgtttcatgtgtcacaacttcgagcagcctgaggcatggctcattcctctccaacactgcctcatcaactcagtactgaccttgagttgcaagtgaccctaacggcttt

SEQ ID NO: 37836 - DNA, 2313 bp, Cannabis sativa
tttaagtatttcatttttcatttcttaatattgttaattattaaactcatgaaaatacctacttcagaatttagcgcaaaggaacccatcagtattgagcaagcctggggttactcttttgttgcttgaattgatgaactaccgtttgcttccactttacaggtaattatttaattgatccagatagagaaataacacttaaactgcagttatgtgtacatggactacatgaccaggattcctgagttgtcttttgactacatgacctattactttctttatatactatgtttgtactttaattttctcttttatttgatgtgttgatatggtaaattaagttgcaaaatggtcttccgtgtaggtaccaaaccaaatgcaaagccttaatgtacgatattacgaaaataatttctgcactcaaagggaaacgtggagaacatcgtacatttaggttggctgaaaacttgtgcatgaaccttattttgtccttgagggactttttcttggtgaaaagagaagggaaggtgctctctttgaactggaactcttttttttttttgtccaattagatacactgacagtagcgtttcattactttttggcagggtccaactgaatttacagaaacattgaaccgaataactgtcattacttatgctattatgattaaaacgcgtggaattgctgatgctgatcacctgctttatcttcaaaccatggtagaacaaataatgggagctagtcagcatacatggtctgaaaaaacactgcgccatttcccatctgtccttcgtgatgctgtgattggccgattggataagaggagccttgcaattcaagcatggcaacaggttttttcctttcctaaaacctttacccacctgtaaaaattatcctttgatgcttgaaaaatattgtgttttgtttccaagtttatttgaagctgtaatttccttttcctctggctacaactagtttctatttatcccttgttgcttaaaaatgttgtgttttgtttccaagtctatttgaagccaaaagactgttgatacattgttgtaatttggtaaaaaaaaatggtcgaaggcttttagtaaattcaaaagagtgtaacaaaggttctcacctaaggaacctacctaatccaatcaattcatatcgggctttttgctaggattaactcctcacattatctaatctttatttaatttaaaaatagccaaattttgtttccactctcctttcaagctagtgcaaagatgtctatttttgttttgttttgtgctcccctgtgattgttattattaaattataggcacttgaaatttttcccaattaagttgatccattccttcactgcatatttaaattgggcaaccttgggcatgtcataacaacagtgatgtcattttcttttgcaggaagaaaccactgtgcttaatcaatgcactcaacttctttctccatcagctgatcctacatacgtaatgacctatattaatcatagttttcctcagcaccgacactacctatgtgctggtgcgtggatactgatgcaagggcatcctgaaaatattaacagtggtaacttggtatgttgcttaaactgaatataatgtatgaatgttagttggcactttgacacattgcttggccacattttgtatcgatattagatcttattttttcaaggagatttttcttcttctctatcttaagggatgtatgtagtattagttctgaaaaagactgttttaacttttcataatgtggatgtcaggcacgcgtcttgagagagttttcccctgaagaggtgacagcaaacatctacacaatgatagatgtgctacttcaccacattcagttggaacttcagcatggacactccttacaggttaaaaagttgtctctttataaatttcattaacatttgtaattagtgtgaaatcttatcggacttttcatgaagttttttcttttgtaggatcttttactgaaagcttgttcaaacctggcattttttgtttggatccacgaattacttcctttggatattttgcttttggcacttattgatcgtgatgatgatcctcatgctttgcgtatcgtggtaagtttgcatctttagttatgtttctaagaattatcagttaatgtgaccttcatatcactttaatgcttttgtagcattcagtatgatctgatgattttaattttatgatatataaaatttgtcatgttgtccggaattgtccaatgttgtatgtatctctgttttccctcctcattattattgatattaaatactat

SEQ ID NO: 37837 - DNA, 5891 bp, Cannabis sativa
gttaaaccaagaaatgccgttagataagcacttttaatatataaagatatgagcttttcaactcttttaaaacattccaaataaaataaatctcacaataaattataatgattaagtttttaattttagttatagttaaaaatataaacaaaactaagtaaaaaattgtttgaagggtgtggataattattatataaatatcttttatttatgtaaaattttattaattattctaatttttaaaattatttctcaaaagtctagaaaaagctataaatcttatcttcttctcccaaaagacttcttaattaaaaattgacttctaatattttttttatccaaacactaaaaggaatttttaaattttagagcatctttaatagagtgctgcaatgctatattttaatatttttgtaaaaaaattctttttcaatagtagctaaaaatttgtgctaaatttaatacatagtaaaagttgaaacaaatttatcataagagataatattgtaccaaatttaatatacaattaatatatattttttatttatattattatcatttaatgtttataacttactttaatacacttttttaattataatatcaccattattttttaaaaaatatatttaatttattgattaataattgtttgcacattgatctacttgaaacgaattcacttattgttgcaaacgccatcaacaaagggtcatttatgggttatgtttctcttttttatgatcttattgatgatatttctcttttgtagtttctcatgttaagcgtaatgctaacaaagcggctcgtcacttagcgagattcgttattcgattggataataattgttcttggttgggggaaattccttctccaatctactcagatattgtaatggattcattgaaaaaaaaaaaatagtgttttctaaaaaaaaaataataatagttattatattattttttatgtcaatttatattaatttgttattatatattagagtacaattgggaaagaaaagccatataatatttactaatttttttagcaaatttaacacatttttttttacctcgtatagctaatcgaaacggtgtcattttacatccaatatagaaaagaaagagtacacaaaatgtgatttcattcacagtaataaataataacagtagtggggtgaaaatggaaaaaccataaaggtaaacggcgggcgaaagtcggagtcactatcggccaaaaacagaaagcactgacaagtgacaaagtaaaccaagtcatcctgttcattgttctagatatatattatatctatctatgtttgaaatttattttagtatttatttttttaacagaaaagagaaaagaaagggaaacttcttggaaagaaagagagagacccaacccaacctttttaattataggtaagctttctccatctactgctctacttttcatttcaactctctataactttttttttatattgtcatctccgcttctttgtcatcatctttcacatgctgcttggctgaaatgctgcatttacattgacctacttcttttaaggtatcaaaactttattttgtttgtttttgtgggtattttaggaggattttttattgcttaatttttgtatttttttggttaaagaatggattttgagatgtgggtctgggatatttttgttgtttgcggtcttgagagttgagtgaggtgagtgtgtgatgctatgtgggatcttgaaaagaaatgtgataaaatatgttatgtgttgctttctgggatttcttttagatatgcattgtgaggtatgtttggataattaacggttttggctttaattggggtttaattttgtcttggtgttcaattcttagatttggaataatgcaccatttgtgtttcagaaagacgattaataaataaaaagattcatttatatgacatttgacaattgtgaatactgaatattcttttattcccagcatgttactctaaagtttcttaagcttactttttcagagttttttttttatatttatttattatataattttctgagaatttctaagggatactttacctgtttttcttatcttcatggaatctggaattgcatttgggatgtatggacttatatgttaagccagttatgaaactttatatatgtgattcaattgaagtaaataatgctattaacttgtattaaataaaactgatctctgtttggattttaacatgccttgccaagttgttgactttgccttaagtgcttattacttggctggtttcatgaccatctatggtggaatgacttttagagtcacttggtttattgcagatattctgtaggaaatagagtttgatgggtgggatactctcgaaacgggagagtccaagacacccttcttacgggtctagatcatattcttcaagttatccaagttatccacagtctccatatactcagccaagccaagagtacgctcatcagccatactatgctagccagcagccgtatcatgcacctgagtctcatggctacagtgaaggccgagcccccgctacaaaaaagaagctagagagaaagtactcgaaaatagatgataactacagtagccttgagcaggtaagatagctggagtattagtcttatgtatctatgtggtgcccttatctgaaatggcacgatatacctttggtgatttaaatgattctataattctcacttgttatgtagtttacttaatatttccaaaacatttaggctatattctcatggtagcttgtgcaactcaggtcattttaacaaaagtttttcgaattacataaggttgaaatctcaatttcatttctgtatgaggattttacctagtgtgctttttcatccatgttttctggacttaatctgtgctcttagtgatagcataagtttatagcagcaaaaaggtaaaaaaccgtgaaattgtagatggcatttgcaaaaattaaagtcaaagtcaagtagattactgctgaatttgctgatggcactatattaattatcatgctctgcaatattcaacttctacttcttcaggtaactgatgcattggctcatgctgggctggagtcttccaatcttattgtcggtattgatttcacgaagagcaatgagtggacaggtttggtctcatttaggtgtaaaatagttcctttccaaagtgttagaaataataagatgtttaacttactcttgtattaggtgcaaggtcattccaccgtaaaagcttgcatcacatcagtgaaacacaaaatccctatgaacaagccatttcgattattgggaaaacattgtcctccttcgatgaggataacatgattccatgttttggattcggagatggtaattcttttgaatgaatgttgcagtttttatgttatcaccctttcaacatctgaaatgttatgtgatcccaaatgttggcagcatcaacccatgaccaggaagttttcagtttctacccggatgagcggttttgtaatggatttgaagaagtattgagccgatatagagaactggtccctcagttacgacttgcaggttactattttgacatgaaatttcttttcttcttttcttcttaccttgttgattatttgcttaaattgctcttgtgcacctttggccttttgtttcggtaacaggacccacatcatttgctccaataatagaaatggccatcactgttgttgagcagagtggcagtcagtaccatgttctagtaataatagcggatggacaggtacttattctattctgtatcattttgtaagtttctcatcaagtattgttactaaatacgaatttgttttgtcacagatgggttaatgtgtgagtagtccgaattcaaacatttagtgaggctattatttttaagtgaacaatgacagttggccatatggtcttaaggtttagattgctgacaatgttacccttgtatcttgttttcaaatttggtttcgttttcttaaaaaattgtttctttaaagaaagtaacaattttatttcgtctagcagtgtatttttactaagatggcttaataattagtaaataaagtataatatatacttaaaaaagacctacactggctatcttccatcctgctatgctacaatccccagcttgtttgtcttgtctctcaatttttgaattttattaattatgatgtgtcattacaggtgactagaagtattgatactgagcgtggagaattaagccctcaggaaaagaaaactattgatgcaattgtgaaggcaaggtaattgctcgatttgcttgttcctgtaatcttagctctttgcaaagaagcttcttaatttgctactccatttgcagtgaatatccattgtcaataatacttgttggggttggagatggaccatgggacatgatgaggaaatttgacgataacatccctgctcgggcatttgataacttccaggcaagtacttctagccatatggaaataattaatctcgttttccttcatattttttttttgtcaaattttgatttaaaattgtcttcttcttttttccctcttgtagttcgtgaattttacagatataatgtcgaagaatatggacagatccagaaaagaaacagaattcgcacttggagcactgatggaaataccatctcagtataaagcaacactggagctcaatatcttggggtaacaatcgatcttttcattttagttgtccttgtacttggcgactagagttgatacctaaaaaaatcaattccatacatattttttctttttcatttctcaaacagctgtagcagagggaaggctatagacagggttcctcttccccctcctaactatggatcggcttcaggcagtgcctcaaaacgtccaaacagttatcgcccaagtgcacctactgctgtaagaaatgatccgggtgttagcagggcaactcctgccagttcagcttctgataatcatgtatgtacttatctagattattttcaatatcacattagtcatcattgtagtctccgaagtagagtgttgatgatatcggattcttaaaaccttaatttttgtgatcctgacagctttgcccaatttgtcttaccgatccgaaggatatggcatttggttgtggccaccaggtgagtgatctatgctgaaaatttaactgtttttgtcatgcattgaaaagaattagatagttgaatcaagatatgatttttcttttattatttgcagacatgttgcgagtgcggccaagatcttgacctgtgccccatttgtcgtagcgatatacagacaagaataaagctctattagagaagagtgttaaaagttttggcactggtttacactcaacttgcagacagttaagctcatttacaaaacaatttaagggcaatctttggttgtgtaattaattagatgtgatattagatcctctcctgaaaataattcattgatgggatgtggggttggggtgttcagcaaataatgtggcttgtaaatatctctagtttttgtcaattcacagtgctctctgtactattttatcggctgaactgcccaaattctttttctgcgtaatctcaactcaacatacttcagatgctcacagtatgacagaactttgttactctggatcataggtttacacatttatatgagaggaatttgccaaagctaaaacacgaggaaaattaaaaggtaaattttggatttgtggcctcataattcataaaaataatacatatttttgcttgataaaacttgatggtgttcgaaggcttgacgtacggaccttagaaattaagatttttatgacaaaaatacttttgcttgataatgctcaaatttaattt

SEQ ID NO: 37838 - DNA, 4051 bp, Cannabis sativa
ggcataaaacccaacagatgataattttgttgatgctagtgctactatggtttgtggtattcaagctgttaagaagatggtatttaatttcaacatttgttttattattgttttggttttttttttagattttgtctttgttgtttagttatgtttgacattagttattttttctagatggagtgttcttccattttttttgttgctggtcaatgtaccatttcttatggtattcaaggtgtggatgagaatgtatattttttttgatatagtatttttttattgttgttttggctttttcttaatattttttcattgatatttttttgttttcttgtatgtgtatcttgacttttcttattttattataggctcaatcttctggaaaagttggtgattcttgccgcattgatttggttcaaaataatgttcgtgatattgttatttttgaggagactctgattgtagttcttggaaagaaggatagaaagaaaggaactatttgaaagtctctttatatgaaactaggatctaatgatgctaatttagattcaatgtctgattctcctaagggttcttattacaaaactgtgaaatatatttctagattatgtctgttagatgaaaggattgggaaacctgttgactcaactttggaggttgaattcaatgtttggctagggcatggtctaagatcagagaaatatattagttctgattatttttagatttattgtatctatatatatatttattattttaaggaaaacaacaaatttttatctgaagagcaaggataagttttctcctcccattcgtttttttgttgaggaagtagacaataagatatatggtttcacaagcttagttatcttgataatttgttagcttattcagtaagtatttttttacaattgttttgtggttgtttggttattaattttacctttattttgtgttattttttagttgttgtatttttttttcttcatatcttctcacttttttatatcattttctactatctgtgtaagaaaattaagtatgcaaagaaagtaaaattaaaagttacaataattaattgactctttagtgctagcatcacaaatctgtatgatagttttgtcgataatcaaaaagatatttctattttgtctttggatcatactgtggtccaatatattatgggaaaaaaatttatgtgctattgcatgacacttggttgattacgttattttcccaattaatatgaaagtctaagagcattggatatgtggccgcttaaatgtatctgagcgctgcatctttctgtacaactcgctcaggaccagtaggttgatagagttgcaaaggaggcttgtaaactcttttttgttattttgctgtattatttatttatgctatatttcaaaacttttaggaacaaaacaaggttttctataatggagtcatttaaatttgttcatgtttttagattgactaaggagaatacaacgtaagtttttagatttttctttgttttggtttttttttttttatttttttttaaattgtattttcatgtttgtttatttttattatttctttgatttttatgttgtttgctggttattatagtagtgattgtggcatttttcttgcagcttttgcagagtattttattgacaataagcctattctttctgaggattttattattgaagtgtaccgtgatcgtttggctgttttgtttttccactatggtcaaaagaagcaggtaaaaaatattgatagcgagtccaagtttacgtgaaatatttaacaaatcatttgttgtttttttatagtatattatttttaagttgttattatattttttcttatgactgaaaagattatttatatgttgttacgtttttatattttgtaatgtttgctgaatgttatgagtacttatattgtatttttatagtaaatatgtatgtaatagattaaatctctctttaatatatataaatttgaaagtttatatatgtttgagttgtttatatattaggttgttttattagatgttttgttatttttttattttaatttttttttaaaaaaaataataaaaaaacataaattattcagatattattaagaacatcattgtcatagacattttgtaagattcctatatttatgttttcttatttttttttgtcatgattttataattgttttaaggttattttttttttactgttgtttacccatattaatatattactttcttccacatcctagttctcctcaatttttaaacttttatagtatcatttaataaaaaaccaatcataattaatcaaatcattcatatctcaatttcacgtagtacccaattagtttaaaaatcttataaagtatataagcaaatcattatcatcccatttaatagttatagaaatataatgaaagttgtatgcaaattcttttctttagtattatatgctcaattgtattttcagtttttttgccgttgttctactgttgttctttagttattcttgttctcaatatttttgatgtcttctactgcatgttcgcttattgtgctccagatccccacattagctgcacttgatatgtttcttcttctcccagtcagcttccatcctccttttttttttgtcctctaaattttaccttttcaactgaagacaagactattatgtctttcacatttcatggtacatcccacttgctttgatatcctattgggtacactattcattcataagttgctagccttttttttttctttgtgtagtaatctgagcagtagttttatgggtccatgttaatctcctttaactcggctacaacatgtccacatgacatttcatcgatttggaacctgttgcatatgcatgttctctctttgagatctactatccatgattctttcattttggttacctcaaataaataatcagtgattgattttacctatgttatttaaaactaatatttattatacataaagaataatagtggaacaaccctacaacaatgctagaaaaactattatgccccataatgattatgtttaataatttaaactgcataatctaaatctcacctccaggttcaatgaatatgtctagctttttagtagcatctatcctgcaggtggtgccaatgaatgtgttttgtacttttatcctattactatgtgtatattgttgcactaatgctcttaagcattccagcagtgttgtaattgaaagctctcttgctgctaaatttactgagtttagtgattctactatgttagaggtcatggtgcaatatctctaattttttctgtgaatctttggctaaattctcataactaactttttccaagtacggtcttatacatttgtccaatccatctagttttgccatgtggtactcaaactgtttgatcgtgatctcgtttctataaaaaattagacattatttttctcacaccatatgcttattttaaatttttgaaaaattattttcaagattttcattttctgaatcgacaacatagaatgcaagcagaaatatgtgacctgctgcatcttgtgtgcatgcaaacagaaatcttcctccataagatgctttcaagaatgtactatcgaccactattatcggcctgcatgttttccacacttttaccgaagcatccaaagccataaaaacaaacagcaaactgttgtcttttgctgttttcaaatccacaactgatccagggttgtatttttgcaccatgtgtaagaaacttggtatcaggctgtatgattccttagcctttcctcttttacaacatactctttgcttctccaagctttcatgcagttcatcttaatttcgtacctgtgtttcaattctccttttatttcttgtggtgtttcttttgtctttatgttcaaaaacttgggtttgatgcattctcctatgaattttgttattacttgtctttgctcttcatgtctgtaaagtctttttttggcaagttaggtgacaaaataatttttcctttttatggtaagat

SEQ ID NO: 37839 - DNA, 1189 bp, Cannabis sativa
cattttgtggtgtgacaatcttgaagctggttctctagccttgaatccagtctacaatacgcgcacgaagcacattaaaatagacttatactttgttcgtgacaggatgattgcaaatcaactagatgcgttatgttgaaccacataccagatagcaaatattcttactaaccctccatctctctaaaattatctacttcaggaataaattaacactttgctgaccagtgtaacttgaggggaagttaggatatgttagtttgttacttgttagttagcaaattagttatttcaatttgtaactgattgtactcttgctgagcttattgccagctgttgtaactatcctattggatcttgttctatataaaagaggctgagctcatctctaataaaaaagccattttcattttcatttcactcatctctttcttctccatctccaaatctcaaatttgtgttgttttgattttgtttttgtttattttcacttttatacacaaaactcatgggcataatatcttcctgcttgattttggtgagaacagaagtgtacgtagcttgtagctagagtgctagacacgaactgctcatgcaaatggttcacagaacaagaagtactccttgggacatataaataggacttttaccaagatcatgcacccaagatcctaaatgagtgctcgagagtcgagaggcaagcgatttggaatatatctatttgatattatatatatgtaattgaatcttgagttaaattatacaatgtcgttgaaatctttatatttatattcggcttctttacagtcatttgacatttctcataagaacaagtcagccattttttttttatgattaaactaaactaatagttgaaaattaattactctataataaacacaaattaggataagacaatccaaaaagcaaaagtttaagtaaccaataaatccctggaaagctaggtcaaactcgttagttgaaagcgagtttcctatctaattaatcgttctaactgtttttgtcttaatcctgtttttaacacattttttataaccttgctgacaaatataaattgggtactgggtacatatcaccttttatttgtacacttttttaactcttagctatattaatagttttgtaggaaaaataatactgcttagcacactcctccgtgtgctattag

SEQ ID NO: 37840 - DNA, 3630 bp, Cannabis sativa
  modified_base (1991)..(2007): a, c, t, g, unknown or other
  modified_base (2303)..(2313): a, c, t, g, unknown or other
atactccatcctgatgggtacaagaacaaacatctttaatgttacagagttagtgattccataccggagaccaccacctattaagaaagatgtgaagaagagggacataaccaagttttgcagattccataatgactattgacatgatattgaaaagtgaaataacttgaaggaggaaattgagctcttcattcaaaagaacaagatatggccacaaagttaagtaagagactcttgaggatgtgcttccaatagaggaaatgccaagcaagcatactcattttgaatgcaagccatttaagtttggggaggaagattctagtcaccttttgcacccccaaaatgacccattaattgtggaggtgcaaatagcaaacatgatggtagcctgaacaatgattgatagtggagcatcagtgagtatcttgttcagttgctttctagaaggcacgtgactaacaatcaaggacctagaaccatgtgagaacctactgtatggattctctagggaaggagtggccccatgtgaaagtataaagctgcctctaaatgcccaagggtcgaaacatgttgactcagcttgttgtaattgacatacatgctccctataattgcatgatagggaggccaacattgtatgaactctgtgtaatcacatccatattccacctgcaactgaagttcctaaatcctatcaggataggatgtttgaaaagaaataaaaggatggcacgagagggctataacatgtcaattactaccacaaagaaaacagtgggcaaggtcctaatggaggtgataaagatgatcgatgaggggaccctagtcatgaactcctctcaaaaatagggatctacccaagacaaggatagttgttggaaaattattttagtaggatcttatttactattcatgtatgtagaattaaggctaatataatatcctaacattgataccctaaaataataaaataaacgcataagggatttaagaaaactttacattgattgcagcagaataaattgtctctttgcgttcagttctttaacccttgttccttttgtcccagagtattaccaagaactgcacttggatcttctctccttcgattgtgttcatcacagtcttccacaaaggcccgagtatcaacttgaatagtgtgggctgatactcaaaacaccttagaacaatattgagaaagagtttagcatagtgaattttgaattaaaagaaagaagagaagataattgctgacaatgaattttgtcaaactagagctatgaaacttaggttaattctctcttctcatcactttctttatataggcttcacttagggttaggttttggatgagataggcttaaaatacagacttgggctgatctaatcctctaggtcgacattagatatgggctttagagttagatttttaccactttatttcaactaataaaactaatgtgtctcttctaattttagcacttctctcatctaattatttaaatactagttttattttaataattatcaaataaaataaaatttaaatatatttattaattagacccacaaagcgtactaattaacaaataaacctttatttctcttttcttctcaaaattgcccaaacttggtgaaagttcttaagtaagacatagtctatttatgaattctaatttacttgttaaatacattaattgagtctacaagatgatattatcttagaaaatatgagaaccatgggcatatctaaccaagctcctaataagtaaatcttaaaatttatcgagtaaatttcctaactttttaattctttttgactccactatagatttaggattgtactaatgattacatagaatgctctatgtataaaatatagatacgctatgaatttatctattatttcaatcacaacaatctttgatcctctatagacagtctacattgagtagggacaaaattgccattttatccttcaatgtattttnnnnnnnnnnnnnnnnnctacttgtaaatgatattttgggaaactaatataattaccaaaatgagcactctataatttatcgcgttaagccaaactctaaggaaaccatcttttcacttctaataaacatagaagctatagatgtccatatctatgattaacactctcactaagttgcattaccaagtttccaagatgtaagcatgggctagcctcgtaggtaagcttgtaacgaacaagtcaaagaactagtgcaatacatttaagtgagagctcaaccatctcaagattgagatcaaatgatctatgatcnnnnnnnnnnnattgacttagaaaagatataatagtatatttatgatatcttttccactgtcaatatcgatccaatcttaggtatagtcaatacatctgatcttggtttactttactaatgccttagaaaagacattccacacagttaagtgtaagtaaaccttatcgttgattatcacgtcggtataaatccagtgcgttgataattgtgagactaaataatttgaagtagataataacaattactttccactgtgataacatcactgtaattgtgaataactatatgttcaagatttaataaaacttatatattaaatctataatcatgtaataaatatttaaacaaagcatatgacaagatcatggtatgatttctaatctttattgaaagtaaataagatttacaatgaaattaggttttatttagggcataaaatctcaacaaactctcacttgcactaatataaaactaaagtgaatttcaatttaatcttatacttgccgtcttaatcaaatgtagtatttaacataaaccatgtaatatgatctgataggttgtattcagtaccaaccttttccaccatcacattttccttagtaaaataaattcatgattttgtgaattccccatatatatgttttactcctcttacggtacaagattctttactatttagaaattgcatttgtgtgatcacagagtcacactagcagttattccatgtctagaattgtgccaaagtctacatcaaacttcctcgagtttgaacaattcccttattgcctttagggcatccttattattcagccttactggtagaattaatgattcagataggcttttacacttctccaaaaccattgctttgcccacagagtaatcaccatttctttagtagactttctagcattgttgcaagttttagaaatctaatttgggctagcctaagggttttaatacaccacccttataaactaacatatagagcatcttcttgtatttcatcatatgattgattatcttccaatgttcctttctgaattgaactaatacttactcatagctcccactcaatagcagatgtctggtctagtgcatacaagagcatacataagatcttctactattgatgcttaaggaatccttttcttggcccttgtcttatctagagtagttgaaaacaagtccttagataaataaactccatgtctagaagtcatgtaacttccattagagatagcgatttgaaaagttactttagcatcttactaatgtaacttacttacgagagagtaagtaaattactaggtataccacaagccat

SEQ ID NO: 37841 - DNA, 2826 bp, Cannabis sativa
  modified_base (26)..(32): a, c, t, g, unknown or other
tttaaaaaatattttcacttttctannnnnnnaaacaaaaaactgattaaaaaaatattaccaaacgccaccaaaatgtttggtaactatttcaatttttagtttttgaaataactttggcttttggaggtcactgtggaatttaaaaatttctccaaaagttaatgatgtgttagctactaagttatagttttatgatagagttttgataattggataaaatgttatatttaatgtgatttttgtatatataaaaaaaaaatatgtgaatgttttgttgacttatcaagtgtgtcgtggtggtgctaagagtattcttcatattatggttgaatgtatatttgctaatttttgttggcagagatttgatgatttggttttacaatccccacaaccagatttttttggttggttctctaatgtggcgtgctcgtaatgatttggtttggcaaagcaaaaattctgttgctaatggagttgtttcatctactctagcttatcttaatcaatagatgaatgctcaaaaacatggtacttgcataagcgaatatgcttcttcctctgttgtcggtagtgagcatttgatgatacctattgttaacatgacaaagttcaatgtggatgcttttgatgttactgggactggtagctttggggttgaatgggtagcgcgtgatcatggtggtaatgttattgaggcagagtcgaaatttgtgtctcgttatgtacagccgaatatgacaaaagcgataggtgtcaaggaagttcttagctggattaaacgttagaccttttcttaagtggttgaagttgattgtcaattggttgttcatatgcaatttaccatacacaacaaatgtcttcttcgtctggcttgattattttggattgtaaacgtctatttgcttttttacgcaatatttatattgtctttgttaagttatctctgaataaggcaactaattgtttggtgtgttttacttgttctttagcatttatatactaataaaataatacttgtgagagatgcaaatttcagctataaaattgagcctttcatataaagctgattgactagaaaaattactaaaaacatacatcctcttaatcttgtttaccttttaatgtgatcaaataatcaaagtagttcatttgtacagaaaaaaattctttaagtgtgtattaaagtattttattaattcggtgctgctcttccttagtgtaatagattgtaattattggtacattttactaagtaaaaacaaaagcaaatgtgctttcgaaatagttatagttaattcatttttcatttggtgtaatggatcataattattgtatatttatctttataacatcaaggattacaatgtcaaaagcttagcaataacaaactcattaagttgtgtttgatttattatatgaatattaatttttagtttatttttagattaatttaagaataatttgcagttagattattaaattttcttaaacattaatatatttcattcaatttgcttttaatttgtaacactattatttagattaattgaatatatgtaaaaataatctcaaacaataactaataatattttttctttaattatttattgtataatttttacacaaagtaaaaaacatctaacataaaattaaatatacgtgtctcgcacgtaattttcttttagtataaatatatatatatatatatataatgttgttggtaattaaatcttggtttgggattttgattgtacaaaattgtgaatattgaaacttggtaactggttactaattaataatttgaaagcatcatataactttttattattcttggtaactgtttcttatcttgcaacaaaacttaaataagtcaaaatttgatgccatcataatttctttttgacaaagattactactttacaaattaactttttattggaattcttagaaaaaaaaaactttttattagaacttcaagtttatcacatattattggtctaaaatatacataaaaggatgtgataaaagatcctagataaaaattacttacaaactctatctaacttatttatacataaggtgattcatataaacttttcatttatgtaaaatttttatttttattaggtcgatttattatgctagggttttgtaaaacgacactccataggacggccttgagggaatcgtttcagatcattgcaatagttgtaaatcataaaatacttttgcacccatctaagcctccttcgaccgggggcatcgagccctagtggcacagctgcattggctgatgatttggcagtgcatggtggcgatgatcgagacaccacacaagcattggcgtcattgaaattgcgatagtaggcattgaagggagccttggaccaatcggttttcactaaccctcctcgtgttgcccattggtcagcgttccataggctcgagtatagcttcattggttgcttattagggaatggcactcctcttctctcttcattgttgaaaactcttatgggagtgttatctaccataaatctatacagcaactcatgttaaataaacaaaaataaaaataattttaactacaataaaaaatgatgatattctcacttaaaattatacattattaatctgaatttatttactctataaaaattaagaaaaaacaaattattatttttggtaaaattttaatagtcatataatttttatttatttttttacaatttttttaattataattttacagtgttttataaaaacaacagaaaaataatagaacaacaacataaaaataacagggcaacaatatgtaaataa

SEQ ID NO: 37842 - DNA, 2092 bp, Cannabis sativa
attagatattacgcaatataatcagtggaaaaacataccaacaatctctagttaggataagatattagattgagctgagtattctttttcttcagtaatagaaatttctgaaactgaaactctgtttttcttttcctttcctttctagagttgagtgaggcttaatatggatttgctctgcttttttataagctaaaaatttgggaggcaacagaaacagtaaatactttaatattaaaatatgaaattccagttctatcctcgtttgtctttatagttcaactgtattcaaacttgggttccgacgagctttcctctgctgttttgtttgacctgaccataatacccctcacataagtatgtgtaataattttttttttaattaatttttttaatacgtcaacaaatcaacaattggggaatctctgaattggttgtggacagtggacattaattagtacgtgacgtgtatttttcttttaattaagactatataatatatagaaattatataagtggatacaacatctataaaaatacataactaattaagtctatgtgataagcactctaataaatttgcagcctactcttactctgtttttgatgcggtttttaacaaaacattattaaatagatatttgatgcggtttttaacaaaacattattaaatagatatcaccaattaatatgccacatttttattattttcattatatatacataaaaaattaattctcctactactccattccataaagtataatgaatttaaaagacacgtgcttaaagcttttgtgactatattactttatgaaatatatgtttatgcatatatatatacacacatgtattaagtggtatatataggtggatgcattttatgtttattagagattttatgtttttacgtactccatatgaatttcgcttatttttggcttggctttacttgtttaatcacatttttgtcaacggctgggcacacaaaatagcttgagtgggctaatttagagatcacgtaaaattttattattaaaaagaaattaatatataaataacaccaaatatagataactaaagaataaagatcatgaatttattttattttattttaattattttattaaggagtatctcatttttgtatcgtaatagtaataataatagtaatagtacttaccggtgaaggtcttaccttagctgacgtgcttgctcctaatcctgtatatatatgtggctttcatttttacaaaagtcttcagtacatgcatggcaatggccaatctttatttatttattattttaaatataatttgcaatattttttgacttatcacccacacgtctccttataattattattattatgattattattttaatgatcgttattcattttataataataagtataacttgttctttcttcacaaacttatctgctagctatattttatttatttataatatcacaaactggtgtataaaatgtatgattttttttcttctttaaaagtggagtaactagagtaatgaattgataataaatatattaattggcgttataaaatcttttacttttacctttttttttgagataaaacaattttgtcaaagtcaattatatttattagtttcaattttcttgactacaaaaatatctttattactaaattataatgtgtgtgtgttttaaacataaattattatgttcgttggtctctcattattgagcattattgttatggttgagattaatacttttttttttccaagaaaacattaagaaattaacctatttcatataaatattagctaaatatgagacacagatgtatttttttttcttttggagaaataagaatcaatgcattaaatccgaacacctacaaacatgttgttaattttctatacattgttacaaattaaatcaattcaaattttatctacatttaatacttttccagagagtacatataaaattctatactcaacatcatgttgaatttgttggactatgtaatctactttccaaatctttgaaggccgaaaagcaccattccttatttttcatacatgatacaccaac

SEQ ID NO: 37843 - DNA, 2354 bp, Cannabis sativa
aaaatactaattctttggcgcgtgatttacactctatcttgactttcctttcccgcccccatttgatttctctgcttcttcaaattctggttccttaaaccctaaaatccgtccatggagattacggacgagcagaggaaacgtgccgaagcgaaccgcctagcagccttagcaaagcgaaaggcacttactgaatcctccaatggacaacagcaacaacagagccgcccctccacgctcgccaagtgtcccaagctcgcccatcaaccacgcgaattcgtccgcacagacccagttcttaatacccacttgcctggaaagttcagggtcaggcttgaagtatgctcccccgactcattctcgatcacccccctcaggcttggggcttttgattatcccggagaagaggaatgcttgcggcaacttgccgattgcttgtccaatgtaagtagaatcttttttgttttgttttgtttttttttttttgaaaaaaatatgagagaaaaacagagtagaaaaagaaagagtgtttctcaggtctgaatacaaagaggccttaaataggcaaagcaactaactattataacaacctaaccgactgtattaaccaacctaaacagaaaaataaaccaagtataactaatcataataccctctctcaagatgagtgtaaatgttaattacacccatcttgaatacaatattagagaagggagtcggtagtaaagccttagtaaatatttctgctaaattctgttgggaagagacatgaagaagcttgagagagccttgctagaccttttcacgtatgaagtgacaatcgattttcacatgcttggtgtgctcatggtaaactggattttcactgatgtgaattgcggcgatgctgtcagaaaacaggttggcaggtgtgttgtgggagacaccaaggtctttgagaagagcaaggatccaagttagttcggaggttgcattggccatggcgcggtattcagcttcagctaaggagcgagaaacaacttgttgtttttttgatgtccatgagacaagggaatttcctagggaaatgcagtagcctgagacagaacatttaatatcctggcaactgccctaatccgcatcaacaaaaaaaaaacttgaacattggttttggataggatggttttagcatatgcaataaggttgggggcattattggaaggaaagaaaaggccttggcccagagttttttttagatattgcaagatcctattggtggcttgcaagtgagggacttgaggacatgataaaaattggctgagatgattaactggataaaagatgtcagacctggtaattgttaagtatattaatttgccaatgagactgcgatagatcattggataacagatgtcaggcctggtaattgttaagtatattaggggtagatacaagttttgcacctatgtaacttatgtcagttaataattgacgtgtaaatggccgttgggatattgaaatgcactattgatgtctaattggtgaatgttccaatcgtttgttgcagctaaagcaaggaagatttttaaggtattgaattttgcaactagtgcatatgtttgggagaagtcgatgccttgcttttggttgtaacctttggctacaagtcgggccttcacccgttctacttctcctttttggttatatttgattttgtacgcccatttgcagccagtggctttatggcctggggtaattttgttacagtccaagtgttatttctttctaaagctctagtttcattgtccatggcccgaagccaatgtttgaattgagaagctttagcataattttgtggttcaatttgggtgtaagcggcaagaacaacagctcggaactgaggatgaagtttgatatatgataaaaaaggctcaataggatgtgcagtgaaagtgacatgacatatataatcttgcaaatgtgctggtgtgttgatggtgtgaccaactcccgttgtagaagagatgttggttatatcagcagtaggttgttttgtgtcaaacttgggcacttgtgagcagggagctggtgtcaatggtttgtaagttggaaggattgcttgggagaaacatttatcaatctctaagggagaagtgattgaagaaaaagggaagatgttttcatagaagataacaccacgagaaatgtaaacttggttagtctcaatgtcaagaagggtatatgctttcatgctcgaggaataaccaataaaaattgaagcacgactcctaggagagaacttgtgtctttttgattctaatgtagaaccataggccaagcatccaaaggattgaagatgttcatagggggggggg

SEQ ID NO: 37844 - DNA, 3576 bp, Cannabis sativa
acaaataaatatgattttttaattttgtacttcataattatatattttgatatttatatacatatttttattttaaaaaataattttcattaaagtttatttatttgtatacttttaaaaaaatgttaatattataaatatactacatatattggtcagtctaataaagctcgtttaaagcacgatttgggcctgggcccagcacgagtttttcgtgcccatgggctgggctgggcttgacctatggaaatatgggccagcacggcacgacccataattctatacgggccaacacggtacgactcatatttttcgagcttttccaaaacgcgccgagctgggccgtgccaggacgaatttacaactctagttgcatctgtcatttattatgttgagaaatgaaattgctctctaacattttaatattaattcaagtaattgtcagagaatattttgtatatttgttcttgcctatgcattgtaaacttgtagatttgtaataattggaaactatatgatttttacatttctctgctttcaacatttcattactctctaaattcaaacttattagatttattttttatttacttattgaagatttcttattgcagcctgcataataaaaaggcacatattcttactcaacacatacacaacaagtcaacaacaacaccaatttctgctccaatgagaaaactcatttgcagctgacatcttaatttgttaactaaacactaaggtaacatttggttagaggtaatgaaatagtatgaaatggaaagaaaataattctcattccatttctttgtttgattgcatttaaaactattggaataccattccgatgtaatgacctttctatcattttggtagaatgactattccattttgaaatgaaagaaaagatcattccgatgcaagatttgaaaaaattaataatttttttaatcaatttttttatgtattttaaattttatttcatttcattcctattccaatttccattcccattctaatatttccattcctcccaaccaaaagccacctaattatttagtatctaatatgtccatgaaacaaactacaaaatcactgataccactaatacttaagatttgtctaatgacagtaaacaaaagtaatgatatgacatgagaatagaaacatatttgtgtagtttagattattaaattaagagaggttcacatcaaaatgcactcatacaaatgaagctttagtctcattttaaatataattctaaaaagcagaatatgcaaatctcaaatttactttaaaacagcagcttcgatatgaaataatgaaaccacacaactaagtctaaccatatgcataaagaaagcctatcaattcagaaccataagatttcagagacaatgtagaattagctagttgtgaatcatatacaacatatacacattcaagatttcaatggacaacatataaactttaaaaggccaacaaagcaaaacatgatggtagtatcaacactaattgacagtaaaaatgaaagaatgcatatacaaggaaattaacattaactgtcaataatgatatttaaatgatattaataaaaacccaaaatgggaagtaaaataaaatagcttttaactgagctctagaaaaccattttaaggttgaaatcaactacggaagttaacattttaagaaccactttttccttatcatccaactatggagtcacaattttagggacaatagcagcaccaaccttcacataacttctcaccgacaacaaaatcagccttcttcaagcttctccttccaatcaatctattgaaaccctgatacagagcagtaagaaagcaagaatcaatggcagaaaatgaatctaaagtcacacatacaaatcctttttctttttccaatgtttgtcattaagttaaatcattccatttgctgaggaaccaaacaccttttacataacacaagatttcaaaaataaaattatgatagcctagccaaagattgacttgagattaaaatggtacatgtgacgacaccaaagggataaagattttctctactcgagtttcaaaatgacatttcttagacgaaatggagtaatgagagggaggaaaaaaaggacaagggtcctgcaaattatttgggtaagggaaagagtacagtcagtgggttggggagataaggttttgggtggggacaagaagcataaacgccccatcttggttggccgtttggttcaacacttagaagtattcaatcttttaacaaaagaaaaaaaaaaactgaaaaataaggtataggtactaatattttctctcaatgttcagaatctgcaagcttcttgtacatatggtttttagtgagcatactaaagcaaacagaggttccaacctaaagagcaatttattggtccatacaagcaataaatactcaaggccagtgaaattagaggactgaatagtggaatcaaactaatggaagtgttattggctctatagaactagatcaaattcaacgaaaatattggcgtactaaatgcaatgaagtaaagcgaaatcagccttagattagaaccacttataactaagactcacaataaactaataacagggcaaaagattacctgatgtcacttttgagcaaaatctcactttatatacttaaatcagcaatttatgcttcttctacaccagacttcaactccggcgaagtaagttcggactctgcactctccgtagctggttgcttgtttctaataaaatatttactgcgttctattcgaattggtcttcccataaacacctaagggggggaaaaagacaagttagagaatctccaatttaaaatgacttcatgaaatttggatgcagaataggtccatgcttatagtcacaaataataagatgaaataaacaacatgaacaacgctggtacctttccttgaacagagattagagctgcctcagcttctttctttgatttgaaggatacatatccatataccaaggacttttgtatagtttcgcggaatataacttcagtagacactacgctatggccctcatcgttaaagaactctttgagatctttatctgtagcatcatatgacaaattcccaacaaacaaattgaatgtcacttctcgcctctttctgcaataggcaattttcaaaactcctccctccacttcctatatcatttgtatttcttttagcagagaacatgacacagaaaagagaaagcaaatgttacaagtcctctattaacttgctgataaaatgaaagaaaagtcatacaaagatggtaatatagagctattgatttcatcatagtaattaaagagtgtaagattttatatttgattcaagcaaatattcagctcaagtgttttgtgaaagaactcggtagagtactgggctggaattacatcttgtgaaaaagacacatacagaaaggtatgcaatgcacaaattaactttgtaagttatttagttcttgctacaattatacaatttaatcaaagaaagcaaaaacttacattagtaaagaagaacatggctaagtagat

SEQ ID NO: 37845 - DNA, 2750 bp, Cannabis sativa
ctaattgtgatatacacgacatcccttatggtcctcaagaattgggtgtagatatagatgatacttcctaatggttttaaagtaaaaaaaagaaaaagatggagtttactacatttactatgctatgggaagaacgagaaactaatagtatatatcaaagcaactttaatttaaggttattaacatttgtatttataattaaaatgaagaaatttgcgtaacaactgcaggaagtgtgtgatcaaatattggcaatagagaagactagctaggtaggtcaaaatttcttaagctcacagcacaaaaagttgagagactaatcacatgaatttcagatatagctatatatccaaacaagataagtcaaatgatcaacttttattcatgagtttctaacctagtatatgttatggtcaatatatatataataatagtccaatagaattaaatgctgtatgtacattttatccaacaccctactcacaactaattaatctattaattaattaataattttgtttatcaaatttacaactgtgtatatatatataaatgattgagtactagctatatatatatattcattagttttatcttttctgtcttatttcagtgatggagagagtgagatcgtttctacaatctcctacgtatggaaatgtgataactgttcttagcatcgacggtggtggaataagaggaattattccagcaactattcttgccttcttagaatctgaacttcaggtatatatttatgtatgtaaatatatataacagcacaataatttggaaaatttgttgtgactctgtatttaaatttatcacgagatatatcaccctaaaccctagaagacagttttacaaaaactgtcgtctcatgttaatattgtatatgtcatgatgacatgtataaataataataatacaaagaaattaattgatgaataattgtgggagcatgcagaaagtggaggaagatgaaaatgctaggctggcagattattttgatgtaattgctggaacaagcacaggtggacttattagtgctatgcttgctgctccaaaccatgatgatgatgatgatgataggccaatgttttctgctaaagaagtcattgacttctaccttcaacactctcctctaatcttccctcaaaatcataggtaaattaaatattacatttattaattaatataatatattcctatatataaagaatacaagaaaagtgctattattaacctagttcttaccatctctcaatcaatttttgtctctcaatatatatgccgaaatattttttttttcaaattttctttctacggcggtgttcgttatgcttacaaaattattattgtaaatttttaaaaaatttcgaatatttacagtaccaaaaatatattgaagtttctcgaacatgcatgcgtagtaaactaaaatatcaagaattctgtttacggtactttaaattattcgaatttttttaaaagtttatagagatgatactgtaattaactatatcgaatactgctataaaaaattgaattttttttattccgacatatatgatttcaaacgtagaaactgattaagagattgtaataaaatgttatatttaatcagggccggctatttacccatgcaatgagtgctaatgcacagggcccacaaattaaaaaggcacaatatgactttttaagattttttataacttaatctttcactaatttgttattctaaataaaaaaaaaaaagatttttccttaatttctttttttttatttaatgtcttttaatttttttcccataatatttgatattagcttgaagttgcattagaaataacaacaattttaataaaattgtttaagtttttgggtgcttaattatataaaatatatttttgtaatatatgataatatttaaaaatattatttacaagttataattttttttgataggggcctactttttaaaattagaacagagcctccaaaatatttgagacagccctgtatttaatattaatcaaaacacaaactatgtaggtatacgttcaaatcttttcttacctaacttcttctttttttaatatttttttaacatgcatgattatgaattgaggatatgaaatatctaataataattatatagtctttcttgttttttttttttggaacaaatctaataataataatagtcttatatgaatttgcatacatggtcactattttataaagtcgttcaccctgagcatcctgatcacctgattctcgtggcagatgcaagttggtcggcaggtctaactgcaaacatgctgaccaaaccccattcgccacatgaatcaaggtggtcgggatcctcagaatagcagattattatatatttataatattaattaacaaatgataattatctcaccaatgtactcattgattggtgtaaattaagctatagctttatctttcttagggcaactccaattataatagcatgctactttagtacttatttgaccctacaaattactttttatttaatttaaccaataaaaaaagtatgcatatatatatatatataacagagcattgttataagtatcagtagtgcttagtacatattaaacgaacttatcactttgtgattaattagtgttaagtatcattgatgttctttagcatttttttattagtttggcattagtaccaataaggcacattagttttttttgtcatttcttataacg

SEQ ID NO: 37846 - DNA, 2006 bp, Cannabis sativa
tcatcatgggaaggtcgatcaagaacagcacgagaaaagccgtgattagcagtaaacaaagagttatcattaagaggcgcatggccttgatgtccaagattagaaatattaccaccaagaaaagaggggttcgggacaggttggccgaaggtggtggcggggatagtggtggtgccgtaaaaaattgaagtggtttgtggagtcgtcgggatgaaggtttgagcggagcatggcggaagcagaatgtgatgatgagcagccgtgaaggaggacgtcggcgccgagctggaaccgatcggagcggttgaagattgtccgatcgttccacaaatggggagatcggcaacgtgaccggagtcgaacacacgagaagtgggaggatcggacataaaaagaggagctccgatcgtgtccgacaaggatggagcagtttcaggcggaagcgacgccggcggagcggcaacgtcggttgcagcaacattgacggaggataaatccggagtggatgtggcggcgggaggtggtgactgttcactcatggtgcggctatggagctatttcttgttcttggagccatgaagaagatggaggaaaggaaggagaaagaaaaatggaggctagggttttgttacatctgataccatgataaaatggaaaactctttattgctgaagcttttgttttacacggctgaagtgccaaaagaataaaatgataaatacaaaagatgtatttatagtaaaagaagggaactagccctagaggaaaatgggccgaaaataaggcccagtgggccattaaatctaataatgtaggaaaagataattgatgcacatcacattactactcctgaagtcatcaatttcccttatcaattcttcaccctcatccatcccttcagcatgttaagtaataagatattctattaacgctagaaatccaaaaaatatctttaaattaataattcttttacatatcgacattttatataaaataaatgtatattatgtaaaataaaaattattaattttctcaaaaaaaatattaaaataagatttttttttttttcaaataaaactacctataaataaattaattttttaattttataagagggttattacacaaaagtgaatcttagggttatttaactttgaagtaactaggacagtctacactcactagtcactactcgtacttcattttgcccaaaaactgagaagaaaaagtagaaaacctcaaaattgtagagaggagatcgttcttctactccgatcacctccggccattgaagatatcttggaaagattcggtagcagtgtggcttcggaccaagcttaaacttcttcaatcgtctgaacgaaggtgatagcattgcgttctttccgttactatttattattattttcttttgggtggagagttgattgcatttagggtttagggtattctattggcaattggatattctggaattcaggtcttaagtgtaattgaaaatcagatgaaatcattgatatttgaaggtgcatgcattttctcagcgcccaaatatagagagtaagctcttgagagaatgcttagtatctcgaatactcagttgtgacttttctgttttcattttgaataacagtccggactccactctctattctagtgtgattgctttgattttgggtgttggataaatcctaaacgggcctcatcacgaaaaattagtatttataacattagaaaaatgctaactacccaaagaattgatttgaatgggaaggcttaacacgctttcttctttgaagtagttgctattgttttcaaaagattcattttaggtacacttatgctaggaaaaggagtgattctaagactggtaaatagctgagttggctgttaattagtgggacactaattagggttagggagataattatgagttagtttggcaaaatcattcgcatgaagatgttgtttggcccttacttgaagttactaaactactatgcttc

SEQ ID NO: 37847 - DNA, 5010 bp, Cannabis sativa
aaatgctattaaatttgattgaatcgctaatctttatttgctgtggattgtagttgttgagattttgcattggtctcaattgtagtttcttccatttttgtgtttagtgcattcgtagctattagtctctgaactatttatgtttctcagtaaatgtaacttatttaagccctcaaattcataatttcatactactcagtactctcttttcaatctgatcagaatcataagtttgaaaagccatggcggagttcattctctctccaattgctgacaaaatcattggtggtttgggatctgaagctgtgaaacagatatctcttgtttggggtgtgaatgatgagcttgaacaactcactgaaaccatttcaacaatccaagctgtgcttttggatgctgagaagaagcagagtcacaacaaccaagtcaagaattggctccaaaggctgaacactgtagttctcaaagcagatgacttgatggacgaggtcaacactcaagctttgcgacaccaactcataatgtctcaaaacccattggcaaaccaggtactattttcattcaatctcataagacatttttatattctagattgtattcaatgatcatgtaattaatattttggttattatttattgtgctctgtaatttatttccgaaaacaaaaaattatgccactctacaggtgtgcactttcttttctggctccaaccaacttgcttttcggttcaagatgagtagtagaatagaaggcatcaagaaaaaactagtggccatttccaatgataaaaacttccttttggagaaaggacttggagagactctgagttctatgagagtgagagaaacttactctcatgtacgtcatgaagatgttattgggagggatgaagatagagcggttattataaataagcttttgttcgagagttgtgaagagagtgttccgatgatagccattgtaggtattggtgggttaggaaaaaccactcttgctaaaagtgtttttaatgatgagcaagtccaaaagcattttgagttaaagatttgggtgtgtgtatgtgataattttgacttgaaatcaattattagaagtatcattgagtctgccaaaggtggtagcagttttggagaccttggaatggagctgttgctaaagaagtttcgagaagtacttggtgggaagcaatattttcttgtactagatgatatatgggaggaaaatcgtaataagttgttggagttaaaaaatttaataaaaagtgatggacatgttgggagtcgagttttagtaactactcgtagtgaaaacattgctaaatttttaactaccaaacaacaaccctatcgactaggggttcttgatgaagttcagtcttggtctttgtttaaaagggtggcttttgaagatggatcacaagaactggatagctctagcattgtgcagattggaaaggagattgtgaataggtgtaaaggaattcctttggccataaaaacaataggaaatttgttatatggtaaacgtttagaattgcagtggtcttccttcaacatggaattttcaaaaataactgagcaaaatgaagatgatattttacccacccttagattgagctatgaccatcttgcctctcatttgaaactttgctttgcctattgtagtttatttcctaaagactatcaaattgaggtgaaaactttagttaacctttggatggcacaaggatttcttaagttgtcgcttccaagtcgaaataaatgtttagaggatgcaggttatgaatggtttttgaatttattggaaggatcattctttcaagatgttgtggtagatgaatgtggcattattacaacatgcaaaatgcatgatttgatgcatgatcttgcagttcaagtagcaggagaggaatgtatcacttttgttatttcaaatggtcaaggaaatatcaaggaagctactcatcatgtgtcctttgcaagtgatacttactcaggaagggaaatttcagcttcgttggcgtatgccaaaaatgttcgaactcttttgaaatttttcttttcaaaggaccaggcattttgtgatgcaataatatcaaattgtaaatttctacgttgtttggatttgaaacgttcaagtatgaagttagtgtcaaattctattggcaagttgatacacttgagatatttagacctctcacgtaattcttatctcaagtcacttcccaattcaattacgaatttggtgaatttgcaaacatttaagctcaattattgctcaaatctccgaaaactaccaggagatattgagaaactcataaaccttaggcatcttgaagtttcttattgtcatgatttgaattctttgccaagtggacttggtaagttgaaacaattgagatacttggatctttctagtaatagtggtttattgtccctaccagattcaactaatgatttgttgaatttgcagacactgatattgaatcgttgctcaaaacttcaagagttgcctagatatattgagaaactcatcaacctcaaacatcttgaaatttatgattgtgatagattggagtatatgccatgtgggctaggccagctaactaatcttcagagattatcaaagtatgtgttgatgaaaagcgaaaattctatcccaagacatggtggtgaactaaaggaattgatgagattgaacaacttgagaggcagattggaagttataaatttgagttgtaagaaagacgtagcaacaaagtatgagagagcgaaattgaaggataaacaatatcttcgatcattgatattggtgtgggattctaatgttgaaattgatgaaactgaggctattgtgggttatgaaatgtcaatagaaggtcttcagccgcaccaaaatattctagaactaatgctagtaaactatgggggtgttaagctctccaactggctctcgtcgcatacaaacctagagaagctaactttgaaagattgtgaaaattgtcggtatctcgttccattggagcaattacaatgtttgaagcatttgaaacttgagaacttgttatctttagagtacatatccaacattaatatgagtgaaggcttgcttggttcaacaacaacattattgcaatctttgcagacacttgagttgatacgtttgcctaatctaaagggatggtggagagagattgtaaatagtggtaaagaagttgatcattcttcttttgcttcaaatgcaaatgaagtcaaacacacctcctttccttatctcccttcactttcttcattgtatatagaatgttgtcctaagctgtcttgtatgccactttacccacatttggaaggagaattgcatctgggcaacactagctcaaagccattagaagatacattaagaatgctaatgttgagaagtaatgttggatctttattcccaacaaggtcttctctctcacctctctccatgttggaaaggctagatctgataaacattgatgatctagaatgtcttccagactgcttcaagagccttacttctctcaatcacttggatattattcgttgctttaaattgaaggatttgtgtccaggcattctacatctctcatcacttcgacatctacagattacaaattgcgaggtgttaggagacatgcttaatagcgatgattacgactttatgtggcaagcctttaatgaaagactccaatcattagaactatgggagttgccaagtatagtagttgttcttcctaagggtatccaacatcttacaagcctgcaacaacttcatatcaaatattgtgatagtttgacaacaattccagagtggattcacaacctcaaatcacttaagagatttacgttagactcctgtcctcatttgacatcattccctgaaggaattcgaagtctcacctctttgaacaagttatatattcatgactgtcccattttattgaaaagatgcaaaaggattacaggtgaagattgggataagatttctcatatacaacatgtgttgttacatccagatcctaaccatgaagaaaatgaggtacattattaatgccaattattgctttttatttacctaattaagttataaaaaatacttatgattttgtttgaaattgtagaatccattagaaccccaaacaaatggatgcaatctcttcaacaagtcttggctctgcaatactattaaaagaaatcatggatagatatgtggaggtaattatttttcaaatttccttctctctatatactttttgacatggtttaatttactaatctcaatcgaaaataagaacacttaacagctatgtataattggcgcatttagaaaaaaaaaatatttttcatgtatgtttttgttcaaaattttgagatgatttgattggtaaaacttcttaatgttccacttaggccgattgactgtactgctacctctaatgtgaatgtgcacggtctagaaattggaaaatattgagagcccttccatgatgatttataactttctgaatggttttactaaattagaagaggaaacaaaaaatataaggataattttaaaagattattttggtgttcaatcacttacttgaagatttcttttctgttgggttttttacttggatggaatatggccaagtgaccatcttaatttggtgtgtttggcaatgtttgaatggttgaattagcaaaatgtaatatttaaaatttaaggtaataatgagcttaactaacacaaactaattatttttcagggtactttggagaggatgatccaaagaaaaacatgaaaagctataactctattgttttttagctcagaagtctcactctagtatcatgtactgattcaaatatgattcttatttaaaggtaaagatagttttttatattgtcattggattagaggactctgtatcagaaaggagtaccttgagatgcaagatgaacttacttataatggtgatacttgctattcttctgcagtgc

SEQ ID NO: 37848 - DNA, 2848 bp, Cannabis sativa
tatactttaaaactttttataacatggatctccggaacacactttttatgtcgttataatgtccattttatgttttttattttagtcaagtttttaatattattgcggtttttaataattaattaatctactagtattaaactagtttataacgcacgtggcgtccctatatattagggcgttacagtttgctatatggatagtcgattaattatcacaatagataaatgatggttgttcttgtggaatttgaaagtcttgaaggaaatattgcaaccatgtgatttcactggcacataaaagctgtaataacagaaataaaagctttgtgagattcagacaatttgtcataagatagaaacttgtgaaggctgtgaggtgtagaaattttgtcttgaagcatagagtgacattcatattcatgcaagtaggcagtttgtcttgtgatttcgctggtgcgtctaggagcagggggtggttcttcctgttgagtggaagagttgttgttttctgcagcttgtgcctaaactggtgtaccaccatgtacatctgtgtcttgagtcaaggaattcacctaagaagaattgttagtgtaggaagtactagggacagaagtaggaaaatcatctactgttgtttcaaagatatcagtggaaggaaaaactctgttagaaaaagggtcaacaaaatcatttgtggtgttaagtctatgaaatggatatatattttcatgaaaatctacatttatagaaataagaaattctttggtgttgatgtcgtacaacacatatcattttatgccttgtggatatcccatgaaaatacaagttatagcccttggtgtgaatttattcatgtgagcaataagagtgcaagcaaaaataatacaaccaaaatttctcatatgatcatatttaggcacttcactaaatagcagcttataaggacttttatttgtaagattaggtgtgggggtacgatttataagtatgctacagtcatcacacaatcagtctataaatggataggaagtttggcctaaaaataaagtgctcttgcaacatttaaaaggtgttagtgttttcgttcagttacaggattttgttatggagtttgaacacaaatgaactcatgcattatttcaaatttggcaaaaagatctttaaaagttaacttaggtgcattattggacctaaaacatttgaaaatgcatttaaattgtgtttgaatatatgacagaaattggggtatgatttgcatagcatcaaattttcgcttcattaaaaaaatccgtgaatctagttttatcatcaactaaagtgagaaagtatttgtaatttaagtgagaatgaatatgataaggaccccaagtatcacaatgaattaaattgaattttgctttaggacatatataacaaggagattgtttatgaacatcatcaatgttacaataaagtttattgcaaagtgaagttaaataaaagagaatatggataatacaaacaaatataacaatatatattattaattaattaaaaaataaaaatataaatacaaatgataagatgtaaaaccagtaattaaaagaaaagtcgaggcacgtgaaacacgctttctttaaagcagatttgccccctctacttgaacagtactagaggatcaacgagcaaccacttcctaggatacaacgactaacaagcagatgaatatactactttcactactccaacgaactcatattaaaatcttcactttattaccttaaaacttacgaaaaagacaaagaagaagaagacaagagagcttttagtgagtgattctttttgttggtgtgtttagaatgaaaggcgaaacctccttttataggcttcatatggggtggaaaactaagtgtgaacactagggaattaatgccgaaaattccaaaaagttagtgatatgatcaatcacaatcttcactataatttctgatatcaataagaatattgaccattattttggtgattacatccttgactaaatctgcatttattagcaattatcaatgaaccatatttaaggcatcaatttctcattcacacattagtctaagataattattcattatatattaaatataatttttccaacaaagtgctcattgaaaggttgtgctttaaaattgggaatgggttccatgttatggctattttggataaatagattctagggcaaactaacttcaaacctttaactttttcaggtcgagctacactgcgtgtggcacatctcattacaaaccaaaaagagtggaatcttcttcttcttaatgcattttttcagtttatagatgtggaaaaattgttgccatcccactaagtttctttctatctcaggattgattaatgtgccattatacaacaagtatttacacattcaaattgggatactatttggctgaaaatattgaaggtatcaatgagtcttccctttttgataatcatagaagctagtggaaagccctttggtggtttaaacttgccactaaagattaaaatatttgcatggagggtaatggaaaatgctctacgagtagcagctgctctgttcagaaggaaagtgattgattctgtgttcaaatgctttagaatcaattgctcatgtcttatttagttgccaaagagcaaaatcagtatggaagcaaacaaagtttaccattgattatcaacaagcacacaaattgtttagtggagactacttgatccatttatcttccttgctttttcaaagctaattttgaatctataatatgcattatgtgagccatctggaaagaaagaaatagagtccttcataggggagttcgaaa

SEQ ID NO: 37849 - DNA, 4203 bp, Cannabis sativa
tggtggaaagtggctatgctttgtagggcaatatagctagggagctcgtaaattcattgatttggaagcaaaaataataatcacctcagtaaattatcatgatagcaataattactcttgaacaatgggtaagtgctcaagatcaacatgttatctccatgatctcgtttgtaccaaagatggtcttgagaagtggatgctagacaccttcaaagtaaatgttgatgttgcattattttccaattgattgaggctcagataggatgtaggcatggggttgttagcctgaaagttgcgaaagtcattaggcttaaagaagggttaagctggattcagtatcaataagaatagttgtcgagatggactagtttttcgtagtgcaagcacttcggtatcgattatctacatgggaggagagttgcatgtcttcttttttcggtgtgttggttgaggattataagatgttgttacaaactctacctcatatgttttattttttgttcaacggtctgctaataatgttgctcataatttagtaataatatcagtatatttcgaggaaatgatgttcctcttcatgttcacaatattttgttatttgacttcgagttagtaaaatttatcctattaaaaaaatacaacttttggtacttttacaaaaacaaaaaaatatttaagtgtaaataaattagaagttttgatacgtgaaaatggataaaattgaacgacaagtcgttctttacttgaaaacgacgactcgttttgtatttaaagtttctattttatcaacaaaacgacgtgtcgtttatagggctcagttaacagaaattggaagttgataaaagaaagaaggccaaaaccctagcgagagaactctgcatctgaaaaacccccgagaatcagcaagagagaagatgacgcagaaaagtgggttattcaaaggccaaaagaagaggaaaaccgttcctctaaaccgccatggaaaggcacccacaactcgtaaaggtattattgatgttttgctttctcctcctttgtgcaattaaattgagccataatcctaattttgagtctctggtgttctttttcatgttgatgattttcagggaagagatatgtgaagccttcaaatttcacgagcgcaatggatactgatcgggtatgtcagtattgttaaattttgaattagagaattgagttgaaagttgaaacccttaggacccattaatcttaccttgcttttggagtagttattaaatttggcttagtgggcaagtcttatttagtttggattagctagaaaagctatggttttcctaaaattggagtcatattaagcaggtaaaccttaaagttgagggctttatgtcttgtgttttgatattcagttttgaatttgggggaataaagctgtgttttcaaaaaatttgatgtagttggaggctactacttttctatagctgtactatagatttgttttttagtttttggtttttacaacaattgggaatttcccatcttttctgtataaatcctttttttgtatcttgctttggaatattatctaaatttggcttctttgggcaagtctagtgtagtttatggtaggaggaaaactatggttacactgagatggaagtcatgtgagtaggtaaaagtttgtgtttttatcttaaagttgggactttttaggcatgtggaatttgtattttggttcttctcaagtttttgtgtggaaacaaagtcttacccaatcttcatggttcggttagtttgacaatcttacactcctttgagcaaaaaattgttttgaaaaccttggtgtgttcggccaccattctcaggcttaaaatggttagtcattatgctcagttctcaacatagagaattcgatgatctttgatttcccaagtggctggaatggaatgttgattgaaaattgaaatattagctttgatatttgtttaaactatactaagcattattgtttgtgtcatacttcttccttacaaaccatgaaaatcagataataagatcactttctcataactttgatttgatgaattcaggagttgacaaagttcataaacaagtgcaatgaagtgaaggctgccaccgccgcaaacaaggaaggcggtcaattatgcattgtcaaaacaccagctgggaatgaagctgaggccaagaaatagagttagggataatcaccatatattcaacatatggagagttaaaagagaaatctgaacaaaagttgttaaatttacttctcattcaagaaaagctaacacttattttgcttatcatcttgttctctttgattgtaccatgtattcctatgcagttttgataattgagtatgtgataaaattctttaatagttcgtttatgaaactcttaaatactcatttttgaagtttttattttttctgttctttttctacaagagaattttgtaatcaagaaaactttaaattgaactttttgatgaagaagtacaaaaacaaaagctaaaaaacataaaaaggagtgagaagagggacaagataatattgggcatggcccatgacattgatgtgtgaatgaaagctgagttggatctaagtcattaatcaacggaccaggcccacattcatgttgacaggttctaccatgtgttgtagtcttgttagtagatgataaatgctaaatagtaccttttactttttttttgctaattaaaattttctagtccaagatatgtggtacttcttgaaatttttaagttatttgaaactattgacattataaattcaaggacatatgcttgacatggataaaaacttaaagagtacgatttgatacatgtcaaaatttggaacacaatttagtacatgtaaaagttcgaaacataattcagtatatattaaagttcagatagataatttggtacatatatagggaataatttagtgtatagatgatcgctatattagtaaaattgaatgaaactggataaaaaattttgaatctaacattctcaacaattcaaggggcatttaacttaccttataatagtattagacaccactagtgcataataacaatcccgaacaataaattaaattaggcaggcttatattaggcacgtgatgttgcaataaatcattattttatgtacactattttgattaatcaattaataccttagttacatattctatccacaatcttttttaattgatttattcttgtcaaatatatattttgttaaattaatataatgtactcagtaaatattaaaagaaaaatacaaatctagatttgaacacacctctaaattattgaatatgtaatctttgattcaagtgagatatttatttatgttaaattatttattatattttgagttagaaattataattaaaaaaattaagatttaattttttactcttatctagattttgaatgcgcagatgctttgatttgtttaataataaattttacaaatgttgaaactataaatttataaaataaataaaactatttgttaagggatccttttatactaatttaaatgtgaaaataaatgtcaaaaatttatagaaggtgttcattaaaatagaaatatgaaaagataagtacacttacttatttattatgttctctcttttttttttttttttttttttccttaagagcattaatagattcaaaaccaatgcgagcattgtccgtgataagatgctaagggagaaagacaattttctcttcagaaataatatgacccaaaacatcacgcatgtggttagtcatagccttgataataatcttgtaaaacacattacaaagactaataagacaaaaatccacaacagtaattgggttatcaatcttcggaatcaaacaaataagagtttttacattacttgtattagttatacgattttatttttaaatgaactacattaggtgggtgagtatataatttatttaaataataaaaaaaaattattaatctaatataagatatatattataatcaaattaattattaaaattagattcagaattaatagatacaaaaatgtcccttttctttttcattttatttgataatattgcatgatttgaaagtcttgtcgtatgacatgttggtaaaagttctctcaagtttttaaggtttttcttttgtctcttgattctcatggcgtctagtagtca

SEQ ID NO: 37850 - DNA, 2772 bp, Cannabis sativa
  modified_base (1255)..(1272): a, c, t, g, unknown or other
acacattaaataataaaatatttttgtcaattaaatatgccaaaaatagaattaacaatttcaaaatcttctttttaatatgaaaatatcaaacaaaataaaagaagaacaatttcattttataaaaattgtacaatccaacttttatgatattttttttccacttaataaaacagtgttacattatctcatgtttccacttaattccatgtgtagaatattccaatctttctcaattttcttttatatacctatttatttatttatttattttcataatgggcaaagataatactaaaaatattttacaactatacaaagtattaatacagataaaaatttatacaaaaaattaacatcatactattactacagatattacatttatttgtaaggctgagtgatgtacttacatttaattaagtcatttaataataaaaggtatccaaacataaataaataatctaaataacaagtaaaactagagattgttaaataataaatactatatgtgtttttgagaagactatgctttgacaaaagtagataaatttcaatgaaaaggttcttcacttttttttttttttttgtttgtatatatgctttttaggtctagtcataaatacatagatgaactatatgttccccaatttattatagattaggagagaaataattgaaattctttgaaacaattcccccttttattttccttataatattatgtataggccgaatattgtactatatattcctattatttttttttttttttgtaaagtctatatattcctatttagtatatgtataaatatactaaacaaatatgttacgttcacctatatatgtatgtttagtttttttttaagttatgtattttgattttggaaagttgaaataaaaatattatatataatttaattaaataaataatattattttaatataataatatttattttaaaactctataaaaagaaatacaatagtatatgtttttagaaaaataaatataaatactcaaaaattttagaataatttatctaaaaaatagaatatttaatgatgatattttgaataataataatatattaatttttataatagaattcatgatgtgattgtaataagacaactaaaaaattgtgatgaaaatgaggtaagatttgtctaaaaaaaacaaagttgtgatcaaaacaaaaataaaactaaggatgataaataaaagatgaggtttttttttttatttttatannnnnnnnnnnnnnnnnntttatttttttttacagaattctacataaaaactcttattgcaactaacggagcaacctaattcgcaaataaaaattgtataacaacccacatagaaactaccgaagaaactactttagaaactcaaaccgtaaatttgaagaaaagttaaaaaaatagtatataggataatttcttataaaaaattattaaaatttgaatacaattaaccaaaaattatacatgacaacctataatatattataactaaaaatatatacacataaaattggaaaaaaaactaaaacttatattcaattaagtttattgaaaaattataaaaaccaacttaaatcaagaacagtcgtacttatagtaatatttatatatatattgctaaaattaattaagaatattcttttaagtaattatatatgtcttaaaattaacacaaaaataaaaataaaaaaatgttaaattaagaattttattgtaaacccatattttatttagaatagatatcactgaattataaacaaaatctttggacaattttaatttttccaccttaatattcttatttatgtattatctttgttttgatatatttctaagtttttttaaacttcataaattttaggcaaaatgttaggtataatatctaatgctgcttattaacctaaatatctaatctgaattggttccttttatgccaaaactctaaaattgaacatttgcctttgtagaacaagggaggattatcaaactggcatcttacataatgagtatgccatgaaaattgaaaagtaagaatgtaaaggtttatgctaaatgagttaggacacttggtcttgtgcgcttgagtacttttttttctcctaaatgagtcttcatgcttctttacaagactgatttattcgtgaaattaactcttcttcaaattctctaaataattacaagtatagtcatattttgatgaatatacttagctctgttcaacatgttttggactcttgatccttcttcattctttctccagtagagaattatttatcgagagttttggaaaataatttaaagagagattataagttaaagaaatgattggagtaaattaacacaagatcttttacgtgatcttttacgtgttgaaacattaatgaggtttaattcacgagtcactatatttaagttgatcgataacaatatatgctgtttgagtacactggacccccttaaatgtgaagatggagccttatttataggctgtcatgcattatgggtcgagttgacccgaacccgggaggttttacttaatgggacgattacattgttacttgcaagtgggttttgggcttgcttagggggcatgatttagttaaaaaaaattctaacatggataaaagttcgtggggcatgatttaatacatgtcaaagtttgaggggcatgctttggtagatatcaaagtctggggagcatgatttagtgcataaacaatcaccaaaatagtaaaattgaat

SEQ ID NO: 37851 - DNA, 2149 bp, Cannabis sativa
catttacgaactacctttcaccatcatgaacactgcatacactgccccaaacaatactaacatgtttatacaatggagtgaccttaacatcaccacagaatattacttcttcatgcactttgcggaactgaaaatgctccaaccaaatgaaacgagagagtttaaaatatacattaacgacgctctttttatggaagaattggttcccaagtacttgagcgaaactaccggatatcctcttacaggcaagacacctaacagtgaaggagtggttaaattatggttcaatagaactaaagattcaactctaccgccgctcataaatgccgtagaggtttacatgttaatgcctctctctcacaaagaaacagatcaaacagatggtacatatataatttctctctctctgtatatatatataattaatcttagacataatgattttttctcctcctctcttacttttatatgtagttttttaatttatatgtaatatcaattccagcggaagctattttgaatatcaaatcagcatatgaagtgaagaaaaactggcaaggagatccttgtacccctgaaaagttcatgtgggatggtgtcaaatgcaatatcaatgatcagcctagaattattaatttgtaagtttatatgatagcgtttggtaattgaataaatactaggagtatacagtgtggttgaaatttaccaaaaaaaagatcttttgtttaattaatcttccaataatctatcaagacatgctagagctaacactttccttgaacatacaataatcaggaatttatcgtcaagtggactgaaaggagaaatagtttcttctattgccgatctgaaattgctacaacatttgtaatggctacttcatctcaatcaccactcttctttatcaaattctaataaatataattagaatcaaatcagaaaatatattccgctatatatataattactgctaacatatcatatgtattttgatgtagagatttgtcatataataacctgacagggactgtgcctgagttcttaggggaactttcatccctgatagttttgtaagtttcgtgttcccaaccagatcaaattttctaataactatttaaatttttattgaataaagtcattaaaattaaagtcctaattctcatattttatacaaaaacacagaaatctgaagggaaacaacctcacaggtccactgcctgctgtactctctcaaagatcgaagagtggtctattactattaaggtgagcagctagctttgaatatttataaagtaatgaatatatgcctttccctctatcttttgtaagtgagtattgggggcacttagagtatctgacatttttattatgacatttacgtgttataattagttaacgatttttaataaattttatgaaattaaaataattgaaacccaatattaaattatactaataatatttctctttcaaaataccaaaacaaaatagggaatagatatatatgatgtttgactttagttagggtataaccaaaagaattttaaccattgaaattgactgtaaatatgtttttgtcaatatatagcattgatgacattaacacgaacgctacaacttcattgaagccaaacagaaagaataaaaagtttgttatcccagtggttgcttcattcggtggattaattttcatcttattaattgtggcggctgtaatctggacccttaaaagaagatcaaggcaacccttggggacacccactaacaattttgcaggttatattattttaattacaataattttaatttcttattcccttattagcatttgcattataaatactaccccgcttacgtacacgtgcatattcttatattcttattattggttttttaataaaatgcgaggagatatataaataaaatacagttaaacctcctgatttttacgcaaaaagttttctgtgatagaagtatcaaccagtaacattatttagcattcttattaggcatggatcattaccaattaaaaatacataattaaatgatttgtgaaccaggcggctaactagttagctcgttcttctggttcatgtcctgatcgtatttccagtagggggtctgtccctgctggtttggaagctatttt

SEQ ID NO: 37852 - DNA, 1816 bp, Cannabis sativa
ttcattttcatgcccttttgccaattacagtgatgtggagactggtttagagtctatgattgtaaactccattagttttggagatgaacaagcaaaaacacctcttagatctgttagtttcaatagtactgatttggaaccaacaattttgaaatctataggctctggaaaaaagatgacattagaaacatctgttagctttaagggtagtgatttagacaaaattattttagtaaaggttccttctttagataagaaagaacaaaatatggccattgtatcatcaaccatttcaaataggaaacaattagattctcagtactctaaacctttgattcctgatcctgctagtaccaaacacatggctgctcttaagcttcaaaaggtctacaaaagcttccgaactagacgaaagttagctgattgtgctgttcttgtagagcagagttggtatgtaactaatcttttatgttcaattctagtctttgttgtgttgtgttgttctgtcatgttctgatatacaattttttgcatcaattttaggtggaagctcttagattttgctgaactcaagaggagttcgatatcttttttcgatattgagaagcatgaaaccgcgatttctcgttggtctagagcaaggactagagctgcaaaggtagattttttagcaaatttgcagtatgtgctttctattggttttgttatttgttatgtaaagattaaatctttatgtactttttcaggttgggaaaggcttatcaaagaatgataaagctcaaaaacttgctctacaacactggctcgaggcagtaagttgatttcgattttgattaagattacaaactctgtctaatttgtaaccatcaattactgatattagcatcttttgtaatattttaacagattgacccaagacatagatatggacacaatcttcacttttactatgataaatggcttcattgtcagagtagagaacctttcttctactggtaataatctcaaaaccaattgagttattttctttgcttaattcaataaccaagaattgaaacttacaaaaacaaccatgtctggtttgtttaaatgcaggcttgatataggagaaggaagagaagtaaaccttgagaaatgttctcggtctaaacttcagcagcagtgtatcaagtaccttggtccggtgagtctcaaactcggtttatggtttatgactattcatttttggtaaagattgtaccttttatgctgattggttcttttctgaatgtagatggaaagaatggcttatgaagttgttctagaggatggaaagttttactacaagcaatcgggggaacagcttcacacgagcttagaaggcaaagacgcgaaatggatcttcgtgctaagtacttctaaggttttgtatgttgggaagaagaagaagggtacattccaacactctagctttcttgctggaggggctacaaccgctgcagggagattagttgtcgaaaatggcatcctaaaggtattgtcaagacataaaaagcttaaatcttttccctttttgtttgtgttttactggtgggatttggtgttaacaaagattgttcttttgtgattcttaacaggcggtttggccacacagcggtcattacaggccgacagaacaaaacttcaatgattttgttgcgttccttaaggaaaacgatgttgaattgaaagatgttcagatgagtccagttgatgaggaagatgatgctcttagcaagcaaagaagcagtcttcatatgcgaagcaactcatccgatgaggacttgtctccaactct

SEQ ID NO: 37853 - DNA, 1969 bp, Cannabis sativa
tccaacaatctcaatggttcaggaaacatttttaacaacaacaaatttgtcatttaagaattatttttgctatttttgaagatcgaggactaatccactttttaggaacatgatcaatgactgccatagtatatttccttttccattgcaaattagctttcatgggtaataaacttgcataatctgaaatggacggtaatattatcccataaactgcatacatttgggatcaattttacggttcagtagaattggtgtcacagtcattgacccaacccaaaaaactttggcaattcaaatgtatattataacgaaaaacaaactcttttcttctcctactcaaaacaaaagagccgaacttgatcactttgaacagtttgttgtttcagcaaaagttcaaaagagaaaaggttaaacgtttttaataacaacaaaaaaaaaaaattggagaaagtgaacagttcaaatctgagacacttaaaaagagtaccattttcagctatatctgcctagcagcagcatcagcgacgataggcaagtaaggggtccgacccaaaacacaagaagccaaactataaacgaagcaaagaacactgaacacgaacaacgcagtgtaaacccaaaccataatcctgaaccctaacccgctccgacccgggctcagaatccgctggagcagcaagggcagcaccaggaggacgtcaagagtcacggcctgcatcgaattgaacctgacgtaatgggtgaagctagggtttctgacgacgccgaggtagagagcgaagaaggccacgaagcttgcgtaagggatggacctgtaaagaccgatgattggaaggagagggtcgaagaggtaacccaatttagggtactgcatgaagaggtggcgaccgtactgcagggaattgaagaaagggagagtgtaagccaccgctgagaccaatcgatcggtggctggggtgacggtgcctttgttgtacgacatgcgggtgacggtggtggatttgaatttgggccatttgtgttgttgagatttgaggttggggagatttggtgtggtcagtgggtgaggtaggaaagggaagcgagttctgaggttagggatggtgagagactgagagaaatggactaaaggaatggaggccatttttgcttttgaggtacaaaagaggtcaatcttatgaaaactaactaggtaaatcaaattttggtgttggattttgttgtcgtttttttggccgaaatgaagtatatggattattgtttttttcaaaaaaaaagtatgtggattttgttgtcgtttttaaacaaaataaattgtatattttttttttgatccaaaataaattgtatatttttaatctcctttttttttttaaaaaaaaaaaaaaattatttgaatcacgatagaaaccttgaaaaggttttttattttaataaaagtgtgcatatataaaaatcaatagatttcatagtcattagagaaaaaatttgtcagaataaaagaaagtaagatacaactaaactgttgaaggataaacgttgattttgccacaaactataaaattaaattttttattaatactaaaaatacaactaacaaacaaaggatagagtctattgcgaaaagagacatagttctcaagcgctcaatgagtctccttcccattaagcgcattgataactaccctggagtccctctccaccataataaacttgcatccaatatctgtagctacatccaatgcctagcagcatgcaaccacttccccacacaaagcatcagaaaactctaaaaaggttgtctggactcgcagtaccataccaagatggtttcttactactactgccatacacatgcttttcaaccccactttaacatcacagttcaatttgagccactcctgagaagggggttgccagacatccaaagacctcggagcaggagaaaggaaaaaagaagcatgat

SEQ ID NO: 37854 - DNA, 1634 bp, Cannabis sativa
ttgaactttgatatgaagtatctgattctggtatacctatgaattttgatctatcccatggtccgcttctccagcgaggctttgatccattgacccaaatgaaaagttgtggtggtgattgtttagagattccaacagtgaaactcccaggtgacggatcattgtcacttttccaggaagtcaacatataattctttccggtcatcacattaaatccgagtaccgaaccgggtaagtatgtatctgcaggatgattaaaactttgccataggttctctcctgatacaccatcactgagaaccaagttaccactgtctaaaagtactagaatcgaactacttgatcgaacatgaacatcggttgaccagataacagagttgtttttgctgttgtttgcatcaacaagctctagatttccatttctgccaatcatgagacttatggtagctgcatctgcaagcctaacaggattttctctgttagccacccatacaagacttgtggtacgaggagaaattcccttgtaccaaattcccacatattgatttgctgaattattaggactaaagaagcctaactcaaaaacttggctgggtgagactagagtttgtccttgagataatgattgggatgaagttatgttgtaaatttcatagcaatatcgagcttgaaacatgtagaatactagaagtaaacagaggctgcaatctctattatattttgaactcattggtttcaagagagtaacaaacctttatttagtgtttacgctctgtagcctttttactcattatctataccacacaaggcccaaagctattcaacataattttggaacatcgccagaaaaaacatagtatgagtctatgagatgaagctatgcttttatatttattcaggggcccatgctcatctagtgttattttttctatatggctaattaacttttctgctctatgaaatttaacatgtatgaaattattttgtgtaaattttgaaggttgttaaaatttttattgaattattattgaatttaagaattttttttctaattttaataaggaaatgatgaaagtttaggggattaatttggcaatgtcaaagtttagagacatgatttggtagatattaaaatctaggtagcatgatttagtacacgaacagaattagtgaaattaaataaaattagacaatttttaaatccaacaatctcaatagtttatgaataatttttagagtttaaaaaattggtgcatgttaaatttttagggaataaagtcataattaacttttctactttgtaatattttagaagtaagaagtttctatcttaattagcctttctttgaatgcaataaaatttgtcattctattctgactaaccattttttttatatatctttccaataagaaaactatgaaacctcgtctttcacctaatgtgatgaacgtaaagcacaaatgaaatttcgaagaaaagtacttacataatgtttatgtttaatatattttcaaactactgaagtgacgttctaacataaatgaaaacgttgaattttcatcactttggattagtctaaatacttttcaaatcatgaatacaaaatgactaaagggtgactattcaatggtta

SEQ ID NO: 37855 - DNA, 3453 bp, Cannabis sativa
tgtgaccattgtcgatcaaatgatcgtcagttttcttatgctatattttctggtattcatgttaactaggtgtttacagtttgatggttgagattatgccatttacaccattactattatgtgaaattaatttactattaaaagcaatagacttctagtacggtaaacattagaaagaaagaaaatacaacttaaagatgctttaaattttaccataaaaatgcataatctgtattggaaactcatctgtattagatgttcattttgatgactgtagtgatgatagatatcaatgatgtctgcctcaattatggctacagaattagtattggatactaacagcatgtttggtccaactccttcctctgttttataaaattaaatgaaaaacagtgttctgttcttctctatacttgctttattaatgtttagcaatagttggtatggcgtgatctaagcaactaaaactacgtaattatattatacaagtaatatagccaagttaattgcatgttactacaaagggagctttcacatgacttcttccaccaaatttaacaaaatccatacagagaataaaaacagaaacaacattttcaaggttgttttactctctcatatgaaccaactgatttgagcgttatctcataacatgactcgccaacatcctaatgggttcgtcttgtttgatggaaaagatagagttgttagagtaccgtaccatacaaagctccccccataagattgcctctttcgtatttggacaacggtccaaaagcatgtgacttgtcacatttaagcaactatgacaagtgtccaagggcagggctcccctgcatagcccgattgcatttaccttttcggagtctttaccagaggagatgttgtaaaatcccaagctattttgctttaaagatgaaagggagagtaaaagattgtaaaggtttttttggtaggtgttgtcaaaagagtaattacctatattggagcagttccaacaatattcggcgctggaggtacaacctttcagctgggcaaggttgggagtgaaggtgtgtatgaaagtgaggagaaagagcagtatagttgagcggctcatctttacttttgggcatgagacgaaggtgcaaggcttgaagatagttcaaatgtctggtgtgtatataatacacacttgaagagtcaacagtcaagaacaaagaaattgtttgtgtgaaattacctaatactttatgaagtggacccttctacagattaattttccacataaacagattagaatcattatttaaattaaagatttgtatggcccaaagatgaaggtcagtggttgtcctgttctcggctacttatcattcttttcgtgttaatgtgtgtgttggtgtttatcttttcatgactttacatagaacacacaatagtatttgttaattttcttcatcacattatctgtatttcatgagctattttatcattcacattttactcctttcttatcaatcatagcctaaattacaacttaaacactacgtccttttcttttgaaaaaatggtttcaacagatttatggttcttgtgagtttacaacatttttcgactccaatagaattcattagattgatagatcatagataacatccaaagtaatgtaaacacattaatgagaataatgtgtaatcctgtaagtcaaataaatatcttattctgattccaattcatcaatccaatttaaggtaactctgatttttagtgattctgattatatgaaagtaaacacaccataagtgttacatgaaataaataacgttcttaaactacttttataatagcttaaatttccaagatgataaccagcgaaatatagtttaaataaagcaggtaataaagattcagatttatataaaattatgcaaactagacacttgagatgcatttaaacgcaatacatgaccattctcactctcacaaattaggaccactaccaaaaaccaaagacagaacagggggcatattaacgtgacttcagacataaaccatattcatattcaaatatttgattgattttgttggctagcgaggggtgagttcagtcattgaggcctcatttttggatgcttgattagagtcactctttgaaccgtggccgtgtgattgagacgctgctgagttactattattggaggataacgacatctctggtccaaaattactatgcatgaaaaatgcaggtttagaaggggcgcggattgtaacagagtggctatttagcatgagaacaatcgaattcacggttggtctgtctgccacatcttcttgaacacacaatagtccaatttggatgcatctaagaatctcagatcttgaacccaacagaattttcgggtctataagatttgcagctgtcccctcgttccagtttctccatgcctgaaaatgttgttaactaattagctaaatgaagcatcataatttataaaatatttacttgacattaaaaaggggcagggttgagagaaaattgtgtacgtaggtagatgaataatatgtaaacttacgtaggttaaaaggtcctccatgtcctccccattttgaaaactgctattcttttctcctttgacaatctctaatagtaacactccaaagctatatacatcagacttgacagaaaattgcccacgaagtgcgtactctggagacatatatccgctgcaaaagggcatgttattcatttatatattatgtttctattatcttagctttcaattgcttacggtttaagctatatgatttggatattgctgaggtgacactaactatggaaaccaaatgatgtagcatgaattgtgagaagcacttactaggtacccacaatccgattagttttgtcttgggtttgatcgaacacaaataaccttgccattccaaaatctgctatctttggggtcatttcctcatccaacaatatattactagctttgaggtcacgatgaataattcttagacgagagtcctcgtgaaggtaaagtagaccccgaacaatgccttggattattttgtaacgtatatcccaatccaattctgcacgctttgttggatctgcatattcatatacatgtagatatgtttgtttagtcaagtctagttcatgtgttaaggttagtataaaataaaacagtcaaaatatatattccaaccatccaacacatatttgcataccaaatatgaatcgatcaaggcttgaatttaatacgtattcataaacgagaagtctttcttttccatccaagcagaagcctaggagtctaactaaatttcggtgttggagtttcgcaacaagcttaacttcatttttaaactcttcgtcaccctgtccaggggcggacccacaaatcgagaaaaaaatatatatgtattttacttagttacaacatatatttgtattaaaagatgata

SEQ ID NO: 37856 - DNA, 2868 bp, Cannabis sativa
ttaattattggcaagggtggaagaacgtgaaagttttatcagattgtcaagtgcttgtggttgatctcgtctccctcgctagaaaattttgactcttcttttctctatttcaaatgtaatcaaggatatatatgttcttgtaattttgtgtttgttgaaaggtcttgcattagacttgcagactcagttgcattagttagggagcttcactcctttgtggtagcctagtttttttgtcggtgaaatctcaatttgcgataaaaaagacaatggcttgtttttgagtaataacatgtttcgaaatgcatcattatttaaagtaggccataattagtactttacaaggattaatgataaaatatttgtggccactatatatcagacttatctacataaatgatcagtgagcctagaaaaacttttgctttcaacacctttaaaaaatatctctgtaactctggaaccactactagaacttaaaccatccatcacaagagtgattagaaaatattgtaatgatttgaatctattttggtatgtatttcattccactaattttgcatcataaacaagctcctgccttgttgagctggatatggccagtaggtgtgtttatcaaaccacttaaattgttcaaattgtccgtaccgcaccgcactgtaaaaaaatatagtttgaaattctttgcggtgcggtcgcggtttgaatttttccaaaccgcgcggtgcagtgcggtttgcgattttgaattgttaatatgcggttcatactgtaccgcaccgcacattatagaaatattaatttttatatttatttaggtttaatatgtgaatatccaatccaaaatccacaaattattgtattattattattaaaacttattaaaacttaattaaacttaatttttttcatatttattttcaagccttatgatttttttaataagtgatgttcaaaatttgttgtatttgtgatagtttaatatttagtgatagtccaaaccgcagaaactccaaaaatcgtaccgcattgcaccattttttacagtgtgatttctacaatttttaagtttacagtgtgggtgcggtttgataaattaaaaaaagtgcatgtggtttaaaaaatagtcaaaaactgtaccgcacgcaccgcgaacacccttaatggccagcatcagcatccaggcgagggattttgaagttatcttgtacacattttgagtgggcttctgggtgtggtccaatagcttctgggcttaaccaaatattatttccatttattatagaaaaaattggactttatacttttttttatattgccttcttttgattttactcacccttttaaaatttatcatttttacctcttttttcaaacactatactagttttgtccctctcaatctcttttatgctcttctcactttttctatttttattttctctaaataatttaagagatttttgttcttttcttattaattattttctactacaattgcatttgcatgcatgtatggttaagctgtaattttaactgcaatgtttataatatactaaatgaattaagaagaaatcatgtttactatttatcatctacgttggtcttatcaatcataaaaaaaattaatgaaaaataattttataatttaagtatatttttttcattgctattctccaaattaattaattagttaacaactttgctatagcattcatgctagtcatcttaacaattaatggatcattctatatgtggcataaatttattttacataaataatgtgctttaaattagataaacaacatgctttattaggtaaataacatgtcttaatttaggtaaatgacatacaatattgggtaaacaacgtgtcttaaaataaggtaaataacatgcttaaaataaagtgaacgacatgtcttaaataagatcaacgacgtgccttaaataaggtaaacaaaaatactaccctataataaagtaaccaacatgctttattaggtaaaacatgcattaatttaagtaaacgacatgcaatattcggtaaacatgtcttaaaataaggtaaataatgtgcctaaaataatgtaaacgacagtcttaaataaggccaacaaaaattactaccctaaaataagataaacgacacgtcttattaggtaaacagcatgcctaaaatacaataaataacatattttattagataaacgacatgctttattagataaacaacatgtcttatagtgagggtatagtgagccgttcaattataaaacatgttatatttcaattaaatttattttacatctatttttggtgaatgtataataaaaagaggtaattatcaatttatcgaattatttcacaaatacataaaaataataacaaaaatacagttgtactcaattttaaatatttttacgatttttataattttatttacaaaaagtatgatatttttgtgttgtactcttgttaatttgttgttaattttttgttatttttattattgttttgatgttattttcatgttactatagttctcttgttattttcgtattattattataaaacaccgtaaaaatataaaaaaaaattaaacgtaaaattgtaaaaaaaattataaaaaattatatttgatgtatatgtccctaatatatgtagtatatataattaaaaactcaaaaaccatttatttatttatttatttattatttattatgtagataatctgaatttattaacttgtgttttaactttagtaatccacgtttaacgcatctttttcaactttaatacacactttcaagctttgcatgtttaaaaaattacatgttttaccaataatgaactaggacaaattat

SEQ ID NO: 37857 - DNA, 2607 bp, Cannabis sativa
tgtatttgatcaagtgttccttagtgtgagattgaatgtaattgaggcctgatcctcactgttttgtgttgtaattcttggaggtgttaaattatgtactactgaatattcttatcaataaaaattcatgattcattcattctcaagctaagtttattcttgcctagcttacatctaagtttttgattttgtgattggttctagttttgattgtgtgttcttgaacaccactactgttgtaacagatgtgttttgagggtgatccttcaccacacccattttccatttcgctatataatatagcataaagcaatactctttctcaagtattcatgcttatatcaagtttaagcataagttgtttttccattacagagttttgggtcttaaattacagccaccacaatcaaaatcccagcaactaaagacaacattaacaaaaaataaataaataaataagggtaacccattttccatttcatcatatattatagcataaaacaatactctttctcaagtattcataagcttatttcaaaaaccaccttaaatctctgcccaaatatcaagtttaagcataagttgattttccattacagaagttgggtcttaagttacaaccaccaccacaatcaaaatcccaagttgctaaaaatgacatcaacaaaaattatagcataaagcaataatctttttaatcaaaaatcacaatcaactttagctaaagaacatcaacataaactcacaatcaacttaagttacccattttccatttctctatataatatagcataaagcaataatctttctaaagtattcatgcttatatcaaaaaccaccccaagatctctgctcaaatacaaagcttaagcataggttgattttgacattacagaaattgggtgttaacttataaccataacaatcaaaatcccaacagctaaagacaacatcaacaaagaaaaataaaaataacccaatttccatttcactatatattataacataaaacaacaatctttctcaagtattcatgcttatttcaaaacccaccccaagatctctctacccaatttgattttccattacaaagtttgggtcttcaattacaaccatcaaaatcaaattcccaagcaactaaagaaatcatcaacaaagaaaaataaagataacccattttccattttccattttccatttcatcatatatatatcataacataaaaagaaagcaataatcttttcttactcaaatcatgtattaatgtctttgatagtacctctacatccactgataacctcacaacctctactataaggattagctggtccaacatgacaattgtagtaaggagcacctggtcttccacatggaatcatgtctctccttagggtttcatagcttatatacttcttctgcatagccaaaactcttctattgatctctgaatccatttccagctcaccactcaagcaatctcccatctttttcttctgggaacaaaccctttgctccattctatcaatttcattcattttcagtgaattaaggtccaaaactgagaccccatttgaaaatgagaaatgggtttggattaaaatcagtgataataggtaaagtgaaatcatgggatagggtctgagttttgacatttctaaaggttttggctttttgggtgttcttttttgtggttatggtctgtgaaaatgggattctttttggggtaggagaagaagaaggtgtcctccaaaaatggtccaccactacactacacacatgacttggtttcaatttccactagtgacaagcctatatagttacatataaataaaggagatgattagtagggtttatattacacttatatatgctaagtcttaacaaatttggtaattagataaatgttatattttgtgttttattaaaaaaaaaaaaaaacttgtatgtgtgtctatttgtcccacattacttgtgtttgaataatttgtagtgtttatattacccttattagtaggggtagattatagcaaaaaaaaaaaaatatttttttatttttatttacaaaaaaaattaataatttttaaaaagtaaaaaatatgtgtatttttaaaagaagataatttttttagcctctagactaggtgaggtctaagcacaagcctaactcgcctatgcttagggtcgaacttacttaatagctacaaagtcttaacctcattttaagattttggtaattaaataaatattatgtttagtctaataaactatagaaatgttacttttatctttattagtaaaaatgtttatgttgaaagttttttattgattttttttataagtaattattttattgatttatgattttgaaaatagaatttaaatagtgagttgacatattattattattattttttttttttttttgcatttttacaggtaaagtttgaatttgtttttgatattataaatcacttaaattttttaaaataaatagagtatctactataattataatatacacaataattatttaaaaaataaataaattataatttctctaaatattaaacataaaaacatccgatacaaaaattattatcccataa

SEQ ID NO: 37858 - DNA, 1651 bp, Cannabis sativa
taataataataataataaattcagtcttcatcttcttttattttgtttggagaattttcttcataataaaatgctatgatttttcattgagtaattctctttctctgctcctctatcctcttttttgattgaatatctttcattagtaaatttaatctctctataaaattataatgggcatgtttgatttgatgtaatcataaaaacatactattcttgttacaatttaatgatttattactattctactatactatacaaaacacaacttaaaaaatcttgtgtgtagtttcccaaaacgacaaactttctaataattaaagaacaaaaattatagtttcaaaatgaaaccaattatcaataaaattgtcagataataaaaagtgaaatatgcccaagaaaaataaatatctaaactcaattgtccactactaaataaataactaattcattcacattataaataaacttaaattaacatagataattaaaaattgtttagtagattaatttatctaacttaataaaatataattaattaattaattaagaagttgaagaagaattagtgtgattattagtattattattatctcttggagaagacagaggaaacaaagtcaatagctcagggggttccgatcctctcggcgtattcaacgggctccggtgcaaataaaacccttttccggcgatcgctttctcctcttcctccttctcttcctcctccatacacgacggcgaaaccggagttctcggactcccacgcgccaagaattcaaacggcgaaacaggcgaaaccatcatcatctgatcgccgccgccgacgaggccagtaagggacccaccacttctgtaacggcccatagagacattagtagagacgccgttgccgttgccgtagccggtggtggcaggggcggaggtggtgagattaagctctaatttcttagtgttctgtctgcgttcgtggagcttaaaagcgggtcttcggggccccatatcggtggaaacgggtttggggttgttgaaacgggaaggaagagtgagtgggagtttttgggctgatgggtcgtctggtgctccggttagcttttgaaccaccgctcggaaggttgatgggtcggcttggacgaaggtggtgttgggtgaaaccgggtcagatccatatgtgggggagttcatattgttgttgtttgtagagagagaaagaagttgaagtgaaataataatgagagagagaaagaagaagaagaagaagagaaacaacataagcgggaaatgagaccctttttattgatacaattatcgattattattattattatttttataatacactttaatagggtttattcgaaaaaaatttagtgtaattatttttgtgtgatcttttacgtgtatgctagttaattaacatattttataaaattttaaaaaattcaataaaatttaagatgctaaaaatatattttataaacgtataaaataaaaaaaaatcttacttctaattctttaaattatatttgtagtatgttaaattttattaaattttttaaaattttataaattaccaactatgaaaaaaattaaattaatttttttttaatggatcaatttactctttgaagtagggctgtacatcggtcgg

SEQ ID NO: 37859 - DNA, 2865 bp, Cannabis sativa
acctcaaaatgttccttaacctccttagattgttcctcaacaattatggaatccattccaaaactctctcaactcgtcttttactgtcaaactcgatcgatcaaatttcttggccttgaaatctcatgtcattttgacagtaattggccatggtctggatgatatcttactcactggagtagctccaccagcttaactcatctatggaaatatcaatcaaaaatatgtggcttcgaagcgaaaagacaacctcttattcagttggctcagatcttcaatgtttgaaactattttgggatcactggctcaatatagcacatcttacacggtatggaagaccttggagcaatgtttcttgactaagtcgaaggcaagaatcttgaaaatcaaatctcaacattcaataatcttgaaaggtgatctttctatctcagattactatgacaaagtgaaagttcttgtagattctttgccaacagtaggacaacctatgaatgagagtgatttgattatgcatcttctcaatgggcttggactagagtatgatcctgttgtagttcatctaacgagccttttcgatagtctctcatataaatccatccaatcgctgctcttaactcatgaaagtcatcttgagaggcactatacaattaatgacacttcttccaaattgactgccaatctctccacaagcactccaagatttggtcctagttcttattcttcttcaagattctctgcctataatggtcgaggctatagccaaggacagatcaatcgatccttaggaagatattctggtcgtggagcagctccctcaaggcccctgtgtcaagtctatttcaagagtgggcacacacctgtagtgtgccattacaaatttgacaagtcattcattactcccaaaattggggaatcacatgcttattgacagagattgatgacgaagatccatccagatacagctctcacatatttcaagatttttctcatgatcccaagcggtatgctgatacaagagctaacaaacatgtggtaataggaatggaacatcttgaatttaaaatcccttatcatggtaatgagtctcttgctatgggtgatggcaagaaactcaacataactcatattagtaaccactccttactcttcgcttctactccagttcatttatattctgctatcaaagttcccaaaataacaaaaaaaaaaacttgtcagtgtgtcacaacttaccaacaataatcatgtattcttagaatttcactcaacttgttgttttgttaaggacaagataacagggaaagtttttctcaaagggagggttaagaatgggttgtatgtgctgactaagttccttaaatcccctactctagtttagctcgagtgtcatctagcaacaaaggcatctagttcatgtaagtcctctatttttatatctgtgattgtactaaaaaaggctgctctacaagccttctcctcatgtatcaatcatttcaataataaagatttcttaatttctagtcctcaaagtctttaaatgaggttttttatgttaatcttaatcaagatgtcaacatttggcactcaaaattaggacaccctactcccaataaccttgtcaatgttttaaaaaaactaaaccttaaaggctcattaaagaaccttaaattttgtgatgcctccaaacttggtaaaaatcataaacttccatattcattatccaacagaagggcctctgtgccattagaattggtccacacaaatttgtagggaccatctcatgttccttccaaagagggattaggttatacatacactttgtagatgactttaatcattttacatggatctttcatatgacacctaaatcttaagccttccctatatttcttcaattcaagaaattagtggaaaaacaattcaatttttttttttataaaaaaaaggttcaatctgattggggtgagtatagaacatttgcctcttttcaagctcctaatagaattcaatttcaatactcttttccacatgatcatgagaaaaatagtagagctgaatgaaagcacagacacaacaatgaaataggaatgacacttttggcacaatctagtttagatctttcttattggtggtatttgttttagcatgccacctatgtcattaacaggctaccaacaccagtcattgaattttacaccttatcagcgtttgattcacaaagaaccagattatggctttcttaaaacctttggatgtgcatgtttcccttatctcatgcaatataaccctcataagatgtccatgaagtctgaaaactgcatcttgattgtctattccatgcaacacaaaggctacttgtgtgagagttcatttggatgaatttatatcacaagaaattttcagttcaatgaagaagagttccctgtacttgatgtccatccatccactcaggcaacatcttcctctcttaactctttttcctcaacttgtttcgccatactagtaataattcagcaaactaattttccatctccaattattattgaggtacaacttgttggtgaaacaattcaacaacctctagttaatgttggtattcatctcccatccgaaaatcctaggaactctaatcaaaaacctgatctgtcatctgcttttcctatgacttcacaagcatctacttcccaagtgcctgcatctaatccctcatccactcccaaatagaacaattatagtcattatcctttcccagtctaccaactccattttctatacctcaaaccatccaatattggaatatattttaccaggacctagatttactaataagtatgtttatcaacatcctaaatatgaatttct

SEQ ID NO: 37860 - DNA, 4089 bp, Cannabis sativa
aaactaaaataaaaataattatgtttctagacttagaatcttaaattctactatcctagcaacatttaaaagaagcaaggttttttttttttttgttgttggttgaagaaataagcagttgcacgtgaaggagagagagataggaagaagatagaattagggtttttatttttgttttatttgggcttgcttaaatatttgattgggctttttcattaatgtttatggggctttttaaaagttttttaggttttttaagttgggcagcagaaaaacaaatataaaattacaatctgggcctgttttttagggctcaaatagcccatttaactttcaaaatttgaggcgcacgcctcttacgcctcaacgcctcacgcctcaattcagcgcctcacccattgaggcgtacgcctctcttctcctcaacaaggcgcacgccttggtgcaatctttaaacgcctcagcttgagaggcgcgcctcaaaaatgcctttttaaacattgattacaatattgcaaattgatagttctcactataaagctctagaggttcatgtgaagcagcaatataccgaagtaaagactattttcaaaatataactggaagaaaaagaggagaagaataggaagctggcttgctctcacattggttctaatagagcacatactcatgcccataaatcttaagactatttgcttcaaagagacacactattagaatatcgctataattatatgagatatacattcaaataagtcaatttattgggaaaaatcagaaaatggattcagaattgaccatttcaaaatgtgaaattagaaataataagcgggtcaatttcaaaattttactacccaacaacgcctttaaagaaagcttcggagaaatccatatcttcttcatgttttaaagttcaaatgcaggtgcatattgaatgatatacatatatataggaaagagagagagaaagagagcatgtcatgattagatgatctacaacagagcacaagaatgtaaagatacctctttcagctcatattcttcaaaatcttctatctcggggatgggagcaacggaaccatttgcagaacgcttagcacctttctttttctctttgttcaccttttcattcagtggatacttagcattatcatgctccagcaatgtcagaagctctcttcttatcatctcatcagcctgttctattactgtaggaggcacaaaagaactcttgtctccatcagctctcatcaaggaatttttaattaattccagtgaagcagcaggaggtctaggaagctccctttgaagcactttggatcttttcctaagtaatgcttgcagtcttgcttcttcagcagccttttctctagccaacctgtcagacatatcttcttcaatattttgttctggttcttcattttcatctggaccaggctgcacaactacctgatactcattcttaggttgggatagattgctaaagcctgaaattaagttccttctcatatcagcctgtcttcgcagctcaacttttctactatcatggatctccatttcttcattaatgcggagctcatctctaatcggagtaccctttggtgtcataccaaaagaatagccgtctctggttggcgtcataccaattctaggagtaaggcctgccgctccaggtgttgcagatggtgttagcattgggtttggcgtttggatctccttcttcttaggcgtgacccctgaaaaatctgaagggtgcaactcaggattttctccacctaacaatggtgtttgagactccctcaaccttgccaagttttctgcctccatcatgatagcatcacccttaccagcaggtgttctttgtggagtccgtaaaggagtaactccctgtcggggtgtctgaccataatttgcaagaagtgcacgtgttgcaccatttccatcagtgagatcctcgccaccagcaagaagatcactagcataaccaatctttgcaatctcttctagttcatgatctgaaatctggggagcaggaagcatcaactttgacctcttcctaactgcttcaggatcattcaatttgttcgcttgcaatatagctgacggggcatcctgcctttctgcaattttattcttcgcaatgtcttgctttctcaactgtgcttccacatcaattcttctttttccttcaagttcctctatagtggttgggaaactgggttgttcaacagttctctcttcatcagtaacatcatagaaacctggaggaggcttcttttcaaagggaatttccgcattgtagtctattcccttccttttcctcttccgctgcctagtgtcaatcccagcagccttcagttctctccttttctgtaaagaagcaagccttcttgcctcttcaagctgtttctccctggctttcctttttgccttcttaccccttgtgtttgctaaccgagctcgtgcctctgaaagcatttccttctcatcctcatccatatcaacaggatctggccgtgcaggctttgattcagggttcggatcaatctctccgggacgtaacttccgtgggtcatcaccaggttcatagttgtcatccttaacacaggcagcatcaagaagcttctcataccgctcaaggcactgggatggagtacggccaacaattggagcaatagttctccactgcgtgggcatgagcttggcaagatgaagcagtttctcatcctcttccctcgtccactcagtctacaaaaataaatgaaatcaaaacatcacttgaattgcactcaaaaatgattatcgggagctggtgagtattccagaaataaagacaagataattggttcagaatagctcttttagatgagagcgtagaaagtaactatttccaaggaaataacataacactaaataaaattgtaacccattggattgatcatagaatatgcaaggagaaaacactctgatcttctaaatgcttttattataatttttgaaaaaacaaactggtcatggtgtgcttgctttcaatgttaacaaatatatgtttctgccagaaattatgcaatacaataataaaaaaaattaaaaagctaactcttagctcaaatctaaaaagtgcagaacagtaggaaatgctaaattttgagtccaaaaagaggcggctaaaccaatctaactacatcaattcaaagcttaagcgttcattttcaactctactcaaccatttttacagaagtaggggaagaaataaaatacctttttgatggaaggatcaagccactcgtaccagcgagctttacactgcttggcggatttacgaactaaaagcgaagagattcgagcccactggttcttgccatatttcataaccgcggctttaaggatctcatcctcggtgttcttccaaacaccacccttgatcataatcctcatcttggcccctttcttgagaaaaaccctcgcactgctatcctggggagaagaagaagtagaaaagagggaaaccctaggttcgtgaaagaatcagaatcagagatagagatagaaacagagaagagtcgattgattaaaccctagcgtttcggtgtcttcgttgtttctccacagtgtctgtccagatttgtgagggttttctcttatccctctctcatttccgtctcgtctctcttgcctttattttttattaattaataatatatattttttatgctatgcatttatataataatattgttttcacaaacttttttttcttttttttcttacaacattgtctgttgagatcaagctccaatataaactttttttttcaaaaaaaaaatctaatataatataaaggaatttaggaacaatataaatttaagttgcataattatttggatagtaattaataattatattatattttaaaatataatgtatatttaaatataaattgataattatctatataaattctcattatcttatttatcttatttggtaaaatatttagtaattgtataaaaaaaatataatataaagaaacttagaaaataatataataacacaaatctccagggggcgtgtttggagatcactatg

SEQ ID NO: 37861 - DNA, 1896 bp, Cannabis sativa
  modified_base (43)..(49): a, c, t, g, unknown or other
tttttatgcattttaaattttatcccattccattcctattccnnnnnnnattcccattcctattcttatattttcattcctcccaaccaaacgcctccttgatgtccacttcgtgagagacaaagtgttacagaagaaactcgaaatccgctacatcccttcgcatgatcatgttgcagattgcttgacgaagagcctgtcacctagccgctttcaattccttgtaaacaagctcagcatgacagagtctccgctgaggggtggagttaaaagcactgaggaaatagcagagtaaatagcagagggcacttgtgacatcctgcttcttttcccaattcgttggaatgatgatgtaatagaatctttcttatttttgtgcctttaccgttagcattgggatatgcaatatttcttttttctgctttaacaaactctatacgtgtatgccttttattgactcttgtaatatcttcttctctgcctttaggctatataatatgcagcagcctcactcagtattttgagcagagattttcattttgcttccctgctattttctttactgatcttgaaggaccaagttgttctaaatcttgaaggccatcatccttcaaagttactgtacgtgaaactgctgcaagtggttgttgtagtctagtaagtttttcatttcactcaaaacttagtatatatttccatagcatatatcttaatagtcttccatgatgagatgttatattctttcattcatatcatgtgtcctttactttttatttgagacagaacttgccctataagtatgtaccaaaatacattaatgatttaactttaaaattaagctttaaatttacttaattatactttttttataagtacgactctcacactattattgtttgaactatatagtatatatatgaaatgtctacaattgtgtgaaaaattggtgtatcgtaacgaaatttaaatactatattattttttattagatgccatgcaataacgttaagttgaaatgaaattatttaaaattaatttaatatgttaattaaatggatgttgttttttgttttgttagaagttttagaatggatagagattgaatgagtgtaaatagaataattagacaatatacagtgtggatatattactggatgaagattatcaaaagcttcatgatgtagtgcaatcctgcaactttttttaaagaattaggtaattaaacatgcttgattcatttaataattagtttttatttcaaatacattcaatgttatttatctttgattttacaattaagaaatgaaatgtcttacaacaaccaggagataaataaaatatgggatgaatgtgctaattttgtgaagtctaatatattgaagtctaaagctgttggcattggagaacaagttaaatatctgggatagaatctttcttgtactgcaatcatattcggttcatcgattagtgaagtttgatatattgaggaattagtacgcgattaaaggattgatgtgataatgtatttatttttggtcaaaattatttggttttattttttttaaaatgtttttgctgtagttcataaccgaagcaaaaaacgattagcgtcggtgtaccagttttttgcttcagttatgaactgaagcaaaatttttttttttttttgcttcggttcataactgaagcaaaaaaccaattagcgttggttcataatcgaagcaaaaaaattagtatttttagcgtctatggttatagcattggttacaccaactgaagcaaatactttatatgtcacttaaaaatcgaagtaaaaaaccctttatgtagtagtgtcggtttttagctttggaggaattagttggatgattagaccttatgtaacaccctaactaa

SEQ ID NO: 37862 - DNA, 1986 bp, Cannabis sativa
agtaccaaagtacatattgcatgaaacagaaaatacctccatggtctggaaactttttcaagatggagtccgcagccttcaaccccttcttatactgttttgtctcataagatttctgaaacagaatatgagatttgataaacactatggcaagaaaagaagagggtgtcaactggattgtgtaaattaaattgccagcttttattttaaaaaaaaaaaaaaaagaaagaaaattaactacataaaccagcacaataagataatagcacaactatattgcaaataaactggcagcttacagcagcagccatttttcatcaatcctaaatgaatttgttcgtggaatattccttcaaacgaattcttcctcatacatacaaataaccacgttcacagagaggataacgccataaaagaatttaaattaagataatagaaacaatcaatcccattggagagcccatagctacgttttcagacattcataaaatctaaacttgaaacggaatcaaatggataataaaagaaaacgacatcagcaagataacgccacaagtctgacttcttcagtctctatcaggttaacttgatagtagatagtagacactctccagttttgtaatctatctactacattgcatcaactactgaaaatgaaatttaacattaaaaaattctattttaaccaccaaccagttctcatttcaacttctctacattcttctagtcaaacaaacaattcttacaattgatccaataacaaagttcaaaacttaactaatataagaaagaagaaaaatcacaaatttgaacattacgatccctgccccactatgctcttccgccgtaacaaaccaaactatatacaattcgccaaaataaaccatacccaattgattcaatcattcattttgtaataaaaacacaaaagcgatcataaatatcaaaacttttacatgcctgtcaattcatccagcattcaaacaacacaacacgagtgaaacaatcaaacaaacgaaatcaaaataaaagacatatagataaataaactagggttttgattctatttaagcagtgaaaaagatagaaaaaacacagttcgatcttgtagcgattgaaagaaaataaaaaaaaaaaaaatgagaatagtagggaatcgaagcttacgacgatgagtttgaagaggttggcctccttgggagggagagaggcacccattgttgcagaggggaagtgagagtagagaagaacgaaggtgtggtgttgagagggttacgatgatgatgaaaaggagtggtggcgtttatctactgcaacccaaccctactgtgaggaagaagaagccgaagaagaagacgctaaaaaataaataaacgaacaaaaatatattatttatatttatatctcaaaattaaaaataaaaatataatattgtattgtattgtagttactacgaaacgaccgcgagttttaccttttgtgaaacttttattgtagtttctttctctctagggtttatgacttttatgtattgtttgtcgtttattttgaaacgacatgtcacttgagtaccttttgaatatttggtgactagaggaaaaaaaaaagtagttggtgaacaattgattttgtaaaagcagccaaagtgaatttttctttcaaaaaaatattttaatcccaaatattgtgggtggtgtgggcagtaatatttttttcaaatcaaactgcatatgtgatttttgtaattttttaaactgtaatcgtatccgaaatcttaaacccgcaacaatcacactgcaaaaatgtagtattgtgcaattcaatttgaacaatttacactatcatcatattatcatgttataattttaaagtcaatctaataaaattttaacaatataaaaaaatcgtcttaaaatattaatattatatcatacatactaattattaagtcattatagtaacttgtctctaaaaaataatataata

SEQ ID NO: 37863 - DNA, 2202 bp, Cannabis sativa
atttattttttattcatttatttccttccgaactcataatataatacttaatataaaacatagcatacgtgcatcgcacgtaacaatatactaatatatatctaaagtgataaatagataggcataaaatttacctctttatcaatatcaggagttaaatcattttcaagttatagaattcacatcttagtcttccacgtatgcctcaacacacaaagatgagtgtaaggattcatagtttaatcttcttatttttgctttgacacatgagcaataataatttaaccttagagaatcctaaatacaccctatatacgtaggaaataactataatataattaattataacaaacaaactattatttaggtttaattagttgagattgatattgatttatttaaacataaaataatcttattgtaatatttaaataaatattattaaccgattctgttatatgtattatttttaaattaaaatatttaatttaattaaatgttacctaatattttgactaaatgacatggcacataattaaagaaaggacatgtaattatggaaaaggtctacaagagctacacccctcaagaagatgagaatgcgataagcttggaaagaactacctgggtggcatggggtatgccgcccataaaggagtgagtatacttgggtggcatacaccatgccgcccaggaagaaatctttgaccctgggcagcatgcacttggctcctaggtggtttttgcagtgcaattcatcgatccaagtttcctttcccaaaaagtaattcgatacgcctagttgacggttagaactcatcaaccaatttattggctcgaaaaacaaaatcaacttttaaattagatttaagatgaaatataactgtaagtgtttatctcaaaatagagggaaaatgaaaaatttctattactttcactatggtaattacaagaataattttccaacccccttctacatttgaaggaggggtatatataggttgtaaaaggctgaggtacatagtgctcccaaggggacaaagtgtcactttcaccctgcaagctccatgcgtaggtggtggcattgcactttgtacattgtctacactactacaaaaatagcttttagtaacacttttttttaactaaaaataaataaaagacaacacttgtaaaagtgttacttcctagactgtttccaaatgatatgtgtttatgcaacacttttaaaagtgttgtcttataatgatatttaaattttcataaataacatatagcaacactttaattaaaagtgatgctatttagaataattttaaattaaaatatagcaacacattttgtacaaatattgcaatatactatattattatttatatatattttacaatatatataattatagtttttaaatacttgctaaatagtgtataaaagaaaattaaatcaaattattaaatttacattagattatattattaatagataaaatttaataagaataatacacaattcactgtacaaagtaatttaaattacaaaatttatatattaacatacattaattgtaacaacaatgtccctcacgaatttacatatttttcttaaaaaaaataataatgtcgctaactatgaacacatatttataaatacattatttatttgctaaatgtttgtaacattttgattctctctctttttttttgatggagctgcaacaagaagaaaggagaacaagctgtcaaatgtgcttgagtgttgttattccatctcttgaagattataagagttgactgtcaaatgtgctttccattcacttcaaatcacgataattaatgtatggggtacgctggctgtatcctgcaagatatgataaaaaaataaatataatatagcttttacttaatgtattgtgataaattgctttatgacatgtaaataagaattacaaattttacaaagaattactcaaagatttagagagtttttgcatatagattaaagaaaaaaaattctgccaccgaaacacaatattaattcacaagaagaatataaaatattcatatattataataaatatactcatgtacttttaaagcaaaacaatattgttttcaacattataaaatttcattgaagagatgcgtagttttcaacatttatgaatcttcttcaaaatactttaacatatatatatatata

SEQ ID NO: 37864 - DNA, 5393 bp, Cannabis sativa
atatatatatatatatatcaatttgatgaattaagcagcttttttgcattggattttcgaagcctcctttcctccgaaagtagctttgcaaacctgtgtaataattaccatattatattattatatatatatgtacaatataatctaattaataatacaataataatgattggtaaatgaaaaccttttgagttcatcctcattggtaatggtggagtttggaattggttcgtaaagacccgtgactaagttaatgcgagaaagtggttttttgagtagcttcttccccacttccaccagattgttcaagttcgattttgttgctatgtccaccgaagataactcccctgtcaacgtgtcatcctatatatatatacatacattttgatcacgtcaagtgtaattatatggaaaacattataaatatatcaagctagctagttaaagttaattatactactttagttagctacaatctgcttaagtaattatagctagatctgaaatgatccataataattaatgcttttacatatttatagatatatattccaaatgtatatagtaagtctctgaatgatgttttgatcaaatatatatgaatattccaaatattattaattagctagagcaatattataagtttgttgatcaggtgagagccctattattagatagaattgttacatattaataaattaggtaggtaggtaggtaggtagggtggcattatatatatatatgtataaacttacatcaattcggagatggttagcatcggagcctaaggcattgaaaaagacacagttatggtaatcgaccatagtgacacttgcattagagaaaacatcaattataggagtggagccatggtgataaatccaagataaaggcccccacgtggcacacgcattagcattgtatttctgttcagtcttgttggaacccgttcccagtgatatcactagaaaacgagtgaaatccaacggcttagaattccactcgaagctgatcatattgttttttgctatttgtttcgtaatttcactgatcgtaaggaaagactgaccatgaccatgcatgcatcaaaacaagaaaatgtaaattattatcaccacatgcatgttttaattaataataatatacatgcagttgaattattaataatattaccggattattaacagccacaccaccatcaatgagatgaaattcttcagtgtttccatccttatcttggttggtgaaatagtgagaaggaaggtatgttggagctgctgatgtggatatagcaatgtccgccagacgagcatctagggctgaattcgctggagcctatacatatatacatttataattattgaactaataatcaacatttcattctcgttaattggtagaaatacatatttttataagtaatttacggtcaaacttttttatgttttaatttttatacacttaattttcttattttaatggatatgtctgagaaattacatgcactgtgacttggagtgtcaaggatgatcggtaatggttgtttgtaaaaattacaatgctaatttacgattcaaggcgatatatattcaacaaccatacatttgatgcaaaggttgattttttttgtatcttgctcatacatccattctttctatatgctcgacccattctcattattgctcaagctattaattctgagagtgaagactaattaaaaatttaataatgacagaaatatataagagagataggagtttctacagaatggtgagaaatctttttgtaaaaaggtggtgagattaccacactagctagctagtgaaaaataaaattactgatgtcatatgcctatcaaaagactattttgcaaaatattataaaaattagagtaatttgtaacataaataataaatatttaagtttaattcttgattacagataaatatttatgtaagtatttaactgttaactaatattatatttaaaataatttttgaataaaaaattaaaatttatgtacttagacccatgagagataattatctggtcattcagctatatctacgaaaatataacttatttttattgtaaaaaattaaaattagatatttaaataaatttaaatatttataaaaagaaggcataaacatatatatacccgataagaggagaaaagagtaggatgaagcttcttgatgtcgaaagcaggaatgactacgttagtcaaagtttcatgcaacctcgttgaccccaacagtttctccacaagcttatgaagatattttccatcatattttggtccccttgcgtctttcaccgacccaataagtgaaccaaatattccactgattaacatatatatatatataatattaatattaatattaatgcaaaaagtatatatatatatatatgcagcatatataggtaggaatgtaccttgattgagggaaaatatatggacagtgctcaagataaaatgggacaatctgtttagcggaatacaaagggcgtttttgggcattgggagctgataacattgctgcaataagacccccagtgcttgttcctgatattgcatcaaagtaatctgcaagacgagcctcctccccatctatttcctacatatatatatatataaagaatatgtacattaatattatatatacatatatattgtttatatattattagagtcttacttgaagttgagattcaaggtattcaagaataacaccaggaatgattcctctaattcctcctccatcaatgcttagaattgtgatgagccttccatactttggaggttcaatggttgagaatgatgatgttgctttggccattttcagagcttttattatgtgttattattaattggaaaatgctaataagggactgcacaagagaagcttatgtgatatgtagaatatgacaagtaatattatatatttatatatatagagagggtaatggtatgtgatgaataatatgcacattaaaattatattattattgttttttacaatatagtgtgttccacgttggatatataaattaggacatttagtatgagtacttaaagattaatagaaatattaaagtggagaatataattgtttgaaaatttattaaaataattaattagattattattaattgaattatattgtttggttaaatataagaatttgatgaattatagtgaaaagttatataaaattactagtatattaaattcattgcattaaaattaaagaaattttttgaaatccaccttttaaacaaattaaaattactctcttttgaattatgtaatttcacagtataatttttccgacttaaaatggaaaaatcccgtagcaaacttagaatatttctcattaaaattataccatactaagtggaattatgtgtgttctatcaattaatctttctgatgggattataagtgtccttactatatttttttgggatttcactcttagtttgttcaaatcctctaccatttcctccccacgagcgatgagtctcaatcgtacttgtcctatgggaattctgatgttcttttcttggaggttgagttgtttctcctggttgagtaacttcgtttcgagtaatgtcatctgacatggatggaaggttcgaatatatttcagggaaggtattttttttgagttttttcttacaagtctctcaatgaaagtatcgaactgttaacgcagattttcgttaacaaataaatgaatcttaaagtaataaaataaactctaaaattaaataaataataataaatggcaagaaagtttttaacgtgattttgaagttaattctttatactccacgagtctattttattctagaatttttttaaaaaaatcgtatacggaatacaaaatagaagaatttatttgtccgattctttcttttctcaaatttattgtcccttgctccctaggttcatgtccctatttataggagttttagggtgatagttattctcttgggatcttatccttgtaatcatttattaaacatggacaaatcttacgtttcatatttatatcacatgggataataataaaataactatataaccgttccttgtctttatctgtaaacggttaggctaactatgctttattcatcttgcaatacaaataatcttctaaagttattttattttgagggtggctctcggcacctatgtatattttggatcgagtacttcccttattctttcaacatatactcatgagtatatgggtcaatgagctacaagctccttaaagaattcattatctaccctttccaagcaccgtcattctactgtgtactctgtgtatctcgagatagaccttctacgttggttgttcatctcgctggtctcataaagtggtagttattattcacggctcaccattatctttaaaagggtgagttcaaatttttctaccagttgtatttttcgagacgagtttattgaatgtatttattatttcataacatgagctgatttattttttagctttttaatacgtgtcattatcatattaatttctcaaaatatgggtataacaacatgtttaagagttggtgcttcactactaatcttgctgatcatcatccaaatgggcgggttattatagcttaaaactcgtgtagttttgaagcggccattaagggtggaacaaatcagttgattcattgtttggtaaagccaaaaagaggagatcattttgccttaattatggtttatgctactaatgatagtaaaggtagagagtttctttggaaagacatgaaaactattttaaatggtatgaaatttccatggaatgtcgagagtaacttcaatgttgtgttgaataccttcgagaggttgggttatagaagaaatgtcaatcatatatatgattccttttcagtcttgtgtttctacttgtggtttagaagacattaaatacaatgtctccttctttacttggaataataaacaagaagggagagataatttgatagaatattagctacagtgaactagttggataaatatactacaattaatagaggtgacttttttaccagaaggtgaatttgatcatttgccaacactcatttcaatttatcctagccttcagaacattaaaatacccttcaaatactttaatttttggaagaatttttggcatttttaagatgatgtgaagactatttggaaggagaatatttttgagcagccaatgtaaaagcgtgcctaaaagagtggagtaaacaaggttatggtaattttgctattcaggatcaagcatgccaaaataaaatgcttactattcaatagaatatttaacaagatcctagaaattatgacttgactacagaggaagatactg

SEQ ID NO: 37865 - DNA, 3144 bp, Cannabis sativa
atcagattagattgtaatggattttatttagggcataaaatcccaacattagattgttaccttattaatttttttagtgcccatcaatgggtattacgcattaagaagtgtttcgaatatatatatatatgaatatatatttgtatgtgcatatatatttatacaatacacataatatatttttgtgtatatatttatttttgtacatgtatctatatgtattatatatatatatgtgttatccgcgtttctggtattggacatgtggagtccagattagcatccaaagcccattagtgggaccctcagcaaagataatgtgggccaatcacatttggataagttcttccaagaaagtatctcagctccacaatcataaaattgtctgccttcggtgagctgtgccatgaaaaatgtacggtaccatgagatcggagggatgagacagtgttttcccggaagaccgtcccagtttccctttttatgcttacacacaaataaaaaactataattgctagattacaacagaacatcgtattaggttaaatggagaaacttcctatagtgaataatattaagcaattaattcataaattgattgcccataatcaaagcaccagccaaatttaatctgcctggttagcagatcgtctccttcatgggttagacttcatgagactgcctaagtgtattatttactgtaaacaccccaatagaggaaaaaggaaaataaaatgtaattctgctcctactataaatacccatcgaatcctatggatcaaggattgaattctctagcaaactttgctcaggtaaacttgagaacatatattcttcatattcgtaaagattttttcaaggtaaagaaatactgaataatactgactcgtggactaaggctaattaacgccccaaccacgtaaaaaagtgtctatctctttctatcgttctcttttaattatttgtttctttagttcttatcgtttatcttctgtttctgaaaatttcagtaaatattctagtgctttaattgagagcagaaggaagcagtgagaccacttgtagattatgttcaagtaatcatatcccccacccaaacaaagtttggtattcgtttcactagtcctggtggcaaagctggagactctagtgacccccacgaggtgactaatcgttaaaaaggtcgccgagtgaagatcagaatcgagatgatcctatcattgaagatgcaaaatctggagaaagtagctctgaagacaccaaagttaacgctcaagacataccaaatatgcaagaagacgaccctcatgacaaggctactgatgatgatgttggagagaagaaccaaccggacgagtcagatctcgtagtcatcatggaaagacaacttcaactggctgaaaatagattaattcggcaagatcaattcaatgagatactactcacaaagataaccagattggtggccgtgatgactaccctgactaagatagctcctggcgtacaagtttctccaacaactgacgccctttagaaagcagatctaaaagatcttggaacttcaggcgttcgcaaagacaaagacaaaggaattgctgttgaagaacgaaagaagactccttccactaagcagcctaaaaagtctaaactgctgaccaacctcaacagaagaggaaaggaaaccacgccacagggcatagtgaccagactaattcgagaggcaaagtcacgtacaaaaataagattgttgtcgtagtccaaaagccagtgtcctggagggaaaagcctcatcccaatgatttcagtaaccacgatgaggatgttgatgaagtacatccagtgttagatgacagtggcgaagcctttccattaatgatctccaaagaagattgaatgctaagaaggaaaaagttaaagcagaacaagcaagaccccacaggaacgattagagaaacgaaatcaatgatcgtcttcacagaacagaatcttcaagtgataagactcaatgcctagaacataagattgaggagttgatgaaaatcacagaaacaatttctagaaaataaagtggtgccatatctgactctgaggaagaagatatggagccttgtgtgaagtgaatcatttatgcacctgtaacaccctactagtttaggcgtgttaacgtgatttttaacttaactgtgcagctcgttgctaatcaacgagtttattgaaaatcgtgaataattaaaactttaattaactaattataaataccaaaataatatacttgtattaaaccgggatcctgttttacaaaataattacaaacgtttcatagtacatgttcaaaaagtttgtcgcctagcgactatacaaaataggctccgctgtcccaaagatcgtacgctccaggcctaaccgccccgccatgtacaatctccatctgctcgctctcacggctgttcaacctaagccttgcccttacatacacatgcaaacaatatctgtgagtcgacagactcagtaagaaaagcataactaataacatagcaataacccggattataatcaggcacccatacacccaaccataatcctaaccgagtaaggaatgttctcgacaaagtatgactaactgcgaatacagcctatactcagtactctaatcgtactgatgcggtagtagataacttatactatccgatagcctatcatatatctgttggcatctcggtgtaactctatgtacacctcaccgatgccttgatatgctaatctgattgctatagatttgcctattttgacggcaactaacatgtacgctaaacatgtatacatacatatatgcaactgttatactaatcttacctcgtttccgatggcaactatcaaattaccactcatggttggcgaaaatccaaccactagaacactaatggcgctgttcatcgtgatcgacgttccccgacttttaatgccatgatgggctgacaagccctcaacgacatgaaggcagtgaaatcaatctaccacctatgcctcatgtaatatcccagaaaataaataatatttaaatagacatattttattaaaatgaaatacgatattttcgggctcggcaattgtgagaatttagcgatgtggttagtaatgtcatga

SEQ ID NO: 37866 - DNA, 3592 bp, Cannabis sativa
gagctgcacagtacgtttaaaaaatcacgtaatatgcctatgctagttagggtgttacagatgatgttcagagacaatagcgagacgccatggagtgccatattctacagtctttcaagggaaattgatagaaagctggtggttagccaaatgtatgatgatcgcattataatttggtgtaagaacgaggaagagatggactttctattgaagctaaacaagatggtaataccgggaacaggggcactattgcctctttcattagatggtctgtgaaagaacaaaacaaagatgtgaaagtcgaatgtagaagctcttggataggcattgaagagctgccattacatctgtggaacatgaaaattatgaggagaattggaacgatgtgtggagggctgctagatattgagaaggacactacagaaaagagcttcctgcatcatttgagactcaaactggaaggggatgaacatggtttcgtaccagcactcatatcgtttcaaaacgaaggcttggaaatatcattgaaattattcaaattgaacgattggggatataggttcagcggttttttcaatagtatttggcaccaagattctgagttatataaaaaagaaaaggagcagaggttgatgtacaaggaagtgacgacgcatagtgtaaaaggaggtgaagggagagagatagctgaaaggattcgggcgacaattgagttggttgaaaaggagatagaggcggcagacaacgacgagataattaaactgggtggcgaccggagtgtgtcgacaggttccgtgatgtagtcaccaacggagaatcaggtggatgagaggcgatcggaacctgtagctatcacggccatgacggagatgggcggccaggcttcggtacatcagtcaaaggaagatttaatgagtaattatgggagtttgtctttcgaggatgatagctaccctaggaatatggagatgaggccgattgaatgcccccataaaagcacaagaaatggaagagagttggttcctcttcattatgtttttaaccgtttattgagaagcttaagggagccacgtgtgaatagaaatccctccaattgtttgaacatgtgtctctcctatgactcaagagatagaaataattttagaagggttgtgatgggccgggcctttgctgaaaataaaactgaaatgggtattcagctttgtgggccgagtagttacatctctaaaaatagtgagatagtaggttcaaaagctattcagcttagtggattgtggtattaccaaaatggccaatttaaacttatattgggccaaaaagagggacctcctgcaagtctgaaacaattgttgatggactctatcggcagtggatttaaatggaataagaacaaggagaataatgataaagctgaaaggtgggaaaagaagctggcaatgtacaaaaagagaacaccataacaagtggtacttgatttttttttttgaaggaattctaagtaatattcggccaaaaaagagggcaaaattcagagaggctataattaatctctagacagacttcgaagatcaaaaaaaagaaacatggagttcggttctgcataacaatgaagaattggagtcagcagaggttattgtgaataaaaatcaactagtagtatatacaaggaaaagaaaatcagcagccttggttggggaggaagataatatcatcagaatggaaatgctggaagatgatgaagaccctagagaggaagcaatcgaagagtacttttcagaaagtgaagcttcggatacagattgtgaggacaacatagaagagatcaatgaagaatatgaagatattttgggcgacattaaagtcttatggagtgagaaggataacatggtgagtggaggacttgagaagaatatctaatgaagagcaagttgatatggaaaatacttccgtgacatggtcaaagatggtggattccatggctgatttggggatgaaaataatcccaaataaggaaagagtgccagtaaaagagtcaaaagaagatacagcaagaagaaaatgcagggaattgagaaatttagactttaacatcaattatgataaaggtgttaaaaaattagggatggaaaaacgaatacaatgaagatactcacatggaatataagaggcaatggtgataaggagaaaagaagggccattaagacaactttatgtaaactcaatccagacattgcaataatataagaagtcaaaagggaagcggtagatagaagttttgtgggaagtatatggagatcaagatttaaagcatggattcttcttccatctattgggaggtcgggggtacattgttgatttgggacactagaagcatcaaagtattggattcaatgataggagaattttctattttagtgctaattaaagcagaagaaaaagaaccttggtggttctcaggggtttacgggccatgttcatataaggcaagattcgacttttgggatgagatggctggccttagtgtgatttgtggggaatcttggtgtatagggggcgatttcaatgtagttataagagtacaagaaaagttgaacagtaattcttgtacgagaagtatgaagatctttgatgaattagtgaatgagtgagattgattgaccctaaacttaacaatggaagatttacgtggtcaaactttcgagaaaatccaatttgtagctgattagacagattcctgtttactaacaagtggaacatcgcctatctttacgccagacaggaaatgacagtaagagtagtttcagatcacagtccagtattacttgactcagatccaccaaattggggcccctgcccatttagatttgacaaccaatagatggaatacaagtcttttcctaagctctttagacaatggtggaaagagacatcggtgtcaggttggccaggaaccaaaatcatgagcaaactaaagaagacataagagaagataaaggtgtggagaaaagctactcttggagataacagtaagagcaaaattgctctagaaagaaggttagaatacctagatagaatagaaggaagcaatgattggaatgaaactctgaacgaagagagaagggagatcaagaaggaatggaaaaagttagcatttgaagaagaaaggaatgtgtggctgaagtctaaatgcaagtgggctaaggagggagatgcaaataccagattttttcataatttgttgaatgcaaggaaggccagaaacacaatatccagaattgagaaagaagacagaactgtgattgaaaaagaagatgaaatagtcgaagaattgattggctattataccaagctctacacatctgaaagaagagaggggctggatgtggaaggaatcgattggagacaaatacctattgaatcagctagagaattagagcaaccattcgacgagggtgaagtaaaaagagctgtttttgaatgtgaagataataaagtaccgggacccgatggatttagtctagcagtcttccaaaataactgggatataatgaaagatgacctattgtatgtcttcaaagaatttgaagatgaa

SEQ ID NO: 37867 - DNA, 3021 bp, Cannabis sativa
tacttcagagatcctctgattggtgaggcggcggcgtgtcgtcttgctttggactcggctagactcaagaaccacaactatgtcttggtggggagtgattttgaaatagttatcaaaacacttaaaggactccactctagttggaatattgataattatgtctctttatgtaatcaactctctaaaaaaaatttatcttgtaatttttagtttatttctcgttgttgtaattttgctgcccataatgtggttaattaggcgttcgcccagattatctcaagttttgtggagcccttttcaatacatgatactatcctttgtaatgaccgtgaggtctaatttttctatttatctaacgctttatttctttatttcaaaaaaaaaaaaagaaaaaaaaaaaaagaaaaggcgtaggcccatttggaacatggtgtaggcccatgggcatgcgaatactggagtggaggaggagaggatttatgtcggagcagtggcatggcatggcagctataaatcagcttcaaattttgcatatatttaagaatattaatataaaatgtacctactacaaaccccaccccatccctcccctatacccaccattaattgctcttttataatattaattgtcgtgataataataataatcatgtaatgaccatttacttacaaacataaatatgctaatatcatcatattcccaatttttcatccgaaatttcaacttctcaatatcaatctctgcaaactcatactactaagatattaatagtgttcgaattaatttcaagtttcaatcttatttaactatatatacttatcattcacaaagttatatttctgtataaattaatagatgagagtaattagagagtagctagcacaattcttcttttgaatatatttactctttcaatcaaccagccaccacaatatataatagtatgagatttgagaattatgggattgtaacttaagactaatttctgagagaaaatgtgtaatattacttagtagactatatctaataatatctacaatcacaacggtaacggtttgatatggtgaaaggtttagttcccccacaataccatatacaaaatataaaattacttctcttgatatgaaactatatacatcttaatatatccctcaccatcatcatactttcatatttctcaatcagctagtagtagtctttgttgagtttttaatgttgtaatagtactattataataaatgatctcaataataattatattagtaaatataacataaattatcccgagaattaatctcaatagaattgatacaatgtgaaactcagcccacttagccatatattatgaacaacaacattagaagttttaggaatctttacaaagatgcaagcaaaaaagtcttagctagcttacttatagccaccatgactaaattttgtttcttggcttataaagaattgctaaaagatatttattatagtctagtactttttttagtatcataattaaatgttgggttttatataacttaaaaaaaataacttttagtgttttagtgaatatccataataataataataataatcttatgtataatgtataatgtgggtatgatattatagatagatacaatttacaatgtgattcaaccaaactaataaatggttaacagcactgatttgataatgagttaataataaaaatagggaaagcaagtgcataggggttggaacttggaatccatatagcttagctagttagacaattggttgaagcaagaagaagaacctttcacagaatgtacggatcaaagattaattgctttgttagagagttgggttgggtttgtgggttttgtatagcttaattagtagttccacgcattgaccaaaaacttattggttcttacattccccaaaacattactcaatattgcctcaaaccaagtgatccaaaacacctaataagcacttcaattcactacatcacatacatcactttttcctttacttgtgaattagtttaattagtagtacaaaacaaagccctttttttattaattaatttcaacactacatgaatcacgtgtttattaagtctgaatcttctgaaagcctcgccaccccaaatcaaatcttaacaattgttaagataagatttgatttacaattgtggatacctcaaatttttcacttgaccccctccacctcaaatcaattaacaattaattgtagggtaaatattattttggactttgtgtttttgatttgttaaataacaaaatagatcctgtattttttaaaatagtaataataggatccggaactcaatttttgacaattttatttttttaataaaagcaacttgaagacaatttataacacaaatagatactgaaaatgtaatcaattttaccaaaatatctctagatcggattattattaagttttattttgattaaaaaataattcagagtcctatttgtatcattttgaaaaatacaaggtcgaaaatgtcatttaataaaatagagagtccaattgataacttttgcaaaatacaagatccaaaatagtatttactcttaataataaatataagatttgattttacaactgtggataatcttggcttgtgcttccaattgtttaatttttagaaaaatcaaatcttatctacaattatttaattagtagtacctgccacctcaattgttaaattgtgaatataaaattatcctatataaggctgttgatcagattcaattcgcacttttttgataaaacaacattcaattctcagtaagtgtggattttatattttggatccaatccaattcactcatcaatttaaatccaatcttcaataatgcagattagatcgattattttggatcaattactttttcttaatgataaattatttaatttttcattaaaatataaaaaaaaataaaagaaaagactattattttttttttttatctccaataatcatctcaatatatctccatttgtgt

SEQ ID NO: 37868 - DNA, 3374 bp, Cannabis sativa
gcttcttgcatcggatacattatgcaacagtgccctcacaccagaaaaattgtgaatttagtattctagttctacgaagaaaaacttctaatagcacaaaaggcattttaatgaacgatttgatggtaccatattgaatgataacacattaaaatacaaaatttggtgacactaatgcgagaaattaaacaagattgcatgcaacactgttgatcagcaataaaacttgcaaaccatatgcaaaatttcaatttctctttaacaaaaaactcaggtaaaccggccttagctttagtaaacaaggtagctcaagtctattcatagcaaactagaaaaacaaataataaaatctccacacaggaaagcatttttgccaaaactaagttggctttctcatgttgcgcccagcacgaataacttcatccaccaacagcaattgagatgcaattacaggcctgcaaacgaagaagtttcagattatatgtaagaaatacaaatatatatagggtggatgggttattatcttctacataataaaacataaaaatgtagttttctccggaagaaaattgagaaaaggtgctacaaattgtaatttctaagaaaagaagttaacacgtacgctgagtttataatttggcgcttcactgagtagttatcgaagataccctccatctgtgggtcaataggttctcctgtgtgctggttcaatcccacaacatttcctctatcatgctctccctgaaaaaaccacattgcaaagttcggccaagactgcatttcttttttttcttttttaatttcaagaaaagttttaaatgcataccttaagtgatatgattgtatcttgtgtgtcaaggccagagttttcagcaagtatcttgggtatcacaaggagggcatcagcaaaagcttcaacaccgagttgagctcgctgttccaagtgcataaatcaataataaatcaataaatgtgaagataaataaataatgtttatggtcttctttaatcaagaaagtgtagtgctaattaccccttgaacagttttcttcacttcattaacgagatattgtctagctgcaacttcaaatgctccagccccctgaagtaaaatcaactcaaggtttaaatctaagatagaaaagtaaaaatccaattgtggagacaagatatatttcctggttttatgtaggatttttaacaactaatattatagtcagttgcaagtaagactaaaaatcttaaatctaaagctaatcttaaatttgcaaacagaaattaataaataaataataaaaactatatgtctgcagtgaaaatatcatacaatttcaattgcttcaatataacgaacataattgcaatgcagtcttgcatgcaagcatatcaaagaacttttaaactgaagaatacgtactaatacaacagattcatcttcaatagtatttttaacagccctcaatccatcgcggacagcatccttgatctgggcaattgtatggtcattaggccctgcacaaaggaaatcacaatacccaataagcaatatggaactcccagttgtctataagaggaaaaagaaaaaccatgttggcagttctatcacgatcatcaaaataagcaaatgaaaaaatacagctatttatcaaaaataaaagcaacagttgcagtacctttgattaagattgtacaagaatgagggttctttacattttccacaaatgtatacttatcttccccaaggacgtgctcatagaccagaccagcccaaccaagacactcaggagtaagatcatccacagaatttacagcctctcccccacaagccaaaaccaatcgttccatatttcttctcttcgctcttcgcagggcaacaatctaaaaaattcatgcactagcaagttatgatatgtaattttgaatttcaacattttataaacttaaggcctgttcggtaactttttcgttttttgttttttctagcttagcttaccaaaattttgtagtttgttcttagtttttgattaattaatcagaaaattgattttttaattgttaccgaaaaatactgtaattacctcacttttcacttttgttttcccatcaatagtcacagagattgattttaaaaaaaaaaaaaattaaattctataggtaggactcatcattgatgtggcaagtgaagaaaaataaagcacaaaagttaactaggctgataaaaagttaacaaatacaacttaccccttcttttgcgagaaggtccaatgatggtggatcgatacctttttgattgatgatgacaaagttactgtcactgtcagaacaaacctgtaatgaagaccattacaagttagtggtacaacaaaatcagtcatgcagtgtaaattataaccagtagttaagctatcataaccttatttttcagctcaattattcttttaactctttcatcaactgatcgcctttcagcagtaaccattgcttctctctgatcagaattggagtaaaagaaacctgcatttatttcactacagagaaaaccattacctcagcaatgtttagaaaataaaggcccaagaaaaaacaaacaaacagaccaattattgaccaaccaaaataacaatttattgtgtagattagcattacaaggaagtaaacttcacaaatatgcatttagcagtttattttcaatcccttacaattggaaatgaattaagatatcctatcttttcacatagtacacaccaagtgtttgtgagcatccaggtgtcatcattattttcatgtgtgtgcatagagagaaatggtaaaactgaaaagaagaaattcttttattatatccaaatgaggaacataccgtttcaatcaaagagagatagtttaaaatatctacctcttttcatactccaaagaaacattgcatgtcaaaatgtaacaattctctgctcgtcttttcatatcaggatgcctggaaccgtgatcaaggacaagaccttcaacctaagaaacaaataagccagatattagtaatactatgatgtaaaactgtacaatacaaacagttgtactgctagaaatagccacaaaaaagttcataaaaagaccagaaaggaattatatttgttcaaggaaagagcagggtttacataccaaacgtgtgtccacatcaaatttgtggcgcatatgcataatctctaccataaacaaatcgattggttcttcaggcttgcgaatgcaaagaagctgcaaattttgtgttatgaatattagtccttaagtggtaaaggatcaaccacaatcttcaaaaagcagaagcttttgacatgcataattttgaatgtatttgattctagacttaccgaatcaacaactat

SEQ ID NO: 37869 - DNA, 2581 bp, Cannabis sativa
gcgtttcttgagcttgaaaaaaataggataaggcaagagtttcatcattatgaaaattaacttcttggccacaagtagaactctcaatggaaatggtcttgtttggtgtttcacaactagcaaaattaatattatttttaaaatcagggagcccacccggcccataggtaatacacggcctctgagcctttagcaaaggcaaaggtgatttttggttctccatagtgggctcggctccattaagagctaaaatggactcattgcacctattaataggcccaccagaaaaagctccatctctaaaatgatccacttttgaacccgtcccaatagaagagaaagccggcccaatagctccctttagaaagtctttctctttcccactcatcttccttaggtcaactgattttgaattaataaaaggcaacatttcagtcgactttccatcacgcagagtacgaccagaagccatattacccgtaatggcaaattctggcatgcacgaggcagagccagctttgggaacccacatcttgtatcgagccttcccctcgcccagcgagctccgacccgccgccatcactgtgcgactcgctaaccgagaaacaggggtccgtcgaaccgctcccttcgcaccagagaccaaggccaacggtcgacttcccccacgaaccgaaccagaagccacctgtgccgacgacgacgaagctggattgaaggactttgcacccgaaaagacatccaggtaagaagaatccatagacagccatggcccaaacaaagggaaaggaacccccttcaggcttgaaaccgtaactggagaagcaaggtgacaacctcttctttgatgacctaacttgccacagttataacaaaagatccccaatctctcatacttgaattgaacccacctttggatgcccgattccagatcaaaataacaacctgaaaacaagggtaggttaacattgaggttaatcaaaactctgagagacttgctccatagggccggattgccttcgtctaaatcgaccttaatcactgaaccggctttagtccccaagattttaccattatcaatggagaaatagtctctcgggagattaaaaatgtgtaaccaaattctaacattttcaaacatgtcaaaatgttccttcttaggtgcccaagctttcaagataaaagtgtatccacgtatacaccaaggaccacgttcaagtgcccatgagcgattttcagtgcttaaaaaacctaactcaaaacagttatggttgttagcaccatcattcaaagctacaacagtcacattaaacttccaaaccttttccacaaagtcaatgatagtggcctcattaattaccattggggccacaactttcccaagaagacaaaaggtggataaagcttgctgagaagaggcacacggactgatcttgactgaagcttcctcaaaggaataacaccttccattagtagaatagttggtggcattaactaaagccattgaaagcaaacaatgaaagacaagccaccaaacaaccaacctcaccaactccctcacacccttaaccaacccctaccccacaaaccagggataccccacaaccacgacaacaaaaggaaacaaaagaaaaataaaccaaagaaaagggcagagaacctaagacccagagcagaataagacacaaacacacaataccaagggaagtcaacgacacaaccaaaccccaaagacacttacacaaccaccaactctgaaaagaaataggaagaaaagaaagaagggataaggaagatagctatgagagagtagtagatgaccattctctctattaacgtgttgggttgctcatgggaagtttgtaaaaaaaaaaaaaagaaaaagaaaaaaaaaataactagatcacactatgtataattttattttctctgttctttttagcttttctttacttttatttttttcattaaaaattaaattttttattatttcattttttacatatgctttcataaatgtatatgcaatatatatgcgttaaaaaagagggttaactcaaccaaaccaataaatgagttaacaattaaacaccactccaactccaactccaaccgatttaacatcttaatttcaatcacaaataaacaccactccaactccaagtgcacttctcctcacattatttcttattttccttttgggaacattttaaagtcacataattttatatcattagttgacacttctaaaaataaaaaagttaagataagagaggctctttcaaaacaaaaggaaaagaagaaagaaaagagacttctagtaaaatatacattttatttttttaaaaatgtgtatttatatacattttactaaaatatgaattttagtaattgattgggatttttgttgtattttttacttttacgattttaattgtttcatacaaatttatattaggaatagttccatagttttgtgtgcaaactaaatgcatatataatatagggataggatttggtcccgttatgccaaaataaggaatacaatccctgattgtactgtagccgttggattgaattg

SEQ ID NO: 37870 - DNA, 3898 bp, Cannabis sativa
  modified_base (3229)..(3229): a, c, t, g, unknown or other
ggtgtaaggacccaatggaggcttgaagcgaggatgttacaaattatatttaatattgatatgcataaaatctatgtgtatatatgaaaattaacattaaaatttactctttttttcttgaattagattgatccagtccaatccaatacatactggacctaaaatattggatggatttgatccaatcctaaaaatgatatatctaaaatattaaacccaaattaaactaataaatatatatgaaatacatccaatggatagaaccgatctaatccaacattcaatggatgttggatcgattggatggctgaaattaattggatcgaattggatggtaaaatttaacatccaatatataattagatcggacatgaataggcctaaaaatattaaatgtggcccaatgaacacccctagtcatgagtgcattaggaaggtagtaggctagtctagtctggcaaagccttagccaaatgatcttggaactcactcaggtgtgtcctatccggagctaaatgcgacggttgcataacttctgacaccaaattagatattgtcccctacatcagaccgtgataatgcgtgtacgtgctctgcagttcctttttgtccatcggttggtccaaacaccaattttggaaggtgaaacctttgggcaacacgtgtcgttaaccttacaagttggatggcatcagccgggaaccacacgatgaggaggttccctatctaacaacggtcagatcgcgatgttgtaaatgccagctattgtgttgtgctgagtatgacatcctaggtgggtgaagggtatgccctcacccacacgtgtctataaatacttctatttttcatgtgcaaagaaaaaatatttttttatacttacagaacctttgctaaaattcctactaagctttcttctcatccaagagaaacgagagagttaatattcttactgttaacacttgaaatattcaaacactcgccagcaaggctaatacaatggactcgcagactagggattattaacgcccgaactacgtaaaaattacttgcctattatttaacattttatatctttcttaaactctgattaagcaattttcaaaaatctccgtaaatattttggtgctttcattgagagctaaggaaagtttactagtcgttctatcaatttagccatggtgaatacccaaaagaatgtaagcaagaaaattccattggaaactgttatggaggaagcagactccctcacctctggcccctagaaagcttgaaaagtagtgtgaagaaaagaaaaaagaccaaagatctcaaaggaaaagactcagtaaacaaaacaaagagagggaagatcaactataaactcaaaacagaaaattaagaaccaaagaaaactaaaataaaagagcacctaaccctaataaaagcaaactcaaacttttagacaataattaatatcacagagtaatattgaaaaggaaagacaaaaaccaccacgatcagcaagaacaaggctagatcgaagactagaagaaaatgaaacccaacttcgctcgaaggttccagagagaaaaccctcttttttttttcaaatacataaaccattctttcaaaaaaaaaaaaaatacataaactaaatattaaaataaaatctttcaattcgctttctctgtaaagatagtaattcatgtgaaaaattaaaatttctaatgtaagaatcaaaaaaataaaaaaggaggataatgaatttttttgttgtcacttttaaaaggacaatttgggttaccatgcttaaatgtaaagcatggacctaaattaatccacccattaaacacataacaaaaatatattattattccacctaaactcaaaaatacccttctcatttcaacttctcccattctctctcctcttcctttcattcactttctctctcccatataaggccatctaaactcactacaatgcattgctcaccaccgcgctccgctcaccactgtgcacttctcatcctcttgctctctatttgggcgattcccaaactatatgtatattgtttatttttcaatagatctacacatttttgtttgtttttattgactttttgtcctaaaattaaattttgaatattatgtgtttttttcttatggttttttttttagttttttgcgatattttataatatttagcaatgtatttgtaatgataaaccgaatatgaggttagtgatgattagtgatgtttcgtgatatttgactataataataaatatttgcatacttagtgatgtttagcaatgtatttgcgacataagataaaaatacaaagcacattgctaattattgtaaacaattgagtgcaatttagcgatgtgttttacaatttttagtcttgtatcacaaatacatcacaaaaagcattgctaaatatcgctaaatacgcaaacatttattattttagtcaaactttacaaaatattactaaacttcatccctaacctcaaatttggtctatcattgcaaatacatcgctagatatcgcaaaaaattagaaaaccatttaaaaacgtaaaaaaaaaaaatcaaaagtcaattttttggctaaaaatcaaaaaaatacaaacacaatgtgtagactattgagaataaactatatacataataatatttttgagtctggcgatgggtgctcttgtagagatgggctgacttgagtgtgtgtgagactttttagacaggtagagaaagacgagaaagagagaggaaaacattgagatgagttcgattttattatttcacgggaataattggaactaattaaacattgagagagagggacatattttctttgatgttttgtgtggtggtatacttagtgtaaccatgcttcacatttaagcatggtaatccaaattttacatttaaaagtttaaaagtcaggccacattaaacaaacaattcaaaattagatgggtgttaagttttggtaagttggtcctcaaactttattttttaataaattagtccctaaactatagaaattttaacaagctagccctcaaactttatttttggtaaattagttcccaaacttttattttctcggatatataaaatcctcactcttaaatattggtattttatttatttagttttgtattaattttaaatatttatatattgatgtaccttatcaaattaaaatacatattttttatttatatgtatttttntttttttttgaacaagaagaagattctttattcaaacaggcaagaacaaccaacgatttcaaaacagcagcagtccgagaccctgcacattaagaccaactggaaattacattaagaatgtagctatctagcttcccttttctcccattacaacccattaaacatctagcttttacacaagatttaatctctttactcaaggtacttgctgtcttacaactcggctcaaaaatacaattatttctgtttgtccaaactgtgtaaatggttgccaaaataactgtgttgataattctttcctgcatattgttggctgccttggagaaccacctactgaagtcgactagccagtcaaaatggccacaccatttggtaatctcacaaatcacgtttcgggtaaagtagcagtgaacaaacaggtgctggtgcgactcattttccctgcagcagaccgagcataagggagaagagattgacagaaaccggctaagattgtctctggttagcagctggttgttcacaatttgccatcctatgaatctagtatttttttttaaacatgtcgaaataaaagggaaaatatatatcttttatttatatattttttttaaaaatcaaatcaaaacatattttgaacattacaaaactatatatacagtagaacctcta

SEQ ID NO: 37871 - DNA, 5941 bp, Cannabis sativa
  modified_base (158)..(159): a, c, t, g, unknown or other
  modified_base (4893)..(4907): a, c, t, g, unknown or other
  modified_base (5895)..(5900): a, c, t, g, unknown or other
aagaagaaatacttgagtagtgctatgaagatgaagataaaaactcatatggtaatgaagaactcaattgaagatgaagatgaagatgatgagaggttatgggagtccaaccaaatctatatttttaatgataaaaaaaaattaatattaattgtatnnattatattaattattatatcaattttaaaaaaaagctattttgctaattaaaatatttgaaaagtcattttcctaataaaagttttcacaaagcctattttgccaattcactccaaattggagggtgattatattagctgattcattttacttcaatttccaaaaattacaaatgacaataaatatgaattttattatagataacataatataatttggtgtataaattataaatgtgtagattttgtaatcaatgtgaggtggagacattaatagtgaattgggaatattttgtttgttttataattggaaaatattgaaataaatgggcagttactaaaggctaatgaaatattgaattttttgttttttagttgaataggaagatacaaatttaaatggtttttataataaatcgaatgaatttaatatttaggagatttgccaacccatctatttaaataataaataaggaattattatgtcaaaaaaccgaattggattatgatttattaattaatattaatttagtttgtattgactataaataagatttttactaaaatcaatatctttatatatttaaagtgcctatttaacaaaaattcttggtttaacggcaattcttggtttaacgattattttaacgaatttttttttttattttgaaaagttaacgtgaagttaacggaacatcaaaacaaaatctatttctttagccctaaccgatttactaaaattatgggatctagagaaaaatcaaccgaactgttaacttaaaggaaaacaaaatctatttttttagccctaaccgattttactaaaattatgggatccagagaaaaattagagtttaattaatcaatgccaacgattaagaagcttctccttcgcaacaattttgagttaatcagtgcgggaacaaagttaagaaaataaagggcgaggactctccatctgaacatgaacacgatgatgcacagggcaagaggtctggattctatttgatagcttattacatagttaattgtctttaattaagaagtttctttctgtttgaggcttacattcttctccaatattagtttaacagtgagagcaagaaattagatacctcattgaagaagatggccaagaaacataatatggatgtgaaaacatgccaacagaaaacgtactcaattaagaagaaatcggatgcaacagttggagaatggccaaaaagaaggaggtgtgaaaagaaatatacaacaaagagtgcgtgatatatcttctttgctttctgtcttttttctgtaaaaacattttttctttctgacactgtttacgaaacagagaatgtattatgagccgaagatggagaaacgaattgtacgcaccagccctttgggtaaagacaaatattataaaagattataataggtattggtggtttcagcgtgaagagagaataatatctgtggagagttctgattccaagtagtggggatactacagtagcaaggatgaggtattaagggtattaaaatatgttgtgatttgtttatgtatttatgatccttcctgcacttgatatttttggaacagcttgatgcattgatgcatgtgtttgctaaattgtaagggcgagagagagtgtgtgctaaaaattgaaggatttgatgaggctcttaaggcgcgatgacccacaaaatggagatgtgtttaagcaatacctataatcagagaagagaagaaaaagtatctccggctaaaaaattgacaaaatggagtttattctgttcaatcaccgtggcaaaagcagttggaatggttgttgcactgtgtaaatttcaacttcttcttataataataataataattctcatggggcggctgtttcgattgttgtgctacagccggcgggagccatacaacaaccaccaccaccgcaacaacaacctcctctgcggtctcaaacatccagtacacaatctcttcctattgctactactactactactacttcctcctccaatctttgctcaatgatgtctactaaataatatattgttatttatttattgtacaatttaaagtaatgatttcttgaaaaatttagttcattttccattagttcacatgtaatacatacacagtagtttaagcattacacgcaagcctattttcacctggtagtgatatatatatatatatatgttatataattttttgcaagcttatgatatattcatcaacactaaaaacacacacatatatattatatatatgtatataaattgcatatttcagagtttttttttttccttttgcttccctgttattttacttttgaaattatgttagtagtgtgtaataatgcttattaatttctacaaagtttgggttttgagttagggaggacaggaaaattaatagggttatcagttggtcctattcccatgtggccttatttggaatagagcttctttgaaatcggtattgccaatttgggagtcagatgcattgtggtattgggatgaaatgatgtttgtattgggatgatacaaaaatagttagtttcgcaattttttattttaaattttattgaattgtcgattatttaaactcataataatttttttctcttttttttgttaattttttttatgaagctactgcatattgaagaaattctcgtcttttcttccttctctagcattgaatataagcttttaactaatatataactaaatatatgtgcattgcacgtaacttcaaactagtatatatatatataaaggaaagtttaaagagagtgaagtgactaatttaagagctttcttctattttctttattttatcatttttttcacaattatatcaatttttgttattattttattatttaaatcacttaattaataataataatgtaaaacattcaaaaacaaacttttaacatgtaataatttaataataatcactttctaactctttgcattctatacaaattctttgtaaaaaatcttaattagaaaagttactaggaatattaaaaaatttaatttggttatttaaaaagacaattcaattatagattttgtaacttttcatctttcaatttttttttatctaaacatctctcaacctttcaaaagtctctactctatataaatattattcactctccatttaatttcccagcacctcactctctcaatcatttttcatcctctcattttttttaaaaaaaaaaaaaaaaaacaaaacaagttgctgtaacaatggcattgcacaatgaaaaaaaggatcaagtatcttctccttcatcttatataattcatattaatatttattttgaacaaagaatatatcttatataatttaatttctcacactgtttaatttcaagatatttatatattttttttgaagggactatgacaaagtagccccaaattatgaaaatatatttatatatttatataaaattgtgatagttaggaacgaaaacaggtgaccatgcaaactaaagaccaacaaagatggtgttaatcgacgatgaacgatgctgttatgatagattttgggaagcgggcaatgaaaaataattttagagagtaacattgactagcaaacgacaaccaacgactacaaacaatgaacagtgatgtgattggtagatttaaattttctaattttagttttattttttttcttttcctttttatgttttttattcatttatttttccagtttaatttatttttattaactatttacttacttcaattttattattaataattaaaaataaaagtgatatagtatatgttccttagatctaatatcctttaatataaagtgcaaaattaacggtttaccatcattgaattgtttatttaattttttttttttgtcattgttaccaataaaataatattttcgtattacctaattataagaatatgaaaaactacaaattgattacaaaaagtagttttaattatataactaaaattttaagtttctatattgattattaattgataatgataatatactttatacgaatgacaaaggattatactttaactacaaattaattgcaaaggtcataagggcttcattatactacaactgaagtaacaactaacaagtaatcaagtatgttcgataaaatttttatttcataaacaatttaactgtttaattgttataatatgtatctactaacaaatttactattttttaattcattttttaaatatcatataactacactataaatattatttttttctttctaattttatactactttttttctcttcatttttatactttcactataaatgtttagattgttcatctacaacacatatacttactacttttagtattaatttactatatgtatttttttttctctagatggttcatttataatttacatgtatactgatttgatttatatcaacttatccgtacattgatttgatttactatgtcaactatatgtgttatatagttgttagtagatggttcaataaattttgcaaaatattttatatgtttaaatttatagggaaatttttaaaaatactggaatttggattgatttttacaaaaatactgtgtttttataaaacaccagtaaaacacaaagtagaacagctcaaaataacagtagaacaccagtaaaataccagtagaacacagtgaaaacagtatactgcagtatgaaacttnnnnnnnnnnnnnnnaaaaaagtaaaaaataccacctgacagtatttttataaaaaaatagcaaaagttagtataccatgtaaatttcccaatttatattgttcttttgtaaaataaaaaaaattacaaataaaaataaattagtagtaaccacagagcctcttaatttgaaataattttatatttacatttgttcaaaagcaaaactcaatttgtttgacaaatgatattgtaaatatttatatttattaattataattaaaaatattaaaattatttttatacaaactgtaaattatttttattgaaaaaattcctaaaaaattgtagtatatcacgattacaatatcacaccaacaataaatatttatataacctcacaatgtaattattttagattaatttacaacctaaatgtcttattatattaataattaatttgacaatataaatttctaattcattaaatgtattgataacataatgtctcttcaaataataatgaagaaattaactttgatcataagttattattttttttatcaatgatgtaaaggttataattaatttattttttgactaaataattttcacaaatttctattaattaattatatatagtttgttttctaaatttatgattgaaaaataaatcataaaaataaacaattttattatgttaaatatcaattagttttttaaaaagaattatatgaccgcacgatgtgcggttttgttttctagttagatacataaaataattttagctttgatgtataaattataaatatggagattcagtaatcaatgggagatgggatattaaatatgtattaaaaagtttgatttattccattcttatgaagattttgaaataaatgggtaattaaagtttaagggtgattctataatgcaccctcttaaaagggatatattgatgcaccccctacttatttcggcatctaacaaaaattttactctaattttttttcatattcatgtnnnnnntatctatttaagatatcctacaaaattttgagaaattcaga

SEQ ID NO: 37872 - DNA, 2602 bp, Cannabis sativa
tttcttctttaataattttattactatggatacttatttgttcatttttaatcacataaataattatacaaagtgttttggaatgttccgggtaatcgatgttaattattgattttgttgttatatgaataaaaattttgaaggtatagaagtaggcaaagataagacagtgaaattgtacgtatgcagatataaatatatattgggagagaacatcaaaaacgtagatgtacgctcagtagtctcaagtgtgaactgtgagggccaaaagcgtttgtcatgtcatgggataacaatgtccacgtggtgcacgcagacattttattattattttttattttttttagttaaagcgtttatatatcgcttacattgcacgacttacaattcaaactcaggaccccacacacaccctcccaatcccaatcccctctaaagttggtgcatgcagtgatttataattatattttgggatcttgtgataatatattcacagcaccaaactaaaaggaagtgtaaaatgatgatatacacagattgtttggcagctctggaagaaaagtaacagagaaaagaggctaataattacttgggctagcaggaaaactataaatagttctcgatcgtgtgaatatgaaacatatttttaagtgatgatgattccaaataattcagggcaatatatatagtaatttcttttcctggtatatatatttatatagcttatataggtttcggatgtaaacttaattaggccaagttcggtcatgttaaaagaaattaatatatatataaatcttaatgtggttttgcttatagataatattattttttggataactaacacgcggtacaaattgctagctttaggtagaattttacctgttgtagcccgttttggtaaccagatatgatagcgccaaaatatgtcacatttaataatattatttttaaagaatataagtgcaatgttaatctttttgtattacataatctatatatttatatacattaaacagtgaggtggaattttatatgttttttttctattatatatttactaatttttaaagtttttacatttaagaataaaaataatgtatgaaagtttaatataatatgatgtttgtttttgaaaggaatactatatagtgtagggaccattttgagtgctatatttgtatgtctaagtaaatattttttaagctagtgtttaagtctagcttagtggtgatggaggattgaaaaaagagagttcgtggtttaaaccccaaacctttaagctattaattattgtaatactattatgctacactaaaaaaaaagtaaaatatttctttatttacttttatttgttacataattagtacgtgttaaatgatttttttttaatttattcaatcttaactaattacttatattattattttatttttttatcaaaatttttattttattaaaagtgtaaaatattacaaattacaaaatgtgtataaaatattcgttattaatactaaataattaattaagtataaaaatattatgaaaaattattgaactacatttttaaatttttttaaaattttaaaattaaataaatatatattatatattttttaaaaaataaaaaatatttattagttatttcttatttgcagctatttttttttttgggaaattttcatgagccacctaaatttagaaattatttacaaaaataactttgtttttgtgagttaaagggatttgtacatatcatacctttttttctatcttaatatcaaatatactttactcaatctactaagctatttctttgccttatatacatatttaataacgtttttatttatttatttatttattttttcagatgtagtatttgaaattttcttttttcttctttttctcactctctttttattttatattttcttttaggcttagcctatgaatctcataatctcaacagtaactaaaaggtagcctttttacgcagaaaagtgaatatttattttttataaaggttacgcattgattatatattatcggcgtcataagcaagtaattgttaaattaatgagctatggggtaagttccctataagctatcttttaataatttatcaaagttactctataaaatagaatggtttaaaatattacattatagcttttagatctaaaataataaaacattttctaataattttggaattagttggtataataaactttgtttaagtcatttagttactctttggatattaagcctaaaaaaatacactcgttaactaaatcaaaattagaaactaaaaggatgtttttatttaatttttttaatgagaaaaaaatatatgttttctacatattaaaatgatcattttaaagagtgggttgcaattgtatttttgagctaaaataattagggtgtaattggaatttttttttttaaaaaaaaaactatgaaagaaataaatatatctattttaaagataaagacacatgttttagtttaaaaaaaaaagtaaatttaaataaataaagtgcaaggagtgcacgtgtgtttttttttttttattttcaaatagagaagtttgaat

SEQ ID NO: 37873 - DNA, 4420 bp, Cannabis sativa
  modified_base (4369)..(4374): a, c, t, g, unknown or other
atacataattatctagttagggttttgctaatccatttcttaatttcgggtattacaacctgcttcatggatgtgctgcaattcagatattgctctatcttccacaggatgtttgctttcagtagtggtgagagatgaattcggtataatacggacaattacaaccttgaaagatcttacaaccaatcctaaacttggtgaagcaagagcggtatgcttggcggctgagactgcggtcaaggctggtttgtgtaaagtgatgtttcagactgacaatctagtggtggttaaggcttttgaatcccacgaggagtgctgcgtggacttcagactgcagacggcgaaagttcagtttctgaattggtgctcaaagctcagcgactggaagattttccatatccctcgtaagtgtaacttcatggctcacaatatagcaaaatgggcgatcgcctcgaatacggaagggcagatcaatccccagacgctggaggcaactgtgctggatgacttagtggaatgggatcctggtgcgctaaatgtgtggaggagttagttagtccaatttaactctgttgtttagttctcctgactttttaaagtatgttgtttatatggttttatgtttctatgtttgtattgcttgtaagactatttggcgtcgttatatgctaattaatgaatgagtgccttggcactcccccctttatatatataaaaaaagacaatattatatatgttcaagtttcctttacctttctccttttttgaacaaatttcagtcacgtagctgtctttctggttcaaattattagcaaaaatgcttctcagttagatgaaatttccatctaaaactgatgtgttcgttttgattttatatataactaggaaacaaaaatcgcgcgtttggaggttttaaaaaatcttaaattatatatatacattattaaaaaaaagtttacattaatgttaaattagtaaaacactaattaattattggtcaaaaaaaatttatttacaatttacaaataaaaaactataaaaatttttaaatgtgaaatttttacaaagttagatcacaagaaaaattgaagtttctaaaaaaataataaaaaagcattgaaatatatgatctatcttatcattcttagtcttaaatatataattttttttaattattaataattaattcattaaaatgttttttgagaaaagttgttgaggtgtattaatttttcttaaaaattaatagtcactatttttcaaaatgaaattaatagtcactaataatacacataatttttttctctatcaattaatataaatatatatatatatatatatatcaagtaaaacatatttgaactcttaataataagttataattatattactatcaattattacttaattttttaacaatgaacatgcaactacttaattaattagtttttaaataaattaattaattaacattattaataatttataattaaaaattaaaattaccaaaaaaatatagagcttagaggaaaaaagacataccactacctctttaattattatttgttttttgttttgtgggagaattattatcattgttgcatttatttttaaataaacatgataagttgaatgatcgtgtaacttcactttttatttaataaaatattattattattattatttatcaaaaaatatattattattattttaagataaatcaattatttacatgttatttataatgtgaaattaaatattaaaaatatcataaattatagaaagtaagatgttagaaaaataaaatatcatctcacctctctatattatcattatttttttcacttttgagagtattttttatttttgataatccttttgaagatgaattattcattgattattaatttattttataactatttatgtgttaattataaaattaaaaagtatattaatcatatgattgatccaattatatttattatttattgataattatttagggaagtgagttataagaaaaaaaaaagtcactctattaatatactactaattaataaatgttttttttttaaaaaaaaatataacaaaaaagtaaaaatagtttgaaaaagtattgagatgtcacatactctcttatgtttaatttaaaaattaataatacatattaaaagtaaaataaaataattaattaaataaataataagagttaactaaaatatttagggacaaaaaaaggtgattagttttttaaaagaaaaaaataattggaaaattttataatgcaccctcttaaaagggatacatcgatacatctctatctgttttatagttgcccccaagtgaccgagcaaacttatgactcttggtcacttgtattacacaagttcaatttttttcagtccagctactaggttcaaggagaccctttgtacgaattttttatggtaattacataacttgctatagaaaagaagaaatagaaactattagaatgataattaatatcttttttcatttattggtcttgatgtgttgttaccgtagtaatatatatttattgaattataaaagctattacatgatctaattgatctttagctaattaaaacataaaaaattgaacggtatagctcgtgcaagagacaatgctcaagagtaatgatttttgaaccgactgtagatggtcatccgacttgagtatcaagttgttttttccaaacctttaagcgaagtccgctcagaaggccacctacttaagagtagatgtttgagcattgtgtacttcataggggtcattaaaccttgtacactaattggtagtatttcctcaaatggtccccattctaatgtcgtagtaccagaaccagttccatgttttcattatactgaccaagtttatttgctctagaatctgtgacttctgttacttgatatggtccatctcagttaggtccgagcacgccaactgcgctattttttatgtttaagaacactcttctaaggaccatatctcctgtgaagaactttcttgtcctcactgcttgttgaagtatcgagctaccttttgttgatgagccactagctttaggtttgatgatgagggtgaagatggttgtgttgagtaagaagatgatttgaagagcttagcaagtgatgatgaagaggatggaattaggagacattctacactagagtataatccactctctgaaaagaagtttgacaagggcatgatttttgctaatgtggtagtttttggaaaaacccttagggattactttcttgtggaaaataaggatttaaattacattagaaatgaccaaagaatcgttagatctatgtgtagaggagaggatgtaaatggttaatatatgcatctagggttagtttagataagacaatattcaaggtcaatgactcaatacgtaccaacaagtatgaacacaattgtgcaattgtgttgaacaatagacttgcaaattcctcgtttttggccaaacactttctagaaacctttaggttgaatcccaacctacattataccatgtttaaagagatattttcaaaaacaaagtaatataaagtgagtaagtgtaccttctacaaagcaaaacaaaattgttatagatatattagtctgacgtgctatgaaccttctacaatatgagaaaataaatttatttaggtcttatgtgctttgttattttttaagctccttttcagaaaaactctatgtagtaattatttttaattttataggctgaaagtgcttcgtttggtttgactgttagagttttaggttagtaatttttaatatattgggtttcagcaagtagtgaatttatagtcttgtctactaaaatttttgggagaagtcatgaggaatgataaatctttcttttttttagaaaaaaataattatgaggggaatgatttgttcaattataatgtttatttaaaacaacatgaatttcagaaattctaccaaaggcaatcacaatcatagatagagccttagaaacaaagatacaaatataaaactagaaaagcatatctcaccataaggaatctacaaaacatgacattcaagaatagtggaaaaaaacactaatcctaaaattattttaggactcttaattttatttcaaatctaccctaaaattcattatattttgccttgaagttaaagtttaaaaatgatatttttctcatatatggtaacataccatgtttctctatatatctcttttaaattaataatatattaatgtcctttcacatgtatttttgtctcacacccatctattgtatcatcatcacatataattatatggaagagatttcaatggttacatttttattnnnnnnatcatggttacatttttttaagtcattggattactattaaatggtt

SEQ ID NO: 37874 - DNA, 2093 bp, Cannabis sativa
ctctccatacatagtatagaagaatttaatcttaaataacttatagggtcccatttcttttgaaaaaccaaaacaaaagtatattaattagttacatataatataagaacatatatacttacatagttatatatatatttatatatatattccaagtacaactctacaagaaatcggaggtcaagcttacaaaaattcttctatataatttaagttggtgagctgattattgaaatttgactacatattttccttaatcattcagaaaaatcaaactacttttcatgtaaaaatctgcaaataattttctctgcctaacatctaattatatgaatcttttagaatcaacattagacctcatatcaagatatcattagataatttgtctacatataagatgatctagaactaagttatataaatatatatattcatatatatatatatatatatacatgagttaattaaagtcagctccaaaatcttgtgtgagcccatattttgttgagacaaaaaagatatatgagctcttaataatagtagtaataataataatgggtaccacctaagagtccacagtcaaaagtcaactaaatttgtataattggtaaccattcaattttgtaatttattctctttatatctctttcctccccaaacttgatgtgtttagtcttagaaaaattatgttgtttgagtagaaataacatctcaagtagtagtccatatataggaagtgggtgagaatcgtatatattaatattagggtttttttttttttttttgtggaggaagtagggtcaaaaaaacccacaataaaaaaatcattttttttttgttttgcccaaaatttatatatatatatatatatattgtatatatagatttgatggtggaataattggttaatggagtcagctcaaatggccttcttcccatcccattaagcaaattccatatatcatttgtttgttatatgcacattccaccaattaaggccctcctttcattcaatcatatatatatatatatataaccatatatatagccttttggagaagacagtttcatatacattatatatagaaatattttctcattcctttttaatgtaagggtttgacattggtatatgattgacctaattaaaggtacaatagtcactagctatatggctagatttttaaccaaaattattatgtgtgaaaatgtggccactcacctaataaacatcttctcatggaatattgaaagtgcaatctaggtatagtggtatatatatagttgaagaaaagaaagagtcattattataaagattgacaaaaacatgttagattttttaacccaagattgatattatacatataatgctaccttgcctttgaccaaatatatgtatagtgtgcatgcatgtcttctcttcaaaatcatgccatttgtttagaattaatttttttatatacattaattgtcaaaaataaaataataataataataatacgatagtgcattaattctcacttcttattggtatcctagctatttatcataaaactattaaaattattatatttgtaatatttaagtatttaaattattatttttttaggaaagtataataatttatatttttatgtacttttaataaccctttctcttaactgaatttctatattgttgtaggagtggctcaagattagctatcattgaaaatggggttatagagatcacttgctctactaaaattgcttaaaccgattacctaacttggtgcaactcttctccttaacgaagaataataactcacatctcattaaagatctactgccaattagtaaaaagattagcattaatcaacctcgctttgttcttaggattttgcaaaggctttggcagtgttggaggaactgtttagataacaccatcctcatcaaactcgccttgtgatctaaatagttaattagggtttattctttttcaaacaaccctttaaccaataatccagcgagttaggcgccactccaactctcacacacttcttaccacaatctttaattattcacataaaaaatttctatccacataattaatta

SEQ ID NO: 37875 - DNA, 2200 bp, Cannabis sativa
taattaattttgtcaagattcaatgaatataaaatattcatttatcacaaaatcaattatttattttattccttaaatagaaatattataataacaaacactcaaaacaatgtcatgaacacaagactaaaatactcaaaactatattatagaaacaagactaatcacagaaataaaaatcaaatcacaactatgacgcacttatgccgacctagccataaaaaaaaaaaaaaaaacatcctctggctataaatttaaaaataacaaaccttaatttttcaaattagttgacaagcataaattaatttttccagagttacaattatccacttaagagaaagatctgtaatacaatttatttttatactaaaaaagatgtaggtttattgtaaaaaaaaaaaaaaaaaagatagatgtaggtttagaaaagatatataaaaacccaccaaagtccttttgttttgatttgtgtttattttgtttttgttctttaacgctttgtgatctctctctctctcacttactcacaccaaagcatcgagaatctttgcccctctacttccagtttcggctcttcctacgctttcttcgtacttttcttctttctccccttctccttggccttccccacctcgaactctctttccaaactacagatctctatctctttgtgtcgagcttcagatcagtcgaaagcaggtatctttactttggcttactttttctcttcattcctttatatttcattttatttgtcttctttgatctgtgttttctgatttgaatgttatattgctgattgatctgtcagtttgtttggattcatagtctactccttcacttttttttttgtttgctaattggggtcaagggtcttagtggggttgccgtatttcttttccgttttagggctttgatcagattccaaattcattattataatcaaattttcgtacctgggtctgtttctgtttaactagtaattgcttttttttttcttttcctagattgatttctactaagtttataggaggtggagtaatgtggttttgtgtatgtctgacactttattatgtatcttgtattttttttttttttttttgtaattaattggaagttggattttggttttgaaagaaaaaggaaaggaaaatgtagggaaagaagtggaaaataataataaaaataaattctcatgtttgctatggatagagaaatgattgtaaaattgtatttgacaaaattttctataccaaatctgagaaattgatatttttttttattttattttcctcacctttttctttcttcaccaaaatccaacttccaaacatagagtaatggaatttcaaagggaaaagtttattatttgtttcgtaccatgtgtttgtatgttgtttattaaggccattttgttacattgattttccgtatatatcaataagcaatgttgttcacatcttttattcacttacgtacttttgtgatgaagcttcagacagtttactcatgtattaatgttagaatatttgtttagatggcaatgcaggaagcagctcctgtctcggctcctagtgcccaagttgttggcaatgcatttgtggaacaatattaccagatcgttcaccattctccagaattggtgcatcgattttaccaagataccagttctctgagcaggccagatagtaatggcgtaatgaaaaccgtgtcaagcatgcaggcaagtatacttgggagctcgttccctcatttgcatagaatttgaatctcaatgatagtgttttatagctgtgacagaatgtgtacttgtgtcaatatccccaaaaacagaaaaaacttactttgatccttcatgatcacatatagggataatttatttcttagtagtactcagttgacaacttttttgtgatataattctgtatactaccctttctctatgggtatttcaccccttcagtgcattaagtagtactcagttgaccacttttttgtgatataattctgtatattaccctgtctctatgctcatcaccccttcagtgcattaagtagttgttggatcttgtttagatgtgttcagttttcatactatttttttcttctctagttgagtaatatgtttcaacttaaattctcctattaaatgtttgaagatcagtatagtttatcatgaccctgtatggagctacccatt

SEQ ID NO: 37876 - DNA, 5007 bp, Cannabis sativa
ttatttgtaaatattcataaaattatatagaattatgtaattatatttttttgcactttttttttgtaatattatacatttacttgtatagaaatgaaaattgtcctattttataataatttttaattcaaattatgttggagggagagtatcactatactttcatttgtaattattaattaagttaagctagcccgattcgaagtggaaagagagtaatttaaaatgaccatgaacatttgtcatggtcatttttttttatagatttatcttttttttaggtctcaattttgtgtaaaggttctttaaattttttttcactataatatttgaagatattattttttttttattaaataagaaattgtatgacgatatttttttttacatttctgaattaaaaaaatattaaattagttagtcatattattaaaatattacaatatgaaatttaatatatatcattaaacaaaatataagttcacgcgaagcgcgaattgttttctagtttaatatatttcaggctcggtacggtgtatgagattatattgtattatattaaattgagttatatgttatatttttatttagaataatttgtagcataaatatctaaaatttaacttccaattacaaataaatatctaagtttaatttttaatacttaatttataattttggaactctataactatctcatttctaagtgttaagtaaattgtcacttggcaatctctgattggtctaggtcatgagtttttattttttaaaaaaagataatttaaatatacctatcagaaagataataaattgacatttaacttttaggtacttacagaattccagatatataagttaattatcgctgccaaaaataaaacttaagtatttatttgtaaccgagaattaaacttaagtgataatgttgtaatttatttttttattaaatataatattatattttaatttacactaaactattatatattatatattaacatttaatatgcttataaatatcaatagttattacatataaatacaattcagtagtataatatggtgtaataattcataccaaatgaacgtatgtttagataaattagtccttcactaataatatataccatcatacataaaaacagctttatgtataataagaaaattgactaaattaactgaaaatataatgtaatcaggtatatatgaatcttttaagtttcataataataataataatatgccacactttctctaggtgctatccattaaaataataataagtaagaggcaagacactgcacaaaaagacaaaataaatagaaatgaaagaaaatcaaaacaggaaaaagataaaaatggcagtgcaatagacaaacacaagaactgtgctcccttaatcaaaacagcgacatggtatcttttaggtaacacgtagctatccatataaacacaaagacatattcaatttttatttttatatataaaaaagatgaatgcgtacatacatataatgctcaaagctaattagggtttaatatattaactgagaacctataataaaaggaaaagtgtatgtacgcacaatagggtagctgtaccctacgttttttttttttctctcgtgatgaataagccctcatcagaagaggtgttatgttaggccattttcaagaatttattaattagtggcaccaatattatacctttttttttaaattgtaggacccctttgattgctaattactgtcgtacatatatgggccctttgaatggaaccaatcaataccaaattaataatgtctccccccctttgatcagtgtcgttttccaactaaatatcgttcactttagtgtcgctataataagctatagcttgccctttcttcttccaacttcatcaccactacttgttgttgcaccagtagtacttctacttctacttctactaattatatataactccagaacattatttcaaaagtagtagtagtagataagtcattcccaagcagtgtagcagtagtccaacagttgttctgatctctatcatgtcaaatcatcagacttcatcaaggtcatcttcacctttcatcaaacccactgatgatgagattcaccaccttgttttgaagctacaatccttgttacccctccttaatacaacacccaatgtacgctactgtttttgtgcttatatacatgacacactttatataccttattatatatatatggcaattaattaatcaacttttttgttcaaacgtatatatttatatatatatatatataatattctatgttttggtaaatttatatgtttgtgtcatcaaaaaaagttattattagggcagtgagtgatatatatatataaaatatagaacaaatttattaatatatttttaccatgcttaactaaaatatgcttttttttaagaaataatgctgaaaattataaaccagctgcattaaagcttattattggatatgttatatgatcacattaattatcagattataaattaaatgaaattaaacttgattgttttttattcatacatatatatttaaaatagttatttattaggcctaagttatctattgtaatgaatatgtaggtaccggcttcaacaattttggatgaaacttgcacttacattatgaggctgcgtagagaggtagatagcctgagtgggaaactttctcaattacttaatacagcagaaatcgacgatgtagatgagcttattagaaaacttcttcaacaataaaaaactcatcccaaaacctttctctctctctctctctctctctatatatatatacatatatatatttattaaaataaatatatattgcttcgcgttccaactattgatcatgaaagtctctaccatgattcctaataagatcagtgtagtaacagatgcaattcgagtcttattattaatgataaagctctttagtttaaatgttttattttattttatttctcatgcttttaataatgtttataataattggtttattatgtattttactttttatatatttataataaatatttggattgtaccacactgctctctaattatgattaaatatctgagaagctttcttagattgactaattataattaattcattaattatggaccaaagcaatgattacaaattggaaggcgaagttgataaggaggaaaaaccaaaacttaacatatataataatatatatatgctatatatgtatggtgctttattttgtttctgccgatcgatgtttgttaatgttttatatatataatatttggtttggtatggtttatttaataacaataataattaacgataattgatgcctgatacattgcttcttggtggaacatgtttcatttgtagtggacatgcccttgacatcaagaatattaaaacatatatatatttgtcttaaattctccataaataataattattaatgtataatataactaattatgtttatatatagtatatacaaactatcaagcttttttttcttcctgtctggtaacttaggaaataaaaatcaatgaaactcaaagtctatcaagaaagtatgttaattgaattcatagatccttatattagctatgaatataagaaagagatgatcttttgaaaaattagacaataaaactctattagacttttaaataacaacttgagccaaaatttgtacaatgtacgtgtttaattcctaaagaattcaagatctcacagttcgctctttagtgaagttctgaacatcatgagcagtcttaccaaacctagtgctcttagtcttgaatattgataagctacttgtatcaaaaccaataactataaagaccttttcttaatgcaatatggcttaaagcttaataatatacaacaacaatatctttacatgttattattttacgagaacaaaaagctaaaatttatatgcatgtgaggtcttacaatattatcaggaactaagctgaaaatattgactttataaactaaacagactatactggccttgcaaatcagacatatatatactagcctaataaatcaaaccgatcatatgtttactttacaaaccgaacttaccatactcattttaaccatatggtgttacaaaccaaactcatcacactggtcacccaacatcaagacaaaaatcataccacttcaataataaaaatttataattacttacggattttttaaatttataattagccacaactttttatctttagtcacaaattttattgtgactaaaagtaagatattttgtagtgattatagataaagtatcttttttatttgtttaagaataagtacttggatttctgtatggagttataaattttgtaaagacttctcttttaaactctttttggggaaaaaaatcctctatcctttaaaaattattgtcgtagatatatccctttttacattctgttcaatttgttaaaataatttactattgtagttttgatgtataatatgacactaattttacataaaattaggccagacaaaaaatgcatacattttacatagtctaataacgaattttggcaatatatctaaattgttagatctaattaatatttgtatcgttaataaatttaattttaaataacttaaaacagttatataatagactcttatataacctatgactaaacatatgaaaaaaaaataatagtaataaaaataataagtaaaattgtaaatcaaggtgatttttgcaataatttttatagtttgggaggagatcttttttccaacaaaaacctcataagcaaactaataggatggcattgttgaggagcaaaaaaagtcctattttctttattttataattgaactttttttcaactgaatctttattaccactaaagtagctatagggtagataattctactataacactagtaaaaacacaataaagaactttcccaaagccaagaattacaacttttatg

SEQ ID NO: 37877 - DNA, 2243 bp, Cannabis sativa
  modified_base (40)..(59): a, c, t, g, unknown or other
aaataacacacaaataaaaaaaaacatgtatatatacatnnnnnnnnnnnnnnnnnnnnactaaataataacaaaaaaaaaaataactgcatacacttcactacaatatgcaaattacattggcatgaaaataactctaagaaagtaaaaaataccactaatgtataaaataaaataaacatgtgtatatatatattcattttcacttggttgaataactaaataacagcaaataaaaaactgtataacaacttactataatatgtaaattaaataagcatggcagttccccaaattgtatcaaatccaagaaaataacatacaaataatctataaaataaatttaaaaataattatataatatttgtataccaactcaaaaacatatctacacattaaaaaaataaatatatacttattttgctctcggttaaacaatctaatagcaacaaataaacaataaaataacaattctattttaatataaaaattaattggacatcaacacatgcatcaacttaaaaaataaattaagaaaaacacacaaattaaaaaaaaaaacatgtatatattgatttctcttagttaaacaactaaatatatatataaaaaaaaaattacacataacaacttcattttaatatgtaaattacataggcatggaaataactccaagaaagtaaaaaataccactaatatataaaataaattaaggtatttatacatgacattacttacactaccatttgcattattttcatttttttttgcttttccatttttaaccttatatggcaatgatctttttttgttgttgaagtttatgcttctagaatagcctgagaaatacgatcatcctttattgtacgcgttcttacctattttaatttgcattttgaatttctttaattttttagtaatatttttaagatttaagattagaaaaaaggatgaagaagctctagaaatagccataaagtcgttactcttttttttgtttcttttttttctttaaaataaaaaaggccataatgaattgtgaatttatgaactaaaaaaatagtttcacaaatcaaacatgagagtgggatgggagaacattatgtacttgagaagttgaataaaaaaataaaataagaaaaagaaagagccaaatgtgatgaaagttaaagagtagaacaaaaaagagaaagagaaagagaaagaatatgtgggtgacaagagacagtgagaaaatcatgtctacatgtgaaaattgaataataatagtgaaaggtatatacatcatattaatattaatttgtaagtagtaattttgtaattttcaaaaatatattaacgaaaacaattaatggtgaaattgtttcaaatgccgcccattagttaaaaaaagtaataatatgtcatctttggctggattgattaaatatatatttttggttgattttttagctgaatttaaaaatataaaattatatatttaaagaaattaatataatttttgacatattattaatttattttttatatttttacaaaaatcttaaaatatatagcattttaattgaaatactattattcaaatattactttaagttagtttatgtagttagaaaaattatttatcatatgaagataaaaaagttaaattatattgtgtcaaaatttgaatgataaattatttcaaaaaaaaaaattgaataataaataatatctcaaagttagaaaaaataaaataaaataaaataaaaaatatttattttaatttttcgtaaaaggaaaatgcctcatttcatattttgtcttaggtctcttaataccttgagacaaccttgtctaacaatataatattattaatttattattacaatttaatattgacatccatacattttaatgtaataaataataaaagaaattactaaacactcacaacaaactatattaacaaactatattggtatattgtatgaacactttaaaatatctaattatagcaatcttgaacaagataaattggcgtttcccttattggccaggtaagtacttataatcttcattatggtatatatgaactcattatttataataaaaatcatgtgatacaaatttgagtaattatcaaaggtgaaatttgattttttatacttacatttggttaatttttttttttaaacaaataataactaatatttgtaggatatgataacttttatgatattcctaatttttttttttttttt

SEQ ID NO: 37878 - DNA, 2967 bp, Cannabis sativa
aaaaaaaaaaaaaaaacccaaatgttaatgtgggtggaagaagtaaagagattctttttctatatctttctatacaatcttagaatcccacctctctttctaaaggaaaaaaagtaaaagaaaagaccctattggttgaaacgacccgcaaagctacggttgctccgacgatattaccgggaatcagcatgcagcaccaggtgtggtgcatccaaattccttaaggcccaagaaaaagtcatcatcagctaagctcatgttagggatgagaacaccctcgtcttcgtcttcatgatcttcatttaatgcatcaatatccatcatcaattcctcctcctccattgaaatgacatcgctttgtttctgatcatcactttctctttcttctggtagtattactagtgtcttcgcagctgggtcttgttcagtttgcggggccggagagagtttcggggtagtggtcgacggagactgatcagaattttttgtgattattggagtaacgtttggtggaggagatagtttattacgagtacttccggcgagtgagttccggtgagttggacgagggtgagtgtggtctccggtgtaagtgatgatgaaagattctgggtcgttgttgtttcgctcaacttgttttctcgccgcacaaccttttgagctactgcaacggtagtagttcctaaccgaagaaacacatgaaatttactcgagaaacaatcagaaaaaaaaaacattgaagacaataaaaataataataataattagtatatacctcggaaatggagaacctttgatgggcttttgcccgtatttacgccaagcccatacatcagtggagagattatcagccgttacatggcacaccgttttcttctgttgattcttcctgttaattaaagaaaacaataatgggttttgtagaatttaaagttcatcatgcaaagttaaaataatcatataataaaaattaaaccaataatcacactgtaaaaccttttcctcgatctgggcatcgaagacatgggtatggtgggcaattgaaatggagccaaaggtaaagtaacagtaggagtggtgatggtggtcttgttgttgacctgatgatgatgatgatggcgatcaggcgttcgaggcagtagtacaggaacttgatgatgatttcggtctagttcatgcaattggtactgtcgtcgtccacggtgtagtccaccataaccagaaatgtagggttgtcggggcatgaatcgaggcccaacaacgacgtcgtttgaagtcccaaaatgatgattcttctgctgttgctggtggtggtgttgttgatgtcgttcttggtagtgtagcagctggtgttgttgtccactagatcctccaaaatcagaaatgggggaatttggaataataccctgagcaaaattagtggtggtgcccgttatagtggtggggttataattattattattattattatttgagaaaaagggcttgtagaattgttgcaattcttcgaaagtgtttgtagttctgggctcaggctgctcagccaccaggttaggaaacgaaaacgggtcgttttcttcctcaaatgtcaacgaagccaagcaagacaaagtgtccacagacgaagacgacgtcgtttggccactaccttgcatttgagtccatcattgtggtggtgactgaggctgagtctgagactgcccaagacgacgtcgttgtggtcgatttacaactacgaaccactgcgtacagatcccaatcttctgccatttcaaccgatcttttagggggttttttgggtttatagaattgcctagaaattctcgcctaaactagaactgatttctcttgtctatatgtctctctctatttttttttctactgttttctttgccgatttgaatttcaagttgggttatgagaagaatggatacaaaggacggcgctgacttttttttttttggtgtgtgtgaataaaatcacaccaaaaaaaaaaaaccaaatgaaagagaaagagagaaagagattgtggtgagaggaaatggtggagcactgacttggtaaattgttaattatttatactaaaattaaacaattttttttttatttaatttaaaaagaaagtaaaagttatttgtaattttctttattattttaatgtataaatagaaagtgaagggccgtttttttttttaatttataataggaaattattttatgtactaaatttttaattttattttttaaatttacagtttgagttactctggtagttttaatgtgagttgctctggtagttttaatgtgagttgctatgtgaattttagttgtgatttaagttgttctgttctttgatatgtgagttgctatgtgaatttttgtaaaaaaatgtaaaaagaattactttaaagtgtaaaaataaaaaaacttcttttatatttatgtttatataggggagttttatttacatttatgaataagtacactccaatatttaataaagttaagcttaaaattatttttaaaaattaatcttaataatttttttaatttttttttcatattattttgtgttatttcaatagttattttagttatatattttttaaaattttaataaaaaactttcatatagttttatgttataacatttaaaatataatttatttttatttaataagtatattttttaagaatataaattggaagaaaaaaattacaaaaaaactaatataattaaatatattttgtgtaaaaataaaaattattgaatttctgcctacttataaatttttggctgcaaataaaaattcccatatttgaaaaaatctacagtactccttgggctatttggtagatattctatatatgtatacctagggtcagaactgaccctaggtattggtgggctaggcccgcgtctagggtccacttattttaggtgcctaaataaaaaaaaaaaaaaaa

SEQ ID NO: 37879 - DNA, 5204 bp, Cannabis sativa
tataaagttaaatttaaaattgataattaagagatgttatataaaatatatgattagtacaatgtcattttttcggcagcttatgttgaaaaaaagaattatatattagcttattaatttttatatcaaaatatatttatatatatacatgtgtccacttatatatatataaaaaaaatataataaaaacgttaatggaagttaaactgtattacgcgtattttttacatcaatcaacaacccctttaaagggttaattaatttatataataaataaaatcaatataaatactttttaattatatctcactttacatataatgttgaaaaattttgcagggtacctttaaagttatttattttggcatttacaaaaaaaaaatagtttaattaatttttttttatgatcgtgtacgttatataagaattatacttaaaaaatttcaaaaaatttataataatttatagtatcgaaactaagattcaaacaactacttatcacacgtaacagaaaaaaaaaatagtcatgtatacaacaaagtatttaaaccttatttatggtattataaattattccgaattttcctaaaaatttacagacagttctaaataactataacacatgattatgaaaaaaaaaattagattaaacaatacttcttgatgtcaaaatagatagaaaatttaccgaaacacttcaaaaatgtacttataatattttcctattcttttaggtatgttgaccaaactttctatagtctccccctctagatttctctaaccccattctcttcttcacattatatatttttttatcaaatttattttttttattttctataatgagaaaacgagtatagtagagtactactatttgacatgttgggtcaaattccctaaaatcatcaaacaattaaaaaagaaaaagaaataaaaaaaattaagtccattatattattattggacagtagttaatgactattctaggattctctttctttgttcaattgtttttagcaatatatatatatgtgtgtcattttctttaaccccaccattatctctctctttctttccatttctacaaagaccaaattaagagaagaaaaaaaataaaataattataataaaattttattaaaaagaacaaaagaaaaaaaaaagtttcaaaaaagacaaaccaaaccaattacctttattattataaaatcaatcactatatataaatgcaaaggctttctcacaaaagttctggatatgaacccctctcaattgagagataattcatcaaagttaaagaatttctctctaaattaagatgggtttatggaataataataataataatcttaatttacaaaacaacaataatttcttcttccaaacaccaactttcattgaatggctcaagccaatttcatcctcatcatcatcatcttactcttgttctcctcctaattcttcttctagtacttcctcttattcgagctcaattaccaccactaatcgagattattattatgttaataataataattctcgaattagtagtaatagtagtactaatagtactgctctgcaatgtttgcctctcttaaacagactcgataatgatcataatcacgagataaagcctaatttgaaagttgaagaggatactttcgagaaagttactttgcatatagggttaccaaatacaactgttgccgctgatgattatgatcattgtgattctactgagttttctgatgatcatcatcgtcatgatgatgatgatgagaagcatatcaaagttatcgatcatttcaaggaagaaaaagaagaagaagaagaaaaagacgatgatcatgatcgtgatcatgataaaaataatgaagaggaagaagtggtagtaaacatgaagaagcatattaataagagctttgaatgttctttcaatatggaaagtaggttttggatcccaactccagcacaaattttagttggtccaatgcaatttgcttgctttatatgccataagaccttcaataggtacaacaatatgcaggttagtatctataaattatttaatttaatttgcacatttttttactacaattaatttcttctaattcttcataaatttagggttttgagacttcatttggaaaaaaaattgcaataatttttttgggtcacaaaaagatagtaattacattaagagaaaaataaacaaaaataattaatgtctagatgtctatgattaattgttttgtcaatatccaaaaaattctatacatgtgtgttttttattgtctcaagtggtcattattaatttttttgatccactttatttttcacttgatggtaaatatttttcatcttattagataaacctttcttttttgtcatgaattattagtggccatcccctaaaattaaaaaattaaataaaaaattattgatgactacaaatgtaattattagaacctcaatatgatttatttctcctttaataatttgtgtatcttaaataaaaaacctccaaaattttacatacttaattacaattatatcaatgaattaatttctacttattaattaaatgataatttctacttccacacgtacatatatgcatgaaagaaagaataatgctatatgtaataaaaccaattataaattaattatttcaatgcatgaaattccctattaatgaaattaataataatcaaaattaaatcacacatatatatatatataaaaaaattaaggtatatacaattgtcaaaagttataacaaccacttaattagctggtctttgcattagttggtgatagattatctctaatttctcttctattatttttattagtttgaattcaaaatttatgaatttctcttaatttatatattatatagatatatatatatatatgttgaaacattgaagagtatatagtgatgatccaaaaatataatatagaaaaattatgttcaattataaaagaagcaaaaagaaagagatatcatcacctaaccccatatatgatatttagtgcttcataaagtatatatataaatcaatatacacctttttatactccctagggggaaagtggatataatcaaatttaataattaacacaaaatcaaaaaatttgaaaatgggaaaagaaccacaaaattctgaatcgatcccagctaaaagggtgtatatactatgaatatatatttaattatataatgttacaaatatctgctttttgatctatctctcacttaattatctttcacttcctcctaatgaacatgtcttattaattaatattaaaattccaacataattattcaaatttgagtaaattaacacaataaaacaataatgtacaaaaatatgtcaattttgacatgactctatgattgcctatatatattttgaacaaattttattgagaaaactaatatatagagatagattttatgaatttttttcttgatctatataatttgtatactataatatctaaataattaacaatgaatgtattaccagaaaaaaaaaaaaatcaacaatgtagatccaataaaatacatatattaatagattttttctctaaatatatataaatatgtagggcaccttttaatatatatatatatatatatgtttgtgttgtgtagtgtgtgtataatgcaaaccctaaacacaaattaattaataaactaaaatatcttacaaaattgtatattatttaactagtatatcttgtttacatatatgaaatgttatataatcaaaatgaatctatatataagacttgagatgagattgtgtaaataatatatatagtaaaaggaaaaatgatatattttttgtaattttgtattaattaatgataaataataatgattatgattaattatgatattgtagtggggtattaattaatttggattaataacatattaattatacagatgcatatgtggggacatggatcggagtatcgaaaagggccagattcactgaaaggaacacaaccagcagccatgctgaggctgccgtgctattgttgcgcgcaggggtgtaagaacaacatcaaccacccgcgcgctaagccactcaaggactttcgcaccctccaaactcactacaagcgcaaacacgggctcaagccctttcgttgtcgcaagtactcttgtggaaaaacattcgcagtcaagggtgactggcgaacccacgagaagaattgtggtaagctctggtactgcacttgtggctcagatttcaagcacaagaggtctctcaaggaccacatcaggtcttttggtaacggtcattctcctcatccttctctcgaaggctttgaccacgatgaaaaggagtgtgtcactgcagggtctgaggatgaggagctaataatgaccacccatgcgtaatttataactgcatgcatgcatgtttatataaaaatagacacgtatgcatgcattatataatgcctttggaaaaaagcttgtgctcggtaacaaaacattctcatgcaagatagcagggaggggtttgctaccgagcactttgcttgacatataaggtattcatatatataagagtattattatgtgtagaaaagagagagtttatgagttttaattaatggtgtttatgttagaataagagtatttaattattgattacctaaaagggtccatgaagcatatgaattttcttgtcaataatccactcacatcaccaaaaaaaaaggtgttgtattgatgagaatattggagaaaatttatctgcttcatatgtttccaatattggtgatctttaattattaattacatgcattaaattatgtgatcaaatgaggtgtttaatatggttatcaaaaaaaaaaaaaaaagatgatgagtttaattataatttcatctttttttttcttttaatttgatttcttttggttaatatttctctttctgtctattttatattaaatcaatcaactttatttcttgccaaaggcaaaaggtagaacatttgcaattatttgacatgattaatttaattataattattaataatatttaattggcatggatccgtttgtgaattgatagagaatatacatgtctatgtatatgtaaattaatatatattaatataaattagactgacgtaaacttacatcatatacatcataattaattaacatatata

SEQ ID NO: 37880 - DNA, 2640 bp, Cannabis sativa
ttctatggggtttaattctactatcattggcgaaaattggcaaagacaactttattattgactgctcttctttttctttttatctcttcaccacaactatttactggctaaaatgcgcctgacatagataccaatggttgcactaatctgagccgtcagatcatcatcaatgggaaattatatatatattttatttacatataaatacatcaaacaggactgaggttgtcatatatagtggctcttctaccacagtccgtggcccatcccggcatcccctatggagattatattatagattattgttttctacagagcgcacgttaccacatcattgaaagaaacttactaacgtgcacctgtacccattatgcgcacagtacataattgtccaaaaataaattattgttgtgcaatatatttgtaattgtaattagatttattatgttataatcatgaaaacagttttaattattggaatgtatatataatgatcgatcttctcaggcattggagaaaatggtaacgccgtcaccttcaccgtcaccgttaatggttccgagatatctaagcggaattgggtcgtctccgccgcggtgtttatggaaatgcgggaactgcacgccgtgtaagccagtccacgtgcctgtgccgcccgggactccggtcacggctgagtactaccccgaagcatggaggtgcaaatgtggcaacaaattatacatgccatgaaaatatttatattatatatatttttttttttgaaattatataacttttgggttttgctatatataaatcaaactatatgagttaaaataatattaaagaagaaaagaaaaagggttatatatatgcttctccttctataatattattattagctactttgtgttttgaatataatgtgatatttgtctagtttatatggattgtgttaggtttataaattaatataacagataatcaagagtatataggactttattagttttgtgtattttacataattaatatttgaggtatatacattagtatcatgatccttaattaacatatcctataacttataaggtttctcattgctataaacatttgtgtttctaaattttggtttgaagatcattattggtatgtagaaaaaacacaaatttagataaaaaattttaacattaaccaatgtcagttctcatgtgtgagtatatattgtgatcctaaacactgtgtggtgtctcaaacatctaacaagaaaaaatataaacaacaatttcacataacaaagaatgcagtaaaaaaaaattcaaactcaaaacagaaatgaacaaaaaataagaacacaggagcttgcctagttgggcaacaaaaccagattggttttgagcttaatgctggggagaaaatagccttcaatgactttagtagtgttgccagaacagaattacaactatcttttttctcgcttgtatatattatttcttccaaaattttatagttctattttgtaaatataaaataagtacacatttttttaatttatgagctttagcgattaaatctcttttcctatcgtttcacttctacttgtaaatataaaataattactttttttaaaatttaaggtttcatctgtttaattgctattatgcctctttatgtgtatatatgtgacgtttatattggtacacctaatattattatttcaaaaattattttaaaattaaattaaattataaaaactaaaaaatatatatcataaattttaaataactttttaataattatcaaataataatattaggtgtgtcaatataaagatgtcacgtgtacaagaatgtacacataagcaattcatgttgatagttaactataaaaaatagatgacaccttaaatttgttatcgcgaaaaacaaccccaattgctgatttcttcgatttcaagaaattggaaggttttagcactaaaatttgagcttggagatgattaagtgcaagtagaagttgagaggatttagctgcaaaaaacttttaatttattttaaaagattgaggttaactttaagacgtgatgtaactagagcttctccaatggttacagtattttgttgtactttttacatcaatttggtgtagaatcttttactattgctgcaacaactctaataattcacaccaaataccatgtcaaataaatatattttacttaaaaaattattattttattttttttaaataaaatgtttatcaaaatatttcgaggtaatcaattgcatatgagtcgatactttaaagtgtatcactttatatttcccacattgtctaacacttccttttattcttttcagatgactttattcgtggagcagttgtctgaaactgtcaatactgtggcagtggagttggcccaggacaaggctgagcggaaggcgtcaaaaacacagaaggcggagctcttgctcgagatggagaagctaaaacaagaagtctctaaagctatatagaaaaacaagctaaggagaaatttgaagcccatctcaacaatgttattgctgttgggaatattttaccaggtcctaaatatgaatctctaaaacaatgaaattaaacacataagagtttttaaaaccttacattggttgtagc

SEQ ID NO: 37881 - DNA, 3118 bp, Cannabis sativa
ttaatttttgttttgatgcagatatatgaagcctgccttgtatctgtaataacttctcttatttcctttggtttgccacttttaagaaaatgcagtgcgtgccctgagtcggattctgataatggaattgagtgcccaaggcctccaggaatgtatgggaattatgtaaacgtaagatccctgttcatggtgtttctgtttaaaattttagaatcacttatcttgctatttgctttttctgcccaccaacttctgttccccgtttctattaaatatatagattctgtgagattattgtttcttctcggcacaagaaggttttgtaattagtatattctgtcttctacatctttgacatggttatgaagaccaaaatcaacctaagttacatgtctctgatatttaggggctgttagggttgtagggcatgtgagtgatattttgaagcttactgaatctatatattttcagttctactgcagtaaggacaaggagtacaatgatctggcaactcttttctttaatacgcaggttcttttctactgactgaagtctttattttggaacataatattatagttttatggtgtctttatgatttctactcaattgtatctgctttgttgtgacaggatgatgccattaggaatttgttcagtgcaaaaacaattcacgagttcagtgctcaaagtctattgacctttctggtaattcatttttccttgagctttttacaggctatacagcagcaatttgtgagttttggtacattttgggtaatttttttgcaactgtattgcaggttatgttttatagtttagcagttataacatacggcactgctgttccagctggtcaattcgtacctgggattatgattggttcaacatatggacgtcttgttggcatgtttgtagttaacttttatgcgaagttgaacattgaagaggggacgtgagtcagttgtttagctttgtgattatgctgcattaactttcctatctttgaactaatgtggaatacttggtggacctgcagatacgctcttcttggagctgctgcttttcttgggggatcaatgcggatgacagtgtctttatgcgtcattatggttgaaatcacaaataacttgaaacttctagttcctatcatgcttgttcttctaatttcaaaggtctacttccttttatctttttatgttttaatacatactatatttgtgagggaatgagaaaataatttatatttttatctgcaggctgttggtgatgcttttaatgaaggtttctatgaagaacaggcacgattaaggaatattccattactagaatcgagacctaaataccagatgcggaaaatgacagcaaaggaagcctgtggaagaggggtaaatgtctttttaagccttcgtcatttataatatgacagcctatagatagtaatgagtattagtatgaatatagaccttggatgtttggtatatcattctttttaaatgtggacattatgaatcagacattgcattatttgtgtgtatgtaagctttcaagaacctttatactaatccaaattaaattaaccggatgtctgtgctgtgttaacgtttggtgattacattgattttgattgttgtggttttttctttctttttatatatatatattgttaatgaaagtctgctgctaatgataaatgtgaaaactcaaattaaagtgctcctaattgatagagctctccatcttttatactgacttctcatgggctcttcacatggaacatggagattcttctggtgctagaattttttcttttgtgacaaacaaactcataaggcttgtcaaaacacatgaatgtttacaattgtcgtatgcgtttgatatgtacgagattgtgctgaaacttcatttctgaagcggtgaagccatctgaaattaactgtataatgtttcttttgaaggtggtctccttccctcgagttgttaaggttgcagatgtagtttctattttacatagcaacaaacacaatggcttcccagtatgcatgctctttccctatatctttatcgtcaatatttggcggcatttggaggttaatgcttatttttaccctatacaggtgattgaccataccagaaatggagaaacacttgtcattggactcatgcttcgaacgtgcgatatactctctctctctctctctctctctctctctcattattaaaacacaattttcaagaaggaacaatgttaactttgttcatgttgcagtcacttgttggtacttctacagtctaaggctgattttcagcatagtcctttgccaagtgattcaagaggatctaggtttatcaggtaatgaaaagcatcaaagtttggtttaaagtctggcattccacttgtgctacaagattttgatggatttctgtgtattccaggcattctctcaacgaatttgtgaaacctgcttctagcaaaggaatatctatagatgatgtgcatcttagttcagatgacttggaaatgtacatagatcttgccccttttttgaacccctctccatacattgtccctgaggatatgtcattgacgaaggtagccatgtcatctattttcctctgtactttgtttttattttcttgttgtatgcaaataatattacgaataattgttgcatctcggtggtacaggtatataatcttttccgtcagctaggtttgagacatatatttgttgttcctcgtccatctcgtgtaattggtttgattaccagaaaagacctattgattgaggtattgcaattccttttccttagctgtgcatttctacatcaaagaaacatcatttttttaaaataaagaaataaataaaatgaaacttcattgatctttggttgtctgtctttcaggaaaatgtagattcagccaccttggagctccaatcgactagtgtaaggtctctatgatgccttttttttttctactcacacgtagactgaaaataattgtttttggattggaccgtcttagtatgattttgaaatttttttaggtggcgtttagttgggaggaatgaaaatataagaataggaatgggaataggaatatgaatggaatggaat

SEQ ID NO: 37882 - DNA, 2431 bp, Cannabis sativa
aaaaaaaaaaaaaatacacaacaagctaaagttaagtgccaaactcatatattatatacaatattgtcaaatattgtatcaaccctgcctcacatatactcatgataaatatatatattaagtttctacatatacgtaatgttcaattgaataccataactaaacaagcaagcacactgtatttcttcaatcaaacccaattaaaaacataacaataattgtttccaaaaaaaaaaaacataacagtatttagtgtaaatatattacctaaacacaattattctgggtcaataatattttgaggattaccaaatggactggcaaatgtggcaaatactaaatccacatagagtggaaactgagctgcagcaaagaaagaaatcgggatggcggtgacagcataaaccgggaacgcggccactttgatactatcgttaagaacgaagaagtgaccggcacaaaaggcgataatcatcgagactatcgccaaaaaaagagaagttagtcccatcaaaagtttccaaggtagaattttctcgaaattattctccgaaaatctagatgtgaggatggttaggaacataactaaggaagtgaccgaaaaacttagagctattaatgaagctacggcgaacactcgaaatgcaggttgatttgccaacattggttttccattctcctcattggttccgccgggtaaagatgttgatgtggcgaatgccacggtggcgatgagggcggcaacgagggaacaagattctgcggttttactcatccattcacttccacttttgacaagatttttgtggtcttttgtgaatattgtttctggagtttctcctttgtcattgtactcaacaaagaaattttctggcattgaatttctcacgaactgcattattaaaaaatatatatgtcaaaatattttaacaaaagtataatttgaagaattgagtaattttttaggatgcatatatggtatggtaaaaccttttgccctaattttatgttgttgatagaacaaaaaattaattatgaccctaattttttgttgccattgggttttacaatctcttattttattttaataataaagattataaaaaaccgttatataactaattatacgacgtagacactttagtaccctataacaatgctcccaaagcaaggtcatgttgaaccatatgaataactaaacattattgaaaagcttgctaattttcttatatatatatattttatatgacaatctacatcgacttttaaatgttttcaaataatttacgatccatgttgtaaatagagtattcagttgcatgtgtgcttgtttatttttgaacatgtacaactgaatatttaaactttatttttcgatatcataaatcattttaaaatttttaaaaataggtgaaatgtatttagtataactacaatatatacagtcatataaaaaaattaattataattcctttaagcgcttaaaatagaaacacgagaaaagtgataatttaaataccttattccatttaatttcccattgcatttgcaaagcatcaccaggaataggccatctctgcatatttccttggtcagtatttgctgcagtaatatgcaatgcaccattgccatgtttatcaacttttcgaaaaatactctcatttttggaaaattgttggagcaaaaatgtgtacaatttcacttgcttatattccaaagccaataacacaacattcttctcatcttcattcgagtcatatattgccactggaaatttttcaaggattcttttcaccatttctgtgataccatttcttgctgcaattaacatggctgtttctctctttttaactacttttttctttacatactttgggtcctccttctttttagctgtaattaagtgccaataatattaatttaataaaattaatatgtatacagtacaatatcactataaataaataaataaataaataaattgatatacttaattataagaaaacttacaaaaatactggaatttgagttaacttttacaaaaatactgtcacacgattttttttatgtttttataaaacaacagtggaacacaaaacagaacaattaaaacaacagtggaattactaaaaaacaaccggaaaacaacagtaaaaaattcacttttaaaaacagtgtttttgaaaaaaaattccgctccacaataaaaaaataaaaaagttaaaaattttaatatttggtgtagataatcctaattataccttcaagaaaggctgaatttaggtcttcatagtcattcttattagcatttattggtgcttgatacccattgtcttcaaatttataaatattattattatttaagagttcattcaatacttgaagagaccatgtatgcttctctttcagttttcttaaactgattatccat

SEQ ID NO: 37883 - DNA, 1868 bp, Cannabis sativa
agcaaagaactatccaatcaacccaagttttaataaaaccaataaaatttaatgtaagcccaaataaaagtctaacatagattcattatcatattcaaaagaaatacaaaaaagacaattttatatctattctcagattaaagaaaaaaaaaaaaccctaaggtaaatatataatgtcaaatagataataagatttattttatttaatacataatatataattatatagatggagagagaatttaatttactgtcgcaatgagagagagagaggttttagttcttactcgaaaaattgaacacctcccttcacaatcgtcatcactctcaaaagctctcgctcaactcttcatcgttcctcacggccaattgaacgtgcctctcaatgattttgttcttctcgaatgacgcgcatggtagggaagggcttaaggagagagggtttcttaaggatcgagatttataactgagatccacctcctcaatttgaatatagttcaattatgtactcaagtaagtaattatattgaaagttatgtatggtttggaggttttcaatataaaactcctgaaaatgcaattgcatgtagccgtcaattagttgatcgaagcctatggtatagtgattattatgtaattagaatcagagatggtcggcttaattaacaatatttgagacacatagtacaactttaatgactatgtatccagtcattaaatcatgatccactattatgagcccaaaacatgcccactttactccttagggtaacaacatttatatgtgtgattttggatgaatatgtaataatgggtgataagagattttcaaatattgatagaagatgaaggccattattggagaattagtgagaaactaataaagataagtgcacttctatacaatgcattaaataagatgtatgatcttaaagattatgagtattgattgagtttattattgtagatgatacaatactcatcatagtatagtaaatataacaaaaacaccacaacaacaaattaataggattgggcgtcagtacaaaaccgactacgttgaaattagcatcggtttccaaaccaacatccatttccatagtagtaaaaatattaaagaaagacaaaaataagaaaaatcatataagatacataagaatagttgtagtaggaacattagtagtagtaatgattattatgattcttgttaatgacacaagattagccattaacagatcaaaacatattcattaaattatgtaatagttatatttatgaaatatatatattactaaaaacacttaaaaccagagggcatgtccttgccacagatgctaagaaacttttctactgcaattgaaacatcaagattgatgatacccaaaacattagctttaagggcagtgcaaagacatacagcagcttctagatcaactagacctaggagaaggttgcaacagggtgagctccctggagtcccaacaataatgtctccaaaattacttatcaagtttccacaacatccaaatttaaggtggttcaatgaacatattgtcccagagttaggaggtgataggtggtgtctatgatgacccacaggtggtggtggtgggcaaatgccattatggcaagtggagctaaccatggtgaagaacaccaaattgagggacagaaagaaaactatggatatttgagctttagaattcatatttttcaaaatgtataaataattactaaggatttgaaaatattttttattagctcaagataaattgattaattgatgaaagatgttgaatgtgatgtgcttttatacatgctaatttagagtattgaaaagtgtcaaactaaattcaagtattattaat

SEQ ID NO: 37884 - DNA, 3303 bp, Cannabis sativa
tctagtcatcatcctggtggaagatcagactcaagatttaccgggctaatgagtggtgaccagactcctagaggagtgtctgtgtcagcgcagtcttgtgatgtggtgttagaggatgaggaagagcccaaggagtggatggcgcaggtggagccaggcgtgcatattacttttgtgtctcttcccaatgggggaaatgatctaaaacgaattcgtttcaggtattttgataatccattctggcaaaatgactcctttttaatatttttttaaagctattgaaattcttaatacgacatgaagttaattttatatacttattttgatactttttgatgtctagtatatactcacatgtgatctttgtgttgatgcatgttgtcccatgttagtgtcatcctaatcttttcaacatacatttaaaaaaaagttagtgctttgcaatcaattttagttgttgctttttaactaataccaaatttaaatttcaagccgagagatgtttgacaagtggcaagctcagaggtggtggggtgagaactatgacagaatcatggagctctacaatgtccagagatttaatcggcaagctcttcagactccttgtaggtcggaggatggggtaaagttgcaaattcttttacttattctcttttaaatatattatgcatcgagttgcttataacaccaaatgatgctcctactaatttgtcttgtcaattggatcagactttgtgtttctcaatcacgtatttgaatcttcgaagtagtatgtagatagatatgcattagtatgataatgattcacttgattcaaattatttttggtttcacttgatattacaagtgcataagggttttgcatgatgcaaatgagttatcctttattgtagaattagtaaccaaccaaactgatgaatgtatgcctaaagaaattgtgtgcctatttcagtttgcttagtgtttataattgtggattctctaacagagaaggatgtaaagctgtgctaaatgcttaaatattgatttatagaagttcttttttatcatatatttagattaataattgctgttgtttctgtgagttgatgaatcttttctagagtttccattgcttctgcatgcgcagtaaagattaaaacgctgcgcatgaaacattgtaattgttgataaaattcttcatgaaatttctgtatccagcttgggaacaggaaattttctctgtttactcttttatcctctaatggccacaagaggaactcaatcagacatcaatctgctgagagaattcttctacttctactatgttaacttataactaggacttagtagctgatactattgagtaacactaagaattttcattgatcccacatatgaaataactgatttcaattaatcatgactaacatacatacttgtatttattgcagagagattcttcttattcaaggatggggtctgttatggaaagcccgtcaatgaataaagactggactccaagaagccattataaaccccctggaaatagatatttccctcctgactcttatgatcatggtggtggtggtcctcactacaatgctagttcaagtggttatgttataggtggtcacaaaggtgagacatcatcttttgatgcctcaaggacaacaacctcatctcgagatgaggcttcagtttcagtgagcaatgccagtgacctggagactgaatggattgaacaagatgaacctggcgtgtacattactattagacagctagccgatggcactagggagctgcggcgtgtcagatttaggtaacaatgtattattaaaggaagtttacaactagtcttgtcccaactattaacacttttcatgttgagttctcaagacataatcatacactaaaataatcattaggtgaaacattacaaggaacctcagaacttatgctttggtttatttttgtatgattgatgcagtcgggaaaagtttggggaggtccacgcgaagttatggtgggaggcaaacagagaaagaatacaagctcaatacctttaaatttttgtgacacaaccaagagttgaggaggaggatgattagaaagtaaaagagctaagaagcatatggatgactcaaaacgccaatattccactgagaaggaaactggctaaatcccctcgcctcttatacaaagctgaaatgacattctttgatctaacactactactactacacaagtaatgggtttcttctgctcaagactccatttttatttttacttttggtgggggccttatgcacattatctcttgatgtgttcggttttgccttagttatgtcttttttatttataaatgataatactacatattattacaaatcacttaattttttttttccttttttgaggcctttttcccattttgggactcatgtattttgggcatcatcatattatttttatttattttggctatcatattctgtatcagctttagtttgtaacacagtttatagtttgagaaatgaaattggaagcttttataactaccttttatcttttcgaaatttcctcgaatgatagcataccttgatatcaaatgaaattacaattaaaactgtaaattcaggtcggactctttgatacggcatgagcccaacatgagtttgaaaggtacgggcacgacacgacatgaaaaaataattgtgctaagcacagcatgatgatgtaaattgacacaacacgacatgggctttagcatgacacaggacgataagcctgaaagcaccgtaaaaaaagcacaagcatattagcttaaaaatacgacacgtaagcacgaatatataaaacccaaaagtacgacatgcaaaatgctcaaattaataaagatgccacttgttgatattgaacgacatgtccccaaaaagttcactttgatgcagataagtcccaaaatttaaaaaattatggtagccccaagctcaagattctcattaatccgtaggtatctaatttaaccgtttgtaattcttaaaaatgtcaagtgtcaaaagtttattagtccacatcatagaaaaacgatttaaaaactttaataacttttttcgttttttttcaattcttttattaaaaattataaaactttatatacactaaaaaattacaattttttacgattttccacccaaccttcttggtgatcgaggcttactgccaacaagtacaattccttcatttccaccttcttcctcgtcccatcccactatcccagaaaattaattaagcaacagaaaaaagaaaatatgtgatcga

SEQ ID NO: 37885 - DNA, 3594 bp, Cannabis sativa
tagggcataaaacccaacaggacactcataatcgatttcaacagagttcctataacagaaaaaataagaggaggaggagaacctcctcttggagatggatacgataattagttagaacgtctgagggatcaacgaccattacaagcaaaatcaagttaagaacatgttaaatgttcataaggctggtcttgttggtctcctcgagacgagagttaaggcccagaaacttggggccttatatgttaatatgctcaaggggtggtgcttcacttcgaatattgcttggcatgaaggagggcgtataattgtggcatggaatcctttcagttactcggtgaacatactcaattgtaccagccagcttattcatcttttagttgcaactttaaatggtaagcataggttttatgttacatttgtttatgccttcaacaagttgaaagggaggaagatgttgtggtcagatttaaagaacattgctactcatgaaccatggatggttatgggtgatttcaatgaaattttgttcaaagaagaaagaatgggcaagagggtgaagtataatgcagcaaacgacttcatagattgtgtggggatctgcaaattaaaagacataaagtttggtggtagctactatacttggaacaacaaaagacaaggaagtgacagaatttgctcaaagattgatagagttcttgccaaccagaaatggttagataatttcccaaatgctgaagccattttttcagctgaggggttatttgaccatacgcctactattgtctctatgtaccatgaaatacttagtggaaaaaaaccattcaattattttagaatgtggacttcccattcgaggtatgcagagatagtgaaaggagtctggcaacaaataatctctggttccaaaatgtatcaggttattttaaaattgaagaaacttagagtagctttcaaagaattaaataagaaggatttcttaaacatacaagaagtgactgaaaaagcaagagaagaactgaaagatctccaaaagaaattacaaacagagcctctgaaccatgaattaatcgacaaagaagtggctgctagacacaagtatgggcatcttctcaagggtctgacttcatttttgcaatagaaatctaagctcagttggataaagatggagacgaaaatacaacaatttttcatgccagcaaagatcatcatggagaaagaactgatgaactagtaaagattattgatgcctttcttttattttatcaccagctgcttagtactaaaatggaaaataggaggaaagttattgatggtgtcacgaaacaagcgccttttagtctccaaatcataagctgaatcactattgaggaagttttcaaaggatgaagtcaagaaagtaatttttgaaattctagggatcaaggcaccagggctcgatggctataccagttgtcttttccaagaaaattaggatttaattggagatgacattagtgaagttgttctttctttcttgcactcaggtcaaattctcaaagaaatcaatactactgtattaacacttattctcaaatgtaagtgtcctaatacggttattgactttagacttattgcgtgctgtaatgtaatctataagactacaacaaaactaatctactctaggctaaaagctatcttacctgatttggtggctcaaaatcaggggggttcattactggcaggtttattgcacacaacataatgttctgtcaagatctgattaggcactatggaaggaaaacaatcaaagcagtgtgcatgatcaagattgatttatagaaagcttatgatacactcgattgggatttcttggaagaaaaacttcaagctttttcagttacttgataagtttgttaagctagtaatgatatgtgttcgtactcctaaattctctcttatattcagtggatctcttcatggatatctcgaggggaaaagggggttacgtcaaggagagcccatgtcaccattactctttgttcttggtatggagtatctatcaagaataatgttgagaattggtgccaaaccacattttaaatttcatgacaggtgtgaggagctcaaattgaatcacttgatgtttgcaaacgatgttatactcttctgtcatggcgacttcaagagtatacactatgttctacaaggactaaggcttttctcctgctcttcgggtctgcaaccaaaccccactaaattttccaatcactgttgtggtatggaagatcatgaaattcaacgcatcatcgacaactctggctttagcaagaaagaggtacctttcaaatacttaggtatccctatttgtgctaagcgtatttttggcaaagaatgcattattttagttgataaaataacaactagaattaaaacatggtgttcaaggaatttatcattagcaggtagagcagtgtttgttaattcaatttttctatccatacactcttcttggagtcaagtaatggtcttaccaaagaagactattagagatgttgaagccatatgatgtgcttatctttggaaaggtcaatatttgtcccttggttctggaccaattgcttggaacaaggttttccaaccaaaggtagtaggggaaatcgatttgaaaagaagcttagaatggaatatagcagcgatgacaaagtatgtttgggcaattgcaaacaaagaagataacatgtggattagatggattcactgtatctatatcaagggagagaactggtggagctaccaagtcccaccccaagctagctgatactggaaaaaactggttgctgtcaaaaatcaagttagagtttgtatggatattcagcagtttacaagtatgcaatataagatctccaatggatataaggctctatatcctactcaaagaaaagtgaattggagccaagaagtatggaatagccttaatattccacgacatagcttttgtttgtggatttccattcaagatagactcagaactagagagaggttgcaaaactcaacatcatcggagaatatttcttcctgttctgccgaaaccaaatagagacatctgatcatctatttttctcctactctttctctttactttacttaatacaagtaaaggaatggatcgactggacagtagaattgacatcttcatgcaaactgctgagatggatcaaacgagccaagctaagcaggttcaagaaagcagtattggctgctgcaattgctgctcttatataccagatttggaggaaccaaaatgacttacttttgaattcagcaaagtagaaagtggagcatgtagttcgagttatcaaagaagatgtgaagagaagaattacatgcatttggcttaaaaatgtcaattcagtagatactaattggttttcaactttgtaaatttatggcaagtatagtctttgtagaaagcatagctgagtttttgttattcattgtatagatggagaaatacagatcttcaaattgaagatgcttgtaggatgtaaattgatatttttggagtaatgaaattcactgattgaccaaaaaaaatcctgagatggttaggttcta

SEQ ID NO: 37886 - DNA, 1444 bp, Cannabis sativa
gttaaaactaaagttcagatagtttagccgccaagatcccttaattataatatgtgcttcctattatcaaccaaatcccattatatatatctgtccatcttaattttgttttttttaataataaaatttggtggggtccattcatacgaaaactaacaccatttgctggctacagatcatgactattgtgctcttatataattatattcgaaatcgaaacatgtgtgctgaatatgagatgagatatcaccccttatattatggaattaacatatataataagttccaaatatttgcttggcttattggcaatggcatattcgggtgtcgaataggagagaatttatgaatattatagtttgagtgatcaaaagttggatatagaattaatttgggaaaatatattcatgcatgattctcgtgataaaggtgaaatattgtcgtatgggatatagaattagattatttatttaaaattcgatacgacacaattctttagcagtcgttataagacaagagaacacacttctcttttttagattcttagtttacatgtgatcttttaaatgtgcttaattcaatttcttttattctattctgatctatttacttcattaatttattgtagcttccttgttgagattttaaccaccaaaagaagaagaagacaccactagcaaagtatgcaccaaaaaaaaaaataataacaataattaacaaattaattatacaaccacttaaggctaactcaaatattcataggaaaatgtgtatttagagttcttgattggaatctcaaactatgcaatgtgtaatatgtaaatgcttaattaaaataaataaattaattatactatttctataaaaatataaattaactaattatattcactatctgatgattaattaatattatttgaagcactcgggtattgaagttgtcgcttccatgtgatcacattggtctctgttttgaagtccttggttttttgatgatcacacaccatgatttcggcgatgggattctgcagcgacgtaggcagcgacaaggggatcttgttttgagtttggtttaaaatctgtgtttaattttgttgcttctatttttactgttagtagttaattctaattaggtttttatggggttagattcttagttaatttactgttattagtttatctagtaaaatttttgtcttttgtcttttgtcttctgttcggttccgttaccgtaagtcttgtctttgtgacatggtgtgattgttttatggtctgagtttggttcttgattattggtttgagattgttttggtttttgccattattttttagtttgagaagtttaagttttctggtttgagtgactaagttttctaggttgagatgttttatggttgtctggtttgagatggttgaaggcaggtttgggtggggttgtgtggct

SEQ ID NO: 37887 - DNA, 2795 bp, Cannabis sativa
tattattttgtagattttttttttggtgagatagaaaattaggggttatttttataatattaatgttttattatatctagctttctggaacatctttttctttcttatggcaatcgcaaaatactcgtagcccatgatttagttaagcaagctcactttttacgtaacaaagttactttttatataatttaatatagtattgctattaagcacatgaggtgacactttgtgaatgtttagtgatattctattacaattattaaattaaattatgtaagactaatacttaattatatcaataacagtataacatcatagaaattgctatatattttgatcacactacttagtgtaaggtaaaacacaaaccatttttttccttcataacttcagagaaataaaaagtacataagatgacatgaaatcttgtactctcaaaatctcacatactatgcttacctatgaagataaagcaagcattgtagattctattattgaacaataacacattcttctctcttaccttacctcttaatagataaagattactcttacatatcactcacaagagggagtgtagcattatgttcagctgagaaatcccatattctttctccaccaaaattgaggttgtattttggtcttttatcagggaaaaaaaccccaaaatgcttctccaactctggttgtttttggttctcattaaacatagcaaaaatataggtctcaataggcttgttaggcctcttaggggaacctttcttgacatgcctaataagatttgagagataagtccttgcattgtcatccgaggtggcgaaaccaccggccgagggccaaccactttcggacaccacaacatctaatgagccaccccaaacaccttcaagagaagagtacaatgcatctaatattgcatcaaagagattttggtatcccaatcctttgtcccaaacaaccacatttggagaagtgaaaagagcatattggagtgagatagcaccagggttatccctatggctaaaataaggatatatattagccaaaagaggtgttttagcccaaaccaaatgaccaacaattggctcaataaaacctctaatgtcacctctaaaagcaccttcagatggtggaaaagatttgcctattaatgttgtgtcaattgctgtggagaccttgatttggtcttggagaccagctgatctaactgcattgaacacatttaccaaagctggtaaaacaaactgagcaagccaagctgtatttccactaattggactcacttcatttccaactgcaatgtacttgaatctcacacttggccagaaattgaccacattttgttggacccatgatgttgcttgtgaagggtctgcaagcttttgaagatctgagtttggaaacccaagaattacctctatgtttgaccctctaagagcatttaaagcttcatgatttggatcataaagtctcattctgtttatgttgtttgccttgtacagagccacaacttctgattttgatggtaaattattacccatcattccataacaaacacctactgattgtgcacctgtataaacacaaatatatatacacatcaaattaccatatatatataagaccctcttgagttaaggtacatatgaagctcaagaagtataaagagattaattattgtacctgaaatgccaagattaattgcaactatgaataaacccaaaagaagcattgtagtagtagccattagagatgtgtttattggtaaccaaattgagtattttgatgttatatttcaggtctttatatagagatgttataattaattaacttgattattattattattattgtaaatcaacttgattttttattggccgcctagctagtatggtcttattatacaaatcacaattcaatgtataagcatggcttatctctttctcaaatatccttctccattttttatttattaatttataattattattagtaataataaaaaaaaaagttgtaatgtggatggatatgtgtgacgtctctatcttagactttgaaaatattattgttaaaatatatatgactatggtatgtaagattttgaacctaacttggatcaattttccacgtacggttacataaataaatatattttataacatatgagtcatggttatacaatacattttattatgttgaagtaaataaatgggacaatatatccttacaaatatatatatatatatatatgacaatgtctagtatttttttttgaaagcacaatgtatagtgtttactatttaggaaagtgaaaatatgctaacatatttttgaataattatgttataaaagaaaaaaaattatgttatagtgtaataatttgtgttcactaatttctacttttttttttaatataataatgagataaaatgaaaaaaaaaaatattgtctaaaagtgacttattttttagaacagaaaataatattttattggtctcaaaattcttattttttataattttattttcaaaaaataattttttatttttaaaaataataaagagttttttaattataatatcaaacatacacttaattattttaaagtgcacataattatcctaaactcttttcatttttaatttttttgggtgtgacatgcgtagtctaggagaaatgaaaaatccaactagctatacaaagtctaaaatagaccctgtacattgttattttggattagaataataatattcattcatatatatatatagagacacaaatccatatatgaataa

SEQ ID NO: 37888 - DNA, 1675 bp, Cannabis sativa
gtaacagtggaatgtgacgatttggccaatttgagtcacatttatacggttgagtatcttagatttctcagggcaaaataactaggcaatgtgaatgttaggattagtcagtgttatggttttggaccattctacccctaggttaattttgcttcatggttaagaaataggaaatttagtaattttgccttaagatgtttttagtgacgagtttaatggtgtaatagttcagaacttgttttatttaattaaataaattaaaaataaacttacgatcaaaaattagaaataaaaaaaaccaagtctctttctctctttcctcttgcttcggccttagcaaaccccaataaccagaccccctttccatcatttttcatacaaaaaattcaagacgaatttagtaggaagctaagggttttcatagctaagccaaggtaaaatctttgtcctttattttatttagttaaagactaggttttggcatgtaattgtttggttttagttattgttcgagttagggatgttgggaaatgtttctgaagttatttcttggttaattgtactgttttaagcttctttttaagaatgtcttgagatttcaagttcaagcttgaccctttcttggtgatttttgtttctcagggttgatgatgaaaatttttgttacaataggttgtttatggcttatataggggttctagagcttattagaaaatttgggttggttttgtttgataaatgagattttatgaaaatttacagtagaaaatggtagattgtttctcaagaaacggtctactgggtttagcaagtggggacccaagaaaaatgatctgccatttgtaagaaatggcctaccgttttttggggttatttttttgaaatctcatttttctatgtttatttgatatttagagtattgccatgctaatttatcgataggaaatttttttgttttaagtgaaagtcctagaaaagtgatttagcaaatcatttagcagtttatgaatgttgtaacttaggggccgttaaattgttgagtagcagttttcactaaggttgatcgagacaaattcaggtaaaaatagtataataattgcatgtatttgcatgtttagcgtacatattttatgatttcctaatagataatatatcagtaagagcgatattagtgtatatagaattaaaacataatactgacatatatatgtttggtaaagtatgggttgtctctatcacatcattatgattagagcatcgactataggttgatattatggtcagtcatactgtcgtacctatgttctagacatagtacccgttggaagtggggcaggattgtgattggtgtatgggtgcttggttataatccaatttatgtttatgttatgtttatgcttttcttactcagtctatcgactcacaaatattgcttatatatgtgataaaggcaaagaaaaatttaaacatcagtgagcacaagctaaatgaagattgtacatatcgagacaattaaaccttgagtgtttagatcttcaagacaaaaggccttattttatagtcgctaggcgataaattttgtaactattgtattttgaaaactagtgtaacttttaaaataggattctggaatatgttttgtactaatgtatttaaaattaaatttaattacgaa

SEQ ID NO: 37889 - DNA, 2222 bp, Cannabis sativa
ggaaatacgatcaggacatgaaccagaagaacgagctaaccagttagccgcttggttcccagatcgtttaacaaactgaactgaaatattaaaactagaaaaggataataaaattattaatatcattacattatttgtttacacttctaaaactatttaatagctttatattgtaatgagattaatggccattacattattatatattagaaccctcgttatatgattatattgttagaaaaatgtttctcttatccttcttacttttatttaaattttcaatattaaaaataataaaattttaagtatatttttatttatataccacttatcttatttaattataatattcattagaaagttaaaccaaatgttataatatatatcattttcattacaatttttattttattacgtcattattatttatattactattattgttctcattacattacttcaaaacagtcgcctaaatatatatgaaaaggacatcaaataacagaaattacaaactatgtaactatggccaatgaccatgagttattggatcaaaatatatatatatatatatatatataaaaatataaaataaaaccccataaatttgggaaaaagagaatgttaagaaaaaccattttcttaatttttttttttgttgaaaagttatagtttagaaaaaataaaataaaacttgagtataatataaaaaatttatttaggaattgaaaagataattttttttaaatatgttattttcctcatgtttgaattcaaataaacaattgtgaatccttataaaaatattttctaaatgtcatatagtttataaaacttagaacaattataaatatattaaaaacaaaattaacaaaatctcataatttttttttctacactttttccttaattatagaaactttattagtaataataaaacttgaagagttacaacttcttagttaatttctaagcttcaaatcacatgttgaaatattttttttttaattttttttttatagtaatgttcgttataattataatatccaccttgtaaatttttaaaaatttctaaataatttattgtaccgaaaatagagttcttgatattccagtttacgatcacgcatgttcaaaaaacttcaaacctatttttcagtattataaactattcaaaaatttataaagatgatattataactataacaaacactgtcttaaaaaaattgaaaaaaaatatattctgatatatattttcaaataaaaattaactaaaaaattgtaataaaaatttggcggtataccactcatcttaaattgttttctctatctgtatcggtcaaataaaacccatacggaaaccaattcacacgataatattaatgaaacaaggccattgccctttgttgttgtagttttatatatattaatgttactatcactaaatactatatctatatggtaccgtgatatacataaatttcatctttaaatagaacaaaacaagataatattaatagatagatatgatataatatgatatataaaatgaagaagattcaaagataagagttgaataatatatgtagcggtgcaacttgtaacatgtaacagatatgttgtaaatgttggcagttcagatacaaatacaaattaaagaaaaaagcataaaaaaacagaaaactacatatacaatgatgtatatgccaacttgtttatataataataatatagtctatattacacaaacaatcaacttgatgatgaccctttggtatatgacaacaggtaaaatggactttaatattgtatttttcttttctcatataaaaataaaacaatgaaagaataatgtttacattcgagtttctgcatatacacgtgtttttgctacttcaggcaatgtttgggttgagttaagatccaaaatgaaataatatagggaaaaggacaacatacattaacaaattaggattgggaactgcaaaaagttgataaatcaatcacatttagtacacatcggtataattacatccaaatatacagcaattgtaaattctacacctttgtatttttaataagaaaatttgattttatatacttaaaaaattaaaaaaaaattattattaaactaaaactctaaactctaaaaaaactatgacattttttttaaaatctcaaacatacccccctcacaattcacccattctctctctgcatca

SEQ ID NO: 37890 - DNA, 1316 bp, Cannabis sativa
agaactaaaagctgaaattcaatgcttactcaactagcagagccatttcttgtaatgaaattctaacaatcataaaaactagtagtatggaatctcaccaagcaaagtgaaagacatatagatatagtatattctatcaactaaattttcttcaaagatagtcaaaatttataattgggaacatcttatgagagattagagattaaccaaaacaaaacaaagtaagaaactgaccaattccatagctgagtctaacaacagcaccaatcttctcccaaaccggaaactcagtatccttaaaagaatccaatgtagtgacctccatagcaggactcgtgaaccctcgactgccctctccttcacttcctctactatccacagcttctctactcccttgctccgtcgaagctttaaccggtcggaactgaaccatgtgaacatcagaaaaactcagtctcctttttctcctccttaccctcgctggaaaatcactaagcctcgaacatagtccaactctaccggaaaacgacgccgtcgaagaaggattcaagtacatcaatggaagttccatacccaaaaaaaaaaaaaaaacagtaacaacagaagaaaaagggtgttcctcagaatgggttggtgtcaaaatctcgacttgttcggtcttcttcttcttcacggagcatagtagctttccttcttccaaatttggtctcttcttcttcttctgattttttttattattattttttggttttggttttttaccagagaacgttgaccgtccgattttgtatggtttttaaggtggtgaggatacagatgatcttgaccgttggatttaaggtggtggttaatctgacggtggagaaagacaaagtgggcccagttagggggaatgttgttagattagagaatatccagttggcatatgggtgagtgacacgtggagataacgcttgccattttggattgaattttgtgttttttacttggaaaagagcgtacaaaagttttaaacacaaatttgggaagagtttataataaatggaaaaagttaaacatgcaatatcataagatgggataaattaatgaaaagtaaagaatttgactttaaatgatcaaaagacaaattaaaagttgatctcaataatgtttgttgattctttttttttttctacaatttaagtttttattttgtaatacatctactcaacaaataataatgacatgagacttaattatttgtaaaaattaacatgtttaacaaaatggctaattagtaaatttttcccccgaactttgacacgtactaaatcgtg

SEQ ID NO: 37891 - DNA, 2570 bp, Cannabis sativa
aagaaagatgatcttgttggaatggttttgtgtttgtcttttacctttcttttgagtgtttgattttctgttgggtagttctgaataatgattgctgctgttttgttcagttcttgctaatagttttatctttgcgactgagttttctttagccttttcttgttttgggttgttactcaggttatgagaatccaacaggtttatggagcagatcatatcatgttagtatgaaccatcggtttgcactcaaaattttttacttgtttgatcatgttatctccttattcatatttgtacccttgctctctctgtgcatttatgcagagcgtctatgatcaaaacccttatgttatatttcaaagttacgaaaacactcctcaaatgtcgtacagaccatatgctccctcttctatgaggcgtcatggccactttaactctccacaaccatttcccacctcagattaccagtcaccagtttctccaaatgctcaatatggtgctgcattaagttcagttactcaggcagcattaccaattgagttcaatcaatgtacgaacagtgagattgctcggccaagacgaggtccatcgccacttgaatattctggtagagaaagcaaccttattgaaaattttgatggttttagtttgatgcagcaaggattcgagaggttaggaatcaatggattatggtcagacgtgtctaaacctatgaatgatcagagttctctaatacaaatgttacctgcagctgcttcttcaaagcaagttgatttacaggaattgcctgaacttagtttcaaaatggttagtttcagttcaatatataagttgattggaaataatgccaatgccctgtttaacagctctttaagctactcatacataatttcccttgctcttgtatattttatctgagctgaaaaaatcaaattattcggtgagaaattgcacttgcctccaaaatttgatcacagtgatgctgtgtagatattttagtgtatggtctaactgtgatttttacaggcttttcaacatgaaggactagtatatggctccagttcttgtacaagttcctatgaaggctactgttatgatgattaccgctgtagccataaaagtgtatcaaattacaggccagggagtaatggacaaacctggtctgtaagtaaggaggccaaggaaggaggaaagcatgatcttttatgccgttgtacaggtatgctagcaacacaaactgctcaaaataggggtcctagggctttgaagaaaaaaagcctgactgcagcaaatggttccatcattaatgaaagcaagaatggaacatccccaaatgtttataatgggaatttgaatctgctggactcttccatcaagtatagggatgcaaagttctttgtcatcaaatcttacagtgaagataatgtccataggagcataaaatatagtgtttgggcaagcactccaagtggcaacaagaaattagatgctgcatatcgtgacacaaaagaaaaagagcaagacattccaatatttctgctattttcagtaatttacttccaagtctttaagctaccatttatacgtctgaacctgaacaaatgtctaaattattcgaagtttattagtgaactatgtgtagcaaaacaagggattaatttagtgatctgatgggcataggtccgaatggagtaatttaatgaactttactggcaagtttatcaatgttattcatttaagcagtcttctaatttgcatttcagaggagttgtaatttctttgtgtttagcgttaaaagattacaggtcctttggttaactgtttgtgtgcatgcatgcatatttgatggctcgtattatttctttattgtttttgctgtattattgacacaggttaatgctagtgcccaattctgtggagtagctgagatggtaggacctgtagattttgacaacagcgtggactattggcagcaagacaaatggactgggcaatttcctgtcaagtggcatataataaaagatgttccaaacagtcagtttcgtcacatcatactcaaggacaatgacaataagcccgttactaacagtagagatactcaagaggtaagaaataatatacaggacctgaaacttttgttacatttctagccatggagttctctgctccattttatctttttggctttattgtacgctttatctgtatatcaatgtgatcagaaaagaaataactatgtttaaagtagagtttttccaatggtgctagtactactagtatagtatttaatggaagatttttgcaggtggaattgcagcttggtattgatatgctgaacattttcaagaactatgaagctctttcctccatcttggatgactttgatttctacgaagaacgacagaaatcgacgtgggtaagaaaggttggtcggcaagcaaactcaacttcgttgcttgaaaatagaggtaagatgctgcatcatcccaacatgtcaagtcactttccattgtcttactcaagacaattttaaacagctattccttatcaacttgtcattttaagtgtga

SEQ ID NO: 37892 - DNA, 2574 bp, Cannabis sativa
aaaatttagtataccatgtaaatttcctttaaaaaccctaaaaaaaaaaagaaaactacaaccgtcttgtttataagagaacaaaggaaagcccaatgcagagagtttagagtagctttgaattcgaaactgggccgaggcccgagacccatgctgttcacgaaaagtacgcgtgcaacttcttttcaatacgtgtcggtacatgattggttaaacagtcaaaagactgacctatccttaatttcttaaccaattatccacttccacgcgtgtaaactcacgtaattacgctacaccaaaagccgtcggtggaaccaagaaaaatcaccaaaagggtttatttttattattttatattttcagaagagaaagtatattaatttaagaaactgacttagatagaaaaccagaggcctttttggttttagagagagagagaaagagccctagtttccacactcagttagattaagtagacgaagacgacgatgtccgggacaactgcccagccgcagcaagaggaggacaagaagcctaacgatcagtctgcccatatcaatcttaaagtgaagggccaggtattatctctttgttagggttcgcaagtttgaattttgtgtattaacaacaaatccacgaattcatcttagacgggggttttatttgattatcgaattgtgggtttgttttactttttaccgcttttgtttgtttcctggaaaaatttaggccatgccttttgatgtctggggtgttctgatttttttttttttggtgtatttataaattctctgaccctttgtatttttgcttttggcattattattttgtttatccttcttgtatttggtcttcgaacgctgaggctaacacttaacttgaaaacataatgtaaagttggttttatggttttgtaagggagtgctaaactgtatatcaagacattatcgttactattaatccattttagtgaggaaaagggaagcagtttatacacttgcgtgtgacatacgttttgttgttgtggtagtgttttggctactcgtgtctattttgattttctactttcttgtcggactgatgatgtgttcatttggaaattaaaagggtctaaaatttgttttatccagatgagttccccttagaggggttcaaagacgatggtaaagttctaatttttatattgggtttaactttgagttttggttagaagccttatattgtttgtggtttgtttagtgggtgggagtaacatttgaaaagcgaagcagtggattaaattggaggtggtatgtagtttaactgtgctagtttaccagttagcttgcaatgttcattgtagaagtatccttgttttatttcttgttattgggtactttctccattggtcttgttattcagaaaaaagtaaagatttcttttgatgaaataatgtagaggtttttattcacaggtcaactcttttattgtctgcttagtaattttatacaagtcctctgtatctaatagtagtttagtaatcaagatcttaatgagtgtattcgctagcttctattttattatttttttgctatccggtgttcttatatgtcttgaaaatgtaggatggcaatgaagtatttttcaggatcaaaagaagtacccaactgaaaaagcttatgaatgcatattgtgatcgacaatctgtggagttcaactctatagcatttttatttgatggtcgtcgccttcgagctgagcagactcccgacgaggtctttctctcattctcttaacataaaccttagtgtttttttcatgaatgaattactgatgcagttttttatatgtgcgtataactgcagctggaaatggaggatggtgatgagattgatgctatgcttcaccaaactggaggtgcttcttttatgtaatcataaaatatggcgactctagtagtactatatagtgaactactttatgtggatttggttatgaaggattaggtgtttagtatcttttttattttcttttttaagacttgttctagtattctagttatcggcctagggcgaatcgaatctatttttgttatacttcttttattggtctatggagtatgaaggtatcggtttatgcttaagatgaatgtgtgtttggcctatgacttgcactattgttaggcattagcttgtgatttacacagcaataaagaatttgaacagttaaagcactgcaaattgtggtattttttttgttataccaaagtggtatacattaacaaaaatcactattcatactatttcttaaaatactaatatagctgaatagaagaattttcctttaaaatattattatagctatataaatacacaagcaagtctttacatactatttacatggatagacaattgagtacaactaaatcccttgggacttagagcgcaggaagaaaaataacattgtgaatgactttaaggagataaagacaaaaagaatggaaagaatgaagctttttgtccagtacattcagtaatatatatatattgatgtatcagtgaaagacttgaataccctctccaattttgttggaga

SEQ ID NO: 37893 - DNA, 3244 bp, Cannabis sativa
agttgttaagaatagggctctagaaatcagaaagttaaaattgactaaagtaatataaaagaaaaaagaaaaaaagttggcatatatctaaaaccaaaaccatccaaacaaagttgagcccaccaatattatagccgttgcaagcgctgtccgtactaaaactattataacctattgactattgactactcacattttgtttagtgataaaaataaaacacagccatagtaaaagctttaaataaatcccctaaattagggtttttactaataacaatgaattactttaatataaattaagaaaatattttaataataataaaaaattaattgatggagttaaaaaagggtacgtacttcactacccaaccaataggaggtggtgaataaaaaaagcttattcccaatcaaaattctaagaagttcacattgtttatttctcatagtgtcacactagggaacttgcagtatccataacctgaaaataaacaaaatataaaattaaataagaaagaaaaaaacattgattataatatatattaggaatttcagcataaatacctctaaatttcactatcaaattagagattctaaaattatctatatttatttttttttttttcttaaaaacaaaaaaaacaattgccaaaacaaattcactctaaaattaacaaacagcgagacatttatgctaaaaattagttaattcattttttcaaaaaataaatatcttaataaagcataacaaacccatttgttttaatttttaatttacgcatttttctaactgggcctaaaaaataggttaaattgggcttacttggatctttaatcgtttgagtagcgagcccatcaaagtaacagctccctccagtcttcttaaactgagcccagtaagaactaaacgcatagctgacgtgtcgtatcaacgagttcgggtgacgacaatacccgcgaggttgaatcgggtcacaggttttattcccctgcgagcaagcgtacgatagcgctaaacccaaagccgtcttattggctcccttcgccgccacacaccaaatcttccccttatacggcgtattattctccggcaccggcaacggcttgtactccgacaaaggcgtctcaccgctcaggtcgatctcatacacgggcttcccatgcgggtgtaacaacccgaaatgtcgctccgtacccggaccaggtttctggttctcattgtacaaagcgaatatgaaagacggtaaaaccgaaccgggtcgggccggggttccgaccggaggtttggccgtgaatttcttcacgacgtttcggttgtaagttgcagcgttgtaaatattagctccaatctggtcgaaatcaccgccattgggccaacccgtttctgcaataaaaatccgaacatccgggtacccgacccgtttcatagcgaagatgactgagtcaaccatttggtcaaagaggttagtgtaggttaatccagtgtttggatcggtgatagtgatattcttggattggaatagagcataatccaggttaatggttttaggttcagaagaccatggaaaataggggtaaacatctaggaataggaatgattttgttcggttcaagaattgtaacatgggtttcattacagagctcgaaatatcagacctgaaagtaccattggaaggtggaaacgaagattgaagaacatccatggctaaagttgtacccaccttgactttatgggctccgtggatttttagggctttcttgatttttctcatggctgggacaatactaaaccaggatgagttatctgtaccgctaagcatttcgtttccaactaagagatatcgaatcagagtttctgggtaaaaagggactaaatttgtgtgaacccattgattggcaagtgtttgatttgtggaaatgtttttgactaattggtttggtaccattattgagacttgtagacctgtgtttttcagtgctttgaggatttctgggttggcatcgtagattttgactcgttttgcttttagggatttgattaattcaactgaacgagatggagttggtagattgttacccagttgaccatagttgactcccactgcacctgagatctctgcacctgtaataaaccaaagaaaaaatgtattagaaatacccaatacgatgtcgtattctgtgattagctttgtttagtgaaaaggagaaaaaaaagcttacaggatgatgaaactaagaaacagagtatgaacaatggaataagagctttttccatggcagttcgagttcgaagtactgagtcaactcagctcaaaccctgaaaacaaatataaagattgaaacttttgtggattgtaactaatgggtgtagagcagaaattgatgttaattaatgaatggtttgcttaaagaagaaatcatggagagagttgatatagaacacttaccaacgtagtgcgtggaatcgagggtaagaccaaagtgatgggaatatcacttttttaatattttcaaaactttttttctttgtgaaaagataaagaaaagaataatagagaaagaaagagaacgtgagatgagatctgagagaacagatcacagcaaaaaatgggtccctttcttttcagtcttgtaagaaaattataacattaacattggttggtttcgtggaagggatggaaaagtgggaatatttatatgttgtagttggacaaagtgaaattagccgttgagggagtggttgttcagattaattaatatttatatggctttaatagatttgcttacctatactcttttcaacttgttattataacttttttctgctgtttaactttattatgttgctgctaatcttggaagctttacttttcaccttttattggcttctaattagtgattattaagaaacatcattttagaattggaaagaaatgtcatatcagacaaatacaggtgtgtgctaaaatgacgagattgttttttatggtactgtcaagtgagcaacgtgttgagcacaaaaatgaaagtgtagtttattgaaatggcactagaaagtggaaaggtcaagcttgatattttccttcatttttatgttcgtgtcgagtcgagactaatgtataacgagtatatgttagattcgaaaatgacccgtttaataatcgtgttaaaaaataaaactcaaatatgatttttttataaaggggttgatacgatactatcagtgtaatctatttataagcatact

SEQ ID NO: 37894 - DNA, 2851 bp, Cannabis sativa
cagaactgtctcataccattggcataacaaatgtctaaatttcaactaagatctgtataataatgtctagttgtaagcatagacaattgaccaagtttaattcatgacataattatgccattgtttaggagttagttgacttgaattggccatgatttagctgaccagaaggttctctgcctatttgtgttgttaagacaaatgcggagtaacggaggcctgttggttggtggattaataacttctaactcctgtaatttattaagttggaacagtcacaaaaacgtatgggttcattcgttagcctttctgtcacccttgtaatgggggaagtaagctgtgttcatatgattatttgcatctcaggaaaatcaaatgaaccatatttcggtgcaggcgactgaaaccaggaggtggaggtgtaaatgctgcaattttcagtgctgcaggtccagccctagaggttgcaactaaagaacaggcaaacactcttcttcctgggagggctttagtagtttctctcccttcaaattctcccttgtttggtaaggaaggagtaacccatgtcatacatgttcttggaccaaatatgaacccacagagaccaaactgtttgaaaaatgactatgctaccggctgcaaaattctccgcgatgcttacacatcgctatttgaaggttttgtgtcaatagtaaggaagttacccccgggaagtaatgataatcttggttcaaagcagtcggagatacaaatacgcaatgaaactgcctcaaagaatagtgagcaaaaatttagaagagatgatgatgaccatgaatctgataggactaaaaagtacaagggatctcatgttgaaactaaggtttctaattctagtgttggaaagacaattcagagtggtgaaaagtttgatagaacagcaactaaagcctggggatcatgggcacaggctctttaccacattgccaagcaaccagagaagcataaggaagttgtgctagagatgtctgatgatattgttgtactaaatgatctttacccaaaggttaaatttgacttcttttttatgtgctctgctctgcaatttatgtttgatctaaactaagatattaagatttgtccaggcacggaagcatcttttggtgttgacacgattggaaggtcttgagcaactagctgatgcacgtgaggagcatctcccattgttgagaaaaatgcacgatgttggtttgaagtggaccgaaacattactgcaagaagatacatctttgatttttcgcattggctatcactcggtatcttgctcaaaagcccatcattattattttattatgttcaaatatttgataggaaccatagtagcatattttgttattttaggaagataaaaattgattgctgaaagatggagaaaggtattggaaattcttaaagcaattacctcttggcgccaaaaatatcattttccatgtaaaataacttcatatgttcatcttatagagtcagatctaatttagaaaattaactgagttgactggataggaaagattatatgccattaagctattgagctgtgttttgctgcactttattattattattattattattataattattgttcagacactcctgcaatttccaatatattttttttttatgaatctataccatctgtcttctgatcagtaaagaatgaaatctataaagttaacatttggtaataagccttctcgaccatctttattgcaggctccatcaatgcgacaacttcacctacacgttatcagccaagatttcaactcaaaacatctgaagaagaagcaacactggaattcattcaccactgctttcttccgtgattctgtggatgtaatggaggaagtcagcagccacggaaaagcaaaactagaagatgatgaaaagctgttgtctatggagttacgctgccaccgttgtagaagtgcccaccccaacatcccccgcttaaagtcacacatcactaactgcaacgcaccatttcctgccaacctttttcagaaaggtcgtctagtgagcgctccaaacaacaccatcatcggtccataaaagaaggaaccgtatccaagttttattctaggaaagtttctttttcaatggcattgaacactgtcaatgtctattttggtgcaattgttataatgttctataatatggtctgttaatattttgatgggggaggattgcccttcttaaaggccatgttgctttggtatatgctttataatggatgcttagaacaatctttttaagccataattagttgaattttgattcttgtcccttaaaagagtggatagaaagctgagaaatgtgatttgagagaaataaagcataaaaagtgacggggtttaagggcacttgttttatgtcaataacttgtaaattttaatgtatttgattctctttcggatttatcaaactaaatcagtggtacaaaataatacaaactatggtgttgtcaggcaaatataacctctgaacgtgatagtacaatgaagtgaaatgcacttatcaccctaagaggaggcatgctactatgtattttaatattgggttttataaagtgaccatggttatttagggtgatttcggcctcgagctcgtttggtatactgtattgtactgtattgtataatattgtattagattatattgtattgtattagtattatttaatacaagattatattttatattgacttgtattaataaattgttttaagttacacaatatttgccataaactcgacccaatctcgactcgcgacccaaccttgaacccctgaaccggtttgggtcaagtcaggtt

SEQ ID NO: 37895 - DNA, 2696 bp, Cannabis sativa
tgtttacatgcttcccagtgcttgacagtgggagccttaagtaattggcttaacttgttggtgatgtaggcaacaccaggtcgagttaagctcaagtactgtaaggccccgattgtacttctacacaaagtgatatctttgaaaggatctccatcaagtagactcaacttcgagattgaacttgtagggttaggacaactcttagctccctccatgtgaactttagtaagcaagtcagttatatatttgctttggctgaggtacatgccatttttctctgtaaacttcaactcctaagaagtaatgaattggccccagatcttttaatgaaaatttagtgttgagggcagagataaaattgttaataagagagagatttggacctgtgagtagtatatcgtccacataaaccagcaggtaaactaaggtgctgccagagccatgaataaaaagtgagctatcagattttgagtctgaaaatccctaatgaattagagtttgcttgagcttgttattccatgcccgtggagcctattttaaaccgtataaggccttgtgaaggagacatacatgatctggcttagatggatcaacaaaaccaaggggttgttgcatatagacagtttcattaagagtgccattgaggaaggcattgctgacatccaattgctcgacacaccaatttttgttgacagcaagagaaagaacaactcgaacagtcactggcttcaccacaggactaaaggtgtcttcataatcaatacaggagtttggaggtagcctttagcaactaatcttgacttgcatttgtccagtgatccacctgaattgagcctgaccctatgaacccatttatttgtgataacctgcatatcttttggataagggaccagtgtccatgtttttttgttggtaagggctttgtactcagtgttcatagcagcaagccatttacgattgcttagggcagctttaagagactttggttcagtgggaataaaggatttagggagagggtgcttagtagcaagataggctttgggtttagtgatgccattttgagatctaactctcattgtgtgagttctacctatgggaggaactgaggtgactgttgtattgcccagtgaagcattggaagaaatgggagcttggtcatttgatgttggaaaatgagagaattgtggaaggtgagagtggtggtctcgagatggttcactggttggtaaaactgagtcacttgttgaaattggcagaggaataggtaagtcatggtttttatttgctgcaataggcatatgtagatcactaggttgaggtactggtataggcataggtatgtcactatttggagataaaggggagtgtgtgggaacagtggggttcacatgttgttgatcattatgatttgggatatgtggctcaggtatagggtgggtattaggtgcagttgaggacacagtagggtcaatagtagcaggtatactagtatggggtgataaaggtacagtattgaaagtagtgaaaggaaatgaggtagagtttgaagagtgtaccagatggttagaggaaagtgcttttgcagggtaatgttgttcattgaaaacaacatttcgtgcaatgtaaacccttccttcattgctttcacatatgtagcccttgtggtgagtggagtaccccaagaatagacactattgtgatctataatccatcttgtgctgattatatggcctcaaatgaggataacaggcacatccaaaggaccttaggatgttgtagtctggttggtgtgaaagagagtttcatagggtgatagatagtttagaacccttgtaggtaatctgtttatagaaaaaacagcagcactgaaagcataccaccaataggataaatccaaaccaaattgtgcaagtaaagttagcccagtttcagttatgtgtctatgttttctctctgccctcccattttgttcatgaattattggacaagtgtgttgaaaatgaatgccctaattttctaagaacctttcgaatgttctatactctcctccttagttggcttggacagacttaattgggagattaaattgtttttccaccaacccttaccacttaataaacacctcaaaggcttgaggttttagagttagtggaaagatccatgtatacctgctataatcatcaagaaaataaacatagtatttgtacccttgtttggcatcaaaatgtgatggtccccataaattagtatggattaaggccaaaggttggtttgccctggtgtcagaaacagagaatgaaagagtatggctttttcccaattgacaagcatggcaaaaggtaaggtcttttatggagccaatgtggggaagatggggtaagagtttgatgagagtgtttattgcaggacgaccgagttcgcaatgccaagcattaacatctttagtagtaaatgaatgatacaattcaagggacaaaagagagtaatcatgagaagtagatgttttattgattgaagaatgagtacaattggttatttcaggtacagcctgatcattttgcatgtaattacaaacacattcaggtgtagaaaaaggactagacacaagattacattgtagtgtagctgaagtagagaatgaagagtcatctcccaattgatataaaccatccttaaccttccctttgatcagcact

SEQ ID NO: 37896 - DNA, 1443 bp, Cannabis sativa
tttatgtaattgtgtcattgtgacttattattatattgagatgatattatataataatgagtaataaggggccacatgcataagtaaaaatagtgtagtgagatttagatacaagacattattatattgatgtttgtatataataatatattagttataattttagttcagttgaatgacaccttaccatgacatcttgcctaattaataattggattttaaattattcaataattaatctatacttttgttgttaattaaaagataattataatatatctaattgcttttgttaacaatataaatatatattatatagctcatactctttcctttttgccttttttttaatataataatcaattttattattgagagtcaaccaatattaggggcagacccacatgtaggcgaggcaaggcagtcgctctcctaaaaaaatcgaaaaaaaaaatgtatatacaatttagttagttaggacatatatttgtaataaaaaataatatttatagacataattaatattagttttagtgtaatggttaaactagttattaaacaaggaggaattgcttcttataccaagaaacttcatttttcatctgtagtgcatatcatactcaccatgtgttgcgttattactattttgcattacatgttgaagatatacactcgaaaagacagatgacaataacttaaaagatctaacaacaactccactcggagacactttaagaaaaataataaataaaaattacaacaacttcaaaatcactctctataaaaaaaacaaaaacccaacaacgaacaactctgggcagaagaggatcgtcaaaacagcatgaagttgaagagtttgtgctcatcaaatgagtgactcccttgaaaagaaaaaaaaactctaaataaacaaaatatacattagtaatcaatgtaatttgaaatgtgaaaagtttctcaaaaataaacaaaatttctttttgcttcttttatatatggaatttggaaagtttctcaaaaataaatttaacaaaatgttattttctcttgaaattggatggttatatataaataattaagattataatatatattgtaattaataaattaataactaattaaaagccagccatgcatgtctaaatttatatctttaattatttataaagttttattgctttttagtttccaggtttgatgatcagcatgacttttccaaagttttatataataataataataataataataataataaattaagaacttaaacaaaaaaatgagtgatgtacatttttttatgagtatggctagacttagagaattgctaaaaggtattatactatacctagtatatttttggtactatagtgctattgttgtaattaaataacatgtctcgtataatttaagaaaataacttttaaaaaatatcgctaacca

SEQ ID NO: 37897 - DNA, 3184 bp, Cannabis sativa
  modified_base (854)..(864): a, c, t, g, unknown or other
  modified_base (2137)..(2144): a, c, t, g, unknown or other
  modified_base (2417)..(2419): a, c, t, g, unknown or other
tatttactcaactcattaaatctatatgtagtttctcctgtttacaatttttctttctctccttttgcagtccaagagttaaagttacttgatttaagtactagtccttaaaattaagcatacgtactagttactactactagcccttttcattgctttaaattacatcattgaaactactttcaattgcccaaaaggaaaaaattaaactttccaaaaagaaaaaaaaaataataaataactacaccactcatttattcatttgcatgtgcatgaaaataaactttcttccttttttctttctttctcatgccacgggacaacggaaagcggttttgccctttaattaattattgattcttctaactactatctacttctgaatttcatagtaaatgcaaggaaagttgggtgaaggtttttattgatatcaacttcataaataatgaatagttggcatgttgttatttggacctcttagcagttatttctttttatcaagttgatttttatttgtaattttgtttttgggttttttcagaaatatggaaaatgtggtagagtttacttttatatggtataaataaattgtcctgctttaaaacaaataatacaaaaaaatagaattaaaaaataattaaagtttaaatatgaaaaaaaaacaataaataaatttaataaaatttgtaataataagtttcgccgaaaaagtcatcggcactggaaaggtcgccagtgttgaaaaatttattatcacagaaaaagtcaccatcaccagaaaggttactggaaaagtcactggaaaagtcgcaagaagtagatgtctcactataaataaaaatagaaccggttcnnnnnnnnnnngaataaaaacaaataactcaaattgattataattaaattacatataactgattctataacataatgaataaaaacaaattaaaaaaataacttaaactagttataattaaaataaaaccggttctataataatgttataatgaataaaaataaataacacgaaataactcaaactggttataactaaaatagaaccagttatataacatagtgaatacaaacaagtaacaagcaataactcaaaccgattacaattaaaaaaaaaaaaagagagaaaatcagttcctaaaacactgaaacataaatgaaaaataaaactagttccacaacaaaatacctcataaagccagttatagttttttttaaaaaaaaaaatggggattaattccaaaaaaatattgaggcataaatataaaaataactgattccataataaaataaagaaacgcaaataataacacataataattcaattataatataaagaaactgataatatttatcaactagttaaagatttgagacaaaaaaactggtttcgtaaagtaactaagataaaaacttacatacaaaaaccagttaaataaaataactcaaacaaaaacatccatttaacatgctctaacctaccaaataattacactcataccatatctactccaaaaatactcattcactatgttatataaccggttctattttaattataatcggtttgagttatttcgtgttatttgtttttatttattgtaacattgttatagaaccggttctatttaaaatatacctggtttgagttattttgtgttatttgtttttattcattatgttattgaagtagttatatttcagttataatcggtttgagttattatatgttatttatttttattcattatgttacgaaaccgcttctatttttatttatatctgagacatctacttttggtaacctttctagtgacttttccggtgacggtaactttttcggcgactgtgactttttcgatgacttttccggtgacttttccagcggtaataacttttccagtgacttttccagcggtaataacttttccagtgacttttctggtgaaacttattattgttttacaaatatgagattttcatcttttttcacaaaaatatgacataaaaagcccatctaaatgaaaaaaaaaaaacaactcataaccttatagtattatttatttatgtcataaaaaagtaaactcttataatattcccatagggtaaatagcggcataagtannnnnnnntttaagtttgtaagtggcataaactcaatgtttatttttagcagcataagtacccaatgtttataaaactgtaattttcctctagttttgtcaatacagactccgttttgaatttattaaatgaacatttggaagtaaatgatactacatgtttctgtctagatccaatgatcaagaatctggaccttatatgtggtctgttcaagaaaataacagagtttgtattgacgaaattagagaaaaattaaaattttacaaacattgggtacttannncgctaaaaataaacattggaattatgtcacttaaaaacttgaaactttgggtacttacgccgctatttaccctttcccatatattgtataatttctcctttggttttgataaaaatttcccattaaataaacaaataaaaagtacatctaggatagtctttagagtggggcaagccgttgcctaagccccatagctaggtctctaactaatcaaaaatactttcacattatattttattaaaatgtactcacttatatgagtgcgttatctaatatactctcactctcaatttaagtttgcacataatttacattaatctaaaggatataatagtgacataatctataaaaatggatatatcttaaagaatatggaaataaaggtaaaaatttaaacaagtaaagtaaagtgggtatacaatgtaattttttttttccttcttaagattttttttaacattagccaataagatttcaaaaaatggggatattgatacaaaaaactaacttttctccaaactttacatgtatactttgataaaagaatttttacatttatactttccttatcaattgctttttactgttttttacataatattaaaacttcaaaaaaaacttttttttattctttatatctttttttagtcattggctgacttctttttcttcttctttcttttaagttgttgactcttttttattctttctttctttctcttctctctctttctctttttcattttttccaactctctctctctc

SEQ ID NO: 37898 - DNA, 4374 bp, Cannabis sativa
  modified_base (128)..(130): a, c, t, g, unknown or other
  modified_base (3010)..(3011): a, c, t, g, unknown or other
aatctccataactttgttcagatggcattgccagaaagagttgatcaagtagtggactctgctcttctaagtggagaagctgtagaaaccacaatgagaagagaaaactacaataacaatagaggaannnatgaaatttacacagaaggagaaagtaacattaattttgagaacccagatcaaataagcactaatttgtgcaagtgcttgatttcaatattggagattggacttgcatgttcaaaagattcaccaaatgaaagaatgaacataggagatgtgatcaaggagttacaacatataaaaaatgcttatgtgaaacttgggagccaagaacatggaagaagaaccagaccaactaactaattggtaatatactaaaacatatttcacttgtattagcttttactgttagttcttgtgaattctgaaagagtattaatatattagaagacttattcacattcacttattctattaattttgctcaaaattttttaagaactttccaagcaactatatcccacacactaacatgtcatttgcacagcagatggaactttattgaaggagctcaaattaatggtgaagatcttctgttctatataatatatatcattttgagaataggcttgagcattcattatctaacttgtacctaaattttagtatttagcacatatatgttactcggtttttgttcattctgtttcgttttcttttgttacgcatattgaatagtttgtaaatataatcaaaatgttctacatgtgctttatgctctaagttgatagatactttatgtagtcaataccaattcatttaactcattgaaatgatatttaagaagttacaaatacatcgaaaaaataaaaacaaaagatatgggcaacagctataaattaaaatacataacaaggataagcaaacactttgatcaagtctctcaacttctctcctcccttcttcattcaatagcaaagggatactttgtttaaataaaaataaagtgaaaaggtcaattgtcccttcacaatagccaacgttctaaaattgtccttaaaatatacttcagaccccaagttatagattttgagtaaattgtttcattatagtcattcattaccaaaacaaggtctctgcaatttacacaagtagctcttggattggttgacatatgaggtgtatttttctttttcttttttttttttttttttttttttttttgggttgacttatcatctttccatgtgacaaaggactgtatattgagtcataccaattccctcctttgtatagaaaaagactttcagattcttaaatctcttccatctttctccccaaatggttccataatcaagattggtttcccttcttctaaacaccatttcaaaacatcttccattgcattttcttatattggttctttgataaagtctaattagccttaacagaagctcctagattgtaatactctattgactagtatttctaaagatgattcttttgggttccgagaaaagtatagtatagattcagtccaactcatttcactacactcccaaacattcaaacccaacttcggaaatttatatctattatcccaactatttcgtcagctttcctaagaaaagaaacaaacaatggaaccagactttgggccagacatgtagtttcctactctgttcacttcatcttctcattactcaataatgactctgacaaacaaaattttatcaaacattgtactaatgtcctgccatttaaaaatgagcttagttgaatgtttttcttaccttttctcgaagttgaagacagtgactgttagtgtaatgtaaacgagcttgatcttccatgtaagaacgacacaaaaactcgattcccatcaaccactcgagcgccagcagcgtaattggcgaccagtccatacttcctcatcatggtcccaaacccaaaggccaagcccacctctggaaaagttcccgccggaaaggcatggagtgggcttttctcggctattttaatatgaatatgactgatgtcttaaggaaaattgcaaataaaaggaatctcgtgaaagcctcaatctcaatttcttctggtttaaagtagcctaataaagtttcgtacttgaattgaatccatctgtcagagcagtgagaaaggccattttgttggagaggtaggctcttgatacagataagtttccattacagttaagttgaaatggtgagatcatccattgacgcattctgacacacaattaaagttcatgaaacaatatggtaattgccaagatgccataattcaccaagatttatattatagtaattttttgttaatttaattgcggttaaagcattaatgttaaagaaacttaaacatcagcatattataatcaactacaatcatctaataattacaataatgctcataaaatcaatccaagatcagaatatttaattagagcattaatgattgaaaaaacataccctcttgtagtagcattttccatttgagccatgacactaaaattaccaatgtaagcaagattgtagagatagtaagaaagcaacttatgaaagagtattctctttctcttaatcaccacacacacacatttcacattaaacacccattaatccctttatatatatttattttatataaagcgtagctatgtaatggaatatttaatttaacaaaatttcttagtttttttacgttaactttaattataggctaatttagattgttttctctcgaactttgacatgtatcaaataatacctctgaaattttttacccgttaaaaatttctcctaaattattgagactattagatttaaggacttttatctaattttaataaaaaaattctaacatggatgaaaattaaggggtataatttagaacatatcaaaatttgaggggtatcatttagtagatatcaaagtctggggagcatagtttaatacataaacaatcactgaaacagtaaaattgaatnnaattagacaaaagtccttaaatgtaacaatctcaatagtccagggagaatttttaacggtcaaaaaagttcagggagcatgatttggtacatgtcaaagttcggagaaaaatcctaattacctttaattatatatatttaaaaataatatatatatctttatatattaaacgacaattcttagtttaaatttaataaaaaaaaaaaacttataaagtaataaatattaataaaaaaaagctaataacaaaatataatctaacactgaaataggtaattctaactgtatctttaaatttaatcgtaaacaactgcaaaagaaaaaaaatgcaaagggaaatttgattttctatacttacatatatctaatatttttttcctaaacacataacatttaatatttgtgggatatgacatattttaaaatatccctaaaatacccccatttacattaccccctcccctctctcttcttctctcgttgttcttcactgctaagctccccactaagagggccaatttttttttttgttcactcattctccactcattttcttaacttcactacgctataatctactacactacaagctatactacatattttctttcaattttggaaggagcatcatacagggagcaacatatgcaagcaataggtaatttttttttgtttgtgtaatcttgtttgttgttgttatatttagtttagaatgttgttttgatgcttgatatgtggattgttgctgtaattttactattttttgtgttaaaatatttgctgcctgtgaatactagaattttcctagtttctgcattttttttgtctggcccgatggggtccgatgctggttcgatggtgggcccgatgccctgtcaaaatgggtgacaggggtgaaggcccgatggggtctgatggtacccgaaaaattttgttttcttgatttgtttggggtcaggtccaatttgtgtctgatgggtccgatagggggttcgattggggtgtccgaaatagttttggggatttttttaggcccgattggatgcgtgtttgatatgtgtccaatgggtccgataggagtccgatttgggtgttcgattatagtccgaaatatattttgggaattttttaagacctgattggatgggtgtccgatggggccccaaaaaattagttttttgtttaattttgggatcgggcccgattttgtccgatggtggtgtctgattttttccgattgttttcatatttatttcatagaaagatttttctcagcgagatttttgttctaaattgtaattgtatttttttaaatgtatgtgacaggttcaactgataatgcgtttgttatgtataatggtgt

SEQ ID NO: 37899 - DNA, 1604 bp, Cannabis sativa
gtttcgagtcgtgttatcgtgtctcacccattttaccaactctacgcaagagtgagtccctccctttgaacacttgacaaacagctagcattagatttagagatcttagctagattgtccacaaaggtgagatattcacacttgataaatttaaagctaaaataatcaaataaagattttaaatgaataatagagaagaatactcttcaataagagagtggatagcaactttgcagtctacgaagatagtaactctaaatcacttcttatccaaagcccacttcaaagccatcttgatagcctctagctcagcttccaaagctgaactgaagaagctttgccactacaagaatagtagttctaaaacaaggagtggccacaaatttccacaacaaccaaacctgcactatcttttttgaaagaagcatcaaccaaaattaggttcccatcgtgggaggaacggtggaattctctaatatttccaaaaaaatagcttttgagattaataagcatccatagtaatgtatctaaattcaagatacatttcctgaacttgaagcattagcaccattgactcacaagttttatccaatctaataagatattcatatatctccaaataatttcaaacaggacagccatgtaaattaccatgttcttcctatgctccttctcttcattcttgataagattccacaccacccccatcatgttatcactgtgcaactcgtcacactgcacctccatggccccccaaaccagagggctcttgccaaaggacatctaaagaaaatatggagtgggttctccccttccaggtcacacatagggcaacaagaatcagataaaaatacaatttatctctagttggaatggtgccaaaattagatctccaaagggccatacaactcattgggtgaagattgtagaaccaaatggccctccataacgggtgcagaaccttgaatcccccttgttgggcttgccaatatgctcctttcagtgaataacctccatcatttttagctttctaaattagtctatcttgaggcatctctaaaactatgggaatatcacaaaccctgttaacgaactcttccccgaacaagtataaaacaaattgcatgttccaaattcctctattcgtgaggaaatgatttgcaacaaatctcaagttccgagccttcgctcgaacaaactccataacttctctaataaactctgtcaacaaaagccatggaatccatagttggaacgaaacatcaatattctctccattaccaataatgatgtgcaagtaccgtgcttgatgatatctataacgccctaattcataaggcgtcacattataaattattttataataataaactcacaatttaaggaaatttgtggatttatttaaaactttaacaatatttcttaaaatatataatttaaatccttttcaaaatattactgagttggagatccgcttattacaaatttttattaaaatgtactatattattttattacaaaccattcctacataatcaaaatactagaaaacatgatcatgtcaaccgagcataaaatacgatggggctaatatgtacattcat

SEQ ID NO: 37900 - DNA, 1746 bp, Cannabis sativa
agtcacacacccttttatttactatgttccacacaccatactaatcctgagtctaacatttgattagataatgctacattgaatctataaaagagtagaatatcataaattgaagctttctcttccctcttcctcaaggtctaagaaagtgtaattcaatgatatctgaacttagaatttacttgcagaaaaagttttttaacacaaagaagagtgatcacaaggcaagataacatctttcttacaaagaccaatatctttaactgaccttccatggagcaaacaaatcccagcctggtcgaaacccggtggcacaaattacagcatctgaatcttcatctatcacttcagcaagcttatcagaaccatctgttacatcagctttaacctaaaacaaacacagagaaacagtaattcatcatcattccaacaaaaagaaaaggctaattaggacttttcttcatgaactttgaactttgacatataacaaatcagactactaacttgctaatcccttttcctcaaactattgagattgttagatttaatgacttctgttcaattcagaggacacaaaacaatcgacatgatgaaagttcttcaattcaacaatctaatatttaaggataatttttaacagcatgaaaagttcataggcacgatttggtataagtcaaaattcggtgaaaaaaatcccaaattagccaaaagaaaatgttaataatgtccatagatagatggcaacaatatggttatatactctttttagtgttccaccattaatgtaagactctttaagtaaaatgaaaaacaaaagactaaattgagttttctagacatatctaacacatcaaaacctcataaaatagataaaaacatacaaattgaagatctgggttatccttaaaaatggttgttttagccttatccaagtccctaaccccagctttgacagaaaagcctttagccaaaagctgttcaacaattcgtttaccagtgctaccagtagccccagctacgaaaattttcttctttctagtggtagaagaagaagaagcttcttccacggttatctcatttccttgcatctacaaaaaccagagaagacatacatagctataattagtattaaacatttgaagaagaagaaaaaggtgaagttgggtttaccttaatggaagtgaagagtgtaatggaagtggttctgattgtagaagaagaagatttggttgtgagaagaagaagagggaattgaactgtgcatacagagtgagcaaaagctaaacgagtggccatttggtctctctacataacacacactaaatatatagttatatttctctctcctctcttctctcttccacgtggcagtaaaggtctagaaggcaatatttgctttttagaattgctaaaaaaaggcactagtggtactagaatcctccttgatgtcatattgttattgatgtaattaaatagcgggtcaaataaaacttaaaaaaataatttttagagaatatcgctaatcaatcagaaagtattacttacgaaaggtgttgggtaccactggtacccaatagcgattaccaaaacttggtgcaaatcttatccctactctttcagtaacttagacaatcatgaaaatcacgtgttagttataggggtcttagagcatttttaataatggtattctttaaaatgtcaaaaacctctaaattactcaaaatataatattttattttatcactc

SEQ ID NO: 37901 - DNA, 3364 bp, Cannabis sativa
  modified_base (3153)..(3159): a, c, t, g, unknown or other
tgtgaggtggagcttgttgtttctcttgattgccaaggaacagaataataaatctgagaaaattattattattattactaaaaaaaaaaagtcaaaccgcatatactgaaaagaaaaaaaaaaataggccccatgtgagatatcccactaaggtcccaacatacacttaaaaagaagggtctctcattgattttatgagaaagggctagggtagtcccccttttcataaatatttaaattcatttatatatcatcaaattaatatatatgcaatgactatggctctcctaataacactactcccttatgatagatcaagtgcattgtatccttttctctgacaccctatcctttttttttcctatcattttcccatgttcccatctactcttttttttttctttctttcctagagataactttcatatcatcatatcctttttcatgataagataataaaattatgtatatattcacgcaatagatctctactattttttccccacttgatgaccctgcatgttatctctttcaaagtatatattattatatttaatttgggtgtagtgtgaaattaataatagcaaatagtaataatataagttgtataattgaaaacaaattcatgggttttgattatcacacacaaatgccaactattttgtctcagtaaatttttcaaatatatataagtgagtatgtgttaattatttaaataatgtatgcatatatgtacgttaaaatgcagacaataaaatagatggttggttggttggattagattttggcagtgtacccaatttaaaggggcaggtggatctagtactatatttttgaacatcgaaattcttttcaattacatgtctcttgtcccttatgcaaggtgaggtgtattagaatgttttagtatatatataaatttacactcacaatttttaaaaattattattcaaatacaaacaaagactaagaagaaaaacatattaataatattaataattagagggaggctaggtaggatttcatttcattagtaatgtacatgtatatacatttatttatatttatttaactatatatatccgacgcgtttcttaataagtagttttggtttaaatttttcacagaaatttcacgtgatgcatgttatgtaattaatggtactttattaatttttggtcgatatgatcagttactgaaacatgcatgatcaaaacaaactggaatatatatatataatataatatacatattgaaattgacataattaatatattaactagagctattttattgctttgctatgcattattttaattagttggtgtgaagataataaagtataagaaataagtcgatggaagagacccctgatcagcaagacttatgcaaaattctctatttctctatctccaattttagttaacggttgagattggaaatgtctgaaagaagtttataaagagcttgaggaggttcgattcggactatatatttatatattatattatatacgagagctattagaattgagtattttacctatcaataaaaatagtaaatggctatataatttatttatttttttatgtgttaatttatatagtacctttcaaaaattaattgattattttatttttaccttttaatgtctattgaaaattattgttttctaaaagttgagtgattttgttttgtggaagttgtgactttgtttgtaagtatagtagtatgtgttcaatgtgcttgtctgaaatcaatatataaatagtggtaattgttttgtgtttattttaagaatatagtgaaatagcagtcactaatgatctgttccgcagctagtaaagataagttttttttttcttcataatataatatttcaaaatattttttgtttaaataaaaattcttattttaatatcatcactaagtagtgtgctaattaaattttacatattttatataggtatgtttttatttactcacttggtcaagctgcaagaactttaaaagataagttttattacaattctctttcttcaaaattttactttattactaatttatatgacataatttaaaaactgttattttaacgtttatttataaagttattaaatttatttgatggttttggtctaggtattaacttttttagcaacaattcttgctttcttggttggattaagatgaactcaaggaaatctcacagttcttcaggcagaagttgtagctcttagaatagttgcattggatttgttgttagatttggacttcctctcatttcttttgagcgtgattgtttcgttttgatctttccctttcttaagagattttatttctgtaatgatttaggctctctatttgatgtattttttagtttaatgtccaattttcttaaggcgtcccttattcatgcaaatcttttggcgctaatgtcgctacgcatgaattagctctgcacgcacttagggtgaatggtgagctaatttggaggaaagatcttcgatctcttctttataatgtactcaatgctaattttttctcaatgaaattttgttcattgttcaaaaaataaatgattgtaaatggcttaaattaacccttgatactacaccatgattaatatattttttttaatttataattaatcttgaatattattaattataagttcaactaacaaacttcaaattaatttttttttgctttttattttatgtctatttaaaatttattcctaattatatatattttttttaatttcaaatttacataaaaaaaatttaattaaatttatttttaaaaaataattatacttatagaaaattataacatattcaacttataagaatttaataataattactcttaaaataattaaatgtcatgagttcaatactttagaagtaattttttttttctttacttatatataatttaagatttcaattaatttaataatttcaaaattgtatcatattatattaattaattttattttttatatttttagattcaatccaatctccataataactcaaatccaatccaatttataaacgtgcatattgaatcggttattttagattactttttaatattgaattacttaaaatttttaaatctttttcacataactaacaacaaaannnnnnnaattattattattttatgtctctattatactcatatttcgagcaacaatatggtgttgacacgtgtaaagaaactaactcgtgttataaagcaattaatgcatgtactaaagtactcgcctcagaaaatacatgtggtaaaaatattaaaactcgccctatgaataataactactaattgataagattggtgagatgaacgatca

SEQ ID NO: 37902 - DNA, 1706 bp, Cannabis sativa
aacttacggatactttgtctgtaaaggatccccacttcttgatttctaaaacatacaaaacggaaaagttttacacatagcatagcacaccgataaagatttaaaaaaaaaaaaataagtataaagtgcctacctttgcccatggaagcttatcatccgaacaacctctaggaaaaccattgtaaccaatgcctgatgaaagaaatacagcatgagtgaccaatagttatgaaaatataagatcaacaatttgatgatgtagcactaatttgacattaatctggtgcaatttaagaatccagacaaaattacatgcataaattgctaatgaataattttcagaatatatatgtgcattcatggagataaatgtttagtgtcaatagactagatttcagctaatttatgttagttgaatagatcatcctactataactatacttgtgggtcatggctacataaaaaaaattgtttaaagatatgaacaaaatgtaattgaatggagaactatttttatagttcagagagaattttttcaaaaacaaaatattcaggggcaaatctctacaagattaatagttcagcgaataaatcctatttattcttataacaaatggtatgaaaagagcaaactttcttgccaggcaaagtatcataatgttttctatttggaactgaatgtatgatttattgaaactcaccaagaattacaccattttgagtcaccaagcatgctccaacctatacagaaacattacaaaaatgaaaaagtcagtttcaattcaaagtaaccaaatcccaatatcaaactcaaattgaagcatttattcaatattcaataatcaataatcatgatttgaaacatcactaatacgcattagaactactcatgacctgcctgttgggatctttggatctttcagctgataagaatgcaattgccatgaaataatcatcccaagacaaatatctgcacaaaaataataacccacgttaacaaatagcaataatgataattctggataattcctaaaccctagcaatgtccaaaaacagcagaaaaaggattattaaatttagtagtctttgagctacccttttcgttttgagggatcaaaagggctctgggaagagcaatttctcggaacgacaactttatcagatgaatcgactcggagagattgcttagtagaatggttgaagaagaagaataagcggcaagcgagtgcggatgctaaggcaccgaaaatggtagccgaagaaagcagagtgaggtcgcgagagttcatggagttgaaatgtcgtgctcaggccacttagcttagcttcagttcttcactttccactgaaacaaacagctcaatcaatcaaggcgccatggaagagtagccggagttttgcagagtgatgaaatgaagcgggagatttgcacggttgtgaaaaagtaggcgggagttccattttcatcttcctttttctacttttggacccccaaatgttggagcccaatctaatattgggctagatttcagcccattatcaggcactgatgggctgaattatggcccaactaaaattgaacccataaacagaatagagacattggggctcttttttttttgaaataattacataaggcatcattttttttgtaaaatatttataattttacgttcaaagaatatttttttacatttttacagttt

SEQ ID NO: 37903 - DNA, 1845 bp, Cannabis sativa
tatattacaaggagaagcccctttattctttaattgttttaatttggttatcaatttcaatttgtttcttttttaaaatatatatctacatatttatatattcacgaaaaccacataatgaagttatataacttcatctgcttaaaaaaaaaaaaagaagaaaaattacgtgcccgactattggtttgagtgttgctacccaacaccaccttgatattaattaatgcaattaaatattgagatcggacactaaattgcacaaatgacaatatatctgtctaagtaatgttggtcaccagttgtccccggtgccccttagtaatacccattaaagctaccatcttgagcacaaatgtttcatttctcaatctaaatgctaatgaagatcagaagaggaactcaaactaaccatggttgccaaaagtgaaacggttgtcttggaaacaacttttgccaatggtttgtgcaccacagttgatcctccatccggcttagaacagactgcagtgccacaaatctcggcggcctgcaagtcatcaacatcacatcacagaatcaaagataaggacatgctctccataaaaactatgatctagtttacctgagaagaaagcagatcaggagctgcaccgtgcaccgttgttggcttaaatctcactgtcttcggtctaatggtagcatgaactgcagcctcagaagatgtgtttgagggggatgtatgaagggcacctgcaagaagttctgagaatgatctaaagcttgaacaagacggccttgaagcaaccggtttcgagataaccgtcctctctgactccttaacattcattcttacaagtagtgatcaaatagtagttcttgagcatggtaatgaagaacctcaaaatccaaccatcttatactgaaagtaatgaagatgaagctgtttttgcttcttatccaggcctgcaggatataaaatcatatctgagtcaatacatagaacacttggtgtgcagatatacattttgagtcaattaaagtacactaaaagaacaggattttatagctatttatctcatcacaagagtcacactaatcaaaatgaaagtagttaaaagaaattaccaaaccattttccttaagaacaaatttacgaacatgaaagagttaggccaaaaatggtggaactacaagagggaaaaaaaaaaaagaaaaacaaagtacgaacaaaaatcagaatgaaatgataaaatagtaatgttttatctttcatcaacatattaaaatatacatatagaaaaaccaacaaatgacaactccttgagtcactgaaaccaccataaatgtctctctgagtgagttcacatgggaaactagatgaaaagccaaagaattttctactaatatacataaacaaacaaagctagaagaagaagaagagtatttagtagaagattatcaaaaaaatccagaaatcttcaaatgaaatactgtctatattatatgcatatacatgtatcatagcgaaaacaaaagtaacatataaatccaagaagatgaacttggaaagaaagaattgcattaccttaaacaaacttatacatataaatacaaataacacagctaaattctgagcatgtcttattctgagctacaaacagcacaacacaccccaaacaatttttctgaagattttgaggtttttcaatcttcagcagtatacacatatgtggatagagagggagagacagatatttttatttctataaattttagaaaataaatatatttttcataatctatttttgggcaaaatatacacaagcactaaaagctgactacaaggaatccagccatgaaacaact

SEQ ID NO: 37904 - DNA, 4197 bp, Cannabis sativa
  modified_base (2452)..(2456): a, c, t, g, unknown or other
  modified_base (3309)..(3317): a, c, t, g, unknown or other
  modified_base (3495)..(3496): a, c, t, g, unknown or other
atgattatggagggtccattttacaaacaacccagtaatcaacaaccccagcgagtcaagcaccaataccacacttacgcacttgttacttgtaaaccctaacttaactatgccattcatctaaataaacatttatcatttaacattctaagcatgacatcatatatcatataaatactctaaatgctcacatactgcctaaaatggaaagcggtaaatagataatcgtataagcagtaaagtgtttactctcaacacttactgcaccacaagtcgagtttgtctctgacgatgattacatgttcgacaggtctacaggaagtttaagaaccttggcgctctgataccaaactgtaacgccctaacaattagggacgctacccaaggtgattaagaaaccctaatccctcaatacgagattactagataagcgcaggaaaattaaacatttatctaaaacagaatgaaaataaaacttgtaatagctttaaactttacaaacaaagctgacataattcgggatcccaaaaaatatttttacaaaatattacaagtacgatgaatatcatagatatcactcttaaagtgccaattaatactttctggggtgaatatcactcttaactagtacggtgcctgtactgccgaatcgacacaatggttgtgtcgctatgatatcacctaaaacatatacaatcacaaatacagcatgcatatataatatgttctatgctagtcttacctcatttccaaattcaattgagttggccgactaggacgaaaaacctcgtgccggatggatgccctagtcacatatacataaacgggtaaataacatgctaaaaccctaatatggggaacccaattactcactactaatggttctgctattggtattagttataacgataccctaaatatcatgaaaacaactaactaaggctttgaaagtaacacaaatcgacgaatcaaacaattcaggaaaccaaccctgatccagttaacccggttaattggtttgcaccaggtaatccggttaattggtttgcaccaggtaacccaaatgaattcaaaatcttgcccaattcgtatccaaactttcccaatccttccagaacgccagtaataccattctaggataattttcaagtgatagcagtaagaaaaacacactaaactcatgatgccatagttgagtcaagttgagttctcaaactcaaaatcagtcaacaataacggcccaaacaagcatacaacatcaattagaacctactgaaaacatccctaatcgaaattcaattaatagaatcaaaatttcaataaatgtaactttaaacctactaaaaccaatatcatgccaagaataggtttgctaggacttacctctacttgaaacacctcaaaccctagctgaaatctccagattactgatgctagacattgattcccttcaattcctgggctggttcgaaagaggaagaagaaggaggtagacatttataggtctttatcttctctttctaatttcttttccaattaatccaaaagtaaaataattaattaattttctaatttgtaaatggccaactgccctaaaaacaagctgccacctaaccctcatatgtaatttaccaaaatgccgtctattataacttaagcaattaataggccttagggtaaaatagtccaaaaccataacctcgcctaaccctgatattcaatatctcaagtgtttgtcccactaagaaataggttctaaacttactcatgtgactctatcggcaattcattgcattttttgtcgtcaccgagtaaaaagtataaaaatcacatagttaacatttaacatatataatacttctagactttaataaaataactgaaattaagaaattataattctagtgcccatttctaaaaataggactcacaacattataaattcataattaattataaaaatatcaatatttaatgctaattgcctttactaatccatattctgacatgcggtcattacattgacattggataagatatcataaagtcaccgttatatctatttaagttaacaccacttagttgatcttaggtcaatagatcttaatcctgagatggttaggttctgacttaaatgtattatttgtattctttaacttgttcattaaagttgactaattggatcgtcccaatgcttacatcttcggaacatggtagtgcaattgagtgggagcgctaatcatagatggatctacagcttctataacttttagaagtgaaacgataattttcttcgagcttggcttaacgcgatacatgattgagcgctcatttcagtaattatattagtttaccgaaatatcatttacaagtaactagagtgttttaaggataaaatacattgaagggtataacggtaaatttgtttctactcgatgtagatcatctatannnnntcattgattatttggattgaaataatgggttattcaaatcgcatctattttttgtaatagagcgttctatgtaattaagagtgcaatgctaaatctatagtggagtcaggaggaattaataagttaggaagtttacttggtaaattttggatctacttattggaagcttgattacatagggccatggtccccacactaactgagataatattattttgtagtctcaatttaattgattttaattaattattaagaattctaaataagactatatcttctttgtgaatttttaccaaggaatggcttaattgagaagaaaagagaattcaaggtttatttattaattaatagaccttgaaaggtctgattaataaatatatttaaatagtaattttatttaataattattaaatagatagaattagtatttaaataactagagcagaaaaataacattactgaagaaagacaagtttgtttcatgaaagaaacaaaataatagtaaaattctaactcatgagcttcattaataggttcagccatgaggtgaattttaagccattggatctttcttatcatcccatttagctctaatcctaaacctaatgaatccttataaatagaacattaagggttttgattcaatagatgactttacactctctcttgtctgaaaaactgaataaaaaacaaacctcttaatttctattattatatttcgaattgctcttgagtttttttcatagaattttgtggtccatggtgattgagaatatgcccactcatgtaaaagtaatacctagcatagtgaggaagattgtgtctaaccatattgaaggagagaagatccagnnnnnnnnnttgataatgctctgctacagataggaatcaagggctagagatctgaatggaagaagttataatttttctactgccatcaatgtaaggatttcataatcttttatgtatttatttcattattttaggaaaatcatatttaggatgttagattatagaatataatcaaacatacatgttnntaaatttagatcttggtaaaataagttccaacaaacccaacgtcaatggtttgcacgagtactataggatagatgaatgtagggcttttagacgaaaaaggttgagtcttggcactatttttctcattttggtctttgtgttttgaagaacatgaagcaacatggttttaatggcttcttttggtagaataggttattttatatctgctaggaaccttggttggcctattcgaggcatttttaccctagctagttggtcttgtggtgtctggatgatcttgtgctatttggttactctttatgatgtctgaatgttcacctccctttcccttttgcacaggtgaagctgcacgactactgaggaggtgaacactggatagacccaaatctgctcaagcttctccctgaagatctttctataccccgggcaagtaattcttcatctcactcttcggccagctcttcgagcatttcttatgacttggaagttagcagcggttctcttgaaatagaaatccaacaccacttcccctctgaacagattggatgagagatatatggtcagttcatttgggaactgaaccagggttggaagaaatgtcttatagcttcttggacatatatagtctggccaagtgtcccaaacaccctaccagagggatgtagtgttgggttttgtgtcctaaataaaacccatttca

SEQ ID NO: 37905 - DNA, 2254 bp, Cannabis sativa
ttttttaatagaagtccactgttaaaggctttggaaaagttaaaggaaattggacctttgtgagcttataagttgatgctgatgacagggttgtgcagcaataaaaagtctaagcaaggaggatgctgcctttatttgtgtggaagcagttgatgtggtccctcaaaagggatttacatttgaggtatatataatttttcaatctttttgcttaactttttttttgaggtatagaaatttcttgaataaattattgcacccagcctagcctatttttaatctaaaagaatatggaaacaaaggacactgaacgaaaattgtttagaaataagacacgcttgactcaatagttataagtttttatttattttttatttttataataagttagtggtgttaacagtttactgtgataataggtagtgaacggagaaaataatgttcctgactggaaagaatgtttgactcagttgatgaataaagcagaacagaaatcccaatgaccaattcggttcatgtggtcttctttttatatatcgtaatgtacatgttaattttatttaaatttcactatattataagaaaggaaaataaagagagcacgaaattcctcttgtgatttatttagagaatctccaaggtacactatttcattaaattggagggttaagtacaaccttttagtcaatttccgcgctcgaaaatatataccaaaatattttttgatagtagtattcgttataattacaatatcatttcttgtaaatattttaaaaatttcgaatagttaaaatgaaatatcagaaactctgtcctcgataccttagactattcataatttttcaaaaatttactggtttgatattataattataacaaatattgttatgaaaaaaaatattctacatgtgtttttaggcgcggagattgatttggaagttgaaattggtgtaaaacgaaatctttatattattctactatatgaatacaaaattataacataaattagttattaatgtaaatagtataaaatgtcaaattttttaagtaaaatatttttatttggtgttatatttagtgtaaataattagagttgttgtttagtgaaaatggtgcacccattggtgcaaatgaatattaagttttttttttattgaataaatcatgcaattttttttatagtaatcagttaaaataatagtttccaactcaattgggacacctcctccattagaaacatgaccaggattagaattagaaaaataagccaaccaattggttgcctactttttcggattgtttgacaaaaaaaaactaaaataaaatcaaatcaaatgaaatgaaaaagattgtagcatcacagttaaccttaagaatacttgttcaatttcattcactgctcaaaagacacaacagtagaaattgttgcaacgagtacaatcaatcctttagcttgagcaatcaattattatgtaaggtacgtaattacaccactaacaacttcttcagttgtagaaaacttgttatttctaaccactaatactctaatagtaatttgatgacgagtcatcaaagaataaagaagccgaaccaataacaaaacaaaaacatgtcacagaaacaagattaattgtagtaacttaaacaaatgacacttaaaactatgtcacaaatataagactaattgcaatagcaaaaatctaatcgcaatagcatagcaaaactacaaatccgatcaaaccacgcctaagcccagggagggtcagcgggcctggccgcagaaaaaaaaaaaaagacaacctccagcgactaaagatgtaagaacgagaaaccttagtagacgatatagtatatttagaatatgctaatagaatcttctatatatttatataagggaaaatgaaaaataaattaggtggtattttatataattttttttttcatttttactattttatgaagaaaatttgataataaatgttttgaaaacaatcatacattgtttaaaaagcaacttatatgttatcctacatagtataaataagttttatatttttgttttacaaatataagattttcactttttttttttacaaaaatatagcataaacagatgattttctgcattaactgtgcaacaatcggcggtggttaaagaagcagcgtgtatcagttggaagatatggtatgttcgtaatgagcttctatggaataaaaaaacttgttctgctatggatgtggtccgatcggctag

SEQ ID NO: 37906 - DNA, 4476 bp, Cannabis sativa
  modified_base (2488)..(2494): a, c, t, g, unknown or other
taaggatgaatttctactcggcggtgccgtccacccattgttgtggtgtggaggtggtgtgggccgtggtgggggaagtgtcacagtctcatgcgccatgtcagccgaccatatatggtcccctcgtcccataaatctctacaactcacaaaataacaaaaaggagatctaagagaatgtatgttaggatcataaagagaaaaatgagaaagaaaaatcaactattataaaagggtttctttttgtgtgcttgtcattatactctttggacttccaaactacaaaaatgagaaaggaatataaatatcaatataaatatgtatgtatgtatgtatatatatatatatattaatgttttgaaaacttgaaaaaaattaagtttggatagttgatctcttttccacttcgacaaaattatatataccaattttccaatttgaacaacagcaaaatttgcttaggctttcttcttcgagaaaaaaggtaaaagattcatagggtaataaaaagccaaaagaatacatacaaaacaaatggtttaactaacacatttcatattgatatatgtcttacaagagttacccaaagacatgttcaatattattttataataataatatcaaatattattcactagttctagagaaaggccatgtttatctttataattaactatattggtatatattattttttagagaaatatattctctgttttagacataaaataatattgtatttgtatgtagaaacagattttgctgagtttgaagggtcattaattgatttacttgacaaaaaaaaaaaatatgcactaatcaattaaaatatagagattgagttagtgggtattgctttcaatttttaataaaagaaagtggtttcatcatgctgacatatgatgacaccatgatcgatcgatccaagcaataataatattaataaatgtaaagatccataaaaccttagcagcaccaaaaagagaggaaaacataaagaaaaagaaaaagaaaatatcttcttatgttcatgatcatgatcatggcatgggtaggttatagatttttattgtataatatcttcaaaacaaaagacacatcacaaatttcgtacataactttatggggtttcatttgatttggaaaagaaatatatgttacaaaaataaaaatatctttctcttatatatgttcctcatagtggtacaacctccatattcatggccaataagagtttgcctaatacattagttaaagaagatatttttatgtcattcaataaaagaaacttaatttgttttctataaataaaaaaaaaagaaatgaaaaggacactataaccatttaattagattagaaaaagagagtgaaatatttatttaagggcttaggagtggatggtcattctgagagttaattaagtgagaattaattcaactagcagaaaacattactcaagaaaggataggttgtaattggatgaaaatgatgaattaattgtctcactcattttctttctttaattaattttattttacaaactgataagtatatatgaggagtaccctttaaacatttttcttaagaatttttttaacattaacacttttaattacactctatggggagactatttggtcactatatatatagctaactataggtcatcaagtactataacatatgcaatttggactaacaaaggtctttgactattatattatgctatttattttcatgtaggaggttactgataatattgttataattatatattaaatatatagtagtagagaagctatctagaaagtgtatgtttctaccactagttagctagtttggttttgatcagttataataatattgttggtattgttttttctgtatattaagaatattccattcatagagtactttcagtgatatattaaaatacttttcagtaatatattataggaaatttatgaactaggcccttttattaggttattttgatagatgttatatttgtttcggtatttaaaaaattatttagtttattttcttttatgattatctacattatacttgtttaagattatttttaaaattttaaaataatttaatagtttgcacgtacaacaaaatatgtaaatcttattttcgacatataaactactcagaattttctaaaaattttacaggtaattctaaataaatataacatacacagtgatgaaaaataaccggactaaatagttttcttaagtactaaaacaaataaggagtctactgaaatacccctttaaggatgtaccatgtagacaattaccctatattataaagggacgctattagaaatttatgtaataaattctcctaagggtcgttctggtagaccacttatttgttttgacatttagaaattttttttagtaattttttcattcgtgatcatgtatgttgtagctatttattaggaccacttgtatatattttttttttttttnnnnnnntttacaatactaaaaataaggtttaaatagttacgtactgtatgtataagaaaaaatagttgtgcgtacaacaaaatatgtaaatattattttcggcattataaattactgggaattttctaaaattttataggtggttctaaataactaacatacacgattatacaaaaaagttggactaaaaagttttcctgagtgtcgaaatagataaggagtctaccgaaacacccatttaggggggtgtattgtagacttacccaatactattttggacaatgcatgtgttttggtaaaaattattaattggattcttaattttgttaaataataatttagactctgtatttttataaatgatacaaaataaaccttgaaatcaattttttaatatatttatatatatatttttaatataaccaacatgaagctagtatctagcacgattacaaatacaaaaaaatataatataagtaatttggtaataacacttaagtcagattattattaaattttaatttaacaaaaattaaatttagaatctattttatactattttgaaagacatacaagatttaaattttcatttaacaaatctaaccagcaaattttgcaaaatatatgtccaaattagtatttagcatatcataaattttattttatgtacttttaatttgggtatctaggttctatatatatttcattatgtttaatttgatgtattttttttatttgagtaggtaggttgtatatatatttgatcatgtagtttctaataataataattaattataacaaatcttagtttagattactaatcgttaagatcaatctaaacatcagctaacaattatagacataaataaaattaatacatgcatcatctcctagtacaaattaaattcacctaatatatatagatatgatattcctcatttaatttggctaacttaaaataataaatagactatatcatacaacaaaatattgtataattgtaataattcatgcctatataatcttacaaaaaaaaaaaaaaaatcatgactatataaatgagcagttatatattatttatgagatgaattttttacaccttgagatttttttgaaatacttagattaatgcaacactataaggattatagttatattattttgtatattaatggtggtattgcattgggaagataatggagcagtaaatataggccatgcgtgaatgtagcaacagcaaccatataaccatatatatatatatatatgagtaatattgctattaaaaacattagtggtatttaacactttcttgacattttacgttacgaatgactagcgatactctctcaaaactattatattaaactatgtgagacccaatacttagttggagcaatactgacacataagagggtgctaatcaccactagtcctttttaacatttctataaatatatatatatatatatatatatatatccatgttgatgagaagtctatccaagtgatgatttagtttattgcctttaaatttttctactataatatatatatatatatatatacatggtcaaatgtaaacaagacgataatttcaaattagttttcacttccattatattccacaccatatatatacatatgggagaggaggactgcatgcgtgttgacaacatcactgagcactattattacattacgagcccactggcgccacccctgtagctttcattatattatgtatgtataatatattataaaatatataacaaatttatataacattttattttaaaaaaattataatctaatatttatttttatgatggcatatgttgtatttattttgtaccacatgtaaatttttttaaaaaaatttaataatttaccgtacgtgtataacaattacacacatgcaacaaaatatttaaatattattttgaatattataaattatcttaatttttttaaaaaatttacaaaga

SEQ ID NO: 37907 - DNA, 2557 bp, Cannabis sativa
acattattaacaactctcaactccagcagatcaattagaataaaataaaactagaaagaaaaaaaaaatgtgcttgggatgaatgggtggattacatcgggcagatcagcagttaaatactccttgattgttgttgtgttctcatatatcttgtcagtgattccctcgggagcaggtccaccattctccatgttgtatttaatcccaaaatcctgacatgaagaagaaacaaagaaagaatatcatcattattattcatgtcgagtcaaaattatatatatagacaacaagaaaactaaatcttaagttaactacagcctaaaatattattagttactaaactgcttcgtatgctaccttgtgataagtaagacctgattacaaatactattaaacttcacatctcccagatttaaaaattaaatattaaaagataaatcaccaggaagaaggaagaacaaataatgttatgactgacctcattaggaccacccggattatgacttgctgtcaatataaacgctcccgatgcctttgatccctgatattgaagttaaatagtattaattaatggattaattgtccatttcatagatatcaaatgctaccttcgaaattggaatatggaagtggagaaaggaattgtgtaaagttaatgtttaacagattataacttacatccactccagttctttcacgtataacagctgacacagcgggagttgagagtagaccattctgaccaacccatatgcgccttactccattggctgctgccatcttagtaattatctgttaattagaaaaaataaattaagtgttagattttattacatcatataggaagtaaaacatatgattctacaaaatcaaaactagaaatcataatcttagtatgttatttcacaattgtagggtatacacttaattaagaaatgtttcccttttttcataagtttataacatagacattgagataattattcttatcaagcaatactaaatcgttggacaagtttgctaatctaatgtgatacatattaagttcccgtttcatacaaagtgtctactcatacccatccattttttaaccctgatattaggtcatgaaccacagttcagaggtacaaaaacaaatagatgttatggtacatgaatagcctcctttgtgtagagagaagagagagagtgaaagatcaaccaaactctattcattttgactgcatttagatacatatttaaacttgaacaaaattacctgaatagcatcctttgagtaataccggccatcaccagatacaacaagtgttgcacctgcataaatgatcatcagggttatagtaattcaagttgacctatttaaagagcataacagttaaaagtgatagagcaaaagtgaaattcgaagagaaatgtgaaggcgttgtgcgcatatatacctctaactttttctgcagtaagggcattgaatgttgcctgaacaaaattctctaagtagtgaggctgaacaaaaaccttcacctgtcaaggtcaaggaaccatatatattagtatgttaaagagcataaataataatcattatgcttatttaaaaataaaataaaaataaaaggccatctcagttggtcatttgaacataatacaagcaaaggtgcatttatttaataatcttatactcaagcaagcaatatcaatttcattcaaattttcaaattcaaaaatcttaaatttgttggggagaaccgggattacattttacataatgatggaacagtttcaaaggcattgccctatacataaaagacaaaaaccagcagaccaagtagctattctttgatgtttaataaagaaaatttgtcaacaagtcaaaggtacccaattaaaatatttgtatgacaatcttaataaacaagcatgctaacttttaaagccaacaaataaaatacttatagtacaactgtttactttgtcataagaaacaaaaacaatactagatctgatagaactaattaatcacttatacatcattaaaagaaattggcaagaagaaaatcaaccatccatgagttaccactataatctccataatttaagtggcatgaccactctacagatatatgagctctgtaaaaacttgtggcatttttaccaagaaggcagttattttgtgatgagcttcatataaatgggattctctttcatgtccaattactgatggcttgtttgatcaagttcagcactattcaattaaactaataaagccagggagaattatagagaacaattgaatatgattttgcagggattaatttaaaatgatagacaatttagatttttcaatcaattacaaaaataaaatcgcaacatcaaatgagacagtcaaaagcattatataatacacaacagattttagcataatcatgaggcttggaagataataattcataggccaaatattaaaaatatgaaatatttcaaagatggtatggtatcatcaatagcaaaagaagctgatatggccttactaagagcagatccagaacatgagaatttttta

SEQ ID NO: 37908 - DNA, 2612 bp, Cannabis sativa
tacatatcaaagttcggggagaaaaattgttaattagcctttatttatttctctctctttttcttataaaactactcactatccttttttttttccttttctccaagtctaatttttttcttcttctcgagccatctttctctctttctctgtgtttgcctttaaattaaagagaaagagtaggaaattagataggggactgccacgaatcatccacgctcgctcaaagtttcttcttctacttctttttctagggttcgtttttgtccatcccaataaaaatttaaagccccccttttatttcgaatagaatttttagccaaaaattgcgaaaagacaaagctgcccaatctccatacagaggcggcgccgggatgataccaagcctcgccgcagccatgagctagctcctcgagaaatcaattttggctctgtaaaattttgtcgtggagacccacggcaaccccatgacagactttcgccgcgacaactgacacaccaactgcaaatttttcttcagtttttgatcctgaattgttcttttgatatttgaccaaattttcaatccaaattatcgaaacctgaaaccaaagaaaataagcgtaaatttattctaaaaattgacatttaagaaaaaaacatctgttaaaaatgattcggacaatagactaaaaatagcttaacaaatgcaatgggtgtgagaatcccaatatttattctgctttatttgaaattcgttttgttgtttgtatggaaaagacaagttacaatacttttacaagactgttgattatgaaaatagccaaccacaataaaaaataaatgttgagagtgcaattaatatgtacagacacgagattataatggttcaccccctttcaggtaatgaactaatggttcaccccctttcaggtaatgaactaatccacttagagtttttattcactagtctataataaaatatcacaaagacgtggtctaggtgagttgtttatgctttagaataagattactattgcacagtgtttcaatcgatcagtatgaaaagtgtgcctcaataataatgaagaggataaatttcttatttatagagttacatcatgagtcaatttgcttattaggccgccctgtaactaatctggcctagggccattctcataataaaattacaattcaaatatctcataaataaagtgtctatgatttatgacttctagtgtggaataagcggagctcatattcatgacggttgaagaagttgtcggagctggtgtggagctaccctgttgccctcggtgtgtgtgatgacagaggtcactgggctcacctttgtacggtcaggggtcttcggtcttctcttgtgatgctggagttgacttttggagattggggaagcttctttgtagtgggcgcatggtgggcaccaagggctcattgtgcttcaagtttttattgagcctccctctatagatttatgtctctcatacacggctacgtcattttgtctacttctcgaaatgataactggccctacaaactaatacaagtatattcaacgtattttgtcttcacaattactccaaatcaacaataaattgcacaagaatactaacaagtgttagcaaaaagcccatagatagtagaactaccatacaaattaaatttgaaacaatctctaatctcatcatatagaaatgcaaattcaacacatccctttattgtttgtgttctttacttttcattatcttcatttctcatttactatagtattaaggtttaacctagtttataagaagcatcaatctcgcattcatttcaatatcaaacgatgtgggacaaaaacagtcctttcacatattattgttatttttatctatcttttggtaacttttatgtatgtatttttttttttaaagaacactacaacaagaaaaaaaaactataacattttagttacaatatttatattttatgattaaatgtaacttttagtcacaataaaaaattatttgtaactaaaacataatatttaaatacaaattatcgctaaattaagttgagtcacaactttgtagtggggccaatataagttacaaccaaattagtttctttataaaaggaaattaaaacaatatagttaattattattatttttcttcagtttttcctttacctaaaagtcaaaaaaataaaaagaaaaataaaaatagcttagcggttacatcttatattagtaatttaatcaccaatttataacaacatagtagtgttattttacaataaaatgaaatgtcttagttaaggtaattttttattatccttttcttaaaaaataaactaaaatcaaaataataaaagagttttgtatagataataatatggctaattggtgatgatctagttaataactaaaaggttattgctaattaaagaggcatataacatatgggggaggtaattaggtagagttatataggaaatctcacacattagtgtcttttattagaaaaagtcattttagtactaacaaaattcataatataacaaataatcaattcttacaaagtatcaatattttatttcttaataactaaaaaatggatcacgtgatg

SEQ ID NO: 37909 - DNA, 1688 bp, Cannabis sativa
aaaaaaaaaaaactatgctttcacataaatttttcaaaattataccttaaacttttttttttggataaccatacattaacttcctttggataatttccactatataaatctttatgtgctatttaatcagttactttataaattaaaatgtgtaatttccactatttttttaatataagtttagactatcttattacactaatttatatttcaccaagataaaaatataattttaagtacgcaatttgaaaaagtattaatgtcacattatattttcaattagaattttgcttttgcttttgcttttttcatgatgatattaattgtttaaaactcattgttcatcatctccaccaaggaaaaagattgtaggcttagaaggttgagtgatctcaaccgttccttccaacatcttagcaaccttccccatggacggtcggatttcggggcgactctgtaaacaccacaaagcagtctgaaccatccgattaaccatatcatagtgggccctactatcgtacgattgtttgatctgattgtccaaaatatcctcaacattcacttctctgtaaactttatcaaatgcccaagctggaaaataccaaacctcactcccttccttaacagacccttcttcttcttgtatctcactattcctacgcccagtaactaactccaacaacaccattccaaaactgtacacgtcagctttagccgtgatcgtatccgatttgacccattctggtgccatgtacccgcgggtcccacgaatcttagataagctcaccatatcttctttctttcttaatttcgataacccgaaatccgaaatcttcgggcaaaaatcatcgcccaatagaatgttttcgggttttatatcgcaatgtaggacccactctaaacattcctcgtgtaaataagcgatggatcgggctacaccgagtgcgatccgataccgtatgttccaatctaatacgggtttagactggtccgacccggcccgttttgaggagaagaggtatctatctagtgacccgtttggtacgaactcgtagacgagaattcgttgacctttttcagcgcagaaaccccataaccgaaccaggttaaggtggtgcattctagcaatgatggtgacctcagcccagaaatccggttcaccgccggcgacgttctttaagcatttaacggcgacgactctgtgatctgttaattcgcctttgtatacatcgccgaaagctccttgtccgattcggtcagagaagtctttggtggcggttttgagctctgcgtaggaaaaacgtttgggtccgccggcgggaagaagctcgagaccgagtgttctagccatgtctctgtatttgatatactttttgagaaaagcgtagaagaacaaagcaccggaaattagttcggcggcgaaaagagtacagattattacgatgtttcttgtggttgtgttggaatcgtctggaggaagaggaagctcgattttgatcggacatgtcgtttcgagaatctccgtcatgcctttgaaattgctctgatcagtttcggattcgtcgacgcggaggaacatggcgctttctgttcccggcgaccaaaacccattcacaagccgattatccgaatcgttcttgttcttcaatacacaagagcctctgccatcgtatttaaacataaaccct

SEQ ID NO: 37910 - DNA, 2791 bp, Cannabis sativa
caaacatcatttttctagtagtgttagttagatggtttttagtgttaaccaactaactctgttagttaagtgttctttggttgtattgttagaaggttgttatcttctctaatgcctataatataaactctttgtaaccttcttaatcattaatgaatacagttcttccaatctctttttctgttcttgtctcaatccttacaataaatttctatgttatttttttaattaaagatgttaattcaaaatttataaatgaattaagtacttattaatatttcatgatcaatgcttttaattgttattattatttgtctatcgtcagtaaaacttgattgtgcaaagaattcataatccataagaagagtaagtatataaataataattccacataatcataatttttgtggataaaggagacataataataggtaaggttgatattgaaagcaatttagcaaatctttttatatagatattgccattaactatatgtgaaatataattggttaataaataactttaatttcaatttaatcttattataataatttcaagtgagagtttactagattttactaagtacgttataaaaatagtggaaattttttttcattatattgtttatccaaagtgcacacagagaaacttaaggaaaactaaacaataaaattttaatatcagaaaaaaaaaatatttaacttttgactctccatattaccaataaaacacctataaaataaatacaaaagttagattagtatcaaatatttaacaagtatataaaaattttagcatataccattacaaactcctatgatgtaaagactagtacttatcagctgtgctcatctctgttgagtaggcgcaaaatgaaactaggtaggtggtaaatgaaaagagggatataattgaggcacaattgttagagctaaggaataagaagtctaaggaagttagaataaaaaataattcgaccaaaattaggctcagggtattattatctcttcttttttttgcaaaatacatccaaattgtcatatagcataatgataaagttggtgatcgataacttttacaaatataggatccaaaatattatttatcatatatatatattatatatatctggtaataagccagttttagtaagaactctaccagaaccaaagtaaattccctttttttgcttcagttcataattgaagcaaaaaaacatttggcggtggttataaaccgaagccaaaaaaaaaaaaaaaaaaccagaatttgcgtctatggctatagcatcggttacacaaaccaaagcaaaatagtggtagtttgttgaaaggctgatcaacatcatcactctggctagtagaatcgtcagaatttccttttttggtggtagactttcgtggtcgagtgtgagatttgtctttctatgtacctctgcctctagaatcagtatattaccttgctctaaggcattggttccttgtgaggatcatcagttctatgatttttaggatcacttttccctgcattattatcccgcgaattagtattgttaggaatgttatcgtcaggaaacatatttcttgctgctgcaattcatgcttccaatcctgctactttctcatgcatcagtagagaaaagtcttcttgagctgctaactttagttcaattagtctcaattttctggccatgatgaccacaagatctgtcttgtcaggctcacttttcttattagcattgtcatcttcgagattcgtaggatcagactcgtcttcttcattgcctacatcgatgggatcatcactggctcatcatgttgatctttttctttttggcgactggtcacttcagtgggatcttcattggtccttgtcttggcattaggatcaggatcatccatcagagtgttgtgaaagtgaagacgagatttggttcgggtgagtgccataattaccgtatgtaatcatcgatcatataactgctttctttagcactgaatgaaaataccaaaatatttactgaatttttagaaactaataatttaaatatgaaagccaaagaaatataattcagagagaacaaaataagaacactcaaggatttttacgtggttggagagttaatgagccttactctaccaataatttaagtaggaaggattcgtatattatttatagtgcatagatatcatactaattacccttttccttctgatgaagagtttacaaataatacattgactttgagcttttttagtgaagcccgacccatggagcgatatttgtgtgctgacgtagtggaggccacatcacgagtatagctgtcaaaaccgtgctaccttgtggggaattaatgacatattaattacttgattgccaattatttagtttccttatttacagagatattattctctattcgagattctgtgaaagtaattcttaatcttgtgcgattcggtagaaatagaaaactataatggccttctgaatacacattaaggcttcctccaactacacggatatatgctttccggatgatgacgatgctggaaggtaatctcatttagacgagtcataggctacttaaccagaaggattgataagttatgggttcgacccatttttgttgattgggcccactaatgggctttgaatgtaccagttgtatttattatttgaattacacgtgtccttagccaaaaacgtggataacaacgatcaatttataacatacattgacactaagtttgacctggtttcgggacagaaggtaaactttgcaaaatcc

SEQ ID NO: 37911 - DNA, 1276 bp, Cannabis sativa
aatctctcttcgtaacactcgtataagaaaatatataaatatatctttatttatatacataagatcataaaattataaggaagccacatataggtacgaagagatcaagaagtaagatatataataaattgttaatgggattcttagacaagctctgggacgaaactctagctgggcccaccccggagactgggctgtctaaactccggaagtataactcctttgccgttggcactagtattaataataataataataatagttcaagagctcctccacctccacaggtggtggttaatgatggggttagtcggagcatcacaattcttaggacaaattccacacctcctctcaggactttatccactcatcaagttccggtttccgacccggattctccttccggtccgttcagcagtgccccctccactcccaccacccgtaactcttctcatctcttcatacatctcgttcatataatttttcattaattatttggggtttccatgattaattatatttattattatgtttggataaggtttaaaataataataataattaataataattaaatatgtaaataaagaagggataagttggaaattaaatttttataaattttggtattataattattgattgaaaagtaaattgtggggtttgattgggtgcagccggaacgcctggcgatcatcaaaatatgaagaaacattggacaaggagaaaattccctgttgcaggcgatgcctttgaagttgaccgcactcataataaccagacaagtccgactgtttaccattggttgttttataattttattattacactaaacattaatctgaattaaattaattaggattcaccaaaaaaaaattaattgaaattaaattgttttctcaattagttgataattgttagactagtactataattattattcttgaacgatgcttgactttcgggcaatagtcgaaattaacacaaaaattcattaattataaatttagtacataataagaaaattagctttaatttagtacctattgttttgaaattacacaatataaatcgtttctaagttggtaattggcttctcccattgcaggatagtgattagtgctttggatcgttgagaaagagagaagaagaaattgatggtggattttgctttcccatacatcatcgctatgccactctgtttgtacatagaaggaacctttttgcagagactgtttctgctgctactatatatatatcatgtacatatatatat

SEQ ID NO: 37912 - DNA, 1771 bp, Cannabis sativa
gaatccgagttcttgcaggagaaattaaagaaagagttgcctctcaagtacttaacacttaagacctggccgcacaacgactgattttcattaaggagggcccaaccccatttagctaataaggcctagttcatttccatggacttctgaaaaccaagaccaccttgggctttgggaagacacatgtggtccaggccttcaaatataagcctctattcctttgctcacaatcctactaaaaatctctggccaaaccgtcaatcttggaggcaagcttcttggacagtttttgaaaataatattaatctcatttaccaaaaaaaaaaaaaataatagttgaattatagttgttatgagcttatttttagatattttatatatagttaatttatagttatcatgaggttgatttctcgttattttttaattgtatttttactttttgttgagcagagtcgattttggtaattttaaaaatttacaaacgtatttttgtgataaaaaaattttagaccgtaaaatttaaaataaaacattaaagaaggatatctttgaaaattccccaaaaataaatccactaagaaaatataagggataattacttttgtaacttcttctgttgcaagtttcattcaataagttgaatgttttgtagttgttgttatcatattgcttcatgtggaatgggagttgctgatcacaacaaaaattcttacatggaactgcagaggaagaaggttgatgagaaaaaaaaggaaattttggttgataagactagtggcctaactaagaactatgacgatttcattgcaactttatctgaaaatatttgcaggtatgctattcataactatgattttgtgacctctgggactgtcaaaagagcaagatattcttcattgcatgggtaactttgaactctttattattttactttgtttataatgttaaaataaaccttgcaaagaatctaattttgagtcttaacaaaaagttttctttcaatgtagttttcatattgcttttcatagagttatgatagtatcttatgtattttttgcattataattttgatcaagtctccttaacggctagaacttgcttaaaaaggccacatccaaagtcaggtgtagaaaagagttggaaggcatccactataaaatttatgctactcatccaacagagatggatcttgaagtaatcaaagagcgaaggaactgagtttactctcattttcgaggagcttttcttctttcaaaagtgaaaatttttctattttttgttagttaatgcttaccaacagctgctataatcaaatacaacacacacttttagattgtaattttgccaatttgatgaataaactggtgatatttgtgggttatgaaagctgatctaatgttatctacttgttgaaaaaaaaattgaaaacttatgggtcgtttgataacattttttttaataagttttttgtttttaaaattggaaagataaaaataattttgaaaaacaagttctataaaactgttttcatttttcaattttttaattgagaatcaaaattttgaaaacaaaaaaaaaatatttttaatatatttttaaacagttttttttccttaatcaatattttgaactccgaccagaacgggactcaaattccccctacggccttgccgctgaacttagcctctaattcgaacctgaatccgatcccagacctagaccagacttaaataaaatcaaaaaatgaaaatgaactttacagaacaca

SEQ ID NO: 37913 - DNA, 2809 bp, Cannabis sativa
taaattcttctgtaccataaacaaaccaaagtgtgcccacctaatattatgggatcttaactattggctttatatattagtaacagtagtagtgattgaacaaaacaagcaacaacaccaacaacaacctaaatgaaaatgctatctcagttacatattcttaatcaaaatattcccaataatcaacacaacaacagtccaagaaccgacaccaccgtgccgcaaacaacatcatgttccgtgtaccaaatcaatccagatcacaaaaaaacgatttcaaatttcaatcccacggaatacctcaaacattcgacgcgttatatcattgtgcatttcaacacataccaatgcacaaaatcaacaccatttagtacttaaaatcatacgcccgataataattcctaaccaaatcaaaacgcagatccaatgtgaatacaaatatgcgtgtatatatatacatacatacatacatacacaaacacagacaacagttctcgatcaaccgaaacaaattgattgaatgaaagaggtttaatttcacataaaattgaacaaattaatacacagaattgaagtttttcgaaatgaaatcaacgattgattgattaccattgttacctttttggagcctggaagcgtgaatttttagagagagaaagtgtttttttgaagaatgaaaatttacagaaagagagagaaagcttataaatagtggaagagaccttgcaccaagaaagaagaagctttatattttgcaatgtggtcctttatatttcttgaaattacaaataatcccactttcttgatttttttttttaaacatttttcattgtttttagtttagatatttttgtggtaataaatacaaaatctattttagcattttattggtgagagattcatatgtatccattttatatgggtcgtagtcatgtaagattccaataaatcttaggctatttttattttattattatcaagtttaaattatattgggtttttttaaatactctttttatttttaaataattataaattggtataaaatatgaataataataattgggcaagaagtgctatattttatttttatcaatttacaaaatagagtgttctatttgtaattatttaaactaaaagtccaaactcatattaaaaaaaatagagtgacccaaaaatgtataaacactatacttatattgataatggttgaaaataagattacacaatttaggagaataatttttaatatggagtgcatgtgatgcatgatgtagagttcaagtctccataaaaaaatatcatgtccactaaaataaaataaaaattaaaattaagtcaattatcaaatataataatcaaatgtttatgattgtttagttgacataaaaagtacctagatttaatttaaagaaaagaataggctggatttagtgacactgttatgagatgatattttataataaatagttagggattcgatcattataataatcattaattttaaaatgtgtaacagttgatatatttttttacactaataacagtatgctctctcgtaataatgttgagcacaattagtaacattttatattagaactactactttgaaccatctaacaaaaaaattaagaaaaataatctaaaaccctaattataaaagtatgagaccttgatgtccctacatactcatatactcatagataataaactatttaaaactccactaatttatttcaacatttttaaattttaaggaggaaatttagaatctttgactcatgttttcacaatttaaaatattaaaaaataaaattcaatggaataaaaaaaattagatcactcactcacatgtccctactcatagatgataaatttagtgggggacaaacgtataaacaaaaagaaagtgaaggggcaattatgtaatttcaaaaaagggtaatttttatttgaaggggtgaaaagtaaaaacaaaatgaaaataaagggcgaaggtgtaatttcacaaagagtacggtggattggagggaagagtgggtagtagggacggtgggagaaagtgaagattagatttagattccaccgtggcactgaatcggatgtgggccccactttaagatgccctttctctcaaacccaacattatatattttttttttatgagaattgctccgtgcttaatattttcgtcggtgtcatactgttattaatgtaattaagtatcgtgttttatataattttaaaaaataatttttaaaaaatattgttaatcaatcgtagagcattacatatagaaggtatttaatattactggttccaaataataatgcttatttttttatggcattcttattaggcatactagtggtgtctgatattttttataggtggcttcttacgattgattagaaatatttttttaaaattatatggtgttgaacactattggttccaaataataatgcttattttttttatgagcattcttattgggcataccagtggtgttcgatattttttataggtggcttcttacgattgattagaaatatttttcaaaaactattttttttaaattatatggtatctgatacttaattgcattaatagcaatatggtacttcttaatatttatcttttttttattgaggtaacgcttctctatattacactctacgcttctttcaatgcacctttactttgcatttggtttaaaaggtaattatatttccacctcataaaatgataagttcatttataatatttattcaagtttaaaattatttttaaaaatcacttttaatat

SEQ ID NO: 37914 - DNA, 4340 bp, Cannabis sativa
ataagttatagattaactattcacattgaattaatggtacataagtaatcatgagataattagaagggtaaacaagtattttgactaattataattatgaactaataattggaggacgaacttaaatttttaataaaaaattaaatagttataataccaaaaataaaacttaaacaattatttaccttacatataagaaaaaaaatcatgttcatgaaaaaatagaccaaaaaacttttttaatgctaaaacagataaaagtctacgaaaaaatctctttaaggagtgtactatagacttgccctatacatattaaaatgaacgacatttttataaattttattaagtaacaaaagtcattcaaaataataaggttaagtaagatttttgtcccccaaatttagatatgtaccaaatcgtgttgttcaaactttttaagatattaaaaattcttcttgaactattgagattgttgaattctaaaaacttctattcacttccatttaattttactaacgtgacgattatatatcgtgtcccgtgtacgtaatttaaactttcatctatattaggcatcgattaataacattagagagaaatctttgaattcaaaaattttaatagtgtgggtcaaattttcaatggcctataaagtttggggagaaaaatttagaacatactaaaatttagggtaaaaatcttaattagaagaagaagaacaaagccccttgttatttacttttattgcaaaaggcacttctaaatgaaatatcctctcattcacaaagatcatattttctcttcaaagtctcaactgtaaatgtaatgatataacaaactcaaacttatctgacattcatttcattcaggacctatttgagttcactcgtccgatcctgagcgacctcggcggtcagaatgatgatggatctaggtccattctcggctgataatttcgacccgaagaaatgggtgaactcggcctgtcagactcggcacccggaggactcaatcgacaaccatctcgtcgatctggagatgagactccaaatcttatctgaagagatctccgcctcgctcgaggagcagagctccgctgccctacttcgcgtcccgcgggccacccgcgatgtgatccgcctccgtgacgatgcggtctcactacgttccgccgtcgccggaatccttcagaagctcaagaaggtacctacatgctgtgactgtttctgctatgtttcttcttttgttctgcaattcggattttggttcatgattttttttttttttttggatttaattcactagaagacgttaagtgtggaaaatttggacaatattagggtggctgggtcagattcactgcatttcggaagttgagaaagtataattttctaaatatgctattccttgatgccaaatttgaagcttggtataattctcggctgagttttgtcaattttccaaagtgaacgagggaaatttgaggaatatttcctaatgtaaaaatttcaatgctagttttttggacatttgagaactagtgttctgtagtttgaactatttttttagctcaatcttttggcaatgagttagtaaatttttggaaaatattacaacacgactggcgtccttttggttaaaacctctcgttttctctttctctggttaagaataaatatatggaatcacattgagttatacactataccgcacatataactcaaatagtagcctaaatagatttgctctgctttccattaggttgcagagcattactataaactatagtaacaagttcacattaatatacccaccttataatacatttaccaatgtaattggattatataatttacatcggtagacagctgttgctggcttagctatgtttatatggtttgagtttttagcttcttaattctttgtacatgtatatgtatgacaatattctctctttcaaacaattggttttaatttgcaggctgaaggatcatcagctgaatctatagctgctctggccaaagttgatactgttaagcaaaggatggaagctgcttatgacacattgcaggtgggtatttaatcgcagaagttgtaatcagtgctgtattggcaaatgttgatgttgcatttgatatactcattgtgtatgggtcaacaggatgctgctgggttaactcaattaagttcaactgtggaagatgtctttgccagtggtgatcttccaagggctgcagagaccttagctaacatgaggcattgcttgtctgctgtgggggaggtaatatttttctatgattgttttaccactatactctacatttggtatttataaattttgaaagtttaatatggttttttattttttgttttaggttgctgaatttgctaatgtgagaaagcaacttgaggtcctagaagataggctagacgcaatggtccagccacgtttaacagatgcattatccaatcggaaggttgccaaatttatacagcgcttattttgcgtttcacttgctttccgctcaatccacctcgtatcaactccttttagtacatatcatacacaacttgaataacttacatctattataatcctgcagatagacattgctcaaaatttgcggggtattctcattcgaattggaagattcaagtcactggagctacattacactaaagttcacctaaagcctataaagcagctttgggaagattttgattcaaagcaacgtgctattaggcttgcaaatgagaagagtgaagctgaaaggctatcaagccatgagtttcaatcaagttcttcaacaatttccttctcaagttggttgccaagcttctatgatgaattgattctctatcttgagcaagagtggaagtggtaaattcttctgacttaatgttattttaagcaccgggtaacatattgttgacacatagaagctttcactgaatttagagattgagctataactgtcatctgcaggtgtatggttgcttttcctgaggattataaaaatcttgttccaaagctactgattgagacaatggcaactataggaccaagctttatttcacgtatcaaccattcaattggagaagttgttcctgaaacaagagctttggggaaaggtttgtactgactttttttattttgtaggcatttaatattataaatatctttcaattggagaagctttaagttatacaattttacttttggcaattcacaaattattctgtaaatatcttatgtttctttttatataggtttattagatattatgtctggtgacatgccaaagggaattaagattcagaggaaacatttggaggcattgattgagttacatagcgtgacacagacttttgctagaaatattcaacattcattttcagattctgatcttcgagttctaatggatacactcaaggcagtgtactctccctttgaatcatttaaacaaaggtaagcaatcataaaattgtatgcacgcacttccattttcttcttttaaaaaacttcgttcagtaatgttttctttgtcatttactagattctgtaacggccatattcatttttttaatcagtgattaaacatgtaatctaggtatggacagatggagcgagccatcctttcttctgaaattgctggggtggatcttaggggagctgttactcgtggtgtgggtgcccaggggattgaactcagtgaaacagttcgtagaatggaggagtctattcctcatatcattgtacttcttgaagcagctgtagaaaggtgtatcaactttactggtggttctgaagcagatgagctaattcttgctcttgatgacatattgttacaatatatctcagctttgcaagagacactaaaatcgttaagagtagtctgtggagtagaccaagatggtgttggttcaaagaaagagatgggattggacaagagagatagcaacactgcacgaaaagttgaattgatttcaaatgaggaggaatggtccattgttcaaggggctttgcagatcctcacagtttcagactatttaactagcaggtcctctgtttttgaagcttccttaagagctactttggctagattgagcacgacattgtctttttcagtatttggttccaatgtggaccaaagcccatcacatgttggtgatgacagcaacggggaagcatctgtgggtggaagggctgctttggatgtggcagcagtgcgacttgttgacatccctgagaaggcccggaagctctttaaccttttaaatcaggtacataaagcaatatttcaatttcagagtcacggtctctacatctcgtacatatt

SEQ ID NO: 37915 - DNA, 5291 bp, Cannabis sativa
caatagtagtatttgtctgttggtgaacgttttcttcattctttaattgtgcaatgccacgtcttagtacttcatgcaaaatttggctataagttatggcaacagcagatacctcatttacttccgtagccgctacctaatcccacctcatttttttctatcatggaattcaacatcaacccaaaattttaaaaaattggctatagttttttaccaaaaagaagaacatggctactgcaattgatccccagttaaatgaaaataccattgaggatggtaatagcaacaaaccagggatgaacaagtacactcttctttgcggactgttggcctccacaagctcaatcttgttgggttatggttagttcatataatatttgtttcccttttacttatccttattctactgacattaaacacttcatctcaattatgtgcattttgtagatataggagttatgagtggggcagtgcttttcatcaaagagaatttaaaaatcacatcaacccaagtggagattttagtaggaaccctaaatgtattctctctaataggatcacttgcctctggtaagacttcagattacataggcaggcgttacaccatagtcttagctgcaacaacatttttaattggtgcccttctcatgggcctagctccctcattcccattcctactcgccggtcgcgtagtcgccggcatcggcgtcggctacgccctcatgatcgctcccctctacacagccgagctatctccagccatgtcccggggtttcctcacctccttacccgaagtcttcatcactttcggtatcttaataggttacatattcaactacgccttgtcaggcttgcctgcacacataaattggagactaatgctgggtctcgcagcagttccggcgatcggaatcggtttaggggtcatggttatgcctgagtctccacgttggctcgccatgaaaggcagattgagtgaggcaaagcaggttcttggtaagatatcatccactgaaactgaagctgagttaagatatgaggaaattgtcaaggcagcaggcccggcccacgagggttgggatggtgggccgtgggtttggaaggagcttttattaagcccatcaaggcccatacgtcggatggttgtggccgctattgggctcaacttttttatgcaagcatctggaaacgacgccgttatatactactgtcctgaagtgtttaaagcagctggcatacacaagaaaacgcatcttttcggcgtgaatgttatcatggggcttgcaaagacttctttcgtgttgttctcagctctgtatttggacaaatttggaagaagacctcttttgttgttgggatccgctgggatggccatttcacttgctggacttggtttgggctctaagtttatggagagttccagtagcaggcccacttgggccctagtattgtgcatcgcagcagtgtgtgctgatgtttcgttcttttcaattgggctcggcccagtaacatgggtttactcgtctgagattttcccaatgaggcttcgggcccaaggtacgagcctggccatatcggtgaaccggttggtgagtggggcagtgtcaatgacatttttgacaatttctaaggaaataacatttgggggaatgttttttgtgcttgggggagtaatggtggtggctactttgttctttttcttgtttttgcctgagacaaaaggcaagaccttggaagagatggaaactatttttgaagatagaactatgagtaaatgtaataattataggtcaatggaaatgaggccaatgtaatattcaattatttggtgcaatgataaattaaaagaataaaagggcagaatagtcagcataactaattttttactagtgttttcagctagattagaatctcttctaaaaaagaaagaaaagaatgtcttcaaaataaaagttccatgtagaatattaaaatcttcatttgttggccgacataattggaatagccaatatactaatagaatattgttaattaaaagctcgagacactaaattaaaccaattttctgtgatgtttgtaaccatataatatatattatattaattgttatgccattctttttattaatagctagcttgctcttggtaaccatttggtaagctttcttaactgtaccaaataataatttaagataaagattagcaaaaatgatggtcttctcattctttcattccaaatagtatagtttcttcaaaatctctgattgttctcaaatcgtttaattacaattacaaatatatagcacgctaatatttaccttaataaaatgtcaatatgaataagacatgtaaatattttaccttaattattagccatataagggatagaggtttaaatgatgggtattgaattatgaacagttacttattcttgtaattatttttcattattgttttgttttttgaatggcatatgtttgtcatgttatatgaaaattaaacataagagatggagaaagatatcacattcttaaaaatgtagaaaaatccaaaatattggttcatagaacgtactccactttttctctttatatcatacattctttcttttttatgatttgacctctcatatgttccattatttttaatttcactcattgccaaatataacattagtatatgtctcaccgttttaagctctattatgcagagaaagaaacgacttagagtaattatactaatattacgttttaatcaacaaaaggatatatgagcaatgtgttattaacataacagtaattgttataataaccaaataacagtaaataaaaaacaaaaaatttactagtcgtacacgtaaataatactatacttgttaaaaaggctcaaattcaataatgtgttgaaacagagactttagctatatttggtcacataatggatataaataacaaaaatatataaggaatagaagacaagcaagcaagaaaaaccacacacagaactacgtcttttcaggcagtatagtgttaagaccataccacattgcaggctttttgtattgtgatataactgataagagtataatattattaggaagaacagcaaggtagggcagccattttttaaaaaggtgaaaccaaatcaacccaattttaaaaaaacacacacacatgcattcatatgcattcatacatatatatatatttatatatgaaatgcatgtatatattgttccggaaaagtaatgtgcaggggtcaggagtggtacacaggtggggaaagagtaaccaaataagctaaggtaagaccaaacataaaacataaactgacatattgggccattggggtcgagaattctcaccaccacatggacaaaatttctatagttctacgtataatgatataagtaatatcaatatttaatctaattattcaaacattaattactcaaattaatgtgtatatatgtatatgtactgcccctaaattaatatatatatatatatttttctgagatagggtaaaaaagaaaaaaaaatgaattattgtttaaacggcgacaagagatataaaacaaaatgaattaactaattataattgattgattgaataattggagccaaatatagatttgatcgatcacgggtcctgaattcttatcatggttttgtaacattgaggggtacatctccactactttttgatatggtaaacgacgagtacattaattcactttcttttttggtaaacgaccagtacataatcacttagtatatatatatggataaatatatagtgaaatttgaaagcatttaccagatgtaggcatgtaaatatgttgtgggcatctatttctttgcttgaaaagaccagattataattaccatatattactcaaaagcagggatattttgttttaatttatttttggaaaacaaattcaaaatattgaatttattataagagtgtattcaaattcaaacgtagaaaagcatgcacgaattccacgtcaataaaaatgaaatgctttatatatatttgttgttgatattaattattaatttaatcattgatgagatacgatgatgatgagcaaatttcaaattaagatgcatttatatatagaaaaaatgtttgacgagtaagttgcaaactcttgcctcatatgttttttgtacattgcatttgtcttattagtactctaatcttattcttttattaaagtagatttactcctttttgaattgataaattatttgaaggctagtgccgagttaccatatgctcacagtcattgtaaaggacaaccccacatggatactcaaaagtgaaaaatatatatataaactagaccatattgcccaaaagtcaaataatccaaaaagtgacatacattacattattatttatattattatgtatggtatatagatcccatccaaaatgggctttgaaattttcagagcctttgctaattttctctttctatagcttgaattaataattagcatatgtataaaattttatgatcatcatcaaattaagcaataatattatggagtaaaatgaggaaatccatgggaaggtatgacttatcttgttgtctttgtaacaaattacaccttgaaaatccgaaaccaactactctaaactgtcttatagttacttggcttggcatttcagtaaagggtaagagctgtactctttggtttgtattcacattatttggaagcttttaagacttggagattctgtgtcttggaagcttgagagatcatgagatttgggaaagatgaacttgaagatatgtgtatgttaattatacaaataatattattgtaatttataaatatatatgtgtgtgtgtgttctcaagggttaataatgttaggatcatcagatgtgatcagggccatggggtgtttttgggaaagtgaaaattgatcatcataaatagaagtaagtgtatagtattgagtaagattgaacttcttggattttggccaaagagtttcggttccttctgctttgtcttgtaattagaagtgtactatagttagagagccagacattagaaagtcgacaagaaactcttatataagaatagatagtactcagattgaaacacgtatatatatatattgttgttacatattttggtcgaatataatatggaaaaaaacataaataaattacttttgttgatctgaaccacacattttaaatctgtatgcatctacttgatctccaagggtgcacaatgcatatagttgtatgaatcaaaatctc

SEQ ID NO: 37916 - DNA, 3494 bp, Cannabis sativa
tgttaaccaacttatcattacttaacagattttttgttaattagttgttaattctgttttagcatgtaacaaacttttatgtactgctttgtattactttggtctataaataaagaaatggctcccctgttttcgggtaagccttgcattcattttcaatctctgttctttcttttgagctcttagcttttctcttctccactggtttttaccttcttcaattcgcaagctattttttttttttttttgctgattttcattaataaagtttacaaacttcctttaaaaaaaacaaagttaaaatattaaaagataataaatattgggcaacatcacgtgtagcttagttgccaatattacaataattgaacgttatatattaatcaattcattaggatatgaattataacgcaaaaggtaaacttaattagtcaaacaagtagagatgatgatattgaatctttgtacatatcataccaaaatggatgatgtgtcaaatttaaagtatagtgaccaggaaatgagtcattttctttatggtgagacgtgagcattttattcattcccaccttaaatctttacacattatatatatatatatatatatttatataaatcgcatttggtgagtttagttgatagtagctcattaccaatgtcgaaaattccatgcttatagcgctgccaaaatcaacaatcaaactataaaacattcatttgagagaaactatttagtacagtttagtacttaaaccaattcccattggtgagactagcatttttacaattttttttttttttttgaataacatttttattatttattctcttttttttatagagaaaatgaatcaaaaattggcctttaacattttttatccagggtttagattgtttactctaattctcgtaatatgtttggtgcctataaatgatagtgagtgtctaaaacttctattgtttaatttgtttaaaatgcttatatttctaataatgctctaccaaatagctcacagtactaatatatttttatccttaagaggttccagcatctattctcatacatatgaactagcttatctaaatcttaactacgaattgagtcgtgcccaattagcattgatagatgtaccaagcgccaattgttatcatttagcattgcaagatgtaagtataggtaaaatatgtttttcatttcaaaaataatttagaaactatgggttaagtttggtaatacttttatttttttaattttttaatgaataaagtaaaagtagactttttattttttaaaattatatttttgaaattcaaaaatatggtatgtaactatttttatttttaatattaaaaaaaaagaaaataaaagtttgttttgtaaattttattttggtattttgtttttatttaagtcaagtcttgtgtctgaggctggggtccatagttggggtcgagtctagagaaagggctagggcgagggttcaggttcagattcagttcgagtttggattcggggctcgcatttaacttcaaggtcatggttcgggtcccgttccgtgtccgagtctatggtccagggaccgggacgggagtggagtccatgacctagtttgggtctaggttaggggttcaagtcttggtccgggtctgggatccggggctgtagactaggtccaagtatgtggtctagatttgggttcgggtcaagatccatgtccgagtccaagttcgagtctgggtttgggtccaggtaagttatcatttttatctttcatggttcacatgttattttcttgattataaattcaatatataaattctactaaatttcaaacatatagttactcatgattatagtgttttctacacgtgaaaaataatcatgattatattgttcaaactatttagactcaggatttatcattgcacaaaatttatattgacatgataattagtgatgttgtttaattacacttggataagtagaatgtattttttagggcattaggaaagtcaacttgcatcagatgtgtcggtgatatatcgaattagactgatattgacactgaaaaagatttaataaactgacagtcaaatcttttttaattaaagctcacttagttaatctttgattaattgatctctatcctgagatggttaaccattagcttaattatactatacgggttcttaggcttgttcgttactagtttacacgtaggactagccaatacatacatgttgggaatttgatagtgcaattaagtgggagtgttaatcataaatatagaatctatagcttcaataaatgttttgaagtgaaatgatggttcccttagagcttggctaaaagatatagatggaagagctcttatttttgtatatatatagttcaccaaaatatttttttttttttggcatagaaatctggccaacactcggttgctagactggtgataggagtaataagtttcagtaaagtaagtagagagacacaagaaatttatagtagttcactccccgtgtcacgatggtgatggagctacgtgtacttcgagtttttatttcacaagaattaccagaaaactagcaaagccaagacctccaatttctagagagaaaatagagagagaaaagctctgatcttatggggaactaaaagaatgtgaaaaatgaactagaggagctctcctttttaagggaacgaggtcttattaaaatattaataaaataatttaaaaaatatgaaaaaatcactttgggttgatcttgaccattaatgatgatctaacagtgaaaaatttacttttgataaaattctccaatttatagagttttgctcgttggattattttcgggtattctctgaaaaaaaaaattgtaattatcttggacatgaattttaaatttgaaatattcataattgcaatatgagatatgacttgatagaattttgaaatagcttcgaaacacaagttgaatcgtgtcactcagatcaatattgagtgtaacaccttaatgattaggcatgctatagtgactttttaattacaatacacacctttgccaataaaaggattttatcaaaaattgtgacaaatttaaacttatgaaaacattatacttttataatcataactatatatactcttacaaaagggttgcgatcccatttttaaacttatttatacaactaaaataaactttataaacatgttgcacaacgactacaaaatgaaacccaagtcgttttgagacgaaactttctaggttgttccttctgacatgtacaatcatctccgagctctagactcattgctgctcagccttatccattcctttacatacacatgcaagcaataactgagtcacaaacacagtaagaaaaccatataacaaacaatatattgtcgacttatattaaggcacccatacacttatccacaaggcttaacaaatgattaagaatgttcttaatgaaggtacgtatgacc

SEQ ID NO: 37917 - DNA, 5259 bp, Cannabis sativa
tttattaaataaaaatataataaattattttgttatatattatgatatatatttaattatatatgatataatattttattttataatttaattatttatttttcatttattctacaaattatttatttatttatatttattattatatatattattttaatttgttttttttttaaaaaagaaataaataaaataattcaatttatttttaaaccaaacacacaattactttaaacataatctaatcttgtccaattttggataccaaacgggcctaaaatgaagaaagaattatagagaaagttttaaagagatgtgcaatttacaaagcagatgattttttttttcttttttttctttttttttttctttttttgtgaacgagcatgtttagtagtttggtttgtaaagtctttaaagataaaagagttattatatgtaacataataagatcccatagctataacataacaaacagctcatcctaaatacttcacaaaaccgatccaacacaaaaggaattcacaaacagttttattatatgttcatgcctgtttgatctgttgcataaccctgaattagattttcttcttcacagtaaccaaatcagtagtagaaccataggctctgtgcaaggcttcagcacaccaaccatgaccatcgtccactgtaggcatcctaacttccatgaaaggtgttaccagtttataagaacttggttgtacaacaccagcaaaaactctcagcacatttgaagcatcaatgtctaagcacacattgatattcgaaatgcctttaggcgcgggaggaattccaacgatcttgaaataccctagcagatgattttccctcacattttcatgcccttccccctcgtacacgatgatgagtgcctcggtttggttgtcttggacagtggtgaaagtcatctctttccttgctggcattgtggtgttcctggctatgattggcacgaatttgcctccatctgcctgaattccaattgcaagaggtgtcacttgtatggttaacaagtcaagatttccaaatgggtcactaataccagaggccactgccccttcaagggcagccccacatacagcagcttccaaagggttcatccctttataaagctcttttctcttggaaacattcaagacaagatcttttactttaggaatatatgaacacccaccaacaacaattgcatcattcacatcctcaatttgtaccttggcatcatgcaggcactggattatgagagactcacatttctcaaataccgttttgttcacttcttcaaactcctgttgatccaagaccttgtttatctttaacccatttcccaagtcaacatcaatctgaacactggactgaaaagagagtttgtggattgcatcctgagttgcaactctaagcaaacccattgcttggatgtcgctaattccatggcttgagaaaagggtatcagcattaggcaacagatgatgcatcatattctggagcaagtcttctccaccaatggtagctccagccaaggcttttatctgggagactcctccagctgtagcagtcacagctacatcacagtatccagcacccatattgaaaatgaggccaattttctcactgccactggccatattatcatgggcggtttgttgttgttgagcatataacaatgccacggctgttggttcaggcatcagtctcagtacatgaagaccagccatggcacaagctcgctcaatccgagtaagctggaatcggctgaatgaaactggaacagtgaggacaacatttcttattggtcgcttaagctggatttctgccattgctcttagctcaaccaagaagattgccaagacttcttctggtgttgttgatctccaggcattgttcaccaaggctgcgatgaagggtcggacaccaatgtccaatgtttgtaccaaaaacggaaggcttttgctggcatgaacaacaggatcggtgtcaaccctgccaatcaggcgtttcatgttgaatattgcagctccagaaagcaattcatgctcatgagaaagttgattgctgactccaccggaagggacttcatctttgaatgtaacatatgacctcatcatcttctggtttctggtgttcttaaggagctccacctgggagccattccagaaagcaacactgcattgtgaagtgccaatgtcaatgccaatcgcaatttcagggaaagcagatgaagatttctcatctgctgcgttttcactatcggataccacggtgtatgctggttcagccattcttgtatatccacaaatcacagcccggatggtgaatgtactcaacctatcatagaaagtaagtagaaagagagtcactcaactcttcatgatatacatctagccactcattgtgatacaatgtaagcatccgtaaatatgcaagaaatatagaactaaaatgaacacaaaaataatgttagtcttgtttactcgagaaaattgtcatttgggtcatacaacaaacacctatagggtgtaatttattgcactttcgaaatagacaatgcaaaccccacaagcgtatgatctaataactaataagtcttcatactaacgttgataaagaaatatttaacattttcttcgccagcagaaccaagaagagaggaaaatttccctacctaaaaacagttggtttagttttgtaatgatacatgaaacatggcatgaaagacactaattcaaagaaacccattcgcacaaaaaaaaaaagaagaaatacaatcaaacatagaagacccatttctacccatacacgttacaacagctttacatcagttcttgccttggtaactatatatgaattgtagtagagcacgatcaaagattacccacattatgcattattgtattaagcaaaacccagcaaataaaaagaaaaagaaaagctaattaacaaagaaaatggttcgaagctatgaaaagtacttacagtaagttgagaggcagacgatgaaggcggtgagcaagagagtgaagaaggaattgataatggagaagaaagaagagaaacccagaaggtgagaaattagtttggtgattagcagagaggaatgatgtgattttatgagaaggagtaatgaaaatggtgcatttctaagttgttctagagcttcctagattgtaagagacagaaccagtatatacttcccaaatgacaaggtcggtttctagaatgtgcatactcttttttcatttttcattttttgccaaatgtagaaccaggcatatgctcattgtcaaattaatgccaccttttttttcttcttatttttttttttttaaatttcaatcacacaaatctttttgtgaaagctacataaaatagaatataggtttttaaaaatattttacttaagtggataaattgataaatattttttttatctattaatctattaattaaaaatacccttatattatattttattaaattttacttaattttgtgagtaggttgtctaatatacacttgctcacttaaccgatataatgagaacatcatctataaaagtgaatatattttaaaggatatgaaaataaaggtaaaatttaaaataaataaagtaaagtgggtatacaatacaatttcctcttaaatatgagagctctgggttgggctacattttatgtttttttttttttttttgcttttatatgggtttaattaaggaattattttacaaaaatacacaaaaattacaaaaatatgattataccgaattttaaatatttttataatttttatgatattatttacaaaaaatacaatttttttatattgtactcttgttaatttgttgttgatttttttatagtttgtatgttattttttttgttctgatgttatttaaatgttattttttattaattttatgtagtttttttatttttttatttttataaaaaatcataaaaatataaataataaaaattaaacataaaaaaaaaatatattttcttataaaaaaaaatagtagtttatgtaattattcttttaagggtgtctacacatttggtaccctgtgttttatctaaatacaagtttggtaccctgtatttttaataatgcttatttagtaccttgtattttacaatcatacctatttggtaccctaaatttaaatttttttgataaaatttaatcaatacaatcaatagtctaaaattttatgaattctgaattcaaatttatttatttgattacatataattgaggactgtttggttaaattaataaaactgtattgattaaattttattttaagataccaaatatgtacaatttaaaaatatgagataccaattaagtattattaataacataaggtaccaaatatgtttttggtaaaaacacaaggtactaaataagtatattcccttcttttaattaagtcatatttaaataaaatattttttaaaattctatatttaaaataaaatgcattaaaatttactctctttctaaacaaaccaaactagatactttctctcttcaagggttattgacactctccaatggccgattctgctctccctttaccattgactgaaatcaaagccctcctcctccgctgtctaccgctagccaggccacttccggccaccacctctgattcgcagtttgctcctcctcttcctctctcattttttccctcgacccggtgagttgcgacaatggcaggaagacaaatctcaggcgatggcttaccatccaatcttactggaatgaccaaaaaccagctctatgacatcatgtctcaaatgaaggttttctcttcttctgtttttattttctcttgtaaaattttttctatttacaaacataatacttgttgggaatgaaaccaaagtcacacattggttaggaatgggaagaattatgggtatataaagatagacactactactccattagtatgaggtcttttgggaaggtgcccaaaaataaaaccgtgagggcttaggcccaaagcggacaatatcatactaatgtgggagtcaaggtgaggtagcgacccgacaaggtgaaagaacgaggcccaaatcagagccaaaggttcaagcgctgggatagtgggatgcatttgcaatgtctagaagataccctcaatgtgatgacctcgcgattgaagatctatatggtgccttgtattgaaagtctatctgatattgaggtagtcaggtggcgtgtcccgtt

SEQ ID NO: 37918 - DNA, 4249 bp, Cannabis sativa
tattattattattattatacttttgtagcatcaacttagtacttgtaattatagtgtaactacctcattcttttacaaacacttaattttgttttcaacttctttttactaaaaccaaatttcattcttccaaattattcttacaaaattaaaacaagcctgtaactactttgaataaatcattcaaacaatcttgaagatccgaccccatcaaatctcctcttcaatgtcttccaaactctttaatgatccattaaagtgaactttgtagctatcttgaacaaacttttacgacaaaaatcactatggtttggcttttttaagtgttcttcacctttcgagagtataaaaaagaatgtcgagactcgagcaatttaagtatctcaatataaattatgtatagaaattagatattgatattttccaaaaccaatttaaaaggaatttctagttagccaacaattttgtgtattctagaataatttaataatgtaatgattgagattagtggatcacttgtctttgtatactatattctttttaattttatctcaattcatttcataaacttatttgatgtcttattggacaacttgcctcgtttattcaactcaataactcataccatgtactatgaccgagtcaaatagtatatgccattcattttgttctttgccctaattgtggtgtaagtttactaaacaacaaagaatctaaaaaagggaatctagaacatatattctaacatatacttaaatatgggtaaacataaacaacatattctaacacctactactataattatttttagcataaaacctatattaattaacaaaatagatagtttacttgtaaatagtgacattttagtttcatctcttttttcaattatttaatcactaccaaagtccaaagacttacataaactcaagtaactcaggccatcatactcttgcctcatcaagaaaaagagcgagcgagtttttaacaagattatgagcaatacaattcgcctcttttttcttcaatttaatgcaatatattttcacgaagcatcgaaaagtttgtttaattaagttcactagtaattttctattactattaacattgtatttcttcataactatctttgaatctcatgtactcttctcaaaattaactttgatatctcataaagtgtaggtgtggtactaaaatgccaatccatagtcgacatagtttatctttataagctttatgagagataacatcattttaagtgtttgtattgtgtgaaattgaaaatataaaagtaaaaaattaaactttatagtatatgatatgtaataaaaataaatgattgttttatcttactaattttgagtctccaacaaggtatggaactcgatcgttgcttaaattcaatacccgaatccgcctgttagtgtaaccgggtaaacttgaaccctaacccttttgtttcgccttttcctctttgaggttttgccgagcaagagttaagtatcaatgtaaaacacaaatgagagtgagaaagaaagagggaacgaaataatgaatttcaaaaataaacacccaacacctatgaacccttaccaaccgaactcctaagataagactacaatgcacccccgaacaatgcactcgaacgcgctcgtgcatcatgaccaggttcaacccgacctgcctagtccaaacaattttctttttttttttccttcatattttcgggtttggctgagtcgggtacgggcatgttgggcgtgttgactgtctaggccagacccgatacaaatgttcagccctgatataacaatactaagaattctcatttcgataaggatgttcctgctgagctagtagaaataaaataaggttgcaacattttgtgtttataaagaacatatacttaagagagctggacccatgcatattcttctttgtaagccacactgtactcacaagaagctttgcaagtatacacgacgattgttgcccaatcgagcgaatccacgtcatttcgcacacgaaagtagtaaagtaattgaggcaaaatctgatcattaacagcaaagataacatcagcttgcccatgttttccatgaaactccgaaaaaagtaataatgaggtaaaatacctggaattcaaaacgcatagggccactgcagtagctgcatttggggatgtcatcctttgatggtcgcccgctcgatgtgggccacagcggtttcgaatcaggagttttacaatacctattacatcgaaaaaaacaaataaagcataaacaagaacataactacttttgtaataacaaactctcttgtaactttactaggtttaaaattttaagataccttatcacttgttccggtgcccaagcgatgcgctcttcgaatgataaccaactctttctctcatcatcaccctgctcagtgacgaaacaaataagaaaaactgaaaaaggtataatatttgaggaggcaaaattcgattctgtcttgcaaatgcatttctcacctcaaattccttcatcaatgacattattgtgtcatctgttcggttcctagggagcagcgtactcacggccccattttcatcgggtattcgtgtgtcgaattcatcttcatcctcctgtattacttcaagttctggccataaagtagtgcatgcaactacttgcaaatagatgaacaacatcagagctaaatttataggcaatcatttcttatctcatatatataaaattttgctaagagtgaaaatggtaaattgaatatctcataatatttatttcgctatttaggattttcgcctcctgaattatgacctttacattattgtatctcctgaatttttcagttcattaaaaataatccctaaactatttatagtattgtaaagtggtcattttgttaagtttttagacacgtcgcaaacaaaataatgacgtgaaaatttatattattaccactaccacatcagcaccatgtgtgtaatttaaaataaaaaaataaaatatgtattttgaaaaaattattaagctaaaaatccattaataatattagagttttcaatttagtttaatcattaatggatttttagtttaatattttttttcaaaatacatattttattattatttttattttaaattatacatttgagctgacatgacaataatctaaacatcacatcattattttgtttgccacatgtgacaaaatctaacagaagaatcacacttaacaacactgtgaatagttcaaggactatttttgacgggctgaaaaattctgagaatacaataatacataagtcataatttaggagacaaatcttgaataacccatttattttaaataaatctcaatactatatctatacaccaaccttcttgtaattcactggagatggttccactgttaccaagactactctcaattgaattagaagcaatacgcacacgttgacaatcataatcatggcctaactgagaatgcttgacctgtgtgtatccagaaaagatcttgttttacacacaagagtacaaatattctttcttgttcaatgaaaggaaatgccaagaaattataaagctctttaccctatgtttctctgaacaataaattgccttttcgcaacttgagcacggtttaatccctttccatgtaccgcaccaagtacaagatggaactagaagatgaagtaatcagcaaaaccgtcacggtactcgatcgataagtgttaaagatatgactgaattgaatagaaaaaataacctaaagagcataatatgtgttatgttacaatcaaacattagggcccctgacattagttttaagggttaaaaaacatttaataaaaggtaagtaccattttagaccatgtattttacaaaagttaccgactgaaccttctgttttgttaaatgacaatttagaatatctgtttttcaaaatggtacaacataaaccctgaagtgttattaccagactggttacatttttacataggaccggctttaggttggttatattgaaaaaaaaaatagtcaaaaattgatttcagggtctaaattgttttttcacaaaacataaggtccaatcggtcacttttgctttacaaaagacaaggtccaaaaaggtatttagcctctattaaaatccgattatgatagctaatggaaagtcactagtaaatatgacaaaccattttgaggtaagccaggaactaaataaatatttaagttaa

SEQ ID NO: 37919 - DNA, 2391 bp, Cannabis sativa
tttgaatgtatagaagataatacacatatactaggattcttcactataattcacagtttgtggtttcaaactctaactaatccggactaaaccatttaagaccaaaccaaataaaccaaatgagtccaatgtcaattgtttggtcaattcagatcgtttataattctctggttcgatcacggttttataattcttgcccgtggttcaaaccaaaccaaattgtctaattcttaatatatacttaatatgatttttttattaaatattgatatttaagaactatcttaggtacaatattgatagttaccttaacattgtgttaagaatatttatttttattgttatttacgttttataagctttaaagtaaaaataattcagtaaaaaaataataaaatattttcgaattacaaaccacgatttcaaattaaaccaatttgttcttaagtggattggtttcgtttggtttgagcatttaattggtctgattccgttttgaattttataaaacttacattactggtttagttcgaaaaaaatgaaaatctggaccaaacccaaactatgaacactcgtaacatataccatgattaaaggtttggccttttttttttctttttgctcctgaaataataagaagctgcttatctattatgaatgattgctcacatatgtgaatgttcatctatatgaaatcgattttctagttttgtggctaattacaaatgctaacttataggtggacatgaacttagcaagtcaactggaaatgccggagcaagaattggatgcggtatgtatcttcgttgttctcttcgtgttgggttggaaggttttttatttattgtttctcttgtttatcatacatgattagtttgtcatatcagggaatctaaaatgagtgttagaatcttacaatatgggaggtcagattgagactgatataatgttttcctggattaattgattaatcattgtattggtttaaagtactaatgaagtcttgtttcattcctgaactttctcatatattaagaagccttagttcttcaaaattgctctttgtttataattaaaccactttggcagaacttacttccaaaagggtgcccaagtagttataaaataccaacaaatggcatacttaagagtcaatatgggatcctaacactacccaccttttagaacgtacacagcaacccactggttaccatttcctcgacttcggtcctacttgagcgtgcatgactctaataccattagttacccccgaaaaattagcccaagagaggagagtgtccaattagctataaacgactactaaccaatcccatacttagtcaatgtagattcgaatacacccgttgtcctgaagtccattaagttaaaagacggaatagttgactatcttgaaaccttctagcaagtctaaggtcaccaccactcttaagctatggtcattagagatgaaagaaattttgaagatttgaaaagaaaatatacttccctaatagatatttgatatgtaatttcttgatattggtttggtagtaagcacattattgtcattatatattagagagtattactagctaccactacaaggtggcgtcttgcaataatttagcgatatgacattttaggtggtgctaggcatactgatattgttttctgactgtatttgttttttcttttcctttgcaggcattattggacttcaatcatccgtttaagcctttcttttttagataatatgttgtatagtttgcataataaattgcttgaatgtatcttgaacatagtataggcttgaatctttgttgaccttttcttattctgggtgtttaaggttactagaaaatgagagataatgttaatggtatattagtgtactaagtcaatggttaaaactaaagatgtaggcaaacaaagactgttgatttagttgataattaagaggtaatgagcacacaatctaaacaaatacaatagtgaaattggtaatgagtaatataatgatacctgcactatgaaattagacccaaatattatacacaatgacattaaaaaacagttgatcccagtatagatctaattcatttagaaaaattgacacatggtttttattattttgtgtttggtaaagatatcatcatgtataaaccccaattgcaaataaaaattaagtaaatatttcaaacacaaaaaagtttttttttgggggggggatattggcggtaggggtgtttataaaatacctaatttaatttaatctacgcgatctaattcaattcaatttgtaaagtgtagatattcgtacttatttgattggattggaaaatccaaaattcgtgcgaattgaatgttgataggcatataaaagtaaccgat

SEQ ID NO: 37920 - DNA, 2469 bp, Cannabis sativa
caataaatgtaattctgtctattactgagctttttagaattgaaaacgtaaaatcatataaaagtagattgtagattggaataaaaaacaagacagattttaaacagtttcatgtatccggatgatgaaaataatgcattaagcaaacccataagctgtggtgtagctcttaatttaaattattattacttgagaatatttcaagaggaactgttcaatttcaggcatccgaaaccccaatttgagagttggaactgctcacttaactatcagaacaagcacttttagagtaccaggactgaaacagttttcaaggcagaacaaacagatcagacaattgaatgcctgacatgaacacgaatgtaaaacctcaagaccttagctccatgattaaagagggaattaaactatgggccgatgacacttccacaaataaaggttcaaaaattttgggagaaggcaacatactcaaaagttcagaaactatcatactgcaacttaccagtggatttctacagttaaccagcttgcactcctccaaagaaccttctaacatccaactttcccaaacatcaaagctgtgacttgcaaacacaaattccattcttctattaatctgtgaggtgaaattagaagctgtgttagctatcgcactacatgaaaataataattaaccagggcaggttgtcagattaacgataagtatttatatatgactccgacagtgtttcttaataagaagccaactgccaattcaataacaaattacaataacctgcaataattttccaccagcggcaaatgatcgtagcccaattgtatcctacacaagtgcgatttgtataatatatcagataagcagctggagagtgaacaaatcaaagctatgctgactacataataaaaaataacaaaaggctacaatttttattagaagatagggaaattattatgagcaaaaccttgcttcttgaagcaacaagaaactgcgctgcaggatccctttttgttacaccagacattgtatctaagaaccaaccgccacctttagctctttgtctggatacatgaagagcaggacgatctcttgcatatagggctacaacatacccatctttcaaaagctcagctggttttccactaagcctcttgattgattttgcaagctggctggaaggtgattcttgaattgattccactgtagttttcctatttctagagtccgcaggagatgcaaacctagaactagaactcagagcttgatctgttccactcatagcagtatcatcatctcgatgtgaggtactctccttttctggggcagaaggatcctctaatttttgccaggacttttggcgtgtgtgcctctttttggctttcttcccagacctactgcgcctaccatcagatcgagaggcagtattttgagacagtcctgaaccctgggcctgcattgtctcttttggctctttagcaactttgttgtgggagctttctggagttacttgaatgacattagttaactgctcaacaagtgagtcttgtaatagacttccatctttcttatcatatgcttcattttcggtgatttcacttgtttcctcttcctcttcatccgaaatggcattttttggaacaatcccctggaagaagaatgtctgcaatatggagatagctttatcccttatctccatccagacttcttcactgtaatctgcacttcgaggaagtatcaaaacattgggcatttcctttacctgaagaaatatgtgattatatattaaacttaatacacatttacctcataatacaaagtcaaacttagatatcaaggaatcatagttgactgatgataaaaagcctcgtattttatggagggaacaaatgagaaatcaaccatgactgaaaacatggaaagatgacgaatgaaaaacgaggatagaagtaagtgactataattgttattcaacaagtgggaaatgagagcagataataatcgtctttagattcttaaaagaaatacatttgctaaataaattaatcgaacataactactcagcatacccatgcttccatccactgaggcccttcagcaccatccagagcacaaccagcaagggttccatcaattaaaagctgcttgacagcacaatcatctaacaactgactactaccagtgtttacaagaaatgcccctgtagaagaaggggacgagtcataccactggaagaaaaagaacccaaacagcgttcaattcacccgatctccaacaaaatgataaaaatacaaaaaagtaccaggctttatgtgttgcaagcattcggcattaataatctgaatcgtttcatttgtcaaagcacagtgaagagaaacaaggtcacttgcagcaagtaaatcattaagagtatccattcttctggccgcagaaggaaagtttattttagacctcctgacgctttcagtcccctg

SEQ ID NO: 37921 - DNA, 3797 bp, Cannabis sativa
  modified_base (3734)..(3761): a, c, t, g, unknown or other
agatcctgataaaatattcccaacagtatattagaaggtgatttatcactgactgtgtattacgaggtgatttatcactgactgtgtatgatattcatcactgactgtgtattacaaggtgattcatcactgactatgtattacgaggtgaatcatcattgattgtgtattatgaggtgattcatcactggatgtgtattacgaggtgattcatcactggatgtgcattacaagagattcatcacggactgtgtattacgaggtgattcatcactattgtgtattacgaggtaatttatcactagctgttattatgaggtgattcatcactggctgtgtattactaggtgattcatcattgttgtgtattacgaggggattcatcgccggctgtgtattacgaggtgatttatcactattgtgtattacgaggtgatacatcactgacagtgtattacgaggtaatgcatcaccgattgtaaaataagaggagatgctagatctttgtattacgagatgttgtatttttactaaaataacatcccaacaacactataatacctcatttcacaaaccttgtgatctttatttagatgaggtcacctcacaggttgaattctgagttttttccaacctgttccataatgtatttgttgtgggaatttattatctatgccatgtggcattcaattcagctctttcattaaatagtccaaaaaatgagtataacagtttcccctaagttagttttttgtggttttcacaaatttgacttattatacgttgtcttcccattctttttggtaccactccaagtagctcattttataacatacgaattgggtgttacttgttctaagtcatgtgtattacgactaactcaattgtgtttctcatgactgatgcatgacagagtagatactacaacttaaaatatgggagtgtgtacaatgatcagaagcacaggagtatgtactacgaccaaaagcatggaagtatatactatgacaagatgcattgggagtatgtactatggccatgtactatgaccaaaagcatggaagtgtgtactatgacaagatgcattgggagtttgtactacgactagaagcataaagtatgtactacgaccagaagcattgagagtatgtattcgaccagatgcatgggagcatgtactacgaccagatgcatgtgagtgtgtactttgactagatgtatcgggagtatgtactacaacaagaagcataggagtatgtactatgaccagaagcatgagagtatgtactgcgactagatacatgagagtgtgtactacgactagatgcattggagcatgtactacgactagatgcatgagagtatgtactacaaccaaaagcagagagtatgtactatgaccagaagcattaggagtatgtattgcgatcatttgcatgagagtgtgtactattaatagatgcatgggagtttgtactacgaccatatgcatgggggcatgtcctatgaccatatgcatgagagtatgtactacgaccagatggatgtgagtatgtattacaaccagaagcatgggagtatgtactacagctagaggcgttaaaagtatttactacgaccagatatgcttatttaaacttataagcataatgagctcgaattattacttaaactttaattaataagtaatttgtaatacaaatactctgaatgacacatttatttatatgtataaatatgatgggctcagagtattacttaatacttaattcaaaaagtaatttgtaatatatatatatgccctaatatgtttatttatacgtacaaacatgatgagcttgaagtattacttaaaacttaattgaaaaaataatttgtaatacatatgccctgaatgaaatgtttatttaaatatataaacatgatgagcttagtttattatttaaatattattttataagtaatttataagacacgtgttagtttaactttcacattttgtacatttttcttttctatgtaaccattttaacctcttctattctagatcaggttgattatatattaatttatacatattttcaaagtgtcacgtgaaaagtttcatcatgatatagttttttcatatctataatcaaactcgaaattattttctttttctagttacgaccagattagaagttttactcttcaattacaactactttaattaatgatcttcgagcatgccccctagcgaaaaagaatttagtttgttgaggttcaactcgctaagtaacaaaagttgttcactatagagtatctccatttcttaagtgaacatattgggttatctttaagaagattgagtcatctttgagcagagttatctatgagtatattgatctatgagcatagttatctacgaacaaaattatttactagcagattaatctccgagcatggttatctacgagcacagttatctagtaaaatctactagaatatttatatctgaccatagatatctacgagcacatttatctacgagtagacttatttggttaccaccactttttgtcaaagtgtaagaataaccatatttttcctatcttccaagctttgttggtcttttttgctcagtactcaaaggataaatagtcataattagcatgccaatatatacaattatatatcttggttatatgctcacatgtaaatttggtgaagagaattttttgagaagttgtttagacaactcatatttatgtgacacgtcaacaatcgtaattgttaattacaagtagattgtattttggagatatgagtaaacaagagttcctcattccatcattttgtcccacttctctgtgacatatatatcctttggtaaccacttgaacaaccagtaagtgaaccaacaaagtcacttcttattctttatgtcaatagaatgactaaaatattaacaccatttagtatttctcttatatatgtatagattttatatataccattttggtggtcaaagacttatatatacttcacacacacatatataatgttgtgtaaagtaggcaaaaaatttaaaattacttcctacatacattgaagatgattagtagaagagagttaatctagattctcaattttgaccaatttcatggttaggattgtgaagatgatgaatgtgaatctcttccttcttaatctctcaatgaaagcattaaattgttgacgcgatttctcgttaacttaatctaagaagattattaattcaacaataaattcaagtaaaaaagagacgaaaataataaatgaacactgtatatttttacgtagttttgtagttaaatctacatactccatgagtcaatattatttctgagttttagttgtatttacaatttggcaaagtttctataaattagaattggcttccctttttctttttgagtgaacccctattcataggaatgtgatggtggctactcaatcttttgttagtgaaaagttacaattgatgggaagttaatgcccacatttcacgtgtaactgaatatttagataagtataaataattattttatatttaaatacaaagaagtggtctttgacttggtcaaatcatgatatttgtgagtaggtgcattgctgttgtgtaatacgaggcaacgcattgctgcttgtgtattatgaggatattcatcactaactgtgtattacaagatgatgttggaaatattttactaggnnnnnnnnnnnnnnnnnnnnnnnnnnnnttaacatcctaatatgaatttataaaacaatgaaat

SEQ ID NO: 37922 - DNA, 3502 bp, Cannabis sativa
  modified_base (1757)..(1768): a, c, t, g, unknown or other
  modified_base (2015)..(2021): a, c, t, g, unknown or other
ccaagcaagcttggcgtatatattcgattttggagtctgttgcagctcgagttatgaaaagtatttaatttccaattggaaactttctttctactgaaaaatcaaacacgtgactcattctttttgaagagcattttattggtaaagagtttttttagaaggtggtcgttggcttattggtgatggttttagtgtaagcatgacgaatcatttttggattccaaaagtgtcaattgttctttcaaaattttttcggtccaacaatttaatttcaatggttagtgatcttaaattagttaatggtgattggaataaaggtactgttgactctttgttctcggtggatgaagccgctcaaattttaagcacccttcgttcgaatcaacaacgagaccatctcatttggtactatagttcttcatgtgagtatactgtgaagagcagttattggaatatcatacgacttttaagattgggtcaaaatgattcttctttgggttcttcatcttggtagaaatatttttggagccttactatccctcctaaggtgaaagtttttatttggaaagcatgtttattttggtttcttatcaattcgaatcttgttactcataaagtttctaatcctcatacttgtcatgtttgtggcatggaaaatgagacatcttttcctgcgccttgggattgttctagtcttggtctcgttgttaagttggtggattttgttctaacttcttcatctctcccttaggctaaccttcagtattttcttcgtgaacatgaatttattctttacaaagatgagatggagaggctctggtgcttatttggtgtatttgatatcatcgaaaccattagattcataatcatgagctactagatgtggaaggagtgttgggctgggtgatttcttttgcttgtaattactaggaagctcattcaaggaatggtggaactattgttgtttcgatcttggctgtctgttcgatagtctagccacctgagcccccgtgggctcctttgctaaaagggtgttcaaactcaacatagatgcatggttgcgagtctccgattgtcatctaggcatgaggcggtcattcaagatcatgttggtcgttgagttgcttcgtcggccttgtcggtattcgaattactttctccaaatgtggttgagcaatgacttttggtgagtccctagttgtgttctcgtcttgactatcgtaatttgaagtagagacagactgcaaagttgttacacaaagcttttgaacaaaaaaaaaaaaggtcttgtatggaaaattatagttctcttttgcaagatatttatatggcctgtaagaattttaatatttttaagattttgttttgtaattattcaacaatttttattgttcataaccttgttaaggtgtctctcttgcttattttagtagggaacggatatacttgagtttgtgtaagttacggactattttaacagtgacctaatgataatttatattcattcaaaaaataataataattataaaaaaaaaaaaacaaatttagaagggatatcccattctaactaacaaaattattaggctaattagatttttttaatttttttttttttttacatggattggttcaattaaaaatttgcaacccaatacttatataagattgataaaaataaattatattttaacataaccaaccaatatacactttaataaggggataataaaaatctaagagcatgtttggtattgttnnnnnnnnnnnnttttcaaaaaattgtttttagaaatgagaacgaaaaatagttttcgaagtttttaaaaacaagtcatgtttggttagtgttttttaaaaataataatggccaaaagtgaattggtttttaaaacagaaaacaacattttgttgtttttaaaattcttgttttttgtaactttattttctaaaaaccgttttcaaaaaacaaggccaaacaagccaaattgtttacaaaaaacaattttctgtttttnnnnnnnaaaaacagttttttagttataatgtcaaacatgcactaaaactcctcgtatagtgataataatcttcatgaaactaattctattatcaataacaataataaaatggtcttgtaaacaccattatcgaaaacagaattaaacttaaaaattattttaaataaccactatttctaaacaaaaaagaaataaaaaaattgataaacaaataaactttgaaagtaaatacttaaatgttatgttgaaaatgtttcttaagtgaaaaccgtagcccgtctagctcagttggtagagcgcaaggctcttaaccttgtggtcgtgggttcgagccccacggtgggcgttttctgttcttcttcttatgaatataaaaaaacgatttttttttacagctttatcgtttacaaatataattaatgtagatatataataatattattaaagctatataaggttttgctttaaataaaagaattattttattaactatagttaataaatcagtgctttttattttttgaaaatgtaataaagcagtactttttattcatcaataaaataacatcataaaataaatccataaataattttaattacattaataagtacaatatatacatacatatccaaattaaaataattaaaaagtacataatatattggtagattttgagttttcttaggtaatatatttagaaatagtttatatataataaatagttattaatcaatttgaatatttgatttgaattatcaaataactgtataatacctcaaccgggttaaaacaatcccaaaaattagtgaaatttggtttctatgtgtttttcttatgccatattaaaaaaaaatgtttttttttgcaatattttaaaagatatgaaatttccaatttgtttaaatttgcgtgggtctctttttccgttataaatgcagctttaagaaaataattaaataagctatacttaaatagtttaatcaagttttattatgagaaactcttaggctatatttagtaagaaattaattaggacgaattaattaagaaggatggacaaagacaaaccattccctcctcttctcctctccaccaaaaaaaagtaaaaaaagaaagtttgaagtccacgaggagagtcacacgaagtaacaattgatcgataacacaagtaaagaaactacttaatatccaaaataagaaacagtgtaaaaatatcagctgtagttcctatgttttgaattatatcaatatagttttatcttttttttttttttttgaagtgtaactttatctttctttagagtaaccaacggatataaaatcgtaatagtaattgtgtaaactgtatcctagattcgtatttttgaaaagaatatctggctggtcatatttttgtgtaacaaaatagcaaccattaggtatatgaaataatgtcatatcttttaaaagttaggaaatttacatggtatactaacttttattattt

SEQ ID NO: 37923 - DNA, 2183 bp, Cannabis sativa
atgaatataaaaaaaaaaattagactaaaaatattttctggatgccgaaacaagttaagggtgcatcagtacatctcttttaaagggtgcattgtagaatcaccttatagtttttgtatagaaattaaaactttcttcataaaattaaataactgatattatagataatattatttctatgggtaattacgaaggacatatttggaattaattctgtccaactacataattattgtatgattaagacaccaaacttaccattttttttcgcaaattgtacacatggactttctaaatacactaacgtttttgtctaacattattattaacacaaaaataataattcctaattgttacttaaaatctaaacacatcttgtgttttaatgtgtaatgtgtaataagatgaaatttccattcaaaaaaaaaaaatatgttttatatacaattgttttgaaaggctggatagtagtttaagaacaaagattaatatttgatgcgaggatgtgatatattccagtgaagaaatatattacatattagagtactatttactttttgtctgtaatatattatcatggcaagttggcaaaacattgtaggagaaaatacacgttctctctctctctctctctctctctcatttcaaagtgaatcatgtttctttcattctttcatatatgtgtgtgagaaagaggaagagagagagaatagcttgtggtccaaggcacttttcttgggttggcttgatatagtttattattacaagtatgtgaccctgcagttccaggctatgattcataaaatttgattgagacgacaactttatctttggtgggtaagtatgatcgaatgagattctcaagcatcacagacctcttccaacaataattagcacatacaattttgcccatcgtctttactcttttcccaattcttcactgctgtatgtcccagcaaaaaaaatttctccactgccgtattacatgtattgataggcttccactaacctttgtttacagccgaaggaacagggtaagtaaaatagacagcaccacagagaagtaaggagtgatttggcaagttagttgtgtgagttttgattgtgtgtatgcttgtgagggtacacccggttataggaataaatgggtttttgttgaaatggtgttatcgggctcaattgcagtttgctgtgtttggtaggtagtcccgtagagaataattggttcccatcctcaattctctgggcagcgtccatgatctgagccaatcccattggttggagtatgtgaagagatcccctaatatgatccttgagtcccttcataaaactaccttccaatatgtgttcaggtactccgggaactcttgatgctagagcttcccacttcaaacggtagtctcgaaccgttgaagtttgtgtgattgagagaaactcctccgacggagaccctatcggcactgcccgaaatcggtgaagcaaaagatgcttcaatgtctcccacgaattgattggtctgcgttgattctcccactgaaaccaggttaaggcatccccgtccaacccaacaatggctgtttctaacatcatcggctccgtcaatcgacaaatcaaaaagtatctctcagcacgatatacccaaccttttgggttgtctcctgaaaacacgggaatctccattctcggcggtcgatactcccccccgtggtgcggcgttggttgaaatgggttgggatgtggcggtggatgtggtgggaagttattccgaggtggtggcgactgtgggaaacgcacctctggtcctatcggcgccgaggaagatgatcccagtccgtgcgttacgggatgacggaattcgttgctggccgtggtggtctctgccgggattttcccagcagcaaagaatcgggtcagctgagccatcatgatctccggaagacgctgaacttccgatcttgtctccgacacttccttccccagctgcgacctcacctatgcaatctccttctgtacctccgatcgtagagcttccaagcgttcatccatggcttcaccagtcgtgttttttttcggtcccatgaaatcaatgctctgataccaatttgataggaattcctgtcaaaccagtagcaacaacaagcagaaagaagaagaaaatagagcagaattgatgaaaaatggct

SEQ ID NO: 37924 - DNA, 1870 bp, Cannabis sativa
ttttttttttttttaatttgggtttgataaaaattattatattaatttttaatattgtaaattattttaaatttgtaaaaatacctaagaagaagcatttcttaaaaaaaatggcttttcttgtcccaaccaaaaatagccatgccatttcgaaaaaaaaagaacttttatatttcattaaaacataaaatattgaattaaaaaaaaaaaagaaggagaaactaacttcttcaactcctacaactactacatggaatggaagtgtaatagtatttttccctttaaaaaaataataagagccctaatagtaataatatattttttctaaaaaaaaaactctcgtgtaaaaaataataatatatatttatgtgatttttaaagtataaattatttttattattattattatcattattttgattggacgtggaaaatagtggaccacttaatattattgtggatgacacgcggccattatatgccataaacattatcctttgtgcaaaaatacatttttgatatttttttttgcattaaatataatttagaattaatacatttttttattatatttaattttgaaataaattccacaatgcacattttaaaaagagtctacagatatatttttatttatttcgactattaaaaaaaaatttatgatcatttgtgttgtaattattaagaatattttataaaattttgagaaattttaaaaaaataatatattaaaaatatgattcaaagttcaaaccgtatatcttaaatattttatacgcgtataaaataaaagaatcttacatgcaacaaattatttgaattatatttttagtttgttaaatttttctgaatcatttaaaaatttgtagaatatcttaaataattacaacgtaaataactataaaaaaaattaaactaaaaaattctctcaaataccgaaagatattagaggtgcataattggagaagcataatttaatttttattgtatgctactattattggttttggtttatatcaccacaccacatttgaggcaaattcacaaaccacacaaagctttcacctttacaaaaatctcttctttcttttatggcgttgagagtgttcttcattagcttctccgaaaattggcctctaaaatgctctctctcttccatccatgctttctggtatgttgtcaaatcctaaagatgcaaactttaattatattaacttcttatttagatgtttttcattgctgaaactgagaaattgaagaacttttatcaatttctagaaaatatttgttgtactaatttatctttatgagtaaagttaagttctttttatacaatacccataattgtaattgatttcaaagttcagatttttctaaattttctttcacctcagattgttatttcaggaatttgaggtgaacccagttaggattttgtagatatttctgtgacccagattgagatttcatggatactttacttaaaactcataacaagcttgaattcttgcatccacttaatgggttttattcagagaaattgagcaattcatacccaacaacaacacctaagcttcatgagcttagatttggtgttaagaaatctaaccccaaatggagtaagactacttgtgttagggctagtagtactagtagtgctctattagaacttgtgccagaaaccaaaaaggagaatcttgattttgagcttcctctgtatgacccatcaaagggtcttgtagtggaccttgctgttgttggtggcggtccagcggggttagccgtggcgcagcaagtatccgaagcagggctttcggtttgttccattgatccttgtccaaaattgatttggcctaacaattatggtgtt

SEQ ID NO: 37925 - DNA, 2129 bp, Cannabis sativa
ccatggccaataagctccaccttgttggacctccatatctagagtaaaaattcatgcaccattattttggattttttgagagataacacttgtatttgaagaaagctcaattacaaatggagagacaagttaacaatttttttttgcttacacgacaccttttaaaatttaaccatgtactgttagaaaattaaatcaaaattggggaggatataagtaaagttttaatggtcacataattaagggtatttactgttgtcaaactttgttcttgttggaattaaaaaaaacttgaccactggttttgcactcaaacaaaatctccatggcctactcccctatttattcatcctaaaagtggccatctaaatcctcaattgataagaatcttgtattgcagagtagtggaagtttatagttatgtttatgaggattgcatatatgaacaattattgttggtcatggagcatgtcttaatccaaccataccactaagtgacctctgtttttttatttattcttttttttttattaaaaaagaggtcccttgctattaaacagattgttgctttggagaacaattccatacgattttagaataagattcttacttatgaggtaatgttttggttgattagattatcaacattcttttgttattaccacgtgtaatggtgattaaggctttgctctgtttaattttaatgtaagagaggcctatatattttgcaatttaaattgttagaaatctagttttgtttttattttgtcgaccagaacatctagcatttgtgagatgttatcttgtgaacgtgccttataggatatcttggccatattacacttctacgatccaattcctattattgtaacactgaaactgtagcaaaaaaacatatttttatatatacgtgtggctattatatgtaaatgttttgcaaaaaagcatattcatttggcaatattttttgatattctacttcttgcaatggaaatgaaattcaattattgtaaccatgggacatcatacgtaaatgttttgcccaagacatccaacggacaagctaagtaacctgaaagagataatcttatacttgccaagatattcagtttatatgcattcaaatgttactctacgaaagaagcatttaatccacaatggtacatattttgccctcaccctaaacataaaaaaataatagttaaaaaaaattggaaggaataagtaatacatcaacatttcaacatgagaaatactagaacaatgaaacatattttactcattaaactgaaatagtacaagagcctcctatttacctatttgaaactgagtttatacacaaaacatggaaccactcaatcatctatttcacaccaaatttatcaattaactagaagcctcatactttacaatggactacttgtcaacatttcccacataaaaacaaaaaggcccacagttaaatattaagaaaaatagatagacttcttaaaagtttacttgtaactcatataaattgaaagtacatttactatcatataaactctattagctacatagtcagcaccctttcactgcttttcttgttttcttgtatgaagcaaacctttgtcaatatctccttcgctttttcttactagaaaatttggataacggcaacaatttctctggagaacgacaccgctgccttttactaccaatgtctccttgtcttagttgatgttgatggtgtttattagcatctttagaaatagtacatttaaaaagattattatctccagccaccaactctagtgacaacataaatgtaataatttttttcaaatacaacaccaacatctgcacacatgttccttccttcagaaaggattttcatgtactttattacaaatataccgcaatcactaactgcagtctgctgaggtaaacttggaccaagaattatcatcgaatttgaaaatttccatctaatgccaaagcagttcaaaacttccataaaaaacaaatcatcaagcacttctaactataacaaaataaatattaaacattcatttaataaaaataatgaatatcataaaattcacacaaacttgctataatgaattaattaccagttcaagcactaattc

SEQ ID NO: 37926 - DNA, 3816 bp, Cannabis sativa
  modified_base (46)..(47): a, c, t, g, unknown or other
acttaattatactaatagtagtatatgtgatatatatatatatatnnatatatatatatatataagtataagaaacaagtgatatagtgagaaaaatataagatatttttcagataaaaagtagaaattgatttctctctctctctctcatactcgcacacttctctctctttgctcaactcacatgccacacacaacagtgtagtgtgagttttgtattcgtccctatctctttacaatatctcataaattgagaatatgctcagattttaaaattatactcatccaatcgaatctaatagcccactgtatttttaaccgttgagattggctttgaatattgtggtgtgaactcttcagtaagttcttagattggacgttcgataaattacaaaaagataacaagaatcccctgatatgctacaagatattatgttgagatccttaggcttatagttcatcagtctagatttaatctatatatattatgttgagatccttaggcttatagttcatattggattaaattattttaagtgaatccgtttttgcttttctaactttgatagaccattaagaccaacatcgagaccacttgtaccataggccaatagccttcaataaatactccttcccttcataagagaaggggttggaaaatttgtgatgggagctatgcaagagtaatacactctccattttctctatgcaactcatatgtatttcgagttttaagttcttccatctttcttccatttacttgataattcttgattttccaaccaactaacgtgttgatgagattttaccatcaacaactttgtaattataaatatatcccctaaacattatcatttgactaagaaagtattattattattattacttattatttaaggaaaaagtattagttaaagatttcttttataaaaaatataataattttggagtttagagaagtcaaatcaaaagagtttaaaaaaaaaaaaaaacaaaatccattccagtacaaacaaactatattaaaaacttaaactaactctgaaccaaaatttaaaatgaggagtttagagagatttttacgatcaaatgcaactttattaagaagaattgaccttatatttttcctctaaatgaaatgaacacaaatactattttggaacaattaaggcttccataatctatttgctatgtttattaaaacgccaataagggaatacatctttcactgaaaaattcaggcccttctgagatgagcattattatgaagcaagaaaggcattagctaacttgacaccaagctgaacctcagaagtggttgtaaggtggagtttatctggtttaaggttcaatcccttggcatcaacacacttaacatttggtaagctgagttgaagctgagcctttctaacctcctctatgtattgtccctctccagatgcaattgccacctgtaccagaaatagaacaatatatataattttcatacaaaacaattatatttttacctttgccttattgagaaataattacacgagtcactcttaaaggatttattattccttatatctattattgattggtatgatctttgatgaataaaatatactcattgtaaatctactaaaataatcgaaaaccacttgtgaataaataaaggtagagatggaacctgtataatgagaagattcggaatatttagatcagagcggatatcgattatgaatttttccatgttcccaccataagcctcagcatcacttgttctcacagtgtcgctctctccctgaaaccataaaacggcgcgtatcgttccccctttcttcaatgattgtttggccctgctaagcagcctagagtagagcggagttcctcgggcccactgcctaattcgtgtcccaccaacagcacaagggaccagtcccaccacgacgcttggccctctggctctaaccacctcgttggcgaaggccatcccgggtccaaccccacaagcctttccggagtcgatgtccgcgtggagtggctcgtgggcactctcccattttagtttagcgcttagcctaagtatctggctattggggctgcattccggtggggcataatggtcccatgcgccatgtgtaacaccacctcggccggccatgttgctctgtcctgctaatacgaaaatgtctatcggaatagaggtccctatggccaccttagaaatcgatattagagagaataaccagaaaaataacggttcaatcatgatagattatactggaaaaatcgttgttgggattttgccaaaagaaaaaggtggtgtttttttggggggaaggatactgcgactttggctctatctttgctgcatttctttcagccttttcacccccttatgattttggctttatatttatatatatttatacatatataaagctttgtatcaaagtgaatcatcaaaatgcacactgcaattgcattgatagtgattttgtgatggtatctaattaccgtatttacatggacagaaccaagcttgtgctcagtgagccattttattctgattttaagtgttatctacaacataaccataattaaataaaattatgtcaacaaacactctcctaaatcctaatgcaaatttgcgatcttaaatttgtacaaacatttctgtaaaatattataaaaacaaaaaccagtattacaccttcctaataaagtacgttttctgaaagttttaattattgctcttacttttttattgataatttttcttctcagcattgtctccaacaggtagctaaattaataatgtgttgtttatataaaaaaggaaagtgttatttgttataaaattattataaataatataaaataaataaaaagaaaaaagaataagatgaaaagagaaagcgaaactgaattagaatttctcaatattttattataaaggagtgattcctatttatacaaatacgtgagccattgattaggaaactaaggagagaaacaataattataattaatggtaattaatagaaacgatttgggtgatttggacattcatataaataataatttataacaattctcattggatgtctataataactgtctcactaaaatcttgttagaaaatttagtaggacaaaacttgttcaacgaaaaaatagtgcagtgtgaaatagctcctcattttggccttcatagagatcttctaatcgacaaattcaaatcatatatgtcatcttcttaaatattgatgttggtaataattttgtgaataagcttgcaagcttgacacttgattgaatgtgttggacaccaatataaccattctccttaagatcatgagttaagaagaatttggtgaacatttaggcattcatggagatgttctaatcgaaaaatttcaatcatatatgtcgtcttctcaaatattaatgttggtaataattttgtgaataagcttgcaagattgacaattaattgaatgtgttggacactaatatagccattttaagatcatgagttaagaagaatttggtgaaaatacctttggttctatcttcttcactatagctttagttcagcaatgcattttacgttatcatcataatcatcatgagaattattgatgttgatactgttttattaagtgtaatccgtatatttctccaatatgttatctcaatgatctcagtagttgttgtgaaaattgtgtacacaagtatacgcaatcgtaacaagtaataaagtgataaatcgagtatcgtctccacagggattgaaaattagaaattaatttataaaactaattactca

SEQ ID NO: 37927 - DNA, 1773 bp, Cannabis sativa
atagagctaaaaacgaggaatcatagtgctgcacttgatatggattggctagcttttcatcaattgcagaaagtatttggtagcttttggaaacaaaggttagagaccagtttacttttaaagaagataagctaccaatatagactttattaatcccctccttaaaaggtagccatctatggagtagtggaccaggaagtgggacgcaactaacagtggagaacatgcacatagtctatgaattccaaggggttcttcaagaagaactaacgggaatacccccagacaaagatgtagagttcatcatcaagttagctcccagaccgcttcaatttctaaggcgttatacaaaatagcacctaatgagttgaaggaaattaaggtatatctactagagttcctagacaaatggaagatcagatcaagttactcaccttggggtgcaacgatactcttcattaagaggagagacaaaatcataaggatgtgcatagactaccacgagattaacaaggcaacaataaataataagtacatttccctcaaattaatgatcccttcgaccaattgcaaagatagatctaagatctgtgtatcacccggggagggtacaaaaggaagacagacccaagatgatatttgtaacacactatggacacaatgatattctggtaatatctttcagactgaccattgcctcaacaacattcatgtaaaaacttcatggatgtgatgaacatattgtttaaggagtgcttggataagtttgttgtcgttctcattgatgacatttttatctactctaaaactgtggaggaacatgaggaacatctgaagttgactttgaaccgacttaaggagacctaactatagcccaaatttaggtaatgtgagttatggttagagaaggtggcatttctaggccatatagtttctaaagaaatatcaaaacaggcaagagatggccaatgcctaaacaataagagtctgaagtactcaacatgaggaagagatgatggctagagcttgttaaggactatgattttgaaatctactacaacctggggaaggccaacatagtagcagacgcgctaagtagacgcagttatgctaactttgcaatactagcacaaatggaaaagccacttcaatgggaactccgcttgttggagaaggaggcgaataatttctccaaagttcaagcaacttgctgaggtataaaggaagagtgtgtctagcaaacgacttagaacttaaaagaatgaagaaggagttagcttaattgaagcctggtgcctcacatgtcaacaagttaaggatgaacatcaaagaccagtaggaatgttgcaacccttggaaatcatggaatagaagtggaaagatatgtccatggactttgtgataggattaccccgaataaccaagcaagatgactcagtttgggtaattatagaaagactcacaaagtcaactcactttattttgataaagtctacttatagcacagagcaatacgttgacgtctatgttcaagagatattggtgttccatgaggtagctagagtgatgtactcgtgtataagagccatcattccatgggtataagggtccaatggacgcttgaagtgcggacgttacaaatttccataggttttgggatggtctacataaagcaatgggggcgtgattaaaacttagtacgaaatttcatccccaaataggtggacaatctaaacgcaccatccaaatactcgaggatatgcttcgagcgtg

SEQ ID NO: 37928 - DNA, 2075 bp, Cannabis sativa
aaaaaaaaaccagacttataaatttttaaaattattaaaatttatacataaaattacatttaatttgatacacgtgcggagcacgtgtgtctctactagtatcttaaataactagatgattatgaaaaaaaaaatagactaaaactttttcttaaatatcaaaagagtatatggtgcatcggtaaacttttttcaaggatgcaccataaaagctccttaaacttttttaaaaaataaaataaaaatgcacgacctgaaagaaaaaaccaagagaaggctatcattgatcaataaccatttgcttgaatagcaatgaagatataataaaaaaatccaagctaccaaatatgcattaggaagctcgtcccttttttctaaaacccaatttcttgttctttcatttttttactaaggtggaaaccactaattgggattccacacgtaagagcttaattaagtcctaccaagtttcaaattatattactgaaatactaactgaaacattacaaaaacaacaccaaaaacaaaacagcattagaaaagcaatctttcaactaaacccaacatatactaggcaaaacaaaatcccaactttacttagaatacctaaccaaaactgttaccctttactagtagcaactttctacaaacctaaataaaacaaaatgttcaagagagatataaaatcatcattcattgcaaaattaactgattgcccttagtcataattatatcaatgcctaagtcaaaacaaaacttaaattgggattccataaatttttttgttatcacatactttcctcatctaaactacacaagattttaacaagtaattgttaaaattatcattgtggactaatataatcatagacatgattttataaccgcaaatcaatcattaactatatgtttaatatttatcaacaaccataatgagatggttaataattattaattttgttagaggcacatgaaaatgcccatataactataattgacccagtaagttatagtccaccattaattagaccttattagcccaataaactacataaccatcttagggttagaagggtgttttagattataagtatgcatgagttttgttaatgctatggtaagatactgagtgggtagctcttcgtttggttctctcttctattggtgttcaagttgttttcacacattttttagaatggctcaaatggatggaatgactataggaggtatgttgtggatttattgctctaaataaaatatgtgattttggattatatacagttgatctaaatcactatagtccaggaaattgccaagattctgagattgaaaggtacagtgattcgtggctcctgagtcagggtacgagcttgtatcattagcacgagcggacccacatataagcaaggtggagcagttgctcccctaaaaaaaattgggaaaaaaatacatatgcattttagttagttacaaaaaatatttgtagtaaaagatgatatttataagcataatattatctttggtgtaatggttaagctacttagcatataggttagaggacaagtcttctaatcccaccaaaagtatttaagcatttttttaagtttactttggccccctcacttaccagaaagaaattacgccccctcactttaaatctaaggtctgccactggtcattagagctgttgttagtggcaagattagtttgtgcttaagactgtgtttgggacagtgttggggcctgtgagtgattagttcctaaagaaggttctgagaaagacttgtcaaataaaaaaagaatagtcttggacaatgtgactaaaacgcaaacataattaacactaaggtctgttagtgaagttgacaccaaatttgttacctctgatgggattgaaatctattggatgtgattcaatgaataatcctatttagaaattaaatgtgatcaaatgaacacccctatttagaacttaaatgtaaaaaataaattacaccttaaatttactagcagtttagtagttaaggtctgttagtgaagttgacactaattttgttacctctgatgggattgaa

SEQ ID NO: 37929 - DNA, 2450 bp, Cannabis sativa
aaaatgggcttggacagtaaaaatgtacagtttgtcgtgtcccagtatttttgaaaacatttggtaaaaaaacagtatttttgtaagtttccctttgtaaacgggaagcccattgatagagtagattacattttaatattgatctttgggttggttaggtgaggcccaatgtgttggaaatcgtcgtccgtatgcggacgtactattgacagtgatagccttgcatgagttgttggattgttgaaagaatatcagagtagtggatgttggcccaaaaaggggatttccttttgttgtgtgccttttcaagacctgacacaggggacaagccgccaaatttcttagaattcttgttagaggtatgccacgtaggatggttcgtggcacttgaatgtttctagatgccttttttattgtcgtttctggacgacccctaaaggtatcttactttacctctttgaatgcttgtttaataaatgtgtgattaccttttggatccatatgttcgacttagtcgctaagaggaaactatcagatctggacactctgtttggctctgctcaagggttgggcggtcaatcaacctagtagtcctagtgaacgggcctgttaagcttaatgggcttatttgaatacacacgtgttgcctattcgaaaatacagataacatttactccaagcctttgtgacttaagagtcctagaggtttgcaaccatcattcaaatttgtcatcgaatctggggccacaaacgatttgagtcttttgagattccatgatgaaatctagcagaagatcctaaacccttcatattctgttggtggagtacacatgtcgagtattctttggtccatgtatgtcacgcgattcaaagaaacgtgtgttgccttgggttacagactaatgactggttatgtcagcaaattacccgaggcaaatatcatcataaatgcacacgtccctggttccataaatggcaacaaatgaaatctttggcatccttcgactgttggatctaggagaattgtgctttctcaaattcaatatgagcccttggatcggagacagacggatcgccatggttcttagaaatagccagaggcccgaccatttggatctttagccattttctttgtgtttttcaaatttttaaagagaaaaattgtctgtaaacctagaaacccttttctggtgaatgtccatccccaatattgaattacacaactagctaggtatttaccatgccaagctgtgaaaagaataaggtttctttagaaaaaatcaaagagtctacaactccaatcaaagcttttttgaacaccgctccatttgttcgagtcgcaatatcgacctcgtaagacttagagaacgacactcatgagtttataaggaggcccagtgatttttggacgaggaaactagaatacagagcgaatccaagctgtcgccaattatgtggaacaagatcgcgatgccaacaatgagccaacactagcatattaagccagaggaccattttgggagataaatttcatcaacaacaaatttagcaactacagaatgctagaggactcaaaaaatggttgtggattccataacactatctgtctattctgcatcagactttccgttaaaggcgagaagaccaacttaagcgtggaggactttggggattggagtaggggccatatttttttggggctcatctagcactgatagactaattttcccagtttgtggcagtagttgggatggctcccttttcgctgatcccgcgaagctataggcttttggcgggattttttattttctacaaagtaagggagatggaggtgcctggttttgaggatattctcttcttctatgaggtggagtcaaatccaatcaagaaagataggaataaggacggtttccaccatttgaagaagaagaacaaggtgaagtgccttatcaacacttggagccatcccctagacatacaagagtactggatcttcacctctgggttccgtctacataggcatctcactctcctccttgatattcaaacaattgttaagtgtcactattctgctttctgacgattacgtctctgggattagagtatttaattcgaacctttctttcttttttcatcatttatgttttttctctcaccctgaccaactccctactaggaagagcactggaaggtctactacaacatgtctctaacagaggtaaaagttacaaacttagtgaccacaaagaaattgtaggaggtgggtctgattacccaccatcaaaacattgaatcttcaaatttttgaggagttttcttcaaacttgacgaggtttaggaggctattgtcatgattgttggggattattttagcaagatctagaattactaccatgtatgttgtttaacatcctaaacatgaatttctaaaacaatagaatttaaacaca

SEQ ID NO: 37930 - DNA, 3491 bp, Cannabis sativa
aaataatttccaacatttatatatatgtgatatgtatgtgaatggatagttatattattgtgaatgtatgagaggtgatgaatcgtcaattatatggtaaaactgagtgtagattttgttattattttttctagaacatcgtgttatgggaaagcgctgaagttttgccccaaaagcatgaaatttctcaattaatctgtcatcttcagcttaaagtccctacgacgatggcaacttcgaaggatccatgtttaggtttaggggtggtgcacttgggttttctcttgaacgaattcgaaaaaaggaggtgaagtgcttcatcgaagtattcagacttcactagaaacgagttttgggatttttttttctttcttctctcaaacaatttttcactctcggggaagtgtgaagctaaaaaagaaaaaactccaagtggcgaaaatgttgaacgggtgattcacgctatatttatattgaaagtggcgatccgcgtgcttcagatcctacagtttagattacgtcccaaaaaacacacttgcatctgacgatttgggctacgggaagttaacatttaatatgtttctcaggatcgaggcaattcaaatgatgaaacatgccttgaaaatctcgctgacatacgccagtcgtgaacccgcatccctaaattctacgcaccttttcgagacgcttgatgtgcacaaaccaaggagttgtcgacacgtattctcagttccagatagatgaaaggaccacgggctttcgcaacttattgctttggaatttcaaagggacttttcagttcccagctccacatctataaacaagttcgaaaggagggttgcaagcctctgcagcttttgagccccaaaggcttgaggagtaaatgttatatgagtttccaaaatgatgacatgtaaaattctaaagcctaatactagccaaggtcggtccaaacctgggcccaatgattaagtcaaactgtaattcaattcgaacgtaagcccaactcactaagcttccaatactagaccaccctggtctggataaagccattcaacttagaagtgaagagtctatcaagaccaatccagataccttcaagaggtaatcctgaagcaaggtaatcgaagagtaactcaaatggcttccagacctcaaccaacatggaaccctccagacacaaggcaccgcagtgtcagagtttgtccactatattagactagtagagtgtgtgcgctaccgaaagaaggtcacctttttgtccaaattcatgttatctgatattctcagtacgaatgcagcttcgcacgacacctaacatccttaaatggtccccgcttgtatagactttcctcagctcatgaatcgagcctctctcaattggcccaaagtcaataaatattgtattttactctattagagagcctagttgacatgctaaaaccctattgggtccgggtatgtcatttttccctataaatagaacattaccctttcatacaaggggaggaaattaatttcttggaaagaagaactaagaattagggttcttctactagggtataaatacttgtaaaaaatactttgtagcttttctaacttaattacattgactcgtggactagagtttgttaccactcaaatcacgtaaaaatctgaatctcttcttctttaatttatttctttcttattaagcttatctattttcataattagttttcgaaaatctcagtactacatacaacaaaaaaatatacaccatacaataatatatatgtacatataacaaaaaataattaaaaatatgaatatatatagcatgttaataaaattatacgtcacaccaacaaaaatacaatataaaatagaacctaaatattatttttaaaaaatattctaccatagaacaaaaaatacatatactattcactaaaaaagatatactaaaaattaaaaaaatattactaatatatatacactatactaatcgaattatatatcacaattaaaaaatatatatataacatgacaacaaaattatatatcatttgtatataataaaataaaaactaattaaatatcatttaaaacaaatgatatattgtacaattaaaacatatataagaaataattaaatatatgctaataaaattatatacctatattgaaatatatatatatattatgttagcaaaattatatatcattattatatatagtaaaataaaaaaaataaatttcatcaaaaaaaaataaaaaaataagtattatttaaaaataataacatatatcatacaacaaaaaagaaataaattttacaacaaaatatattatataccaacaacccaaaataaattaaataaaaattgacataaatttaaaataataataatttaaacaaaactaatacatgtatatcatgatatttaagtggtattcttctaattctaaaaaaaaaaatatagattgatcactaaaaatgtgagaaatatgaaaattttatgtggcaaaagataatgtataagtaataattagtgtaaaatagtcatttattcacaatttttaaaataagaacatttatttatatggtaatataattttgagttatttattataataggataattacatgaggcactattttttgtaaaaaaaagtttacatttttacgtttaatttttgttttacattttgatgattttttatagaaacaatacgaaaataacaagaaaaccacataaaagtaacatacaataacatctaaataacatcaaaacaataaaaaaatcacatacagataataaaaaattaacaataaattaacaagagtacaacatgaaaagatcgtattttctgtaaataaaatcaaaaaaatatttaaatttcggtgaaaccgtatttttacaatttttttgttgtttttgtgtatttgtgaaataactcctattataatatctctttaactaatacgttgtataaaaaacttttaaccaattataagtcttatttttttttttcttgttggacaccttatgtctaataataatgctctttaatataacatttcatgctaaatttatgtatgtcaaaaagattcatttagttggagcgggttgaagctctgatccgaaatattttgatacttattggatcttggatcagatgcgctctgccccgcctaatttttttctggatcggatcttatttgacctgatttcaatttatttaaagaaaaacttaattaaaaactcggacccctgatttggatcccttgggacttggacccagacccagatccggaccgagacccaggacccaggaccccggactgggaccaagaccagggatcgggacccgaacccggaccccgaccctggaccgggacccaaactcgaactcggacccaaactggtacccatactcgaacttagacccagaccgggatctagaaccgaactgggacccgggacccagactcggacctaagacca

SEQ ID NO: 37931 - DNA, 2216 bp, Cannabis sativa
atgcaacataaaatgtgatttctgatctctattaattactaaatctgattatattgaaataagttttatttagggtacaaaacccaacacctagacctattggtatgtcggctatgtttttcactaaccattggtctattattggtcatcttgtcacaattgctgctcttgatgtcttgaataatcaagtggatccttctcacatcaacaaaactttaattaccctcatatcaaaggtgaagaacccgttacagttgctcaattcagacctattagtctttgtaatgtggtttacaaactcatttctgaggccattgtccttcggttgaagccttttctgcatctggttttttctgaacatcaaagtgctttcatatctaactgtctcatcactgataatgtcttgatagcttttgagttactcaactatcttcgaagcaaaattaggggtatgattaattatgcagcgcttatgcagttatttgacaactcagtttctctcctcttctgaatcctctttcctcaatacttcaatcggactgatttcttacatgctagattgggtaataatccatcctatatttggcgtagcattcattggggaaaagagcttcttcttgatggcctttcttggaaagttggtacagatacctctatcccatgtgttgatgaaccttggcttccaggcatactaattttaagccttttcatgttaacactatgggccatgatctgcgtgctttagatctcatcacaccgaatcgtacttgagatctcatcacaccgaattgtacttgagaccttatttctctacaaagacatttttttagtattgatattgatcgtatccttcaatttcctctaagtctccatgctctcgaagatggacttgtttggcaccacactacaactggcttttatactgttaaaagtggctaccatctggccacctctttaaggaatgtaagatatccatcacaatctctctcgttttccagttggtggactcgtttatagaagttgaaatttccttataagattaaaatgtttgcttggagagtgatccatgatcctttgtcccttgctgccagtctccatcataagcattttattgatgatcattcttgctctaggtgctccatccttgtgaaactcttaaccatgcttttttcctttgtaaacatgtgaaaaaggatttggcaattgttacctttcctcttgaattttactggtatatcctccataacgaacaatgactttgttcactcgtttttctctcactttgatgataatcaaatggaaacatttttttgtctcgtgctatatttggtacaaccgcaataataatttccacgaatcccgcactctccctcctactatttttctagagaaagctttaacttacataatttctggcacaacaccggtattcttcccaaggcgtctaggaacaaaccagcccgcaatcagccatggcagcctccaccacctggtatgtttaatcttaatgttgatgatgttgttgatattaatggttgtatgatgggtattgatggtattgtttatgactccaatggccatgttctttgccgcaatctccaagccagttaaagagaatttctttgtcaaagaaattaaaactaaggctatttccttatgtttataatagttgaaggatattaactgtgtggttcattatgttgaaattgatgcttttacggtctcacagagcgtaaacaattatcaagaacattatggatgttttaatgatttggttcgagatattatttatcggctatcctctttattaagtgttttttttttgcaccatgttcgtaagagtactaactctgctgcagatggtcttgctagagatgcggtgtggattctaatttcgtttggagggctgtttttcttagccctaagaagttattgttgtaaatgaaatggtatttaatttctctcaaaaaaaaaaaaaaaacaaaacaaaacaaaaaaataatttattatttttactaaaaaaatatatatatttttgtaaataaaaaaaatataaagcataaagataaaaaaaattctatataacatatttttataatttttttaatgtaataataataaaacaaaaaccctattaccagtgttaataattattttaaaaactgatagtaacgaattagcatctcataaatttttatagtaacttttattaatgt

SEQ ID NO: 37932 - DNA, 2326 bp, Cannabis sativa
ttacattttaagatagttttttttatatttttaaggtattacacataaaaatccctatagcggagcaatttaaaaagcaatcaaaatctatatatatatagcaacccacataaaaattaccgaaaaatcactgaacaaatctatattttttttttttctatgcacaagttgtaatatttctttcatcaaactattctaagtactaattttacatctaattatcagcttttgcttaaattgtgatgttattagattgatctatttatagtgataatgtactcactgttttaaggcagccaaattttcggcggggaccattaaccactaatctcttttcaatcagttttctttaaagaaagtcaacgcatcgaatgaaggtttgaacaagatctacagtcaataatttaagttcattgtctagttatgtacttagccaaataatccatgtgtaaatattaaaataatatacatgacatagcacattatataaagatggctttaaaacttcacacaaaaaattacacccatttcattaagatatatctatagtcaactatacataaattgatcttcatatatatatatatatatatagagccccatgaaccaatcaacttgaaatcaattctattaagtcttaaatttctgaccactgttacatacatacatatatatatacgtatatatgtgtgtctgttcttcatgtttgaaagtaaaatattcttaacaatattatcatgcataattcaacttccttgggatttaagtaaaaataagatgacgcactaccttacttcatccattttcatatatactaattcatcagttttatatatgtatatatatatatattgtacgcagtttcccagataattagcttttaattatatgtatattcaaacttcaaagcattgatgatgaaataatatttttgtgttgagtaatccaaaagaaaaatggcgcaaatggtggtgggagatgatattgagtcactgagaatcgagttggctgagatcggaagaagcttaagatcttcgtttcagcgtcgaaacaattccagtttcagaagcattaattcggcgaacgacgacggcgatgttgccgaagccgaacgactagctctgcaatggaccgttattgagaagcttcccacatttaataggctgagatcttctttattcgatttgaaaaatagcaatggtgatgatgatgaggatgaagcgaagaaggtggttgatgttacgacgcttggagctcaagaacgacatcttttcattgagaaacttatcaaacacatagagagcgataatctccggctcttgagaaaaatcagaactaggattgacaagtaagtattcttgattattaattaattaattaattgtcctaattaatttgttaaaaaaatagttatcaaagttgtttgatttgtgtgatttatagggttggtgtgaaattgcccactgtagaagtaaggtataaaaatctgagagtggaagcagaatgtgaagtggttcatggaaagccattaccaactctttggaattcattcaagagcattatgctttctgtgagtagtaacttgtaattaataatttcaatggaatatgattatgctttaatgggcatcaagccaaattgatttaattagtttagactaattaatgatcttgaccaaaattatctgatcttatcttatattattatattttgttttacaggggtttgcaaaggtgccgggtttacggtcaggtaaagccaagataaacatatttaatgatgttagtggcgtcataaagcctggaaggtaagcttccagccttgtctgctttgagttttgaatttgatcacatataataatataattactctttgtccttgtctgtgtaattggaattttgtggatcaattattgattaatttttacaatatatatcggatttattataaattaacttgactgtggactaagtcagttactataatttcacttgtgtgggtgattaactttttgaaagctactcaactcctatcttggttgactattacttatcagggtccttactccttatcttaagtcttgtacttagttttgcaagatttttcttttttctttttggtttagttataaagagatatggtcaccatatatggtaggatccacagttgtgggtccaagagtaggctttcttattttccagtttcaacaagtcaacataagtacatttttctgaagttaaatttgtaacactattaagtgtgacacttttttttttttttgatttaagcgtttatatattacatcatgcataacctgggactcgaa

SEQ ID NO: 37933 - DNA, 2434 bp, Cannabis sativa
aaagtgttagtaaatgtacctccatggcagctgcattgcaaattagtagtgtgcaaagcagtaaatgttgatttttgacgactggtaatatctttgctgcaacattaaggtcaagaattcattatgagcaagagcaacaactttgcacattcatgtaacacaatactaagactaagagagacaacaacaacaagattcaatttgattttctaatggctatacaatagccatacaagtcagtaataaactagaaacaacaaatcactaaaaggtaacaaatgattggcaactagcaaccttgttcaagcccaatacagtcatctactttctttctgtagacaaagctagttttcataggcataagaaattgaaaaagaattcattaagggaacttggctcatcaaacatatggattttgattggtcaaataacacaataataatcattcaaaaacagaatcaataatcctctaatctgtagcccatatggagaaacaaaatgaataaacttgcattaaacactttctataatggtcaaacacttgaaccatataattaaaaacaagttagcttaaagttcttcttatttaattattaaaagtaccaaaagtccgacatcataatgaagctaccatttacttaaatacaaattaccccttttctgtttccttcacttcataatattttccgagaaaccaaacagagaatcattaaaaaaaaatagatgaagaaaacgaatatggaaattacctgcatatatgcggtccttgggcgtaccagacttagccaagacttcgagatcgacaaggctgagagacatgaggcccaaggtgagcccagacatcataccagcaaacaccaccaagagaacgatcaccactatatgaatgaaaaacccagtttcacaacactgatattccaccgccattgatgtcaactttcttgtaaaaaccccacaagaaattcaaagacaaaagcccctgaaaagtttcaactgagacaagctaataaagcaattccgggagccccaccacctccattgctcacctcccctctctgtttcccaacccaattttttcgtgtcagagagagagggaaagagagatataaaggacaaagctttacagcgtgaggatgacgatgatgacgacaacggttatgtgagacttggagagagagagagagagagatacagaagagatatacagagattttatacgtgtatgtatgcgtatacaacatcaatttcaggtactcttattaactttaaattaaaattaatatttgtattaattattaagtttaataaagatgattgctattcaccatgtcacttgcacatgtcaccagccagaggtagctttttattattggttagtaatattctttaaaggttattactttaaatttttagatacgatacttaattatactaatagtaatatgacaatattaattataccaaagtaatataacaacgaagacagtgttagacatcactgagacattgataccttttagcagttcccggttgctattagatttcacactatcagtgtgcctaggcattttacgaatgagaattgctaaaaagacactattagtgtctaaaatcttcttcggtatcatacctctattagtataattaagtatcaggttccatataaaataattttaaagagaatattattaatcaatcgtgtagtgacacttattaaaaatactaaacacttctaatactcaataacaattttctttataaatagttaacaatattacataaaaattattacattcaatcatttaaaattcgaatttatataatgactttaaattaaatatatatatataggattcaattacacccctaataatgtatcacttcttgtgctatacactcataattaataaattgagtaagttggtattttgtgctatacactcataattaatagaaataaataaatatgaagcggcatgcactatagtattatttaatttcaatttcaattaacgataataagataagagtagagtgacctatagtgattcccaatacaaatactaaaagtttttttttctttttttttttaagaatacaaaagtaaaagttaaggatttatataaattttaagaatgggtatcccttttgtttatactgtaatagcgtttttaattttggttatttttgatgcttagataaattataatctaaacttttgtagtaatattgtatattgtaattataacatgcatattatatattttaattttttttaaataatttatagtaataaaaataattttttttttgacattgtaaaaaaaaataaaatttaaaataattagttacaatatataaaaaaaattattttcaaataacaaattgaattttataaattaaaaaaaattacttattaattttttaatttttt

SEQ ID NO: 37934 - DNA, 6182 bp, Cannabis sativa
ccccattgacattcctaaaattaagagtaatgaatatagtcaatacactgattaacattagccagacttctattgtgtaccttgtcatttcgagtccgccaaattatatcgacaacaatcgaaacacaaagaaacacttcatctgtattaaagccttgttttcctagtccctagataaatttgatccaattccacaaggcacaagtaaatgccagacccagaaataagaaatataccccacagggaagaacgccacaaatgaaaagtccaatcaaacgagaaataagtgctccaacgtttcctgaccacccccacacgacaaaaaactctgattttcattccagctagatacataatttgcatcttctaaacaccttgctatagatgcagaggcactttgtacatctgttgttttagtccgattatagcatatttcaattaatcttatataaatatcatatttgttaacatttcattgtaatcagctcaaatattcatagcaataattgatatttttacttctcaaaactttttacacgaataaattatattttatatggcttattaataatactctttgaaatataatttttttatgtaaagtattcttccatcatatatttatttaactttaagttaattaagacttttttcttgaacatttaagattgttaaatattcacactctttttatgttaataaatataaaataaaagactttttttaataataatttataatcttttagttttttaatctttaaagtaaaaaggtaaaaaaaaaaaaattaatttgcatctgtttatcaattaccatccaccacgttactcatttcatgataaaatgaaataaaatataatggaaggaacacatttttgtgaaaattatatttcgaaaaatattattaactagccgtatactataagggtacaaccagagacggagggagggatcttttggggtcatttgtctacctcaactttttacaaattaatttgtgtaatttttactattattattttagtgttaccctcataaattaataattttttatttgtacccctacatatttttattgtattcctataaaatttgtactttttatttttatcccatataattttatttcatctcacataattttatttctacccctactatgtataaagtttttatttttatacacgtatttttatttttatctctaaaaaattatacttttcattaatactcctataacaatttttttcaccaccactaataaatgggtacaacttgatagtgtaaaaagtttaagagacaaaaatattaattattctatttattatatgagtattgctattaggtattaatacgaaatgattccttgtgaatagttagcaattttgtaataattattaatttaaattccaatatttctttgatggtattgttgtttctaatattaaaatgcaacactaaggaaatttttgtagtaaactctcttaaaaggtcgttttagtagattttttatctgtttcattatctaaaaaaaattaagttaattcttttataatcgcatatattgtaaactattcaaaattttataaaaatttacagcaattttaaataactataacatataaaaaaattaaactaaaaaacttgtataccgaaatagacgaagaatctactaaaacacatttaagtaatgcattggagacttactcaaaactacttatataataaatacatgtaatttatacatattatgagaaaatttacctaataaatgataataaagttatggatggacaaatgaaaaaactcattttgactttcataaataaactagtgtagtgttgcaattccaattaatcacacaatcagagggtcaaatttagacctttgacatttccatttagaagcaaaattgaaatagtctctcattcatgttacaacctttgactcctttcaggggtaagaaacaagaccccttcctttctcttttttatatcttcatatataggcctataagttaaggagcaagggaaaagaagaacatggtgtgttttaagttataccccagggaattcacagttaggtagctcggaaatcaaggaagaggcgcagcttctgcggaagtagatcacggctgccaaatggaggcttgttggtaatgatccaatctttctctagaagacctgattttgcactagccaccatttcgtcgtggaaagctgacacaatgtggtagattgatgtcctcatagcgtcggcaatgacatatgcctttgaatgtggaaagccgcctctctttttacggttaccaatctctggtcttctcatgcttgatgttgcccactttataccagctggtcccatcaagttattaggggattgtacattgatgttcctccccatgaatgattcaatggcaagaagacaagagagcaaggtcgagaccacagctgcattactaccggagagctgagcaacgccatatctgtcctcttggtgagagcgtgcagttagcgatgcaaccattctggcacaccataaatatagctgtacataataagacattaaattagtcatgcacaataaattcattgatgtcggggggcattgggaactcatgtccacagcatagacattcataatcaagaaactcatctttccactccaaaaaagaatttcatttgtgcatcagtgcgagtaaatgacagagttttgactgtacctggaagttgttaagcaattcagagcaatttggatctggtcgagcatcatttggagacagtaattgattggatatttgggaattattttcaatactttccaaagcttcagacagtttagaggcaagctgttccagaggcctcaagcctacagctaccactcttttgtacgtttcaccactttcctcgaaaaaggcagcccgccgccatacatcaacattattctcacaaaccatgcagagatcaaggtatgcaagatactgaagaagagacctcgggctgctctcttctagtgctgcaaggagaggctcactcggatttgtttcggctgctgcagatccctttggtggtgcaaatacaaacctctttgtatgcaacacctaaaacaccaaacaatttatcttgagaaaaacttacttttttttaaagaaagaaaaacttacaatcaaagaaaatgagaatagcaaaactaaagtgcaagaagtaattcaatctagtgtttgcaatggcctaaagcacgtgtgtgtcagcagtatcaaaactacatgcatgttcatatcttagatgtatctaaagtctaaacacgcatcactacaaaatcattcaaacaagcaaaccttgatagttgttactgttaagtattaagaccgataaattaacactgtttaggattgagagaaaccaacaagggacaaaaaaactaggactacaggagtaataaaattttgaagaaaactactattgaggaatataaaaaactaggattaggttatacgagtgactgaattagaaagaaggaaaaactttgctcttgggttgttcaagcatatagcaagtaacgaaaaaattgtgaaattacagtttagtaatttaaaatattttacgccacgcataattttcccctcttctcttccagatactttttatcgacttttgttttttcttctatacaagacacattacaaggacttgaatctgcataactcgcaagcacacacactcacctacccaaccactttaactagctttttgtggcctcttccaccctctttttcttatcaaacaatatatttttcactttttccccatgccctttctcgcctctcagttttctcctctacctagcatagcctaatatctattatggtccataaataaatatcaaagcatataactcttattgacactttaaggacctcaaatctgattacgttatttgttgtatgtaacctgctgtaacattaagataaaacacttcagcagtatgtcatcgtttagtgaaaagactcatattgtaccagcattataaggtgtagatgagtgcaaaaacagatgagggaacacagttagcagaacaagctattaaatagagacataaattgggaaatccatgataatctacaactgtatttaagtttaagaaatatttatgagcacaataaagattcccacaacttcgttcaaatgataaatatgataatccacaactaaaaagccaagagcacatttataggaaaaaatattcctgtaatttccgtaccatgatacaatgtagatgcaacaacaaaccagttataatcacccttattggtaaaatgttttcttgcgaactcagttagattggaaaaagtgaagagaaaaatatcagccttttaattcaacaatgctttcatcccactcaaagaaacagataatcacatcaagcaaatagataaaaattggaacttaatgtatggtttaaggtaagaaaggtaagacagttaactagcaaactaacagatattctcacccatgaattgcaatcattgtatatgtgatttgatcaagaaaagaaagcaagaaataaatcatatttgcaactaagtatgatcaatgaaccaacccgatgtaagtgatgacttaattcccagctcagaaacactgcaaaacttcccaggaagaatatgatttgctcacaaatgaactttcccaccgtaacctggcctgttaattgatctggcagaaatgctaccacgcctgtcgagaataggtaagcaacacttgaaagcctcaaagctcgagtagtagccgaagggagccccatcttgaagctaaagataggtcggcgctgttgatacaaacaattaaatcatcagccacaaggctactgataacaaggaaaaggcaaaaacaatactaacaaaataatcaataacaacagtaagaattcacgttaaaacatgtacaaacaaacctttatcaagtaaaactgaaaacaatcactagatagagcttccaagttcttaaaacaaatgtgttcatgtttgtgatatgaagaaacacatacagctatcccaaacataccccatcagataatttgtaggaactggcaactgctgagtaagtagcatatgattttcatcaaacattagacaaatttcatttccattaaaggaaaaaccattggatacatttgaaacaccaaactagtgcaaaatcacatctttagtttaataacatgtaattgtttatctatatgataatccatcatgatcaagtgttctagttaaacaatactttttacaccaattgcatcatcattttcttcacagattttcctattaaacaactaaataaaagactaacctgaataatggggaactccaagacccaccgacgattataaacataatgcagtccatagagaaaacccatcacgaaacccctaagcccaactcttccaatcaacccaaccccatcatcaaacccagccaatgcgctcacccagcaaaccgacgcaacagacacgagcccggaaaccgccgccgccaaagaaaacaggacgaaaccgatcgaaacctttgcccggagccgaaagtcagaagtttgaggctcatcggagccgccgggaaccagaagaagccgaaaaaggccgagcacaagctgaataggataggctgggcggtgggattgtggagtggagaggagtgagagggaagtagagaaaagaaggtgggctagattgaaggtgaaaaatgaaagaatgggagtgaaaaagaaggaaaccctggtgggtttagaagtagcagcggaagaagagagttggtataggaagattgtgaagaagaaaaagattagagaagagggaatggattgccatattaggaaccctaaaaaacgagtcttgaccaccatggctggtggtggaggtgaagctgtagccatgggtgtgagagttgtgaagggttttgggggtttcactttcagagttcagacaagagttagagaaggagaaaagagtgttggatcagtcactattcaaaagtccctcttatgctactctctccctccctcctctctattatggaattctagtttgaaatttttaaaaagagatttttatggctaaactctcaaaaatattattcggtagctatttgagatatcctacaaaattttaagaaattcggaataatttacaat

SEQ ID NO: 37935 - DNA, 2575 bp, Cannabis sativa
aactttttcatatggttgaaaaatacaatcatatttttcacatggttgaaaaacaagcattacccatcatccataatatgagcaatggattgtctgcgatcaattgctcatggggtggctttatggttcaatgtcagaagccaaagccattgaagtaatgggatgtaccacagcaagagctttgtggtctgctctggaaaatttgtatgatgctcacacaagagcaaagatggatgatcttcgaaccatgcttcaaacaactcaaaacgggacaactcccatggaaaaatatctgagattaaaaagatcctggtctgatcaactcgcattagctggagatccgtatccagaacctcatctggtatcaaatgttttgagtggcttggatgttgaatacatcaccattgtttccctgattaaagcaatgaacaacctaactcatgttacatggcaagagttagaagaaacccttctcagttttgatgctaaacttgagaggtttagcaatctgcagccatgatcgaaggccctaaatcctcaaagttccacaccaccatctgcaaactttgctaacaagcagaatcctagcaacaataacaataacaatggaggcagaggctaccatcctaacaggtctaattactcctcaggccatggaagaaaaggctaccatccgaatagtcgtggaggaaacaacagccgtggtcgaggcaggggtggtggtaggaactcaagaccaacttgccaggtctgtgagaaatatggccattcacgtgcctattgctacaatagatatgatgaaagcttcatgggaagtccaccaaacaatggaagaggtcaagagaagaaatatcaacagcttatgtagctacactagaagttgtggatcatgaaggatgatatgcagatagtggatcaagtgcagatgctgacaacatggctcataaaaatagttatggaggtaatgaaaaactaattgttgataatggtaatcagttgataatttcaaatgttggaactgggaccttgaaatcttaaactgggaagtcattgatcttaaaagacttgctacatgttcctcaaatcactaagaatttaattagtgtatccaaattgacatcagagaataaattttttgtgtaattctatgctaatttttgttttgtgaaagacatggcaacaaagtaggtagtactgcaagggaagcttaaggatagcttgtaccaacttcaatgtccaactacaacttgcaacaagagtctcaaagtttcaagcaaaaatcttagtgtattttcaccttcatcaagtcactcacagtcaagtcatgagcccttttatttgtctagtttaccttttactattgtagtcgagtctagcacctcttaacctgttcaatcttgtaattccctaaaagatgtatggcataggaagcttggtcacccatcatctaaggttttaaatcaagtgttaaccactgctcatgtaatactttctatgaatgaacaacaacaattttgtgaagcttgtcaatatggaaaatctcactcattgccctttaaaatttctgacagcagagctaaagctcctcttgatttgatctacacagacatttgggatccttctcccgttatgtcaaatataaattttagatttgacattcatttcattgattccttgacctcttaacttaaagtaatactctttactactacaccaaacaatatttgtcatattttcttattatttaatattttatctatatactcataatttatttttcataatttcgggatcctgaacgttcggagactcgaaacgcacgcctaacttgcctacccttagaatcggccctgttcataagcccagaatataaatgaaaatttataataaaataaagtatgttataaaatctcacacctccctcttccatctcactcaccatgaactccacacaatcaaaccactctcattaatggacttgttctaataataatatatattcaaaattttggtcaacttgtacatgctattaataatatcaacaaaatatctatctattatccaccaccactcgtatgtattgtatatatccacaaaactatctttctactatctctctacgcggccaaatcaactcgttttatgaaaattgaatccagttagccaacaaaaaaaaaaaaaaacattgaattcctagctacacatataattactccacatgcattatgattttccaattaataaactatacatatacatataatatgtatataaatattatttaaaacaatatttaagtcatcttattatttcacattaaacattggacgatagcccaaccacttgtccatatgcatcatcatatattattatataaataatagagatatgatcacacaaatcataccacaccccaaaaatttgataacttagctctacaattccattctctctctctctctctctctctctctttctctctctcttactaattataagtatcaatattaatattaagaatgaaacgtatagtctatttttctatattagttgtcttagtactaatactactatc

SEQ ID NO: 37936 - DNA, 2384 bp, Cannabis sativa
gacggacaaacagagattctttaaaaaatcaattaactcattacctggaacattgctactacgaattggagactctcctgtcatccaaacagctctggtaagaggacaatctctaaacaagtgaatcacatattcccttgattgcaagcagaacgggcgatccccttcttgcacaaaaggaagtctgtcacgagtagggagagtattctgacttgctttccatagcatcatactaattctaggatgcaagaatggcttccaaatcaaattccagatatctcttgtactgtagaaacgccacctttgatcttccaaataggctgccttgaccgagtgcatcctcgagatgtcatttttccaagtaaccagatccttctcatcatgggaaaatctatctatttcaaggattttatttccaacatcctcactaaatagatccaaaaccatattctggttccaaccattcccacaagagatatcaaccaccgtttttagcctaggattcttggtacgacaaacttccattacatctcaaaattccataaaatttagccaaggaatccaaggttgcttccatagatcaatatccttgccactgctaattatcgaacaactgttttgctgaattattcttctcacttccaaaatgttcttccaaataaacgagttagtattttttggagccgctgaccaaaacttctctttcaagtaatacttagaggtaaagcctttaacccacggtttatcaatcttcattgccacgacccaagataatttagaaaggagggctctattcatatctttaaaccttctaaatcccaagcctccatacatatttggttggcaaatctgatcccaagacttcagagcaagaaatctgtctttttcaatacttccgcaccaccaatacttcctaaccagaccatataattctttgcaagtagacatgggtaattttttggtaaacatgttgtaaaacggcaaattttgagcaaccgaatagatcatcgtagttctgtctgcaaacgaaagaagctttattttccaaccttccatgcacttcttcattttttccttcaaggctaaataatcatccctttttcttctcttgaacacaaatgagttacccaaattattttccatactagtagtctgttgaaccttaagaatattcaggatacttgtttttctcagattgtccatatttcttgagaacaaaacactagtttttgccatgctacaaagttggcccaaccacttttcatactttctaatgcagttagatagcactttagcttccttctcattcgctcttgagaataaaatggtatcatctgcaaatatcatatgcgaaatagaaggagcattttgactgattttgataccatggatgtctcctttctcttcttccttgagtagtaattttgagaaaacatcctgacacaacaagaaaaggaatggagataggggatccccctgcatgcgagaatttttttttttgatagggctcccattaagcaagaccgagtaggaaactgtgctactacaattcattataattttgcaaacccactcattaaaaccatttaccaaaagcactctatgcagaaaattctatttgatcctgtcgtaggctttgtgcatatccaatttaatcgccatcaagcctccttttccatgctttctgtgaattatctgcataagctcttgcgttaggactgaagacaccacaatccatctccccgggatgaaggaagattgaaagggggaaatgagattctccattaagggccgctatcttatggcaataatttttgcaataattttttacatgaaattgcacaggctgatcggacgaaagttttccactttattcgtattttccaacttgggaatcaagcagatgaaagtgtgattaaagcttctgtccaaatctccaaagttgaaaaaatcttggaccatattggtaaccgacttcccaacaatattccaatagcaacgaaagaagtatccagacatcccatcgggtcctggagctttaagagggtgcatctaccatactacattctttatctccgtcatagttggaatttcacacatcattgtattatcctcctcacttactttgtactgaaataagttatccaattcatggtctagaactggtgattacgactcaaaatgatccatggaatattgattaaacaccatactcatagacttcctacctttgaccagtgtacatttagcattttgcatggtgttgtaccgagaagtgagagttttaatatttaaactcgcaagtgcacgaatcgtttcagaatatagtgttcatgtaagtgcaaggtcgaacccatgggagttgactaacatcaaaagaaact

SEQ ID NO: 37937 - DNA, 2716 bp, Cannabis sativa
  modified_base (26)..(31): a, c, t, g, unknown or other
  modified_base (57)..(64): a, c, t, g, unknown or other
tatatgtgtttaaattacattgtttnnnnnnttcatattaggatgttaaacaacatnnnnnnnngtaaatctagatcttggtaaaattattccaacagttctcgttgccattaggatgtggaagtgcgacttgatagccgtcagttgatcgtttcacgaccttctctaccaacatcaaccacagagaaaggatgtgcaggtgatcagatgcctcagagtggccaaggacccttagtaaaagaggaaaatgggcagcctgaggacaacccaataaacaacccactagatgaggcgactgcctccatcaccccagaggaagacaacagagtgcgaaggttgaaagctttttatcaccatcgacaagggaaggaaaatcgagcctacttagtgagctctagctcacgagcccgactacacaatgaggatatgaacgagcttaagataagtaacttgcggctagaagaaatggtcacaaacatgcaactggaattagaggagctcctgagaggccattctgaggcacccatgtcgggcgaagagggggtagaaacagggaaaggagagcgagtaggctggaggatgggggagtatcaaggtattcaacgaataacacccctgaatcctccccgcaaagagcttcaccagaaaaaaatccagaacccttataacgacctaaaaaggtcgagtccaaggtagtccaaggacacttgagagaaaagctccatcaaaagaccacgaccgagaagcacacactaatagtggactcactttgaaatgaaaagaaagcaaagactaccaccacggacctacgggagaagctaactacaaggagaaaagagttagataggagatggaagatcttcaacggaggatagctttggccgcgtccgagggaacacatcttcctaacaaattaacactgagttccattcaagaaactgcccccgatgaaaaatgataggtcagagagagaccccaataagtttttcgaattctacagagatattaggcacaccacagaagagagttctcacctcaaaatggaaattaaggatttaatacaaagggggggaccttgggggcaatcaaagggaaaagaggcgccccaaggagagaagcaaagaagatcaaaggagaggaacctcccgcgaggctctaaaggtattaagagacattataaccatctttgggggacaagggatagaaggagacacccacaaggggagggacagatatgctagggaagcaagacaaccacctatggtgatgagcctagaacaaaggctgctaaagaactccaaagaggacagttaccttattatgttcactgaggaagatgcacgagggatccattttcctcacaatgacccgcttgtattggcagtgcagttggcaaattccaaagtccacatagtgctcgcagatagcaggagttcatttgacattctctaccgaagtgccctagaataaatgggtttaagtatgaaggatatgaagccttgcatgacgcccatatgtggtttcacttggaatttagtccatcccctgggaatgattgagcttcccctcaccatgggagagcgacctcgacaagtgacggtgatgaccacattcattttagtggactgcccaacaactttcaatgcgctgcttgggacaccgttgctctaccgcttgaaggccgtcgtgtccacctaccacctagcctgaagttcccaactatgggaggagtttcaaccgtaaaaggagagcagaaggaggtgagggagtgttataacacatcctttaagatttccataaaaccccgtgagtctatggccattaccatatgcaacaaggaggcccaccagcaaagggtcgatgtagacttagacccaaaagtgaaggaggaggaggttcatgcagaactaaatgaaaaaaattaaagaagtagtgatatccgagcacccgctaaaagtgcttaaaatgggaaaaggactctacgaggccctcaaacatgagctgagataatacctcaaagggatggccgatgtcttcgcttggggacatgaagacatagtggagataggtcccacagttatgtcttaccatataaatgttgacccacatgcaaaacccgtaaggcaaaaaaaggcgagccctcaaatcagtgcgatacacggcgttaaaagaagaagtagacaaactcaatcagttttggttcatacgagaagccttttaccctgtctgggtgttgaactccatcttggtcccaaagctgaatgggaagtggagggtttgcgtagatttcaccaacttgaataaagtgtgcccaaaagacagcttcccgctccctcgcataaatcaaatggtgaatgccacaacagagaatgaggtactatgctttatggatgtgtacttgggatacaataaaatccctatgaacccagctgatgaggaacacacatccttcatcacagacagaaggctatactgctatcgggtcatgccgtttggactcaaaaaagtgagggccacatatcagagattcgtcaacaaaatatttgccaaccaaattgggtataatatggaagtgtatgttcatgacatgttggtaaagaccaagaaagatggagacttaatcaaagacatagatgaaacggtcactaccttgaggaagtatcatatgaagcttaaccccgttaaatgaatctttggggtgtcatcgggcaagttc

SEQ ID NO: 37938 - DNA, 1422 bp, Cannabis sativa
  modified_base (1362)..(1369): a, c, t, g, unknown or other
ttgatgtaagttgtaattttctttcttttttttattattgattgtagaaatatgttttatgtggatttgggatagttagttctttatgaaactgttgagttatgtttgagttttcctctgtattggagttggaaagtgtagtgtaaaggggggacttaatgttgtgtttgaattagtgagagtttgaagctttaagttcaaagcttcaactcactaatggtagattttgtttcattatgctattttgtgttgagcttaagtatatgtttagaatgtctatttttactatttgaaagagtaatttgaattgggaacaagttgggtaagttttgagtttgaaaaactcaaattttagatgtttggtgcaattcaggtgcctagatgagaaattcgggctattggtttttctggcagcacctaaaattttttaatcaatttagggttcgattggagtctttttccgataccttaattttcatgttatcttgatatttaggaaatttctaccttatttatcaatagaaaaacttcatattataattttaagtcttaaaaagtgttttgtttagatacttatcagtttactgctaatgtgacatagggctcgaaacgtcaagtagtttccactcaagttggattggagataagaacattatatttgtacctaaaagcatctctgtatggaatatggtaattatcgtaagtaaaaaagagttataactctatataaaacccactaaggggcttattacatagtaattgtctaattaggcaacgataactgaaatagttattttataaattcttattagctgataataatatctgtcttccattgtgtagtgtgaattctttcatatgaattgaaatatgtgctttaatgattctgcttgtacattgatatatgtgttttaagtcattacttttttgttgagtcattatgactcgcaagtgatttgtggtgtatgtaagagcaagaagaagatgaattaaccatgatttggagtcttctccaattaatatacatatcagtctatctggccagcgggactaagttgttaggacatatgttttatgtcacttcgagaattaaaatttatattttggatgtaatgcttggttggcaacttttgtaaaaaatttaaatggggatcctcaaagttaaaatttgtaatattacattttaatctttttatttgtttaattacgctttaattaaatcacaagtcttattaaatttttaggttgattttataaattaaaggctaaataggatttttactccctgaactttgacatgtatcaaatcatgccccctgaaattttacggtcgttgaaaagccccctgaactattgagattnnnnnnnntaaggacttttttccaattttagtaaaagagtctaacatggatgaaagtttag

SEQ ID NO: 37939 - DNA, 3728 bp, Cannabis sativa
tgtttgaggagccactaagatactgattttcaaactatgggcatcagtgaccaagtcaccaacattaagctcttccttgttgagcgtttagaaaatggcttcgtggtccttaaagagctgagttggagtcgtcctcaagaagggaactaaataggaaataattacaataggcttctcccagagactcatagagaaaaaagaaagaagatttgaaggaaggcaaaggttcacttaaaattcttggtccatttggtaaaaagttttgaatattcaaacgcctaaaagctggtggaaaagaagaaccacttcctacaatctttgacattttttggaagttaaagggaatcaggcctttattgttcagatgatcctagacaaagtaaaagccatcttggcttttatctcccttcttaggaagtgaaacaaagttcacaaaaaaaataaaataaataaataaataaaattttgcagggatgggaacattgcagaccctaagagaatagaaaataaaaaagtttgaccatcaaacaataggcctgaggaattaattgaaaaggggaaagccccacaaaactgaaaaactttgtaaagtaatcctggagaggaagagtggctctagacttcatgtgagtttggctccaggctccaaagtcattgtatttatggttaagagtctcgtattccctagctgggcagtggtaaaggccttcctcatgaaggataatcccactagtctccacgatcttggccaaatcatgcaagaattttagggtagaatgcagcccatctgcctcttatctgattgccttataaacatagtctccaggcctccgagaacgtcagtaaggggaacgagagggggctccgcaacctcctcaaatttctccgtggactttcttactgccaggacgacccatctcatgctaactcgtgatgaaaggaaatgatctttgagtcaaaggaataaaaaccctttgcatggagctcttaaagctcttcacgcatctgtgaaaaggaaaattccaagcagttcgtccccacaccaaggaatgaaagaaaaataataatgggggtgtcctaactgctggaggagaaggcccctctagacgctccaattgatggattctcgttactatggcatcgggtgctaatcatttcaataactatggaaggaatttgggaatatccaatatgtcagaatcacctatgactatggtgaaagaaagcataaaaaataaaggaggagattccatcaaaaaaatccaataactacaatatggcatcaccatcacaaaattagaaatatccaggagtcacaattgtcctatcgccgcctatatgctactacataccctaaaatatttgaaaatggtattattctactaattttctttaaatcaacaagcaatacaattctatgaaagtagagaaaacacttacatggtcataagggttgctattaaacgacagcaacacatatttttaataccaagctctaaaaagaaccctaattttgttggtaaattatggctcagtgaaggtagagaggcgactgagaatggtgaaggaagtgcagcaagtagtttggttcaccgagaaaaattctgagcataatgggctttgacgagttgagagtgaaaaggtatgaaggaaaataaccaagggatatatataagcccaaaggggtcaaaccgaccctttgatccaatggccccctttgtattccaagaagcacacctgatccgacggtcttaatgcctctagaagaaataatttatgaggagatgattggattactcgagtttcctctgtctgctctgcaataaatggtacatctcaggattatgagtcagaatgcaaatcatcctcatcttaaaacaaggtgaacatgcatgaatgaaagcacaattcagggatggacacatgttttgttgcaagagaagtcgtgtcttattaaatgcatcacaacggtacacttaccttttggatgggaactgaaaggacgcttttggcaattttcaacttctaagaatgcaagcagagatttgggggtaaatgttatcccaaaatttgaattaacacacgtggcaatcaaaaagctgagcaaatgccaaaagagcccccaaattattagacaatgataattagcctacaaagtaaaatggaagctagttctgggagcaaggtattgttccggaagcccatatcagtgccaaagacaaacttaaaagagacccctagaaaagaaggtttgagagggcctggcctatcaaatccattccatcacgcgtggtcccttgtagcgcataataagggaaagtattgtagcttgtccctttcataccgacgacaaaataagattcccataaagcaaataaacttgggatttcctccactaccttttctgacatgcacatacccatacaccctcaagtgagctcacgccttcagctgtcacaaccacaatggacatgtcttgtccacaagaatctactccctatcgtgggcctgagtcaccggcccatgaaaagaaagctcttatcaccgaaggaaatcatccctaaagatgcgacctttagggtaaattttagtagaagggcctttgtccccaaaaaacccatctttattgtcctatcaattggaagacatatctattataaaagggattggaattttgagttaagcaaaaattttgccaaattctctagaaacccaccattgttgtagcctttgacatcaatacaagtgacttgtggactaaggttcattaacacctaaaccgcaaaaaaaaaaaaaaaaaattgtctttctttaatactttcaactacgcttaatcaaataattaattagttgccgaaaatcttggtcaatagtaaccattctcccaaaatgtaagggagagattaatctaactctaatcctataaaaggtcatgatgtagacctagggaagggattcgtgaatttttgtgattcaattccgcttttttgatatctgccttcttaattcttaatctttcccttagtttcctaagaaaccctagctgtcactcacttagaacatattgaattctattgtcaactatctcttaaagaaaacacatccaaagagagaaatttaaagagatttttgtaaagagattttgccattgtaatctcaaaaatacatttttttgaaaacataatccgtgtttgagcattgatataataaagcaagtgagtgaagtactataaaactctacatatgacctttctatttcattaacacagtttgcaatacgacgaccaacatagtctgagtctagtctactcatttacgattttattatattagttgatgaaaaactgcatcagcaactttatcaacttaagagatcaattatcttaagacaaatgctctacgcaattctctttgcgtgtccttattttgaagaggttgcgtttgtcttgttggtatggtaagtaatacatgtttttcctgtccggtggaatcttttggttttgcattggatcaaggtcaggatgtagatggtagctcaagggcagccaaccatgagctaattcaacatgtgtatttaaattttatgttatgagtaattatatatgcccatatatactacacgaaattatattaaaaaaaactacacaattttgacaatacatttactaggggtgtacatcaaaccgctcaaaccgtccgcacctcaccgcaccgcaaaaaaaatgcag

SEQ ID NO: 37940 - DNA, 1434 bp, Cannabis sativa
aattcatccaaacctgacttagtttagtagtttaggattggataatgagttgttatactggtttgaaaagaagtgaaattcaatgtggttttagttttcaggatctggtagatgagcttgggatatatttcttgctatatgaccgagcagggtatggagaaagcgatccaaacccgaaacattctgtcaagagtgaagcactagacattcaagaactagctgatcagttacaaatagggtctaaattttatgtcattggagtgtcaatggggtcatatccaacttggagttgcctcaaatacatacccgaaaggcaaataaacaaaactctaatgctttatgctttttctcaattgattgtgttgtaactcagctttgattgcaggctatcaggtgttgcttttgttgtcccagtagtgaattataaatggccttcttttccccgaaagctaatcaaagatgattataggcgaaaacttgttcaatgtggagtttggatggctaactatgtccctggattgctatattggttggtaactcaaaaatggttaccaacaacttcttctgttatgaaccgaaaaccagtactgttcaacagcagagatatcgatgccctcaaaaaaaccaagggatttccaatgctcacaccggtaaccattgaaaacttatgtgtggaatgatcttttcttatgtttaaagtaacaaaaagcatgattggttctaggctaaggcagagtaggcctgtaacaaaagtttatgtttttctattgatttgtttgttttaaacaggagaagttacaacacaagggtgttttcgatactcttcgtggtgattttgttgttgcttatagcgaatggggtttcgatccaatggagctaaggaatccatttcctaatgagaatcgaagttgtgtacatatttggcaaggttatgaggataaagttgtgccatttgagctacaaagatatgtttcaagtaagttgccttggattaagtatcatgaggttgttgatggtggacatttgattgtgcattataatggtttgtgtgaagcaattttgagagcacttttgcttggtgaagagtctcttgagtatagacctaacataccaaaagaaattgtagtttaatcatagggaaaaaaattgtcaaaaaaagtactattgatttttattttttgttcttattaattctttgatttggaaaaaagaaaggtttgttggttatgaatattattattgatagatttgattgtaaaattgtatattaattgtgttaattgtttaacaatttagagaaagaaaatggtttcatgaatttactttaatttatttatttttgtggcttttttttggggaaatttaaaatgtactaacttttactatttttttacaaaaatactgtcagacggtatttttacttttttactgtgt

SEQ ID NO: 37941 - DNA, 1898 bp, Cannabis sativa
tgtaaccattgaaaccttttccatttatatatatatactcatctaaccgagataattttcaagaacccttttagtttttcttctttgctattatatgtgtttattcttatactaggtggatgttacgtgccgagccacgtattgttagttttatttaagattttagatattattttttaaaaattttcctatttatattgctttaagcaatatttcttatgcatctcaatctttgttaaactcaaacttaataaaaaagttttagaaagaaaagaaaaagttattaaaaaacacaagaaaaacttatattgtccaaataaaatttaacaatcttaaattaaaatccaaaaataagtttcataaatcaaaagaaaaatatatttttatttcccctcattgaaactcaaaacaataattttttaaaaactcctttgtcccaaacacttgcaatgatgtaaaagattttttattatttttaaaaggttgcttaaaaaatcagatatacacaattatacaaaattagggtatgagatcatacaaaattagagtgcgagatcatacaaaataatacacctatctaagttaatgttacgtatgtatacttaattttattttattttatttttaaaaaaaaaactatctatctaaagtgtagagataagaaaattaataaaggaaatcagtattatttattattaatggttgatacagattgtatttcactcttttaatgtgcatataaataacagtaatagaagataaatgtccaactatggtgaggaaaataaaaatgagtaatataaacaaaatccaaggcatgaaagacaaaaaaatattgtgtagatggcatggctaaaaaggactaatcaatgccaaatgcatactaagaatttcaaagccaatatttaaaagtaaagaaaaaaaaactggcagcacttttcacatctcaaaagtatattatatataaaagtattaaaaggttctcaagaatgttgtggggaaagatataaaaactaaatatcaacctgattaatcaagagataatattgtcaattaattgcgaaaaatattactgaaaatatttccttatgtatacaaaattcttgaagtagtattagaaaatagaaaagtcagcattatattttttttcctgcatccatatgttatccaaagcatcaatatttatctctaaacaatcaataaaactatgcataagagcataaaggtaaaggaaagacccttcaattgatctcctagataagaaagttgccttattataatttgcaatactcaaacttctttacaccatcataaccagataagaatctaataaaatacatcttagatgacatatatgctcatttttgttccttttataactaaatacatgaaatatatgtctaaacaccggaaatactacattaaaatcaaagtaaattaatagaataatatattgccaagcatactctaaaaagttgaaggaattcaaattgataattgatcctcaatatagacttcgagatttccattgagacaaaatcaaattgtcacaatatatcataaagagctctatgtttgacaacattgctttctaaaactttcccactccagcgcacaagatgccctgctaccaggtataatgctattaacaatatatacacatatatttaagtttaaacaaaatcaaaactgaagaggactaaactttttcaaagaatccgccagttgtaattgcgcacttctaaagaaaacgtgtgagcttttatttacctccaatgattcaaaaccagtaaaagaataaagagtcatgtgagagtaacacaaccctgatatagtacctagtcccactcgatataatgtaaacaacaagaaaaggaatgtcaaattaaagttgcaaa

SEQ ID NO: 37942 - DNA, 3022 bp, Cannabis sativa
caaaatggaagatcaatggctaaaaaatagcttgactgtgtatttagaaaaggatgtattcagtaatattaccaatgaatctatcattcatcgttttcaaaatatgaaaattcgtagaggataatgtatgagtttgatttattttgttaaatatttttaggatattgagtatattttattttttaaatatcgaattgaatgagttggtatttaatatttatatttttttcaatacacaatttttttttggcattatgatatttattattagaaagtttttttatgccccctacaatcaaagtctgggttcaccactgtatacacgtatgttacatatatattattttaatttatattattattaaaaaaagtatattatttttatagaagatatattttcgtaaataaaaaatttgaaacataaaaataaaaaataaaattgtattaacgtatttttgtaattttattttttaatcaatttgtaattttttttaagaaaatattacataccaatttaattcacctatatcaatcaacattcaacaacaacaataataaaaaacactccacaagttttcattacaaataaattcacatacatttcattaatacattaccataattatgcataataaaaaacaacaacaataaaactctctaaataattatgcagaattaagaaacaattattaccaattaatcaattaattaataaacaagataaacattgaactgaagcagagtctccattccatcagtgctatgctgatcaggagaagccggagaagtcttaacagtggcgaaacctttggcattcagatactttccggtgccacccatcacagccaaatgagactcagccgccgcagtcatatgaactccaaagaaagtcagagtatcactgtaaccaccactctgaaacatggcagtgaaagccattgtctgacttgttccgtccactgagctagccacgtaaaatccctgagcttttcccattagacccgacccgagttcgtgtccttcggttaattcatcatcaaacactgtcattgttccgaacatgagtttctgaagagttatgcccggtgggagtgatgctccgctcacgaaagggaaacccgagccccccgcgatgaaattgttgccgttggtgttttggttttgtagaaaattgcctgaatttccagccaagcctgtgaagaatggtacattgttgttacttactatgccgttgttgttactgttttgtggcactccattgttaaccggaaggtttgcgccgttgggcttcgcaaacgggacttgcccgctcatcgcagggttcgtgacgattccggtcatggcaatggccgacgggtttgtcccgccgacgatgtcgtgcatgaaaaacgagagtgtggcgtgcggatcggccatgccaactgctgcagcaccacctgttgcagcaggcccaacttggccttgggcctgacccgggcccgtttgtgttccaattgggcctactggggtagctactgggcccactggggttgctactggtaatggagatgggcctacttgtgtggcagtggggcccacttgattggtggggacaattgaggtttgaggttgatcaagtgcatcatcttgttcaaggattctattagagaaggttgatgagattgttgaaaataaaaagagagtgaaaattatggttgtgatgagagaattattgggagttgatttatgggttgccattgttttaggaagaataaaaaggttctttcttatgtaagagaattgatatttgtgatggtttgaaagttgaggtggtgtaattgagcttatatagtttttttgaataagtgtagagagtagtagtagtagtagtaggaagtaaaaagatggagttgatagtgtggattaggttgaaccattttattcattggtgcattagttagagcttgaaaaaaaaaaacagttaggcacattatctaaaaactgaagcatttgttcactttggtgcattggttagaggtctcagaatgctaaggcatttttcttttttaattggaagtaggtttataattattggcaatgaaagttgtactcactaaatgccaataggttaagacaaagtaatgtatctggttttgaaaatgttgaatgttaattagggcccatttggtacccaattcaatctccaaatccacttttgaaagcctataaagttttcaaaaagcccaaactctgaagttatgttgcggcttcatattgagatatttagaaatataacaaaaaaaaaaaaaaaaaaaatctaaaacattaggaaataattatctcacttttctaaaattccctgggtcagtccctgttaagtgacatatgtgaaagatgatatgtgtaaaagaagaaaatggaagaaagatgacttttcaaataaatagattaaactttgtatatcaaatccttatgcaaattatgaagaaaaatgttaaggaaaaaaaagagattttttttttaaaaaaaagggattatttcataaatatacaaatagagagattttttatttttttaaaaaaaggattatttcataaatatatcaaaatgacaaaaattatacatttttatggatttgcttttttttttctttttttttttttttacgaattcttttttatttacaaaaatagtgttgttattttgttggttttgaaaaaaatatattattttaatgcttttgctataggaaaacaacacgatttgtttttataactatatactgagtgttgtttttcattgtttcataataatattgttttgacattgttgttaggggtacgcaacttaacatcccgtccaatctaatctaattgaatcgaaccaattcaatttaatccaattataaaaaattaaatattcaattacaatcatggatgtcaaaagaaaatcgatctaatcaaattatatttatatatatatatattaaaaaattatataggattgttttgtatatttattttcgtgatgttttgttctattt

SEQ ID NO: 37943 - DNA, 3793 bp, Cannabis sativa
aacataaaacttgaaatgataactcatggctattggcttacaaataatttagggtaaccattccagttaagtctggaaaagagcctttcagattgttgaaagctaaatttctgtcacgaaacatacaagtacaaaataattaagcaccagtcattatttgtatcagtttctaaacaaaacttcatatacactatgatgattttgtagtactcacaattcattgatatttgtaaggttgttgagatttgatgggacttccccggatagttcatttctatcaagccggctgtagacaaattagaaaagacacttttagattcatcaactttgcagtgtcaacaagttacaaactagtaatattttgaaacataaatggagaagaaacatagataaagtcaagagggggttacttacagaacctcaagagtggtaacatgtcctattgttgatgggatagctccagtaaattggttcccatcaaacaatctgccaatgatcaagtaggggatgttagataagtaaaaacaaacatcaaataaagatgaccaagttatatatatatgttaatttacttacacgtgtatcagtaccatctcagagttaaaaagtctttctggaatgggaccggaaagcttgttcttgttgaaatggctggcatttagataaagtttaggcagtaagtcacacaataaaaatagaaatgtaaaagtatcatatctttgatgccttagatgcgataggggtctattttataactcacaagtgtttagccttaagaagttggtccaatcctggggtggtagaggttgaaacaggaagaggtccagttaactgattgtctgccaagtccagccaataaacatttgagagcttacccaaagaagcaggtatactaccagtgaagttatttgaattcagagctctgtcaagaacaaatttccaatgaaaaagtcaaggaatcaaaccaaaaacattaatgaataaattatttgaaaatattcatcatggtgtttcttacaagaaggatagctccttgaggttgcctatttcatctggaattttaccattgaacctgcagcctgctaggattctgatatattcaaacaaaacaaacccttaagaacaatgaataaatttcagttggtgggaacttgaatacatattgcttggtcaattgttcttacaaaatatttaagtttttcaagtcgcctaatcgaggagagaggggacctgtaagccctgggttaaacgacaagtccctgcaatgacaacaaaacctcaatgagcataactttcatagtgattaagattggtcaatagtaagagtgaacactaaaacatataataagaataaggatgaacttacaaggttcttaattcagtaaggcctccaatatcaccttcaagtctcccttttagtcccatggttgacaatcccctgcaaatatgagcagatcatagtaaagaagacatataatgaagttattgatcaatgttgtataaattttattctttgaaaaaaaaaagtgtggaaaataaattaaaaaaaataaaagaaatcaatttctaatattagtatggaatgaaaaattgtatgaaaagaataattgattcaacaaaattttcataccaaacaagaaaagttgattttttttttattattttcaacactttttttttgccaacattttctaaactttttcctttccccaccaaaattcataacctaagggaactagaaataacactcacaatgaagtcacccttgactctttacagctcactccttcccatggtactccacaaggatcttcagattctccccagcttggaggtaaatgttcccaagcttccttcaatgaatggagaactgcgactggaatggcacaatttgaattagcaaaaatgtctatctaaactgtctaacaaatgtctgtacaaaaggacccttattgattttgtcaaacgtatatacatattccacagaatgtatccactctcaaatttaacaaaaatagaacaacaacttcataacaccaaactattattaataacaaatagatggacttttttaaaagctaaaatggaaattaacattttttttcatatcaaagaacagagcttaagaaaacagaaatatatgcattgcttcatgtgcttatcactcttcttaatatttccatcatatattatttctttttcaaatattcaatcttacatgcaaccaaggaaattgaaacactttcttttaaaagatcaaaacaaaagttatgagtaaagaaattaagctaaaaactatgttccaactccaaatccaccaaaaacacataagatgcattccaacttacgttaacagatttttcacttaatccacacccaacattccatcaaaagacaagaaaaatcaactgcaaagattaattcttaagcccttaccatcgttgggatcagtaaacgaagaaatcaagtgaattagtacacaaaagaaagccaaaaagagatgcaacgagctagcccccatagctgcctgcagtccaagtcctcctcaactcaactctcaattatataaacaaacaattttaatatattcgtctacaaacgaaaaacgacaacaggaatctagcaagtttccaaacgaaagacaagatcacacaaaagcttcaacattttcccattatgccaaagtaaactcagtattgtttggataattaagaaaagaaaaaaatatccatgtagcaaggtagctagagggagagacaggtagatagagagagggggtcctggccaggtcctttttgggtttccttttaaatgattttaccttgtctttgaagtcaattaatctgttttctttctttctttcttttttcatttctctcccaccaccaccattgttttgccactataccaaccgaagtcattattgtctttttgttaatttctttattttaatatttattattttgttatgattctttagttctttcaattacaaaagctaataacataaaaaaatataatataaaagttcacgtctcagtcatcatctcaaatgtcaatgaatgtttttatagaccactgtgttgactaatgacccacacctcccaacttgccttctaattttaatggcaattcaagtcacaatactagcacgaattatttggggtcgaacccaatagaataattatttgggttgggttatgtgataaaatttaagacatttcagattcattaaatttatttattcatgattaaattattatttattttcataaaaaagttaaaaataaaaaaataaaaaattacttacaaaatatattataaaataatgtttgtttacacttaatgtcgggtatgcggggttggaagtttaattaggggacaataaatttttttctttggtatatttaagacaaagtgaaataaaaagaataactaataaaaagagatgttttagccggccaaaatgcaaaggctttttaggaaagaaaaaaaaatgagaaggctaaggctagacgatgatttggtgttttgtggtattttgatctgagaaaggtctttttattattctgtaataatgaaatggtctattataataatgtggctttatatggagagggatacccaatcttagaatacacaccaaattaaattaagaataactctatctctatactcaaacatgaaaattaatcatttaatacatgctccctcaagatgaagtgtacaaatttgtggcatttatcttggcaaataaacccttaaaatgtgatggaaaaagaggcttggtaag

SEQ ID NO: 37944 - DNA, 2533 bp, Cannabis sativa
attaatgaagacttgctcaaaactctattttagagtcatcttggcctaattttcaagtaggagatgaagctgagcattagagttcaccataatttggaagtattattatcaatatcaatgtcgctctgcttgataatgataggagttatggtttttgtatggtatagctcatgatgatcaaggcttgctcattgaaggaagcaccagattttaccaaggttcagtctctcatgaacttctaaaggaatgagatttcgtgaggttcttagttggatgaaagatcataaatggcatcatgtggttcttgcaacaaattgtttgaccgtggtacaagttttacggagttctagtaggatgatctttacttttggtcaggtaattaatgattgtaagcaattcctttgtgatttgagaaatattgatattttctttgttaaatgatcaactaacatgttaattcataactttgttagagcttttgtattatatttgattgttgcataaatttggaggataatctagctgacttgcttctttgtttggtagcgaaatttgatgttgaataaaatatacaatttctattaaaaaaaaactctattcttttattgctacataatttttcagtttgattctatgtatgtatttacttatgagaaaaaaaaaaaaaaagacatgtatagccaatattctttgttcataatttttggttgacatatgacatttttcgtctcggcttaattaaggggtgggcgattagggctaccgcacaaaaccctcctagctaagaaagttttgttggtacaatacaacatgttttatatttatttatagcttgtttggtaggtcgaataagagtcgtattatataaaatatcaaagaacactataattggataaaattttatatcgcataattattacgattacatattttaagacaatgtaaattatattatttaatacataacaaatgatcttgtattagtttgtcttatattatttataaagagtccaggattggggactcggatttcggcctcagacctagacttgagacttaaactcagacccggacccagtccatacttggaccctgaacctggtccaaacttggaccccgacccctagaattggaccttggatctagacctaaccccagactctggaccttggactcggaccagttgccttggatttggacccaaactcggaacccgccccgtaccgtacccaaaattcaacttaggaccttgacccgtactggacctaagacccggactcgaaacctaaaccccgacaccagacctgaacccgtacccagaatccaacctcgtaccccataccaagactcagacagtggacccaatccttgacctgaggtcccaggtccagggctaaggtcggagttggggttagggttaaggttgagtttatagtaaatatagtataattttacgcaacctattaatacaagttaggggtgcacactaggtggatttttcgagtttttggaatcttgggaccgaacccgcccgtatggagattaggtttttcgggtttaaggttcgggtgggtcgagttcaggttgggataggttcaggtgggttgggtcgggtttcgagttgggctaggctttttttaatatcacttttttaacaaaataatacaattatacaatatattattatcatatacatacacaatacacaataatacaatatattattatcaatttctttatattttatacaaatacattaattacacacaatctattttttttttacaatttccaaaaaagaatacttatatatatataattatatatacatattacataaactaacacattaacaatttaacacactcacaaaatcacaattaaaaaagaaatatatatatatataattattatattatataatatatatgcataaaaaataaattaaaaaagtactaaagtttcgggttttaggttttcaaaaatattaaactcgaattcgacccggtacaaaatcgggttacaaccgaactcggtctactaaaattgaaacctgatttttttttagggcttttaggtttcaggtcgggtgggtgggttttcaagtataaatgtgtacccgtattacaagtcaataccaaatataatattatattaaataatatcaatataatatttacatataatatttaccactcatccaatataataatgctcttattaaaattgtataatataaaattatgagagagaagcactaaagtataaacgaaattaatgtatagaaaaataattgatacaatgaatttgtattatgaataataagtaaaactgtatagatagttaataataccaaaatgaaaatatgagaagaaaatgtttagaatagaaagtgtgattatggttagaggtttgttcttaaatgaattattggttatggttcgaggtcccatattagcaaactctgttccactgctactgtttgctgaaacatttactgtcattgaacctaattaacacaaaaattaaactt

SEQ ID NO: 37945 - DNA, 3767 bp, Cannabis sativa
gaatatatcttgaaaatgaaaaatctggctgaatccctctctgaagctagatatcgtctcttagatcaagaattagccatgtatattcttagtggtgttgggccagaatatgaaatagttatgattctttttaactgctcgtgttgatcctctgatcctaggtgaagttcagtatatgttacagaatcaagaaatgtgaattgaacaaaatcatttgtcctctcttgatcttccacaagccaatcttactcaagttcaaaacaggggatcatccaatggcagggggttagtcttcctcacgaggaaactatcatggtcatggtcaaccttcaaatcgaggcaatacaactggtccctctcgtggtgcttcagatggacgtggtcgaggaaatcgtcctgtgtgtcaaatctgtggcaagattgggcatcttgcttacaaatgttatcacaaatatgacactgaacctgcaaatctaactaacccagtttctaacaataataatccccaaattttgctgtctcattccactccctcaactgatgataatgggtggtatgttgatagtggagccacacatcatatgatttcgaacacgcaatagctttcaacaactaaagattacaaagacaaagccaaaatcacagttggtaatggatccattatccctatccctaaaattttttccacttcaattccaacaaatgtttttaatatagtcttaaaagacattctttatgcctctacaattacaaaaaatttgttaagcatttcaaaaatcacaacacataataacataacctttctttttaattttgattcatgttttatcaaggacaagactacgggccaagtacttctttggggtactcttaaaggagggatgtataacagggatctctctaaagtcttgctttactacttctgcaaattctcaatttcttggcacaccaagagctttcaattgcaccaagaacatacacactgctaccaataactctcgactttggcattggagacttgttcaccccttatctagagtccgaaaaactgttgtaaataggcttagtcctcaaataaaatgttctgacatttctttttgtgaagcttgtcaaattggcaaacttcataatatgtcttttccaagaactgtaccaaagataaattctatttttcagcctattcatttagatgtatggggtcctttattctacaattcaatggaaggtttcaactattatgttagtttcattgatgattactctaaatatacttggatttttcctatgacaacaaaaaatcaagtcactactattttcagataatttaatgcctatgttgagagatgttttctaacaaaatatagacccttaaaaccattaaaaaaggatcatggaattgagttcaggcacccttatccacacacacaccaataatagggtcgtgtagaaaggaaacacagacatgttgtcgatgttggccttaccttacttgctcaagctgaaatgcctttgagtttttggtgggaggcctttgtctcggccacctatgtcatcaacaggctaccaacacccatcttacaacataacacaccttgtgaggtacttttcaatcaaaaaccagattattcttttttaaaagtgtttggttgtgcttgctatccccttctaagaccatatcaaagtcacaaactttgttttagaacagcatagtgcctctttttagggtatagcacaacacacaaaggctacatgtgtatgcatccttgtagtcgtgtgtatatagctagaacaatcgagtttgatgaacaaaagttcccctacaactctctctttcaaccgccaaccaccagttacaattctaacccaaacacacaacctatatacataatacctagtccagtcactcaaccagaacctattgccacaacgactgctccttttactcaaatagttccctcatccattcccctatccccattaccgacacataagcctgttctcaatcccactgaaccctccataagtcaaccagcaccagcacctgcagccaatattagcacccaagctactcacacaaaaattgatcatgaaccaccacccctcatcacccatattccagtttctggtttgcaaattcaccctcctacaattgcctccaataacacacatcccatgacaacaagatcaaaaaaatggcataatcaaaccaaacgcccttactgccatctctaaggtttctcttgaacctacatccctcaaggctgcactacaagaccctctgtggtttcctgcaatgcaaactgaaatttatgctcttgttaacaacaatccttggattctagtaccttattccccataaatgaatgtggtaacaaagaaatgggtgcatcgcatctaatataactctgatggtttagttgatagatacaaatctcagcttattgcaagaggctttcaacaaacacctggcttagaatatttgaaatttacagtcttgtggtaaagctatcaacaattcgagtcattttcgctcttgctaccagtaacagttggccaatacaacaaattaatataaacaatgcattcttgaatgggaagcttcaagaatgtgtctatatgacttaaccttcagggttcaaaaacactaaatttctaaaccatgtttgcaagcttaataaagcaatctatggccttaaacaggcccctcgggtatggttcaacaagctaaaagcatatattgttcgatggggatttcacaactaaaaagttgatacatctctctttttcaccaagaaaaacaacaagctattacttctcctagtttatgtcgatgatattctaataatagtagaagatattgcccaaattcacaaacttattactaatcaaacagtttgccttgaagaatttaggcactgtcaactacttcttaggcttcgaagttacaagaaatgccaatagaatttatcttactcattccaagtatataagggatctgctcagttctaccaatatgatagaagctactcctactcccactcccatgattcatggatataagctctctttatcaaatgggacacctctatctgaccctactttcgtataggagtgtgattggtgtattacaatgtctcactatgtttaggcctgacatttcttttactgttaaccagctctctcagctcctaaaagctccaacttctgaacattggttagcctgcaaaaaaatactaagatatttggcagtacttgtgacctcagtcttcacttccagccttcacaaagctttcaattagttgcctactctgatgcagattgggcaagttctgtttatgataggaagtacacttctggctattgtgtcttccttggtaacaatctcattaattggtgttcacacaaacagacagtagtagctcactcaagcacagagtctgaataccgtgccattgccttagctacagcagagttgatctggttacaatccttgttcacagaattaggtttacctactcctcttcttcaattctttggtgtgacaatctcagagccacatgtcttgcatccaatccagtcttccacgccaggaccaagcatattgaagtcgatctttatttcattagagatcgttattgcagatcaactaaatgttaggcatgtctcaacatagatgttctaagaaacctcttcccatagcacagtttgagcattttcgatccaagttaacactgacaagccccagtataacttgaggggggtgttag

SEQ ID NO: 37946 - DNA, 2895 bp, Cannabis sativa
aaaaattactaattaacctaatatataattatataaactaaaaatatatgtatctatgagtaaaatgtacataattgtccttgaattcatcacacccttgtttactccgtacattcacattgtaataattcgttgcaatgaaaaggaatttatttatattaaatgcgtccattcgtcgttatatcgatctctgtttaaattgctgtcccattgtgtctactataaatttaaaataacatcaacaaccattttcgaaatttatactctctctaacttaattaattctaaatttctctaattaccctcgaattaaattgatggaacaatcaaagacagtagtgaaaatagttcaagatgcaaagtggctccttcacctaccgctactattactactacacactcaccaaacattcttccacttacattctttgacataccatggctaagatttccacctgttcaacgcctttttttctacgagttcccaaatcaaaacacaaataatacgacgtcgtttttccactcagacattcttccaaggctcaaacactccttatctctcactctcaaacacttccttccccttattggaaacctcacttggccccaaacctcatacaaacccatctttgtctacgacgaaagaagcgacgccgtttcgcttactgtggccgaaaccgacgtcgatttctaccgtctctcgggtacaaatgaatttttagaagccactgaataccatcctcttataccaaacttggatgtttctcacgaacgagctgcggctctggctttgcaaatcactctgtttcgaaactgtggattttcaattggaatgtccatgcaccatgctgccctcgatggaaaatctgttcagttgtttgtgaaaacatgggctgacatgtgccgatcacgtgattgtgatgatgatgatcgatcaaaaccattgtatgacagaactgttattaaggatccaatggggctcgattcaatctttgctaaacagcttcgagatttagacaatggacctgacaatagaagcttaatgccttggagttttaaacaagttccctctggttcagttcggggcaccttccaattgacacgtgtgaatatcgaaaaactgaagcaaaatctgatgacaaataatattgaacaattacatttgtctacgttttctgttacgtgcgcttatatttgggtttgtttaaataaagcagaagaaatataccttagcagccaaataagtgctcttgggttcactgtggattctaggtctcacttagtggatcctgtgcccgaaacttactttggaaactgttatgtgggcaaggtagtttttgcagatgcaaaacggttggtggggaaagagggcttagctgtggctgtgaaagtcattggtgaatctataagtaattttgagagtattaaagggtcagttttgaatggggctgaaaatttggtttcgagctttattgagtctttttcacgaagcgaatattctgaaggtatagctacaactcctagtagaccgatagtatactacattgctggttcgcctgggtttgaggtttatagtagtgattttgggtgggggaggccgagaaagacagatgtggtttccattgatagagcaagagcagtgagtctttcggagactagagaaggagatggagttgaagttgagttggttttgaaaacacagcaaatggaagcttttgcttccttctttgctcaaggtctagaatagattccatcgatttcttctaaatcatcatgatgacaaaaccaattacaactacttttgagcaagaagcatgtcattttttttttaaataaaattatctcatacagattatataataacaacatgtaattcatttttaatagtgtatatttagttatatgtatacccattcgatcccttacgcccatttatttgagttattaatcaaacccttgtctaatatcttaacctgtatgatttgtctagagcatataaatggcaccaaatcatcaaattgtttgtcggtaaccgtatataagaggcttcttttctaaataattacttttaatttttggtggcagataatttgaattttaagggtaataataaaaaaaattatatttttagaatttcttaggtatttagttgttaaatataagttattatccacgtgttatttttctaatagtatatttaaattaatttttagataaaaaataaaaatttcatgacatgggctaatcagagtctgccacgtggctattgacttagaaatttaactgacaagtacttttggaagtttcgaaaatataacttaagtattattaccgtcaaaaattatacttaaagatttatctgcaatcgaacatataattaatcttttcacctttcatccctaccaaagaacctttcgtgatcctcaaacttccgtgcatggacttgtatctgtatccttcgtcctcgagtgcatccaaggatatgaggtttcgtctaaggtccgagatgtgtcttacgtttgtcagcaccttgattctgccattatactgtttgatggccacattttcagttccaatgaccctgcacgaatgatcattacacattaaaactttacctccataaattgatttgtaataaaaaaaaaatgactctcgatttgaacacatgtgataagtgcatccagaatcgagaatccactccctgttcattgacgactctgagatagagaacggctctccgtccgtggaacaatcgtcaccatcttcaatgattgcagcagagtctttctcatgatgatggtgcctgaagttcttcctatctccattatgagatttgttgaagctttgttgctccttgtacttctgcttgtaaaatcttttcaagtgtcaagactt

SEQ ID NO: 37947 - DNA, 2310 bp, Cannabis sativa
ggctcagttggtgatgcttctctttggattaggcatggaggccagtgctttgggggacctgcttgccccttgcctacaactagaggttagggcaaggcggttgttgaggagtctgacgattcctcttctaaggatgatggtatttgatagttgatagcaccatcttttacattcttgtcctgtatattaatgacttgctttctgacttcgctactttctttttacagatatgtcttccaggttgagaggtctcgttgggagaccttttgatgagccttcaggtcgattaagggacaaggtggccgggatcacacatggtggagatgatgctggatcatatttgcctctttctccactagcaactgtactagctgggcagcctatgattaatgatctttcagctaagagggaacgaccttcgagtcggggtgctccgaagcctggtcaaggagtaggatcagtcgtgggaaagaaagccatggaggcggctcgcaaatacctagagagagcccttccatctatggatgaggagcttcaagagcttggtgatggtgagccaaacaggctctactccactagccttcaagatctatctatggtaagttgtacattaaacttcgttcatttttatggctcttttgtaagtttgttggccagggaatttgttgcatggggctggccagctaatgttgtgtctttgaggggttggctggccattgtaacctcaaggaggggctgactggccagtattgtgcttcgatactgattttgtcttgtttcgcttttaggcctttatgaagctgagctcttcacgtgacagctcttgggggtcctcgaatgctcttcaagagagatgaagaccatagaggcttccctcttggcgaaggaccagaccatgtcagatatggaggttctcattgtgcagaaccagaacatgatctctggcttagagaccatgcttggtactaggaagaaagagaacaccatgcaagctgccactatctttatgctgaaggctgaagtcatagggcatgaggagaaattgagagcagctcttgatggccagcgggccataaaggatgagtacgttggcttgtcttcagaaatcatctatgagttcaagctacgtaactccaatgctgatctgtcatacgtgggcagtgaggctttcctgaagagcatgttggccagcttgtcgatgttatggtcggcatagactctagcgatctagatcttacagcttccaattcagctccacttgcccctgtatacatgtaaatgcaatttattagtattcaacattatggttgtataatataaacaatattttcatgtactgtatggcatgtggccttttactttttaaacattacatattttcagccctagggccttcatgcttgtatctttggtctatacgccctcaatttttgaacactactattttttggccctattgctttttgtcatggattgtgtgaccgactagtcggtctttaatcttagctatcttcttatggccttgacatgtaagtatcaaaatttatttttatatatgttaagccaaagtatgcttgcacttgacttagaggtaggtttagtagcttattcttagcgttaaactttttctaaataatttctctatcctagttcgatgcattgtacggtgtgggtgcccccaagtgaacacgtagacttacagtctcttggtcatttgcaattcaccaagtttcataaaccttgcctgggacttttcttggggtgcttcctattgtatgcatgtggaaatgaaaaaagattaactttggaaagttaatcttgttagcaagtcgtttagacataataaattgaacataaacattgtattttattcattaattggtctttgttgctatgtaatttacataaattgtatctacaagcttatataacataattttacttctagatatcaagtggctacccctgcttgacttacatagtagaagtcatagttgaagaacggtgtgagaccacaccaaaaaggccatgggttctgtaagttggttactagtagtatttgcaagggttctctccattctagtatcttggtaggagtacgagctccaagttcttgttgtgccttcctagcttgtaggctcccttactagttatttctataacttgataggggccttcccagttaggtctaaacactcctactgctggatctttagtgctcaggaacactcttcagagcaccaggtctcctatgaagaatttcatgtccttgacttacttgttgaagtgccttgctaccttttgctggta

SEQ ID NO: 37948 - DNA, 1894 bp, Cannabis sativa
aaaatgtaaccatgatggttataataaaaatgtaaccattgaaacctcttccatatatatttatgtaaatatagagatataataggcacggggctccatacatctttttctatttcctatacaaatattaattacttttattaatatttaatgtttatttttgtaaggattaatttttaaataaattaataagagataaatatatcacacaaaatgttttagacaaaccctagccgcccaataatctttttttgctgctttctctttctctcacctccttctgtatggtaggtgatgcggcggcgagtaaaactcttggaggtgttagttctcggcaagcaacaaggcaacacaatggtcggccagcggtgctcctttccaacgaggcaacgtcgttcgactgagtttcaaagaggtcactccatttgctctctttggttcttcaaagggttttcttatttgttcacagagctactgagattttttttacaaatctattatttgctgttttgattcttgttataagtttagagtttcatatggatttttctgctatttcattttaggctaagaaaaataagattgtgaattaaatatattgctcatcaataacttttgaaattgctttattttctttggcagatgggagcttccccaatatgaaaatttttcaaagggctaatgcaaagatggaactactgcaaagatgcaatatagtttttttttttttctttgatttgaatgtatatgaagatgtgatgatgattttaagtttgagaagtaattgtcttagaatagttaatatgtaatgtataattgtttttaatgaaatttgttagaataaatttattataagtttgtatattacattttttagaatagtaaatttagatatattattaaattacattgttatacaaaatatcatgcttacaattaactaggaaacaaaccgctcttcgcgtgcggctgtaataatcaagtcataaaactatatcaaattttaatattttttatttatgttttttttaataataaaagtaattattctaataaactttaatttaattttttctcataaaataaattaatattgtgaaaaaaaaatcatcatataccctcaatcgtgaaaaagatattataaattgaaaaaatatctcacataaaatatttaaaaaaagataattgataaatttatagaaaattatttattatttggtattgactattattatttgatttatttaatattataaagtttaaagttatactatttatatatatatatatattatatagaattttgaattattttgttaaaaaaaattattattataaaaataaataaataaaaagagtggtttaggaaaaaaaaattagtgtttttttcttataaatataatggattatttttatatccgatcattcaacatcgtatctcacctgttgtctcttatcgtatctcacctatcactgtatctttaccgtatctcgctcattgtcatcactgtatcattaaaatatcgtatctcactcattgtcatcaccgtattagtccaatcagtctctaataatttttgaatagtcatcttctttaaaagttatcttcttaacattataacttccaccctcttggagttggtggaaagtttttagattaatgagcattttgatccctttaatttattgtcaattatttagttaaatttttatttttaaaatttataaatttaataatcataaattatattaaaaagtagaataaaaaataataaattaatatctaaatttgaatttaaatattaattcaaatattacataatttacatataattattataatagatactaatgaaaaatatcaatataataataacgaaaaaataattgtttt

SEQ ID NO: 37949 - DNA, 1302 bp, Cannabis sativa
ataaacaactcaaaaattctcattcactttctctttctctcttcttctttttctcatctattttatattattttatattatttcataacagaaataaaaatgttattttaatttattcctcatgtctctcagttgcagccctaaatctttactttcgctcttaaactttaaacaagaacaaatctaaagagatttagggttgacgcttttaatatactgattctatctggggcagcttcaggttcctctgtcgggctcgcaattcagtcccagttcaccactcactcaaccgccacgatactcgcccccacccacagagagacttcaccatgcctactgtcagcgtaggaagggatcgtctatttgcagccctagggaggacttacagtgagtttgctactcccatgctctcattgttttatctttaaagaaaggaaaatgaaaaatgaaaaatgaaaaaaaattaaaattatacttgtttgtgacttaattgtgcagctcaggaagagttcgaagatttatgcttcaatttcgggatcgagcttgacgacgttgtaagcatttcaatttcattaactgttttttttttccgataatttttacggtaatggtggattgatgcttctatgcttgatggtgtaatggtaatatgtgtatcagacaactgagaaagcaattattcgaaaggaaaaacatttggacgatgaagaaggcgatgatgaagaagaaatcatatacaaaattgaagttcctgcaaataggtgacccttcctttggaacttgaattcgtgtgtacttttaattatgtgatttgagagttacattaggggtgcattttgaaagccatggtgtaattgaatttgtgtgtaataggaagtaattatacactttgacatgtttgtctgatcatatggagttccattttacactgtgtaattactaaaaacttttcattttaaatattaactactaaaaaatattattttttccttgtaattactaactattttgccaaataagatattaggaatttataggtaattactacttcatatttaaatacactttgtattttaaaatatagtgtaattactacactgtgtaattatcactctagtgattacactacctagtaattgcacagttactaccaaacacaccctagttgatgctgttatcgaataatttaggtaacttttgagttttgatttcacttactttttaagtttagatgtatgactttggtgaattagtgatattatctcgtttttcttgtacttcacttcagtcaactgttaagtt

SEQ ID NO: 37950 - DNA, 2504 bp, Cannabis sativa
aagaatagtttctcatttcaaatctagacagtaaatataaataataacatagacagacaatcataaaaattgccaaaggactcttgacaggtgacactacttttttaactgttagtaagtaatgatttttcctaacaaaatttcaggttgttctttgagaaatgcggatttggagatgacatgttgggctcaaccacaatgatgtatacaaggacagtttcagctagttctgaaggcaacaatatgaccaaacgttttggtcgaaagctattgttagtgccaccactgaaaagtagtctgcgttttccaaaccagtgaacctgaatgaaatgaactttactgtttatccttggatactgaagagatgcagtaaaagggaatttcacccagctcacaatggaattcatagggtttaatattcatgtccttttttctttatccgggtattaacaaaatagatactttacagtcttacagatatggttataatgtaaatatggcataaagaaagttgctaactgttaacatgtttggccttctccatgtgttgtatcaaaaattcccccatagtatgaagaggaatttgaagaaacagagagaaatgacaattctatattcattcattctattttagaaaatggtttacacattttatactatcttgcaacacaaaatagcaatattctaaacaatcacaacactaatatagtaataatatatactgaataataaatgcactcatattccaaacaggcctaattaaagagtgtatcagaaagtcaatatcatgttcacatttacaattgacattttttttccttattttactatttcaatccgaatgtctatttaataatgctgcggtttactgtacgctatcctttcagaaatcgattcttgcccacctgtgatgcactttttgcaagaaagagattaccccataatgatgctttggtatataaattatgccactaaaagtaaagtagccttcttgattatacagaacagacttcctttctttttacccacatttcaactttatccaaagaaccaccctatacaagaaagtttgggggttatattattctctcctttttttcttctcattttgcttgtcatgggaaaactctgggtcgaagtatgcctcatttctgctcgtgggcttaggcgttcttcctccctatggaagctccaatggtttgcagttggctggattgatccaaataacaagtactgctccaagatcgatgcctcagggaatgctaatccagtttggagaacaaagtttgctgtttgcatagatgtttcagaatccaacttcaatgatctggctctacatgttgaagtttacagtagggagccaattttcctgagagaaagacttcaagggacagcaactatacttttgaaagagttcctagctaagcatgatgacaagaattctgaggtttcaaggcctggaactgatgaagttggtagttatcagttgcgcaaaagaaactccaacaaacctcaaggatttgttgatgtttctatacgtatttctgaagacagagaagagccatattcatatattggtatgttaaatccttcaaaacttttttctttcatcgtttgtttgtttctgttcatatgcaagctttaatctttcttatccctatttatggcaacatggtcctttactaggagaaactatagaacattattaacgtcaaagtttgtgtgtaggaggaaaggaaggacatataaaggacggtaattctatcaccttggctattggagatggttctgcacaagcttttccaacagaaattcccttagcttcattccccaggccagagaatcaagcaagaactaactccccttatacacacccaatggcattgcctacaaactactcctactcatctgcagtcagaccgagttaccctccagcagctggaccaagttatccaccagcagctggaccaagttatccaccaacagctggaccaagctaccagcccccaagaactccgccacctcctccaccgccttcaaatgccggttacatacctacttttcttccaagaccagatcgtatgcaacagacttatgttaacatgccttcgtcatcatctggggcacccccaggccgtggtggagggcctggttttgcaatgggaatgggtgctggagctctggcagctggtgctgtgatctttggagatgatttcatgtctggatttgatgttccttcaggtttacaggatccttctattgttgtatcaactgatcctcttttctaaccaagtttgtaaaagagcttcattgtaaccttgtttaatagaaccaggaaaatgcatcaaacttgaacaatatcatgttagtttttatcatctgtctgtatttaattaatgtgataaaatttacacgagttttccttcatgactctgcaaatcaggatgcttaaaatggaacgttaatggatgctgattatcatcttgtatctaattttgcaaact

SEQ ID NO: 37951 - DNA, 3088 bp, Cannabis sativa
caatattaggcttaaaattgttgctaaatatcaatattcaataaaaaaattatattaaagtatatatcaagaattaggcggtttggtttggtttgaactaccggtgagaattttaaaatcgtgaccaaaccaaagaattataaatggtccgaattaacaccatattcatttggtccggtcttaaataatttggttcgaattggttagattttggaactacgaattacgaattatataagcatacctaataaattttaaagaaattttcaaataaaaagagaagtttaaaatatttgctatagcaaatttttagtacggattaaaattcactattaaaaattagcgttacataatatattaaattaatctaattctaatacattaattaatttaagtattttaactaaaaaaatgctgtatagatgattaattgagttttaaaaaaaaattaataatataaatttaattagttgaattgtcatacttaaatttggtattggtctaatagaataccaccaatttttttagaaatgatcttaattccagtctcttaaatagtgataatagttatgctaaaatttctaatttttttttttttttttctctaatctataattccatttaaaaaacaattttttaataactaaaaattgttattttattcatattattttcccgaaaccatgtcttaaatttgagtgaatttttcgttattcttttgttgggcttttgggcctagaaaagcttatccattttagtagcaagagaaagaagaacagctgagcattcgtctatgctgagagatgagcagagcaatggcagccagcatagtacctctgtctttctccttcattaacaccaaagccgcagcactacttccggcaaaacgagtcgtttcttggttatcccctccgttatttcgaccatgccagcttcctcatccaaaaatgcccattttcgctgttgcagatggagaagcagtggcggtagaggtaccggtggaggaggaaggtttagatgacaacagtgacgaagaccacaaccaaaacgacggcgtttcgactcgacaatggaataatcgattggtaccgtgcaagttatatgtgtgtaatattcctaggagctacgatattccagacctcatgaatttgtttaagccttttggaaccattttttctattgaggtagtcttcttccccaaccccaacgctgaaacttaatatcaaggcaaaagctttgataatctgcagttattttcttaatttttatttttcttattgtgaaatgtgaaatggggtttttctagatttgtaggaatcttgaaacggggttaagtaagggatctgggtatgtctcaattgaatccattgaagctgcaaaagctgccattgctgctctggatggcactgtgagtttcaaacctcaattactctcttttggtttgctttgattgaagtttttttctttctttgttgaatgaagaactaataaaaacttgttcttcacattttgttttctcaaggatgttgggggaagagagatgcgagtaaaattttcgactcacatgaatccaaagaggaggaatccagagccactggactctgttccactagagaataaaatatacgaaagcccttataaggtctatgttggaaaccttgcatggtctgttcgacctgagtatttgagagaccactttagccaattagggactgtaaaaagtgctcgagtgttacgtgatcgtaaaggaggcaagaacagagtttatgggtttctctctttctcttcagctgaagaaagggacgctgcactatcattaaatggagaggtatgaatgaaatcccatacaaaccatattcttgccttctcttcatcttcatcttgttgtgtttcttattcagttttgtttcattttcttgcaggagtttcatggtcggaaaataattgtaagacaagagttacagaaaaagattggcccttcaatttaggtaccaaaagaaacatagtagtgaagaagaaatagaatgcaaggctagcttaacgtagttgtttacacgtccgtccattcccaacccaaccacagttttgtataacctattctatattgatgagttgagtagttgttgttgtagcctcttgtaaattaacgttttttaaccaatattattattatgttaagctgagacagaaagtgaagaagatggtttcttactgttgacgtctcttaaacagtttaactcattagacacatcattaatgaatctagaaaagactgtgcaatacttctgtgaggataatcaagttgcaacttcgtgcgtggcctaacttaaggctcccaaagcaaagaaaagggtgtttggaaaacgaagctagcccaaaaattatacatcaaacaagtttaatgaagttattatgatctgtaatgcttgcaggcaataatcctacaatgaaagtcttacaataaccatacagcattatatacatataaatacccctttatcttcatctcacacaaaagcttaaatggccctcttagctgctgcttcttcctaaaactgttcaataacttggtataggccgagatgactagtcacaatattattactgaaaattaaaccaaaaaattccctttttctcatcagactgttttgtggccaattaattaaacaaaacgctgagaaagattgaataaaaaaaataaacaatgtagacaaattttataggtgttgtcgtgatttttcctttttagtgtgaaaatggttttagttgtttttcttggttttaattaggtggtatgtattattgacgcaggtgcttgtttgtgttagacatgggttcatttcattaggataggtacactctgtagcgtgtaattgtttggagactgggaagtcggaaatggtgttatggcttgaacaaaatattggatgtggatgcatatcatgcattggaagggtagtgatattcttgcttgcttgtcaatcagttaatgtcttttatgttgatgatcttaatattgtttgttttgttggtgatatttagtattttctgtgtatttctaatgttggctcttccttctttgttcttt

SEQ ID NO: 37952 - DNA, 2276 bp, Cannabis sativa
aattacgtatgtgagcgtaattttttcataaataaatataccttaagattatgatcatatcaatgtagcaagtaatggccctccttttgcacatgcacaccgttaaggagaatgtttttggcatgagaaattttgggccactcattctcatccctcactcgacaatgcttctcaagttttgttgcattgcttatgtgtataaacttcaaagacttcacattacaaagaaagccaggcaatactccaaggcttgagcaagaccaaaagtatagtgattccaaaaccggcatgatcttgatcataagcggttctgttttccactcgcaccaattttccgcgcttgtgaatttcagcactttaagtttcgggtaaagaactcgcacttcatcatcatcagtatcaccaagtactaaacccaaaagctcaggcccaataaacttggcgcgcaagccccaaaattcgagtgcctctagagatggtagtttggctacagctgatggtaatgtgattaaacaagaacaaccacagaatacaagcttacgcaaagacaataaggacttaatccattttggagaaaaggtttggattctaccaaattgtcctactcttaaaactttcaactttggatgaggttggatactattaaactgatccaataggccaattactaattcctcttctctgcttattgggtatatttctagttcataaatgtttcctaaagttgttagatctatgaaagtcttgttgtgactttccaaatgaagagtcaaatgataaattttaagattgttgcaattcatcattgtagtagtcaactctctaatactcaagtacttgttgttgtcttgggtattatgtggaaaccaatctagaattcttaatgaatgtaaggtcgtaataccttttggcaatccctcaaacctagaattttcacccctaatatacaaagacctcaaattcactaactttccaatcccttctggtaattctataggcactagaaaatgagactccattcttaaagtttgcaagttgcataagttacaaaatgagtttggtaatttctctaaagggttgtctccaacttcaagatatctcaaatgtattaagtcccctatattctctggcaatttcatgagcccacaacttgacaaattcaaactcctaagatgttttaaacataacaacatggagatatcaaaaggagcattattgatattgatatcaccttgccttaaaataataaaggtgtgcaagaactttttgttgtcattactcaattccaatttaggaaactcagcttcagattccattgttatggtcaaatgtctaatcctctgccttaactttctcttactcctcttctgatcagcaaccaaatcaacaatattaaaagcttctatgatctcacattctctttttgtcaaatactgaatgaaatcatgtaaaatgtcatgcatcttacaaacaacattatcatcatcatcatcatcatcatattcagcatcatttggctgttgaaaatcttgaaagaaagatcgagttgttaaattccgaaaaatacttgccccttcctcttctgagtttagataaccttctgacatccacatttcaattagttttctcttctcaatcaaatgatcttttggataaatggcacaatgcaacaaacaacgttttcctaaagatgataaatcaaggtaacttagtaacaatggaccaaagagatattgttcaacttcacaaacatttaactcccacaaatgactacacaaaacatcttcccattcttttctacttctcttgaaactcataagaccacccaaagtctttgctgctagaggtaaacctttacacttgctcacaattttgatacctatgtctctcaattctatgatttcttcttcattatttctacccttaaatgcatgcctttcaaatattaattgacactcattttggctcaactcttttaacttaatcatattgaaagtactacctcccatcacacttgctacactctcttttctaatttcttcaaacatatctctaatggttcccacttactataatcttcattccaaacatcatctagcacaagtagaaatctagatccgcctagacaactcaagatccaattaaaggctgcttctaaggtttggaatttgggtggcacagctagagatgaatgattcatgatgatgatgatgatctttaagaaggctctcagtaattgctgatgcaatattgagtaaatcaaaagggtcagaaac

SEQ ID NO: 37953 - DNA, 3854 bp, Cannabis sativa
aaacttcaaaaactattttttattctcatttctaaaaataattttttaaaacaaaaaacagaaaacaataccaaacatgctcatatcatttttaccaattcattaaagcctctttcctcatctaacacatctcatcccaaaaatcactatccttttctaatttctacaaaatcaaagacctcaataattcaacatgctaaaagtattcactaataaaagacacaaaacaaagaagtttaccaaattggcataccatcctgtgtgagaagcgggtaatccatcgcagttaaagtaataaaccaattccaaccactatcaagcctcaacaatatagccgctgcgcgcaaagtggtggcgatattcgtagaccccatgtaagtaagccgatcaggtttccccaatacatccacatttccaaaggcccgaattgacgccaccgacttaaccagcccagacagcctccgtctctcttcctccgacacctccaccgtcagatgcaaaaggtaccgattacgcgggtgataaactgcaagtaatagcctgaagatccggtcacagtcgcctcgtccaccccatatatagtaagcaaatgctggcgggtagtgagacccgacttgaacaatcgatggaaagggtttcgagaagctaaaggccgaaattgaagagaacaacaatataatgagtgaaagaaatgcagcagagaaaagggtcaaaagccattttctctcagctcccataattggtgagctattaaattgagtccaaatatagattcctggaaatgaagaaaaaaaggcttagtcagttgacaagagcatgtaataaagaaaaccatggaaaccaagaggacactattaaatgaaataaaattcatttttatcactttttaaaattaaaatattaccttttagtggggtgttggtccctcaatttaattatcattaaaacttcaaaataacaacattagaattgcaagttcaattattatatcataattttaaaaataatagaggcacttcccacaaaataataataataattgtagagttggaggctttaaacctcatttgtaattcatttgagacttgtaatttaagccttggacctccaaattttaatttaattttattacgttttatcagttactttaaaatgtaaattaactcaaaaaagaatagtataaactctttcggtaggaagtgaaaattccatttatgtttcaccttgtagtattttgataattggataaataaatgctaatttggtgtgattaaatctatcaaaaaaaaaaaaaaacttgtgtgtttgttccacattgctcatgtgtgagtgatttatggaatttttacacctagtagctaccaagtcttcaccggatgataggattttggtaattggataaatgttacatttatcaaaaaaaaaaaaaggaaaaatataacactcttaagtgataagaccttaataaaaaaatacaaaattataaaagctttacaaatcaaatattaaaaatataaaatacttctgaatctgttttgacttcggtacaagaagaaaaatgaaactattacataaaatgtgtctcataaatttagagaacagattcagacatgaaattcagatgcatacatccaaaaaaaaaaaaaccatacactaagaacaacaaagaaacagatccctaatatcaacataacaatacaaactcagattcagacatagttcatgaaagaacaaaagcccacagatcaaagtagcagtaaaccacagaattaagaacacaactttctacgacaaagataacaacaaagagcgaaacttatacttttccattaattctcaacaatcaaataaataatccaaccaacaaaaaaatattgttctttgaatttgaagaatagtagcatacgactcaatcagtagataatttcaagatgtcacaattatcagtttttggttgtcaatttttgttaatgttagcaaataagaaatcaaaaatccaacaaaaaagaaacagataaaaaaatggaaccagatccagatgcaaaatatatatatataattaggaaaaatcaatttagcatgactaacctcaatcaccacatagaagctgagagagtttgacaaagggagggtagagatcgtagtctacggtgtgtgggtatgaccgtgagtggttgtttgttcgtgcctgtgagttagacttggaggccgagagaacagggatggggtaagggaactgtgggattcgtacggccgggggaattaaaggaggcggtcggagccgggggcggagggcctgaggaagacagtcggaatcggagcttgagcgagtgatcggatcgggggaacgagagagagataataggaggatcgcggctgtgagtaaaatgggaaagggaaatgagttttagggttgctaaaattaaaattgaatactgtatggaatggaggaaaaaaaattataagaaagcaaaataaataaatgaagaaaaactatcttggttagtctagtgaaaaataaaaattattggtaaacattggaaactaggactaggagggtgttcggcaatgtttttttcactttagtttttagaattatgttttcaggagtaagaattaaaaaaaaaaaaaaaaaaacagtttttttgtcattttaaaatttaatgttgtttgcttcaaatttttaatcaatattctacatgtttatttaaaaaattggcttaataacttggacactatttttgacatgtggcacgaatgaaacaacactagaggtctgcatctcaggataggatagttttaccagcacactaagagctcccaagtaagcaccaagatccaccaaagtcgtttcttagtactatcatttaacaaacaggttgccatgaccctaaatcgatgaatcatgaagttgaggatgtcatgtggacatcccattgcttaatctgggaccagcatcagtgctagacgcttaggttgacatcatgcgcgccatctcgcaccaattttggttctcaaaaacttcttatgggcaatctgcttagcaattatactaagatacatgaaagaaattctccagccaagtttcaaactttgaagataagtctacaagaaatggcactcgggcaccaagaagccctattggcgcccaggttgacatctagttgatctaggtgcatcatggctagggtttaggtttctagggacatccttgaaccccaaatcctcaaatccatcaaggaacaatgctaggacatgatatttcatcaactccaaagtgttctatcatcttattctatataaaatgatcctactgccttagttgtcttgacacaaccgatgaggataataccactaatattcctagacagaaagtcacggtaccttgtcgtagtgggagcattttaaggaactcatcttgttataacttggaagacacttgtgataaaaatccattattagtataaacaagtaattgatagtcagaataaggaactaagaagtaaagccaacagaattattgttgtgtaccaaaagtagtacgatttatatttatcaactcacaagcgcgcgaatctttattgtagtgtggagattatgaagaatgaggtcgaacccatgtgaattgcgtgagatcgaagaaaatacttatttaatctaagttatcacaactctaacttaggtccgaaaattgtgaggtttttggtaataaaataaagtaattttaaacggtaaaaatgacagttacagatatttttgtgtgatatttggggatattattaagggttcaaaatccacttaagtgtatataaaaatatttatgtttatattgattctcataatttaatcagtaa

SEQ ID NO: 37954 - DNA, 4660 bp, Cannabis sativa
ctaatgaacatgataatctgaattctcatgttcctaaccttactgtccagactccaattgtgaaaccaccaactatttgttttcagccatcccttttaaatacttctaccataccttgtcccacttcctctgcaagcattgacaccagatccattgtatctcacggcccccccctccaacttcacagatctatcatccatttatatgccttttactaccattcctccaacctgcaatgcctttgccacatacccccctacatgccaatctactaattttcccaacaagcaaataatggtcacttctgcactcacaccactattgtctacttccattacacatcctgccactacagtcattaatttttctgggaaggaaaactcttgtccgaatgttcaaactaaacatcagaatgacagcctttctctccgacaaacactcaaaagatgcagagggaatattgttaatgatcttgaatcaaccttgtcagttgatgagaatgagcaccttcaagtttccactgatttcatggattcggttggtgatgaagacttttcagcggtgactgttatgcagtcccgcaggcagccacgaaaatcgttagttggaatgctcgtggtttggggaaccagaaagctattcgtaagcttcgtttgcttgttaaagagcaaacccccactgtactttttattatggaaactaaattagcttgtaactctattgctcgtcttcgtagtcttttaaattttaataatggtttagaagtccctagagttggtcttagtggtggtttgatgttattatggaaagatgatgttgatgtatccttaaacaatttcaatgttaatgtttttgattgttacatggctttccacaatggtccttgctggcactttacagccttttatggtgcccctacccttactaaccgaagacacacttggactcttcttaaaagattgaaagacattgctcctttacttcctgggatggtcataggggattttaacaaaatcctttatagtcataacaagcaaggggggaatttaagaagtgctaatcaaatggatgaattcagatcggttttggactcatgtcaattgaatgagcaacaatttaatggggatcctttcacttggattaagggaagacataatgtggatactattaaggagcgcttagattggtgttttaccaataattcatggacttctcattttcaacctatagttacttctcatttggactactattcctcggatcacagagccatagctgttaatgtcattgttattggttcaaaccagaccactcctcaaaggaaaacacggttcagattcgaaaaaatgtggctgaaagatgaggaagctgccaccattatttagcataactggtctgctgattttgcaggaagtatttctggttttatgcaaaatttatctacttgtactgaagctttacagcagtggcactatcagaaatttggacaaatgaagagagatatctctcacatgcagaagtctgttgctgcactaaataatgcagcagtaagatcgcaatctcatgtctctcagcttaaaaattctgaggcaattcttgatgagttgcttgcaaatgaagaggaatattggcatcaaaggtctagagtggattggttacaatgtggtgatcaaaataccaaattttttcatgctcatgcttcatcaaggagggcaaaaaattctatcaaaacattaaccaatgatcatggaatctcagtcagtggcaaatctgatctaaccagagttatatgtaattattatgactctttatttgcttcggagggagtcaatccagatgcactcctcactgtgcttgatgctattcctgccaccatcactccagcaatgaaccaatctctcacccgacccttcaccagtgatgagatagttgcagctttacaatccatgagcccagataagagcccgggaagtgatggaatgtcggcgatgttctatcaaaattattggaacattgttggtgattctgtcactgaaattgttcttggagttttgaatgaaggtactgacatgtctcaacttaataagtcaataatcactttaattcctaaagtccctaatcctactggtatgagtgattatagacctataagtttgtgtaatgtcatttacaagctcatatcaaagacaattgttctccgatttcaaaaagtattaccgtttgttatatcagagacgcaatcagcttttttatcaaacagacttataactgataatattctggtcgcttttgagcttgttcatcatcttcggcataaaactcaaggaaaggttggttatgctgctctcaaattagacatgagcaaagctttcgatagagtggaatggaagtacctggaagctgtaatgttgcaaatgggatttgcctctcaatgggttactcttatcatgaattgcatcactacaagttcattttcattctcactcaatggagaagttgtaggacatgttcaacctcatcgtggtttgcgacaaggcgatcccctctcaccatatttgttccttatatgctctgaaggactctcaaggctgctacactatgaagagactattgggaatttggatggattacgcttaacaaggaactcccctgctgtgtcacatctcctctttgctgatgatagtttgttgttttgtcgagctaatgaccaatcggctgttgctattcaaagaacgcttgacatttatcatagggcctcgggccaggttctaaataacaacaaatcaacaatgtcattctctcccaacactccaatggctgcccaacatttttttgctcaaacacttaatatgcccatcacagaatgtcatgaacgatacttgggactcccttcttactctggaagagataaacaagagctttttagtaatattaaggaaaaagtttggaagcttctttatgcttggaatgagcaaattttctcagctgggggaaaagaggtcttgcttaaagcggtggtacaatccattccgacctatgctatgagttgttttaaactcacaaagaaattttgcaatcaattggagagcatgatggctaacttttggtggggtactaatcaaaatggcactaaaatccattggaaaaggtggaattctctatgcaaatcaaagcatgaagggggcatgggatttaaatcttttgttcatttcaaccaagcactcttggccaaacaagcttggtgaatttttaacatgccggattctttactcagccgtttgttaaagcatagatatttttcaaccacttcctttctggatgctaatattgggcactctccatcgtatacttggcaaagcatttgttggggaagagaactcttggtgaagggtatgagattcaaggttggtaatggtcatcacatatcctgcggtacggatccttggattccaagccatacgaatttcaagccgattagctataacggtccacccaacatgtcggtctcaagccttattactgaacagagagtttggaaccttgagatgttaaatagcttctttcaaccgatcgatgtggagaagattttaaccattcctttgagtttctttgcctccaatgatcgactcatctggcatcattctacctcaggttcgtataatgttaaatctgggttccatttagcctcatccttagaggaacaagatgcatgttctgcctctgatttgaatcttgcttggtggaagttcttctggagcttgaacttacccccaaaaataagaatttttgcatggaaagttcatcataatatactacctactgctgctgcacttcacaagaggaaaattattgattcagcagcttgttccctatgcacttctagttgggaatcagttgggcatgcactttttgattgtaagcatgctagaaaaatttggcaggattcaaagtttctcactgatttcaatatggccaaaacaatgcagaatggtgattatctccagcttttatcttcagtttatactaaggaagatttcgaactgctggtttgtattatgtggggtatttggacagatcgaaacaaaatcttccatggtggtcaggcacggcccagttcctcaattgttgcttatgcaactagtttccaccaggactattgcagagcaaaatcgcactctggccgcactgctacctcaccttctaccgatcctttgccgattaacaatcaccaaaagaagcaagttccctggtctgcgcctacattaaatggctataagttaaatgttgatgcagccacgaacacagaacagaaacttcttggcataggggccattcttagggaccacaatggcatggttattgcagcactttcaaaaacagtgcaaggaactttccgctcggatgaaatggaagcgaaagccctttttcatgctctcaattgggcgtcacaacagcaactcgctataacacatattgaaactgatgcattgagagtttccacttcaattaattcatctcttgctgatttatcatgtttttcggatattatttttgatgttcagtgtcttttgtcctttttccctgatgttttcaagcagctcatgggttagctaaatttgctttagggttggataacgacatgtgttggataggagagatt

SEQ ID NO: 37955 - DNA, 2190 bp, Cannabis sativa
agattatgagaaggcaatctaactggtgttataaacagaaaagggcaatgaactaagtctaagttgataaacgggatgtgcctaagtagttggcaaacaaaggaaaaatcttttttagcttacggttttcattgagatcaaccggaagacatgttatcttagattgattgtccattgtgctacacaatgcttgggggaacccaggctgtgttggggagcttgtgctactgcggcttgaattaccatttgacatgtgtgtcttcacttggtggtttaagtagacttccaagctagaagaattacttgcagtatttctcttgctcttcaacctaccccttgtaggatagagaaaataaaaacaaagagtgacatcaaatgagaaataacatacgtaagttattaggaaaaatgaaaggttttgtcacttgggatacctgtcctttcgcttttcacggtatctctgcaaagacacttgtctgcttgcctgaccatctgcatctgaagaaacacgaccaaacattttaaacttctcataatttgtcaagggaaaaagcttactcacttggctaagcctcaaatgtgtctcatcattcattagtatcacacgaaatgaacataagtattttcaaatgtgatgcatgctacattacagacacaagtgaacaactcaaatttcactgaactaggagaggagataaagtaggtgttaacagagtcaaggaatttgtgatttcaagagatgaggaaagatggtggtgggaatacagctagcaagtggtagtttcataactttcaatgtgaagctagcaaagctgaaagagaagcaaggatacagagcaactagagcaactccaatggtggcactcttcagaaaatctccacattatccaaaaatataatatctttttatctctcttctacattattttgacaaccttacttctaaaatactccaacagtatgcattctgtaaggttgccatcatgatcccacacactaataatgtttgatataaattttattaaaaaacgaaaaaaaggaggatggcaaggttgcctaaaataagcaccagtcttgacaactaaacttctccaatggttagctctctccaagcattctgccacaccagtaagcactcttccaagaaacccttgttggagatactcttagtagtcagaaagtttgcaatcacggtatgtggtatttaattaagagtaatggtatgtgagtccatcaaatgccaaaggtctgtgctatgtgcatttcagaagtggtgatgtatagagaagagtgaaaaccttatgcttctccctatttatacatacatgctactccctaagtcctacttaaaaatatttcatatggcaaacacagtaaagaacatgaaaattataaagtaagggcctaaagtaaacccttgatctcacaaataaagataaaaagcagatatttctgtaaattatattccttgatggaatcactatgcaaattctgttaggcttcaagcatagtagagttcttaatgtaggattttaagtacccttttctttctcaatgttaactatgctccgctatcttatctgcaaaatgttagtgaaactatttgttgccctaatctgggaactcacgacactaaaccaacgcagtgtcaagtaagacctgtccgtccggtcatgacttcaaccctttagccaaggcaaagatctcgcactctggtcaggataaacaaattgtgtccagttgtgtcttctatcactgattaatatgctccagagacagctcttgtatgaagggtttaggggaccaattgtgactgttctgacaaccaaggcggctactcaaagtgtcttgtcgagttgcacattcaatacagatttcccacgaaaaagggaattattctttgagatgcgcttcgctaacattccatgcagcctcatgacggttactaacatcagccttacattgttcatacgcctaatagatgagcatgggaaattattattcggctttttactctactgtaacagacctcataggcccaatctatgtattgtgtgacacatcatgtgataaaataatctaaggaacagtccaccaggggtttagcctagaagcccctttgccactataactagggctagggcaccagatgtaaaagggtcaactttttagtattaagagggaatttca

SEQ ID NO: 37956 - DNA, 3434 bp, Cannabis sativa
tatatatatatatatacttaattgattaattaagaaaagtagccaaacgcttaatcaaggccttggcattttcagaattgggattcagaatatggaagacatggtcctcttcaagtgtctccataatttctatggtccctccccaacccaaactactactcattttagctactttttcgtagtaaagccaaccgcgatctctcaatatgtccttccctgctacaacaaccagtatcttaggacaagtttctaacccttctaagctcggagctccctctgcaaaagggtttatgagagggtcatcatttcccttgtctgaagggcaaaccacactccaccaccggtccaccatactcttccgaactaagtcatgcacctccgacccaatcgcttcttttccccaaaagtacggctgaattgaagcaaccccacatatcttgatcagtcttcgactcgggttctgctccgatattcggcagattaggtggtgggcaatgttggctccggcgctatctccagcgaggaaaatccggttgaaatcaacgtggtttttcagccacggttcctccgtagccggtgactgaacaccaccgccgctgctggaatgtgaagcgacccaactgagcgcctcccaacagtcatcataagccgccggaagagggttctccggcgcaagcctgtaattgacggaaacaattatgactttggcctctgcggccagctgattgaggctgttgtgataaagtgggtcggcggttgatgatatgaagaaacctcctccatgaaagtaaaccacgagtggaaggagcttaatatgcaattggggtcggtacagtcgagctgagacgcctgtttgaggagcaatgattacatctttagagacaaccccagtttgaggatcgagaccagtgggtgctatttgggtcccggcgagtctctcgatggttccatctttgtagactcgaaggtaagggaaggcttcgatggagacttgttgtggtatagttgttgagtcaagattgtgtgaacccataatttatatttatttatctacacagattttgagtgaaaggaggttttgctactcttaaatagagatcaagaagacaaggatggataatattcaaagtcaaagatggatttcgtaatggtgcttaatataagtatcatattgtttcttttatatataatatctattcaccaaccaacaacaacctaccaagtaattaattatagagcattaatcatcaaaaaggaattaattatagagttgtttaaccaaagagaaaggctaaaagcgctaatactcccaataccactatgacttatcatgcatatcattatgggttacatattttaaattgaataatttttataaaatattattatggattattttacaaatacataaaaattacaaaaagaggattaaataagcacatacgaagttacactacacattgcaaacaaacattaaaaataaatattttcaataagtcaaatgctcactgctacttaataaagtaactatttcaatactgtaatctaataagacaaccatttcaatactgatgtctaataagacaactatttttattatcagtgtttaataagatgatcatttcaataatgatgtctaataacacaatcatttcaagaaaatttacatttgagaacattagttgtaatttaattacaaaaatctcgagggttaattcttataccaaaattgttttgcatgttgttgacgtcacttatcacaaccatcacgtccacaatcacatctccacacctgcaaaattatgcactcacaattttttaacttatttttaaattttagtcggttagcttttataagaaattagaaaacgcgtttcgcattcagtgtattatgtttagtaataattaaaacataaaattatatcaaattttaaatttgatatttttaatataatttttttaataatatgagtaactattttaataaactttttatttttttacataaaaaaggatgacagaataaaaaaaaaaatcaatggaataaaaaaattgttacgaaaatactaaataaaatgtattttcttttctgagatactaaataaaaggtaaaataatttaaaaataacttaatttttttaaaagattttaaaagtaatatattaatttataaggtttatgtaatttatgctatttactatttgagaagtattttcaaaagttataaagaataaaaatattaaaaaaattataaatctttaaaactcaaaagaaattttaaaaagataaataatagtaatcatcttacaattaaaagaaaaagtaaataaagagacatttttaaatattatagtgaaaagaaaaaaaattaaaaatcgaacaattctcttataaattgaaaaccttaaaaaaaagactttgatataaatttatagaaaattcatcatatgattctaaaatattgtcatcagtatctcacttgtagttatcattattcattatccatcttaataggtttgctctctacataaaataaataaaaatttgagttaactattcactttaaatttatatttattataaattttaatcgttttcttataagtgctaatgataagttcgattatttatttttaagaaattaatacatctttaaatttttctttacacctaagtatataaatatttttgttttattaacttttgaaaaaataaatttagaatggagagttcgttcatgattatatttacccattattatatatttatataattaaatattaaatattaaataattatttatattatataatgagaactaattaagtaggaattgataagaatagggcctataggtttttttgagatgatacgtaaatataggtatatatattttttaagagagagttacttgaattttgtttcaaaagaaaaaagaaagaagaaagatacatggattttatataagtatatgtataattattaataataaattttttataaaaagataataaacttgatagaccgaggatagttacggttagttaactaattattatttatattagtttattaattattatataaaactaatcttaatatagaaaaattagaaaaatgttttgtgggattagtagttttatgttttgtgttgttatagatatttatattaatatggatttttttttttttataaattaatttaaaaatctgattttaaaaattaattaaaaaggtgaagaaaaatatatgaatgtccttaattttgataactctcgaaaaaatgttagttgtagatcttttttgttttaataattaattaattaaagaggctgattaagaaaaagaaaaaaatagaaaggattaattgaaaagttattaattcttccatgagatggtaatggttatttaatctgcatacaaatttttttaaa

SEQ ID NO: 37957 - DNA, 2475 bp, Cannabis sativa
tcaagttactacaaattcttagtactaagttactagtaaccaaatcatatttgtatagatgatgacacaccaagagttcatgactcttccgagaagtgcaagtaccagtaatgccagaggttcgagaaaaatcattccggcaacggcgacccacttccgttcatcatccacgacggctctttcgccggaaaattacggagctttcgataagcttttaactagaagccgaactcatcatcatcatcgtcatcattctccggtaacccatcataattttaccaagactcacattaagctctcttcaattttccgatcacttctcaatattctctcttttcccgccatattcccaacctgtaaatggctaacgatcccatctcacctctctgtaaccccatcactaggccggaaagtaaccggcacacttttcggtaaccgccgcggccacgtcagcttcgccgtacaactcgacccgagatccgaacccgttttgttactcgagcttgcgatgtctactgcctcgctggttaaggagatggcatcggggttagtacgaatcgcactcgaatcggagaaaatcccggcggcggccgcgaacggcggttgtcggaagctttttcaagaacccacgtggactatgtactgtaatggaaggaggtgcgggtacgccgtgagtcgcacgtgtggggattccgattcgcacgtgcttagcactgtacggagcgtttcggtcggtgccggagttattccggtggtggaggatgatgatacgaagaagaagagtactgagtcagagggcgagttgctttatatgagagcgaggtttgaacgagtcgtggggagtcgtgactcggaggctttttacatgatgaaccctgatggtaatggtgggcctgaactgagtatttttctacttagattatgaggcccaagcccaaatttgagcccataatgaaaagctcatttgtaggtaaatttggagactgtttaattaagaattagtgatttgattatctctctgtattgtatctgttaattattatgtttttttttttttcctatatacgggttttcttttgtatgatgtaatactactataatgaattaattaccttgttaaaatatatattttagggcttaaaaaaaagcttaaactttgtttaatgagaatgtttgattatgttgttgattaataattaattaactatgtatgtgtttaagtatctgttaattatttgttctttttataaaataatgttttcagttggttgttgtgtgcatgcgtgcttgcacgtccatcatcatgttcataatatttataatatatacttttttttttttttgaaaaaaagtttaattaatatagggtgtgttcttacttggtacctgtttttttcaatgatgtttaacttatgtttgatgataaatttatatcaatataatcaaaatatctttcgtttataagttataaatttaattatttaattagaaagtaaattagtcaataaaattttattgtttaaatttacgtttagtgtaccaagaatattgtatataattttgagaagtgaatccttaaaaaataatattagagtttaattattaatataattaagtattgagtctcatataatttaaaagataataatttttaagaaatgtcgctaagcaatcgtagagcatcacctataaaaggtattagacactattaatgcttaatagtaatgcctaatacttatagaagatgttgggcaacagtagtgctcatatataaaatatgtgtataagagccttatatttgaaaataatattgttattaggtactggtagtacctaacacactagtgatattttttaaaaattataatattaaactatatatatatatatgaaattgatacttaattatatcaataacaatattaacaagtaaaaaattattaaacaccattaatattttttagcattattataaactaccaatatattctcgtattaattaatagagtaatagacaaaaaaacaaagtttttcagagttgattgtcatgcttgtcgtttccctatctctccaaccaaaaaacacacatgtacaaatcagagggagggagagatataaatatatcatctcttctagatggggtttaaagggaaaaaaaatgttttaattaagtacatgaatattaatttaattataatttatttaaaaaataaaaaattagttattgatatatttaataattatttttagaaagtaaaagtatgtatttgtggaactaatatataaattgattacgtatgctggatagcacagatattgtaattatagtttatatatgaggcctacatatattgatattttcttcttttttattaatgatggcctatattttgatttagttgcacctaatttgtataaattcattttcttttcttaagcaaaaacttaataataattttttctttttgcaggaaa

SEQ ID NO: 37958 - DNA, 3829 bp, Cannabis sativa
tttttaattttggtacttttttttagaaaaatatttaatatagtggcactttttgtgtgtcactatatctttaaaaatattaattaaaaataaaaaaaaggatatagtaacactctatgtgtgttgttgttactttttcagtcagacaaaatctgactttatacgcctatagtgacgcgcagagagtgaatgtaaaatggttcagtgacatgtgtggagtgtcactaaaaactgtctttctagtcacctgcattagtgacgcgcgttgaagtgtcactaaatagtattagagttactcaatttgtgtcactaaaactcatttttctggtagtggcttatccatgaagatactacggcaaggattctttttgccaaccatgatagaagactccatggagtatgttcgaatgtatgaaaaatgtcaaaagtttgcaaaaataccaagggctccacccaacgagctaacacaatgcagagtccatggccttttgctatatggggaatagacttcggttagttacctaagggcaaaggaggagtgcaatatgtggtagtatagcggttgactatttctcacaaagtggacagaagccgaaccactagcaaccataacatccaagaaggtgcttgactttgtagtcaataacattataggtaggttcagattaccccagaaattggtatctgacaacggtacccaatttgatagtgtcatgttcacaaatttttgcattaaacatggcatagtgaagagcttctcggcagtctcacacccccagtcaaacgggcaagtagaggcggtaaacaagatcttgaaggataccttgaagaaaagactcgaagatgcaaaaggaaactggctagaataattacccaaagtcttgtggttgtataggacgacggaaagaatagcaactggtgatacttcctttgtccttgcttatgggtataatgtgatgataccagttgagctagacccaccctcccatcgacaaacggcatacaaccaagtcagtaatcaccaactgatgagtgagtccttcgacctattagagagtcgtagggaggcttcacaatatacggttagcagcataccaacaaaaagtagccagatacttcaattctaaagtcaaggaaagaagcttcaaggtgggggacttagtactacaaagagtcttggccaatactaaggacccaacagcggaagtactggggcccaactgggaaggtccatatgagattacggaaattgtaccccctgtcatgtacaagcttggccatgatgactctaacatgaaccttataccagtacaatgatattggaacggtcagcacctctgaaattcaaggggaaggttgaggtggctccgcgttggtcgcgtctcctgaagcgacaagcactgaccccctcccctatataaggggccatccatgcatgatctgggacggggatctgcaatcttgaacacttaaaaaaataaacgcttatcattctttgtaataaagagcctgtctttgacctttgcaacttagattaataaaacacaaggcaagtaggctattaccgacatctgggaccgaacctctttaaattttagtatcttttatttacatttattgcaatatctagtattattaactgtatttattattgtaatttttgattaaatcacatttattacccctctgcgttggttgattaaaaatccaatattcaacaactacaatatattaacgaaggaaagacaaacttgctattgccacgcgagggaaactagagtgtacactttgaaaaatgagaactatgctttgaaaaatctcttagatttttaatatttacaagttgagtgatggagactttgctcgaatgtatcaagcaataagtgacgaggaatatcgccataattaattactaaattatatttgtcaccaaactgggctgccattttagtaattattttcaatttagggttcaactcatttgtttattttaatttcattgcttttggaatttaaaataaataatagaagtttataaatttaaaataaaattgagatattttagacatttacgatttcatctatattataaaactgaaaacaataatatcgaaattattaatctgatgataggattagtaattaggtaagtatcgtgattggtgtaattaaattaataaaaaaatataatattcatatttctatattaattacttaattaaattattattaattatatataatgtacgtgtctatagtatattaagttttatgtttatttgtaattaaaaaaaataataagtaatatatggcacaatttttttgtacattataatgtacattaagcatcatattatgatcacaattttttttgttaaaaataataatctaggcttgctcaaaaaattaataacaaatgagaattttatgtgacattgcaaaactttcttgatctaactaacttgtttgtctttttataaagaagcccaactactttctttgtcatgtttactaaagtagttacttcatttgtcatttttatcacatgctataattaataatttctttgtcatttttattaccattctgaacccacaataaatggaactagtgttgtattagataaaaacttattgactaaaagagtaagagcatgtttggaaacgcacagtgttgtattagttgagtattatttctgtatatataaccacttttatagttgttaaaatttatggtataagagaactacacaagctctatacaaaccctttacatgtattaatcgattcattcaattcaatattaatgaacaagcttttctctctaccgaaactgaactcctctaatacacaaaaagcttctaaacaaaataaagtccatcattatgcttaaatatattagtaaaattaacatatatagctgctttatatatatatgaagcttaatgaaacctattgtaattaatcttaagtagctttctttgtcatttttatagagaaacctaactactttgtttgtcatttttattaaattccatatacctactacgcttatatatatacataaatgtaagctacattttgatttcaactacaaatatctttataagatcgtttgtttgtcatcagtactgcatattcgacaaattatcaatcgatcttagcaaatggtatatttatagactatataccttaatgaacattcccatcaaataatgtagtttttggctatatatataaatgatgggatgtatgtacttgtttggttataggaaggagtgacttcgttgggagcatatggtggtagaggtggtgacccttggagctacattctgaattctggattgaaagagataatcatccatgaagataagaatatcaagtccatttccttcaaagactccactggctttacctctgggacattcggtggcaacagccctgataattcagaaaggggtaaggagagaaaggtacgcactatgcacataattaattaattaattaatcttttatacatacatacatgattctatataaatatatatatttatatgattatgattatgtagattgttctcgattgggtttccgagtatttgatatccataagtggaacacatggtgtgtttaatggtgtagctgatgttatcgtttcactatctttccaaacaaatctcaaaatatatggaccttttggaaccactactattggtaaacctttcaccatccccatagacgaagacagcctcctactcgggtttttcggacgctgtggctactacctagatgctcttggtacttatgtaaaaccagaaccaatcatttcc

SEQ ID NO: 37959 - DNA, 2526 bp, Cannabis sativa
gatttgccttcttcactcttcgcttttgtgtgccatttctcttccctttggtcattccccatcatcgccattccacaccatccatctttgaaagcaccatctgtaactatgaaatttgaattgaagggagtcctttccatcaaacctttcgactggtctgaaagatcgtggacattgtcattttgcacagcaacaaactcctcaaaccttgcatttacatcatccataaagcggcccaattccaacttctttccaccatgaagcagtgagtttctatacttccaaatcccatcacagataacataacagcacacaagtattttctgcaaactccccccatctcggtctttgcagagattaaccaccatgtcaaggattgtattcccctggatttcaccactccgcactgttaaggggcttccaaaccagacacctctagcaaaatggcattcaaagaaaagatgtttaggggtctcgggcatacagttacaaattaagcattcattttcattcccacttctaatcttatcccgagtgggaagcacgccactacacattctccataaccaaaggcccatcctcgggtgtagcttattagaccaaacataactccatccttgaagcacaggcccaaaccgctcttcattgtccaagcagtaagccgctttgacagagaaactacccgatgccacactcttccaaacaagcttatccctgtccaagccattgacaatgtctatccctatgattaactcccctaagctcctcccaaataagtacatgacatacctctcattccatctggtcttagattggtttaaaagatcggccacatatctcaggtgtggagccttctctctaacctcctccatagtgcttcggaactcctcatagctcatccatggaatccatggttgccaccatcagttggtatcccttccattagaaatgagagttgtggttccttgctgtatcaaagttctagcttcaagaatccccttccaaacactagagtctccttgtttaggccgaacctcccaaaactgctcccaagagcagaatttttctttgaatatcttgacccaaagcttgtcctcattacacgccatttcccacgctaacttagctacaagagctttgttcatgtctccaaatttcctaaaccccaaacctccattttgcttcggtcggcatagagtttcctaactcttaggcgcataaaacctattcttttcttgaccaccagtccaccaaaatcttcttaccatacaatccatccgatgacaaaccttcttaggtaaagtgaaagtagacagagagtaaacaggtaaagccattgccacagccttaatagctaccaatcttccagcatgggacaaggttttcgccctccatccttcaagtttggatttaagacgatcaataagaaaagagaaatcattactcttattcttagataaaatcaaggggtttcccaagtaaatccccccaacctctgaccctcttattagaagagtatcttcaatctctttctttcttccactagcacaacccttggaaaacagaattgttgatttttccttgctgcataattgtccagaccactgctcatacttgtgaatacattcacttatacacctagctgcttgcttacttgtacgggcaaaaatcattgtatcatcgacaaacatgaggtgggagatcggagtggcaccgcgggcaatagatatgcctttaatatcccccctgttttctgcccttagcagtaatctggatagaacatcatggcatagtaaaaataagaacggggagatggggtctccttgtctcaagccccttgacggtttgcatctcttgagcggttttccattaaggagaatcgcataagatgtgctagaaacacataacatgatccgcttgattacctcactcgagaatccatgagcacggaggatggtcttaagaaaaggccattcgatccgatcatatgctttgtgcatgtccattttgatagccattagtccccctttactcttgttttttcgaacagtgttcaccacttcttgacccaaaagagtagcatcggcaatccaacgtccaggaatgaaagcggattggaacggggaaagtaccttatccataatcattctcatcctttgcgccatgattctggtgataatcttaagggcaaaattacacaaactgataggtctgaacaatttcactttctccgcattcaaaactttcgggatcaggcaaatatagttgaagttcaagtcatggtctaggaccccattacgaaagaactcttggacacagctgatcaccttttcccccactgtttcccagcagcttcgaaagaaaatcccagacattccatccggccccggcgccttcaacgggtgcatttggaaaactttatttcttatttcttcattcgatggcacagcacacagggacatgttctcttccatgcttatggttggtgatatcaatccttctaagtcctcaggaattgtcgggttg

SEQ ID NO: 37960 - DNA, 2706 bp, Cannabis sativa
tcaagtgtgtaaagagttaataaaagtgagtaatagaaaaaagaagtaaaagtccaaatccaaaaagaaaaaaaaaataacttaagctttggactccaatcactttcaatcaacccaaacagtgtccaatgttgtatttatttgtattgtgtcatttctccaattattgtaccaaaaataatttattagggaagcattcattaaaatagggactaatagtaaatagtacttatatgggttatatagggtgttggttaagtgagtttaaattggaaggagaagaaatggagagagtttaaattgatggagtatcatgaaacccaagtgttggtcattaaaatttaattcatcaaatattttgtttaagtttgacattctcattcccatcaagtgtaacgtatatacaccttaggccatcataaactgtattatactctattgttataagttaatataaggtcacataaatttttgtttcagtcaactattttggtgagacgcgtgaactgacacaaattgagcatttcgtagtagtggtctttgggcaggctttgaaattggtcaaccctgctatatgattgttcaggcatgatctggtcatcattggattgataggatggccttgtctggatacagttggccctcttggctttgaggcctacccatgctcccttgggcgctgagttccctctagaacacagggacgttttccctgacggggatccctaacgaggaaggactcttcaacttgagatccaactctctcgttgaacgacctgatcaggttgttagcttccttatttcgacagttcagctctacctgttgggcttggaggatcgcggtttgtcgatccatccactcttgaaatttgcctctctgatgggcgaaagcatcgtccatagcagcgcatgtttcttgttggtcatggtgtaggaggttagtataacccgaaacttgttgtacggcctctcagtatcatcccccagatcaatgtggggttcgttaagaaacttttatattttttctttctcttttttgtttctttaattaattttttattcttctttttattcttcttttattattattaataaaatatatgtgatgatataatattgaaatgatatagagaaaaatataaaaaagtcgatgtatggtgtaacgtaaatgtgtgaggtaaaataaaaaaagtaaagttttagtgaagtatttttaatgatagagtagacaaactattgggagtgctctcagtcagcccatacctgtagaggctttaaaaactatttcttcttcttttctttgatcttcacatcactttgctttaatttcattttgaaagataaaagtatgattaaattgttaaaatactaaaaatgataaaattgtgtagatgtatttttgttatgcagagattaaaaaaacaattgcagtccttaatggaatgatgaatggactttctttgtgatatctctgtgttaagtcataactaatacaagatacatataaaaaaataacttaattaatcaaaatttaattagaaagctataattaatttgaagattttaccataaaaatacataaatacatttcaatggtagataaatcttcaatatttttaccatttatttaatttaaataacaattaaacgcttaatattagtaataaatttgaattgataaacacatatacattgtggcctggttgcactatgcattgcgtatggcaggtacaatccaaattggtattttgccacccattttcctaaagtgtttcttatcaatattaaaacgacgtacgaaagaacgagttttaagattgtatcaccaaatccaccagtatttttgtcatgaacgaagtatatgcaattactatcacattgagtagaatttgatgaaacttgaacagatattgattcattatcaccaagaaatatagccttgtatctcaacccatcttgatcgatcataagttaatttgaaaattttaaatttctattacaggtttgggagggaacacaatgcaaaagggtacgaacattgggcggccatcaaagaagaacaggtgttttggcatggaacaactcacacattttagcttctggaagcagagacaggaacatatttcaacatgatcttcgggtctccagtgactacatcagcaagcttgttggccataagtctaaggtgtgtgcaataactatacaaaacattctcgttgtgggaaagatatttcacaattaactaagttaacgtgtttggttatcgaattcttataggtatgtgggcttaagtggtctgatgatgacagggaactcgcttcaggtagcaattgttggaactttgtatgaaattatgtaaaaatagaaaaagtgaagtgtgtgagtagaagtcccacatgggatataaacactacattttaagtgtatatctagtgcaagtttgagatatgggtttgggcccgtacccagttttgcgcgcatgggttagaaaaatgagtcactcataagggtaacccaacctaatgactggagatcccaagaattaggttcaacgggtaataacaaattatgagttaatatgtgttgatcatgctagagttatacgagaagcatgaagtcctgaagcgataagaggatgagttaatagaaactcttaatgagatctatactctatgtggagtggagtaccgagctacaggagtactc

SEQ ID NO: 37961 - DNA, 3764 bp, Cannabis sativa
aaactttattttgtaagaaattatgtaaagaatattattttatagaatgatactaaataatgtattgcaaaattgtatgatatgaaatgtgggggtacttttttctttgtttgttccataagggtgatgatgggcaataaagaaattgtaatggatgagttgagaccttgaaaaaatagttggttgagaatgatccatcgtgtgttttggtgctacttgcacaaaccatacaccacacacataacaaaatgaaactaaaaattggcatataatatatatataaatttatatatattgaaaaaggggtttcaaatttttggaattatatgctaaagggagattttgagcaaggccatcaaatgctttgttctctttagttgttctttggccataggatgtgaataaatgctgttgttaattgttatttacaactttattttttgtaatgtcacataattcctattggatttaaaaaaaataattatttagaaaaacaaaaaactatataaagtcattttattatgatgatatacatgcaatgaattttggtattataacctttattatatatttttttttatgtgcatcgaacaaagtcattttttaatgtcaatatgactttggtcccatttggctaattcttttatgacttatttttttttctttggataactattatagaaaagtatatttagtgtttagataacactaaaaaaaatattttatatgcaaattattctaattttttaaaacttagaaaaacaaaacttgtagaatctaagccaaatgaggctaacaaaacttgataaaatattgaggtctaattaataagaagcaataatataaaactgatacaaggagagaagtgtcattttatttatttatttatttattttggaaattgagaaagaaattaaatagacattgtaattatggtatggttccatgtcgatttcaaaccatctaaatcatattctatctcatatatcacaaacttcaagtctagtatatccacaacaacaacaacaaatatcaagttaaatcaatgctaaaataatctatatttttctattaattattttagatttgtatattacaaaagttatccataaaattctttattttgttaaatcataaattaaaaaaatagtatcttgaactatttttttgtcaaaataaaatttaataataactcaatctataagcgctataacaaaaatagttacgctttttatatttgttcgtgctaagaattgtcatcaatttagttttactaaaaacaaaaattatcaaaaattgaagtcaagagtaatatagaatctattttgttatttaacaaaataaaaaatctaatcagtaacttttacaaatacaaagtcccaaatagtattatcccttttctaaattagattgaaatttcctacttttaaacacaatcaaataattcttctggtccactaaaaagatcacttttttattttaacccacctattattgctcttactttagttatctcaacaacccaactctagtcttgttccactaaagaggaaaaagattgaacattaaatttattcaaaaagcaaagaaacaaaataatgaagaaaaagtggattgataatgttcatgagtgacataacatgaaatatacttagttgaaagtatttcaaggcaataaacaaaaggttttggatcaaagcctatacaagttaaaacaaggcagaagctaaggaagaaccaaaatacaccaactatgtacaaaaaacttcactcatcatagttttcatagctccttacccgaaacaagctttctccatttgagtttttgctaataaagcattcacatttttgttactacaagaagcccctaacctgccaagatcatcaacatgagtcataattaactaatcagtaagcaaggaaattgttacaataccaccatagaggtgtagtgagccagatgggtccccaattgtcacgatcgccccggaagcaaaagtggtggttgtctttgtttccaagccagaagatgccccaatgtttcctgccagaattatcaagacgcatacgagatgacattccttgaagataaccagaatcccattcattccaccaaggagcaacattgtcattcgagaagtaaatacgattggtcattgggaccccgagttcttttacagacaaggatcttgagcaacatttacctagaaacaatactcgatccctcaagtgttcaacttttttccaggacatctccccaacatccaaaatatagacttcgaattttcgtgtttcaagtatagcaccgagatttgtactgaaaaacctacagacaagcaaaagctctccacatgactccacaagatacctcaacatattatcatttgtagggtttcctgacatcctacttactttatgggacttaattttgatttcagatacagaagcagccgaagcatcagccgaagcctcagctgaagcatccaccgaagcctcagctgaagcatccaccgaagcactatcttcgctaatggcagcaaaaatgctagctgtgtcaatttgacaaacttcatcatccttgctcaacagatagaaacttccattgtagaaaataccatcctcaaatggttcaccaacaagtttaaattgtttccacgattgagctcccgaaacccaaacagcaatttcccgcctttcattgtgcaaaagcatgcaaacaaagtttttctgaaaaggaagccctgagaggactatcttatggtaatcgtcccatgttctaggtagttttactgtgcttctagtgaacggattcaacaaactgatttcaaccgagagataaatagaattatccactaggatcaaccaatcatgaaaggaaccccaacaatatttcttatgtgcctcaggtagctccatctcccaagctcgtttctccaacatacttaaacaagttctcttctctcttctatgttgaccacacattattaaggatggaatgccaatccttttccaagaagaaacatctgatgcaaaaacatatctccatggcttgcacacattactaaccgaaatgcaatcaacaactgaaagtttctcgaaaataatctcaagtacagttctagggagttctgcccaattcacactaattagctcgctattactctcactaatatgttgtttccgcttctgcttcttttgcttacgatttctttttcttcgagcttccatctctagactccgaaattttacctaacctagaaaataaatccatttcactacacctcctttaacaagaaatcaaaagtaaacaacacatgaagacacttgagataattagaatataacttagcaactcaactggcattaaagagtgacaacaatcagacatgataactaaccaaatgatatgattaaagagtgataccaatcagacatgataactaagcaaatgatatgattacatttataaaactagagaatgtagaaataataaagtataatcaagtaaagcatatgactaaactcatagcacagtccgaaacaaaaaagccaaacaacttgagaaatgacattcagatatacataattattgtaccaatatataacattgtaaactgattgtttgacacataaagcttcttagggttttgccacacatctctaaacaatcctaattcctaacatttgagctgcaataacttgaaaaatataaatatatgctgaatgtgagtgaataaatgggattgattagaaaaattactact

SEQ ID NO: 37962 - DNA, 2526 bp, Cannabis sativa
acatagctatcatcagcaaatagcatatgtgaaattaacagtgccccattcgcaaccttataacctttcaaaagaccctcaacttcaaacttcttaatgagagaagtgaacccctcggcacaaatgagaaaaagataaggagacagaaaaaaggtccaaatctatagattagcattaactcaatattttatttaaactttaaatgttaaaagaaaatgatggtgtcaatagtgagtttgactagtgttataaatctgtgtgtgttgtgttagtttgaattaattttacttagtgagtgtcttctaactccgtgcgagtacatgtaaggagttgaaatttgttgttaggcacttctggtaaggttcgaatagtgacaaaaggaaaatactttaggtaaaatgggatacagtttgtgccaaaggcattgagaggtcttgattttgtcatttccaattatttaacttagcactggtggtgaacacaagtttggcggctcttgcaaaatttcaattcgttactagcaagagttttgaagtataagtatttcccaagatgttctcttctagaggctggtgggaaggatggctcatctcatatgtggaccagtcttgtatagggactagagctacttaaaaagggtctttaacaaaccattggtgatggcacgtaaattatgaattttcatgacatgtggctgcctagaccgtcattttttaaggctattacttatagacttaatgacaataatgaggttagtgatttcattcttcataatggtacatgggatgtaagtaattcttactatttctttagctagagaggcggtagatgatggttggtgctgacattatgattgagatggggtgtaaatgttaaaagtggttattcattggcatgatcactacattttggaaaagggaatggttgattcaactaaattggtacgatgtgggaaagggatttggaaccttagtgcgccacctaaggttcaggtatttgtgtgacgaatgttttatttagccttaccagcagcaacgcggctaatttcccgaaaggttcaagttctgacattgtgctcgatgtgtgaagaagttgctgaaactccaaaacatgcaatgctattttgcaatattcttcattctatctcggtttgcttaggggtttagccactactacgctgatgtgcccaaggttggctataggagattttgattttcctctttgaagagttattctagaagagctttgagttggtaatgatagtgatgcagtggttgtggtacgataaaaattcaatttttttttggtactgctcaatcaaaaattgatgttgtattagagtttgctaaaaaaccaactcataaaatttcaagaacactagcaacatggtctattggtgggatatccctctttaacaacgatggactattggttactgtctcttgttgaatgtttctggctgcccatggatgcatgatgattactaataggggtttgttgggttggggtgatttgtggtgatgatggtgttgtttggttggcatgggcagttggactcttaagggcctttagtgtgaatgtggacgagcttcttgctatgaggatgagactaatgttgacatacccttttgaatttagtcttgctagtattaattgtgattcaactgtggatatgaactgagtaaataatcctcatttaaatgttagtttaaaaatctattattttagatattacttctttaacatctgttgtaggtagtagttcttgtaatgccgttttgcattctacgaatggtattgtttacttttattactaatattgaaaaaatttatttaaacgaatgcttactcaaaatttttgagttgatttatcttaatgaaatgattaatttttttttttttaaaaaaatgaaaaattttatagtatatatcctataaacaaaaaaaaaaaaaattacaataaatacataatgaaaaaatcacataatacttttggttttatttttagtatttttacactacatactgaaattttaatttttttttttattttttaggcaaaaattttttaaaaaatactgtgtaagttttatactatgtactgtgttacatttttactgttgttttacaattattttttagttgttccactattattttaattgttatgttttcttgttttacgattgtcttataaaaaaatagcatttttgtaaaaaaattcgtgtgatagtaaaattgtaaatttttatccaaaatatagtatttttgtaaaaaacctattatttttaggataagttgagaaatactttttttttatccattaattaaatattttgttaaaatctactcacttatgaattatttaatatactcttgtcttcaaatatcttctataaaagtgattatatcttaaaaaagaatataaaaataaaaacaaataaaatgaaataagtatacagtacaatttattttttattttttagcaaatgaacaaaatccggtgggctcacagcccgtagtggc

SEQ ID NO: 37963 - DNA, 1910 bp, Cannabis sativa
aaataacaataaaataataagaatactatataaaaatagatttaaaaattatgtttggtgcgattataaacaaaaattacttcactcaccactaatagtaaaattgcatgcaccttattacacacaccacattctacttcctgatccacattcttacattctaacataccgatcataaaaatgagaaatataaataatattaaacacgatcaaataacaagacaaatttattaatttttaatttaattatacaagaacaaaaaaaaaatgtttagtatggttggtacacaacattgagaacaaacacacattgtaattgatgccaagagagaaagagcattgtcaagactcaatctccacaaatacaaaaataaaaaccctttgaataaatgtgtagttaataataatattgtactactacatgcaaaattaaatggttattaattaagaacaccttatataattaagggtaattaactgcatgagagcattatcttatcagccttcttagccatgacaatgttcctccaatgagtagcaatgttcctcttaatctcatcttctctctttttggtcacatcaacttcatcatcactagtactgcttttgccattcttggcaggaagcttgtcaagctcttgcaacaccttgctgatgtcgatcaccagacgctcagcaagggtgcgcgagaagtcttcccttatcactacacgaagcaagctgacgtgacgagcgtcagctggcatcgtgtaggccgggacaatccacccgaagcgacggagtagctccgagacctcgaactcgtcgtggcggctcctgtctttgagagagaatgccacaacaggaactcctatgtcttttgatagaatttcaaaacgacctgttttttctagcccttgttttagcaccatagcgtttttgtgacaattttccataatgttacggtacccctgaaaataaatgtaacaaaatccaaattaattaaatctatgatgttacagtagtatattttgcacttgtattgtatgccatgttacagcactaatattttcttgtataacacatagttatgaaaaaaatttaaattaaaaagctttactgtatgtcaaaataaataagaaatttactgaatattaattcttttaatagacttactaaataatataaatatatttattaattactaactatattctcacctcaaagcccaatcggattagttggtaatattgagcaataatttgacttgaacctgtgaaaaataaagaacacagaataagtacaatgatacgtttggtcataattaagaaattttatttattattttaattacctttggagaaattgagggtgaaagtgggttggtcagcaccaagataattgatatgaaaaataagttcttcaggcaagtcctgttgggtcctccaaacgacccacccaactccagcgtagacaagcccatacttatgcccactcacattaatactcttcaccaatggtagcctgaaatcccattccaattctgggtaaaggaatggtgctataaacccaccacttgctgcatccacatgaattggggtctcccaactgcataatttataatttaatccattaattatttgtgggaagatattttgtataaaattttgttatatagataaggtaacgtacccagtttgtttgttcttttcaagtaagagatcatttaagagtttaacatcttcaaattcaccattataggttgaacccaaaatagcagcaacacagatagtgttttcatccaccatttccacagctttgactgggtccattacgtaatacccttctttcacctttacttccttcaattccacttcaaagtaccttgcaaacttctcccaacatacctaaaaaaaatacatacatacata

SEQ ID NO: 37964 - DNA, 3099 bp, Cannabis sativa
  modified_base (2874)..(2883): a, c, t, g, unknown or other
  modified_base (2991)..(2997): a, c, t, g, unknown or other
gaaacacaccaagtctttacacaaggaaattgattttatattagaagatgaatggctacaagaagaagatatgtaaatcctacttaatgacgaggccaccctcaaaaaaggttactctttcagattattagacatggaaaatccatacaataacaccaatcacaaagcttcttaaattatgaaatttaacgattcacttacaaccaagaaaaaattatcacttactttcaattacagcatttgagaataaaggaaaatcttcttccagtccaaccacaaatatcttttggaatctacagtactctagaataagttccttccaaagctgtatttgcttttcacgaatatcccttactggctgcaaactggagaaaagaaaacatattatcgatatgacaaaacgagccaccagaaaatgaaggaaaactaaaaaaacaaacaaaatcgtgacttttgtgagaagcctaatgatcatgacaatgatttaagataaataaagagggtgattgggtaaccgtaatgaaagggattggtgctatatatatatgagtgagtagggaagggaagggaagggaagggaagaggagaggagagaattgttcggttaagtgagcattagctcttgggagagtgttgggtctctcgaatacccagcaaccttgttctctttatcatctatatcaatatattaactactatactattttcctgtatttcctactttccataccaattgcaagaaaattcctatcagataattgcaagaaacatgacgaaaaggaagttacgtgtaagaaagaagaaaaatactgcaaatagatcttttctgcgcatgaactttgtgtcttttgatcaaatatcaccctttgaaaaaaaggaataaaagataaagaatccttttataaaataaataaataaacaccattcactctagcagatattcgattgcaataactaggctagttcaacttatagctttctaactatctaaatttggcaaacagcaaacaatgctttcttttaaggttctattagcatactcagcaaaagagcatgaatacacacaaatatatacagtagaccatacatataatataaatgaacatcaaaacatacagagtccatgtaatgtttctcccgtttaacgataaatacatatatatgtgtgtgtatatacatgaaatagtgcatttaacagagtactaggagcaagataaaagaatgaacctctgcttagcagcacgagaaactaaattataaaaatgatcaagtaacacaagattcaagactatattgaccctccttattacaagttgtcttgttgatgattatgcatattgctttccccttcttttcttatttgtggataggtaagactattgatgagagaataattttaaacatgtctgtgtatcatatgcgtatgtatatatcgggagcaaaataagaccacaaattatgcttaagaaccagtaaaattaagaaagagaaaagaagattacgtgaagtaaggtgggtaattgaagaagtgaggtagcttaaaatcgcccaatttctgcatctttcaaatccacagaataaagaaaccaatcactgcatttccctctaactgaaactaatataatatggggaatgattaataaaaattcatacaagaaacaattaggcaaaaaatttcatcttggttaaacctcaaatcatcagcagtaacccatatcaaataacaaatgagttcttatatctaagaatccaaaacattttattaagaagaattagaattgctactatgagaaaagacaaaatgaaaggaaaagaaactggaaaggtggccgatgggtagctaataagaagggatttgaatatacaccaaaaaaaaaacataaaaattagatattaatttcattttttaaaacaatgatcaatcaaggatttttgtacgtgattgattataagattgttttcaaatatgaaaccaagcatcagcctcttaaatacgatatacaaagttaagtgcactagcaaagaaaacgtcattagtgacatttcaatccctcaacctagataattaaattggcacatgaagctaggatcaatacaaaagcacaaagagcaaaaactcaggagccaagaagcagaaaaccattgggggtttagtctattctcttgtaatctaatcattctgacattgaaaaaagaaaaaaaaaaagttaagagagaatttggtgcgaagtgaaaccgtgttatgaagcgatcaaagatcaaccattgaaaaataaaacaagttggaaggattttgagttttgcaatggagtcatctggagtgagagagtaccgtagttgccgttacggatttcagggagctgggttgtttgggcggtgatagggtatagaatgaagggaacggagggaggatcgacgactatacttcaaagttcaaactaaagagagaaagtacatcaccgtcgatgccgagaaatcaacgatgtccgtccaatcttgcttctctatctaaatttactttctttttctttggggtcatttcatttgtcttctcaacggaaaattatccatcagatttttgtgaagttaaatcttactttaacttacctaaaaaaaaaaataataataaaaaaaaatcttactttaatcacaaaatctaaaaattttgtttttgaaaatcaaaatacattctgtaaagtaaaaatatgttctctaaagctcatttttatttttattttttttattttatttaagtcgggtctaagtccaagattgaattcggcttcgggtcagaggctgggttcagcgccaaggtcgtgagaggattgtgtccgggtctaatcggtgtccaaaacattgattaagaaaaaaaannnnnnnnnnaaactgtttaaaaagatattgaaaataattttttttttaaattttgattctcaattaaaaattaaaaagtgaaaacagttttgtagaacatgtttttgaaaaatattnnnnnnnttttaattttaaaaacagaaaactgattaaaaaaatgttaccagacgcaacctaaacaaaataaaacttgctaaacttaattttaatcaaaataaaacattt

SEQ ID NO: 37965 - DNA, 3542 bp, Cannabis sativa
ggttgcttgctattcatgccatcttaatttaaactggctagactttttatgaagacttcattctaccaaatttactttttggagcagggcaattccatggatctcctattgtagaggagctgcaggggcagcattcgattctgagggactgtgttcaacaacttacagcagttcaatcgtcacgaagtaatcttgtctctcttctgagagaagctctccaggagcaggtttgtaagctgtatgttttgtgttaacaaatttttggtataactttgacttctatacaaaattgccaaaatgaaaactgatgtgggttattggttatttattttttcaattttcacaggaaattaagctggatcaagttcgtaatcaacttcaggtttggtcttcctcaaattcaagaacatgtttttttttctttatcttctttttcaatcttataaatttttccctttgtgaaattgatgaaggcataataatacaagaacaataataatgaaaaccacaagagtgattatttccccataaattttaacattttagcgttcacaaaatatgaacttatggtctattgacttgaacatttgctgatcctattcattcttttggttgcaaaattttagtatattctactttttgttatatccttgtatttgtttttcaggctgcgcagtcccaatcagagcaggccaataatatctttcgtcaattagtaggtcgggacaatgtgcacgcactaggtgaccatgttccaaaagaagttcacacttcggtagctccacatacctttatgggaggggataaggagcaatctgtaccagtaatgtatgcgcctacaacgtcttttgctgaaaaatctggacacatggaggaagacccccggaaatctgcagctgcagcagtagcagcgaaactaactgcatcaacatcctctgctcagatgctgtcttatgtcctatcctccttagcatcggagggtgtcataggcagcactaggaaagattccactggcgactattcatccgaaaaaaggcctaagcttgataatgatcaatcagcatatgtaccatcatctcagaatactcaaccactgcaagttccagcatatcctcgtcctgaatctctatcacacaacgtcactaccacaaaccaacaatttaatccgagcgaggccccacctcccccatcatcatctcctccaccgctgcctccactaccacctctgcaacagtacccagtgccccaattcatgcagactgctgggtctataggtaatggaccttcattcagctacagtatgacgcaacaagcaccgtcctcaatgcctggttatccgaatgttgggggccctcctctaaacggggtgtcgccctacgcgacaaccccatcaaattcttatcagggtttccagggtccagatggtaacttctacaaccaaccgtcgtccatgccaatggcgccgatttctaggcaataagatgacttagtttcatatagctgctggtagaaagggagaaggtgctgttgtagtgccatgaagaagacaaaaaactactttgtgaagcttcattgtttctccctgctttcattttaagtaattgctctcctctcatgtgactctcttgttatacatcgcctcttagattttgcacatacatagttaagttagtaatgtttgtaatttataatcttagctttaactgctgctgatttatggattttcaatacaaatctttgcattacatttgtttgaattgtttgaggatgataaattggattattattttcatcttcttcccttttaactttttttttagtgttgtggtctgtcaatcattaggcccatttggggcttctggtggtagtaaattttgggcctatctaagggtagacttgactcattatatattgatttgctcatcttgaaagagaaatggaaggaaatagtaaattactaattccaatttatttcatttaaacatttatagttttgaaaaattctacaattcatccatttgggagaatattttagtttaatttttttgtatggttgtctttgttgtagttaaatgggacaatctttcaaaattttgagaaattttaaaaaaaatttacccgctaaaaattagattcaaatagtctattttagacgtgtgtaaaataaaagagttttgcgtgtaacaaaaactgtttgaaccttattttttagtgtgttaaatttttttgaatctctcaaaattttgcaaaatattttaaataactacaacgtaaacgaccatgaaaaaatttagactaaaaaattctctcagtgcattgtagaagtatcctgtaggtcttttctttttgggaatattatattgggtgcttctacaatgcacctcttttaaaagaatgtactaaagcactctctacgtgttttaacatttagagagattttttagcttatttttttttttcatattcgtgtaagttatagttaaataatacaaaattttaaaaaattcaaaattatttataatataaaaaaccctatcaaagagcaatacactcaaaggagtcaaggactagaataaaaaaaatatacttttgttaagcaagaatactataaaaatagcaatttagtaaaaattgactatctttttttatttggttacaatttaaggtattaaatgtggtttatattgttttgttctacattattcatgcaggatttatattacattcataattatcaaacctcaatttcataatagagttttggtaattgaattaatattatttgtgattgaaatctataaacaaaagttgtgtaataaagctattgtctaatattttatatggaatggtataagaagcacttttgcaatacagaataattttcaatttgttcccctcaaaagaaaaaaacaattttttcttttaaaatttaaatctattaattaataatcagagtttattactatttcacacaatttaacatattttttagacatgcatgcatgttcatatgttcttaaactatatatagcaacattcaactatatactatattgtattgaagcatatgcaatgcactaatatacttgtactaatgaggacggtggtgatgaaacaatcacgttagcattacgtgtcactaagccctaaataaataaaaaagaagacaatgtttttcttttctctctttatgagaaaaaaaaaaagtgaaagcaaaagtattaataagtattgaaagtagagtgagtgagtgagtagaagaaggcaatatcatttggcttgggactgatcctctgcctcttctcataaaagcttatcacatcatatatatctctttttttagtcaaatgaacaaagagactaactagagtactaatgactaatcctatgcttttgggatttgtaataaacttcaccaccaatccaaatctcattatcaagtctccaactaattaaggtaaccatagtgttttagtgcaaaatatgtgtacacatgttatattactatacaaatacttacattgagatgtacacaaaaacat

SEQ ID NO: 37966 - DNA, 2314 bp, Cannabis sativa
cttgatgagtctatttaatcaagtgattatacactaagtatgtgattagggataattaaaaaatttagagtaaataatttttaatatgtatggtaaactaaaatatcaagaatacaagttattcaaagtgttacttatggttacccattcttgttttggtagagcataattgatgattgcatgtgtcttcttttcaatttgaagagtttttttttaagttcatcaaatggtctgcaaataatgtagcattttgtttagtaaagaagtattgttattaggcactaatggtatccaacatttattataggtaacgccttacgattggtttgcgatatttcttaaaggttactttttaagttatatgagacttaatacttaattacaacaatagtagtatgacactgaagaatgtgttagacaccaataatacattttagtatttctcgaagggagagtatttttgtattgatgaatgattttattaattaataattttttttggtaaagttcatgaactaatttgtcaaaacttatataatttaagaacataccgtataaataagccttttgtttgttttttaaataaaacatgtaattttatagaaatcagctaaaaaaaatagcttataatctactcgtgacatatacaactaggattagaattaaaaaatctagcagcgtctaattccaaattatttgtcaaataaattaaaaaaaaattaagataactttaaaaacactattgaggttcatttatctttcctaaaacacaaacaaaataagccttttgtttttaggtgcacaaattcaaaattaaaaaaaaaaaaattgagtgtaagaccaagtctatagttattactagaaaattatgttttagtaagatatgaaaaagaatatgatatgttgcaattactttgtttatgcggcggtaggcacgcatggcagtggtgcagataaaatcaggggcgagagaacccaactagattctccactcctctcttttcttttcttatatattatattacacacaacacaacacaacaccccatatttgaagcaatcgcaacattgtcggcccaaccaacataaaataaataaataaataataatcataaattgcttttactacttactatatatgttcacagcccatcttaagatgttaattaatatttcacaatgctctttatatattcccaggaaaaataaaaagaaataatgttgtttatagataataaattacattaataatatcaaataatagtgtgatattttacaatgttaaatattaatgtttttatatatatggaatatattcattttttttggaaatcaaatgcaaaatatattaagcaaacaagatatatgaagagactttagcaaaaataagagtcactttattaattgatcgtttaataaaataaactgaaataatattcaaagtaccaagtaattatttacattcttcaattacttgtctaaacaaaaaaatcatcttaagagaactctctaatgcttgcacaatagtgaagcaatcaatttcaagaaccacttattgccaatctttgtctttgatccaactaaaggcctcacgcacccccattctttcagcaagtttcagtgagatcatacatttagaataataggtgcaaccctcaatcaaaaaagcctctctcgtcgcgagctaccattccatagccataactattacctccttcaaacaaaacaacatcaacattaaccttaatactatccatctgaggaacaaaccattcttagcaccattacccaattggagaccagtccatgataattatatagtagcagtttgagcaattatccactaattaaggtaacctttagctaatgccacaatgtcgtccacccctaaaaccttcccctgccgaacacactcgttacaggcattccataaggcccaacataaagcaaccatcatatattttttctccaaattatattgttagaaacaagacagacactaagcaaagaatgaagtcccaagttacacaaacgttcctattcctattccttccctattcaaacacaaagcagcagtcgaacaagtgactaaagcatgaagaatggattcaacagccactacaaattaggcaaagagaactcacttgagctcgctttgatctcaactaaattatggtaggaagaatatcacgactagccttccaaatcaaatttttcatctttggaggaattttcaaactccacatcttactccaataaatagcaacagcttgttcattgaagagttaacctcattatgatcttggagtagtct

SEQ ID NO: 37967 - DNA, 3697 bp, Cannabis sativa
aagaaaagaaaaagaaaaaagaggcaatgatgttcaaagatcacagagaacacattttgaattaattttttaattaaaaaaaacgaaaaagtcaacaaaggcaaatttagtgaaagtaaagtaaaccagctcatccatattcactctgattgcaacaaatggaggtgaaccagttccgatgaagccaactacaccagttttagcaactgggtatttgtaaaaaatactcattttctcaagctcagctctaataagctcactagtctcaatttccttgaaactcagttttgggttttggtgtatttttctcctgatacccaccatccaatcaaaaagttcattttcttgaatcaagtcaagaaatttaacagggattagacccagagaatcattgtgacttgaggaagagatgggtaatggcataaacacaaggaagttgatgatgaagaagtagaaagccatgagctattattattattattattattgttgttgttgttattagcagcagcctagaagtgtttgattggtgttgatgtaaaaggaaggaaggaataataataataacaatataaagtggctagtgtcctttttggaagcactatagttggtttggccacacaaacagttgagaggttatagtccaatgaagcttacctcaggctttgggggacagaaaagaaaatgacatttgtgtgtgtgcgtgtgcacacgtgtttaatattggcaaaggacaatcagccacctagttagattttagtacttggcttgagatattttactgacagtctttaatgtttcaaatacattcttcattcaattatcccccaaaacctaatgtttagtgttaggagcaattgttttattctattttttaataggattgaacattttaacaggatttgggtacaatttttttattccaaaattcatgaactcgaaactcattatattcgcccgatattcaactttatttttcagaatacatgcttaatttatttttttgaaaattactttcattaagaataaaaacattgagtacaagttacaatgttaaaagtgtgaaatattaccattccacacaaattttttatcaagctctaaagtcttcgtagctacttgatgagcgactgcattgaacaccctaagaacacatctaatggaacttcagagaatttgggtaaagaattaccaatattaacaaccatatcagataacactaagaaatctattttattacatataattttgttaacaagtaacttcaaatttgattcaacaacagatatagggagcctaacagcaacacaccattttagaacagatttaagagttaaaccttcagcgtaagttgagtctgaggctcctgagattggaatggccaaacgagcaactatattctcattctcatcttttattacagcccccaatcccaatatgttacctttgcaatccatagcagcatcagtacaaagcttggagaatcaagagctataggaggaacccgagactcctgggcacacatggaagctgaaaggcagtaggaaaaaccttcttttgagcgttcctgtaatcatctaaataagatctaatccaagcaaaaacattagtagccggcaaccatcctttgtcaaatagcttattattcctattttcccaaataacccatagagaacccaaaataatagcaaggtcatttttattcagattttcaaaagcacatagcataaagtccttaacatcacaatatctattatccatatagaacttctttaaagaagaaactctccagacttgactagcgctggaacaatcaagcagagtgtgggtcacagtctcaatggggcagttacaaggagaaaaactaggattacaaataatctttttggtaaaatgattagaagaaaatggaagaacatggtggtaggctctataagtaataaatgtttaattttagggggaatgagagattaaaggaagaaggagggagggaagtagacttagcaaagtggtaggcaaacttgacagtaaaagcaccagaggaatgtgaactccaaataaggcaatcctccttactagagtccccaataggcacatgaaggatttgggaaatggtatcctcatcaaaataatgagaaagcttagtcatatcccaatttcccaagtgattaataaaaaaattgatcttatccgaaggaggggttgattaaccctgtagtgaatgtaattatttttggcatccaatgatcttctaaggtcactactaatttttcaaacaaggccctttttaaggagatctctcccctaaagtaaactcctccaggtataagagggagagtgacctaggttgcatccagcagggagttattctttaagtatttggctttcaagattgtggctaacaaaaagtgaggattggtaaaaactctccaagcttgcttggccaacttagcttggttaaaagaaataagagatctaaatctcaaaccctcaaaaaaaaaaaaattacaaagataagatcaatttttccaatgtattttagagttgtcccccatagaaccccaccaaatggctaagactctcaacttttttataaatggacacaagaattctgaatcatgacatgacataagaaggaatgtcctggataatagccttaagaaataactccttacatgctctagaaaaaaaagccaatggttccaaacattgaggtaagaagacactttatctaaagtaaaactaaaattattttttttagaatgtacaaaacaaagcgggacaccaagataattgttgataaaaggcttaggcttaagaccaagagtgttgtagaaaaactcaaatatcgtaggaggagtattaagcgaaaacaacacagaggatttagaatagttaactttttgaccagtagcaagattgtaataattaaaagcctccttaacaaaaagtatcatcaacaaaaagaatatgagaaacaggattgtgagaaatagaaatgcctgtaaatctaacattcctcgcttgaagcctaatagaaacagataagccttcaaggcatagtaaaaagagataagggaagagggaattaccctgcctaatacctctagaaggcacaatagtaacagaaataacaccattaatattaaatctaatagtaacagtattaagacaatcaaatattaacttaactaaattaacatgaaaaccaaaaatgtctaaggatagcatcaataaaaccccataataacatgaataacttcttgaacaataaagttattatcaaaagtggtgcgaccggacatgagggcactttgactaggggagatcatattacaaagaataggcttaattcaattagctataactttagcaattactttatacatcatggaacaaagactaataggacgaaaatctttaatacaagaagcattagattttctatgaataaggacaacagagtattattaatacattattatttagaatacttaaaatatcatcacaaaagtcctattctaaattactccaattcttttgataaaaactagcattcaaactattaatatcaggcaccttatcactagaaatattaaaaagagcaattctaacctcatcaacagtaaaaggcacaaacaaagaaagataatgacttttattaacccttctattcacaaccgagtaaatatcatta

SEQ ID NO: 37968 - DNA, 4395 bp, Cannabis sativa
atagtatatgggataattcccctacaatatttataggcaaaattgagagattaaagtaatcaaaataaaattaattaattaattaatttaattagtgttgtgaagagaatacataaatagagtatgtgtaagagcattggaaaaaataaatatttgtttggatggaaaaatggtggaaaagatagggtaaaaataaaataggaatgtttatttaggtgaaaaagaagttggggaaagaaattgatttttatgtgtaaagtattggagaaaaataaggattttggcattttgttggtgtgattttcggatgtgtgcaatacaattaacaaccctttgtttttctctttttttctcaccaggggcacatggtgtgcgtaggttggaggagacactgatgctgttgggacgtggcatcgtctggctggtgcggggctgatgagctaggaacgaagctgctcgcgtggtaactagagggaggggacagctgatgcgcaagtcccacgcagtgctagcatgcggcagaaaaggcaggagctcactctcggctgtccggggtgaagcacacttgcgcccttgggcctttggattagagcatggatggcttggatagggtcaaatatttgactgagagttggcttgactttgaactgatctgaatatttgttataaattatacttttgtccccattcttcaatattttcttcaatttaatcccaatcttctacctaaaaataataaaattaattagaaatttacaataaaattacaaataaataacgcataacatattataataaaataattataaaaacacatgaaaacttataaaattaatgtaaggctaataaattcaaaaataattaaaaactcactaaattaattaaaaacttaagaactaaaccaattttaatgtaaaaaaatgtgaaaaaaaaactctaattactagagttattaagactggattagacgatgaagccatggaggaaatagtgagagagtttgagaagtgggaggaagaggaagccaggaataccttccacaaagacgccaccaagaaagaaccagctgagggttccaaacaagtcacccttaaattcaaagagtttgccttgagagtgcttaaggaggttcgcactgcctgttccaaaaccatccagattcccttggtggcccctcctagtagtcttagtaaggcccaactccaaagtgtgaaggaactgactgtgaacggtaaggactgccagttgatactcccttcccagattagttggcacatgatcctagttgccatattacttatggggagcaatcccccttcataacttttttcaaagatgtggctgattattttggcattagtccagggcagtttttcgccatggccatgtgaatccttaccgacatctttgttttatacaagttgatgagatggaagtggtcgaagtgccacgagctacactatctctttgatctgagaccgaacaacattgagcagtgatcgggctatttcgggtttcagcatgcgcataggaatattaaattccttcatggcatagatagggtgtcgaaagagaatgacttcagaactcaatacttcttcgttaaggacattgggtctaaacacaccaaattccaacaggtgaaccaatttttcaggcctttccccaccgctgccatgtgtgagagggctcttgcgttagcccaactgccttacttcaagaaggatatcaacatcctaacctcttctcgggcattagacgattttgggttcaactttgttgttacctcttctatcggagtacgagaaataccccgacccttgggacctccgaggccggccctgacggccatagcaaaaagcaccatgctcggacctccgaggctggttagggagtgtgactctcttggtgatacttgctatttgtctttcttattgcatttcttcattaattcacatgctgttatattttactaatcatttttgtgtgtttttgcagatttaggtaacctattgcgacaagtgacctaccaggaatagggggttccccctcgaacacctctcccatggcccctcctggtaaggttaggaggactagctcttgctcgactatcgacattcatactcctggtgttgattcgcccgcctcgtctcggtcgcatccttccaactctgcatatggggccgccaatgatactatcctcgttggctagacgtctataggggcaaaatcacttgctgtgctgcccctggagggccattatcaagccttgtccacgggcctgacggtggcttgtacctacaccgaaggcatcatggatagcatggataagactatgtctaagcttgagtgtctcacccatgcccagatcattgaccttgggtgttgagagatgataagggtaagtttctcattcttgtaaaaaattcttttctttagccatcatctaacatatatgtcatgatgtgtgacaggccgcgatgattacctcctatggtcaatctagagttctcgccctataggaggagcacgagaagcagggagcagcctcgcttcagcttgaacttgatgccctccgtcaagaacactctcagaagattcatgacctagaagcttctactgagaaggttgctgctgagaacgagcgtctcaagggttagcttaccggtaaaaaggaggcttacaccaagcttgccaaggagcatgaaactaaagtcaaggagtgtgagggcctagctgcagagatgaaacaggctgaaaacctctccaccgatgttttcttcaaattttggctaaacaacaagaaggctgactttagttatctgggtaagaacatggaaggcatgctatcctattgtcacaactgtgaggaggcagaagctaagcagaaggcacagacagcttgcattcaagccgattcatacctcaactttggggttgaagcaatggatgacagtcctcttaacaacttgcttgatggctcctttcgatgcacctttacttttaccatttttatgcacaacaataccttatagagatttaagactgttcgacagtctttaatcctgtgactttatttttgagacattcatgcgtttaatctttttgcttggtcatacagcctttatccttatatatggctttacatgttgacttttgtttgatgtgtgccatactatgtttaagcatagcgtaggcatttatttacagccaaccattcaccatacaaaagttgctcaaaatgttgagtaatgcaccgacactttaaaattttaatttttttttttgatatctacttaagtggggtgaattttttcttactagtctatgtattggtgtggttgccccccaagtgactaagtaggttcacctcttagtcacttatcctatgaccggggtgttacttataagttttggctgcccactcttacccatacatcattgaccattatgaggcttgtaatttaattcaataacaatcatacaagttgcgtcattatgtgaaaataacttgcaattttattgataatcagccacaatgccatattacatcactattagcagtatgtgcataaaactaaaacaaatctaaaagaaaagactaaaaactgataaagattctaatttgcttacgggcatacccttagcatgaattgttgctgaagagcaaccgttattgataatatttgcaaaggtgctggccgtccaatatcggggtactggtataaggttgatgttaaagtcataacaaccaagcttgtacgtgccaggaggtacaatttctgtaatctcatatggaccttcctaattgggccccaatactcctgctattgggtctttagtattggccaagactcttcgtagtactaagtctcctaccttgaagcttatttccttgactttagaattgaagtatctagctactttttgttggtatgctgctaaccgtatttgtgaagcctccctacgactctctaataggtccagagactcacccatcagttggtgattactgacttggtcatatgtcattcattggtgggagggtaggtctagctcaactggcatcatcgcatcatacccataagtaagggcgtaggggatatcacgagcttctgttcttttcatcatcctatatgagcacaagactttgggtaattgttctggccagtttctttttgcctcttcgagtcttttcttcaaggtatccttcaatgtcttatttaccgcctttacttgcccgtttgactgggggtgtgagactgccgagaagctcttcactatgccatgtttaatgtagaaatttgtgaacatgacactatgaaattgggtaccgtttttcagataccaatttttggggtaagccaaacctacatattgttgggttttgtgccc

SEQ ID NO: 37969 - DNA, 3002 bp, Cannabis sativa
acattgctcttttgtttatggcaataatgacctcttgtattaaaaaaatcaatgtctagtcaatacatatgtcacacctaattacaagggtagggtgctaccattgtttacaacctacccatctttggaataataatattaatatatataaatgtcaacattataatgataaaaaattccattacataagaaaagtatgataaaaaaagttacaaagacaaagtaccattacacatggtccatatactctatgccaagttgatttaggaaactacatctaaaagagtatagaataacaaagacaaatacaaagtaacaaaagattcatccaattttcaatatacacacacatatatatatattcctgaaaatgacaatcctacccatgctctctgtacaagcaaaagaataagatctgtaactaactctcaatatcttttattccaatacatctgtgttctttctttctctaaatcttcacacaattaacaaaaaaattcaattcaaatatgcttcaattttcttccttagtcaatttattgtccttttattcagtatcaaatgtttgtaaaccagaaacagtggacttctctattgctttccaagctttttcctaagttctgtggaagatatatcgatacgaaatttctcttcgggtattgtgatgaacatgtctttcaactcttctggaatatctaaatcatcaagcacctatagaattgtacaacaataagcattggaatttcccacaaagtagttattttcaaagcttagaatagtaccttgaaaacgccatctacattacgaccacccacaagaaaagtgcagccggttgctttgcatccattaagaatcatcaacatcttattgtagtccccatcatagtatttgggctagaaaatgagaaaaaagatatgatgattataatttgaagttcataaaatgattttgttgctgataatatttttttgggaccacaactaatgcaactaattgtattgagaggaccatacgttaataagcctggctgctgtgtcagcgccaattacgaaagcactgcctggaaatatttcagctttcttataaaaataaggttgattagataagattatcgtcttacctgacacacaaagagaattaaattaatacatgtaaactaaaataagaagctgagctcacttaaaaaaaggttcaattataaaatatgcagagtatgacagaaggattgggattagcttaagtgcaaagctactaaggtatagtcaacgcactatattgtcatgccaaagaaactaaaggtcacaataaacggcatgttgtaggaccaagatggaagaaacacaactagactcaccagccttttcaaactgcttaacacgatctttgatttgagatattgaaagtgggggtttgtcagcattgattgctgatatttcaaagcatggatatccacctccacatatgctgcatgagaataattaaccactcactaatattttcagaggttaaatgtcttggacatgcattactacattaatcctccttacttcagaagtgttaagatactaaaactctgttttattatttcgaagatagaaattgagattctgaagatcaaaagaatttgagcttgaaaacaaattcatacgtacctggtagcaacttccaaaagcttgaggtgaccttcatgcagtggattgaaagaaccgggtaatattatccttctttctccgtttgagttatctgcgacaagagatggtaatccagtacatgattatatgtagatgcacactgatgaaggattgatatggattactttctgcttttgattactggtgatgcgtgttttgtgtaaggttgttttcccagtaaatcattcagctattgatcaaatcatagaactaagaattttcttccagttttttcgctaatatatcatatatgtacattggtttggttgaaaccaaggactaaatcataccttttgaaaatggataaaccttgaaacttatttccccatttataagttgctctagctcttgatcttcactgaactctctttcttgttcatcagatacatcagattctattaaatctgggacaaatgttcctggtactttgcatgcatttgcaattgcctgtaagcaacaacattataacatagccacatgagaaacattgtcaaaatataagattttcagatttatatttttttatgaattttatacaaacagcctaatcattagaaatcatgtttaagtgtaacacacataccttcagaaaaatttgacttgacagatgatcttcttgctctctggttcgcaaaccctaaaaagatgagaaacacaatagctgagccaagttacacttcgcaattctacttgttcaagtatggattgcataaaaagatagagcaagaatgatcgtacaatcaccttagtaaaggtaactgtcgatatacaaagccggtcagatgttcttgttgacaagtaaaacctgttaatagtttaaacaacagggtaaatagctagtcaaaaactaaaaaatccgaaaattaagctaatattttgtgcaacatttcatttcagactatgagactaacatacatctcagtcaataattaaccaatgaatatacaaactgaacaaaaagaataaaaaaaatggcaaaatcaagtactcaattttactgctttctatacatatataacaaagccttgacaaatgcatcatgggttgggttcagataaacagtttcaaaaccataaaaacaagccaaggcaataacactagattcaatccaatcaagataacattctcatgcatgtgtatgttgactgagatgtacatgaacttgtcacaaaccgaattttacataaaccatacctgtgatccccacgctttggaggcatgctagctaaagcaccagtaaaacccacaccaagaactggagaacctattgcagaatcaatattatagtgtcaacatactaactacatagtt

SEQ ID NO: 37970 - DNA, 3275 bp, Cannabis sativa
tatatacaactgacatttgcaaaaacacgatttttcatattttaatggtcataacataccaagagctcttttgataaattacattacaacaacactaacacctcattaaattttgtccaattatatagagattgacacaaattttaaattttatgctacattaatttaataaagttggtaatactaaaagtaatcaatcattcattataaataaactaagctatatagtactcatatcatgtgctctactttatttttaaaatatatcagtatttctttacctcacacttttatagaacatcatatatcatattccaacttttttatattttcttttacttcatttaaataataataaaaaacaaataattagagaaaaaacaaataaagagaatacaaaaaaaatatataatttagctcacatataaaaagtgtagcacatttagttaagctttgagctaaaatagctcaaagttaaaatacaatacattttgacttaacattatttgaatttttagctacatttgacatgttcagctattttagtgctatggtaaattcatatacattcaacataatcaaatcaccacatgtttaataatctacaaaacaagtaagtttgtagctaatataagaaataaattgtattaagtactagatgtcaaaggaacccaaactaaattatcccatggaaagaaatggcaaacaggggaactccttggctcaatcccgagcactcgaaacgacaagtgatcgcgatcccaccgtgaagtatccatatggcaaatggcaaccgcttccaccctctcgccattggctccctcaagtgacacttgaaacaccttgttttcgctctctttccccgggctatggcaatagaaaaccgcataaggataaggcattgtatggcacccaagcattatgggagcgaaaacctctttaggttctctcgaaatggtgtagttttgcaactgcgtgctagtatttttcaaaggggttgtagtcaaaacccgaaatctaacaccgggcccaaagagattcgatgtaaagtctagcatggattctaaggtgctgacacagaatctagtctccccttggataggttctagctcacattgcttgagggtgtactctatggccttagcttgaggtgattctttggggaatgagaaaaaatcgaggagaaaaggaagttttgatgaagagaaaggaatggaatccgattcctctcgggtgaggaaccgaggggaatgggagaggtttttggcagggaagtatatgggaaacgtattctgaattttgaggtcctttggtgtgaagaacactttgagtgaagggtcatccattgtcatgtgatgccctttggaggatgaattgatgatgatgcttttctttgttccaattgttgtttttctgccacttccatgctctacacactgccaaaaaatttagaggtttactactaaacttgacataattagaagtgataattataacctcctattataatcttttagttaaccttcacgctcgaaattacatgccaaaatattttttatagtgtaaatttttaaaaaattccgaatagtttacactgccaaaaaacagagttcctgatattctaatttaccacgtgttttcaaaaaacttcaactgtattttcagtgtactgtaaactatttgaaaattttcaaaaacttacaaagatgatgtaagcataaccatcatcgtcatgaaaaaatatattttgaaatgtgtttttaagcacgaaaattgactaaaaaattataattgaaggttgacaacaactcctattcatactaaaattacacacaaatttgtacaagtaattttaaccaataaattgttaagagtaacttgattactcttaacaatttggtattcttttttcactctacatacatagaactaagaaatttgagaagaaaagtttaccaatataaaaagtgaagcatgcaataagaggcttgaaagtgttattgtaattcccttatttgttttcatcttcttcttcttcttcaatccctgtctttccttttcttaggtgagaagttatgagctttataaacttatccttctgtgataaaacgtccaaaaatcaagctcaacagtttttgttttctataaatatatgcacacacaataatataccaacaacaaatgaattatatattacacattgagttgatttaagacatttaatagaacataaaatattttctcaaactcaaacatttaatagaacacaaaaaacaatgaaacaaacccaagattgaataaaatttggatgaggagtttttatgattgcaaagggccaataaaaaagttaataatttgtaacaaaacagaagaactcaaatgggtttggcctgaagatcaagaaaatccatttagaaaaatcaattaaatgaaagaacaataaagaatatggcttatggcttacccatgtaaaaaagatcagaaatttatagctctagatgaattttctctgcaaacaaaataataggaagataaatttattagaaattagtaagaatcaaaatgaaaaaacttggtaagcatgaagaaatggactgaaagtgaaaccttagactttgggcttagatgaaaaaaggaaagctttgaagaggcagagatgataaatattgttgagagtatagaaagaaaacataaataaaattgttgcagaatgagaattaaaagagttacaaaggtttgactttgagctggtgggtttgtttgttggtgagggaaaaggttgaagaagacagaagaaggtttaggaaaaatacaattaaaagtcaaaaccattataataaattgggaaaatgaggataagtttttttttttttatttaatatagtgaaagttatgttatattattttaatgaaaattattaatttttttaaaaagaagattttattcaatttagatatctttaatagtttaaattcattgaatagaatacatattttgtaagtactaaaaagttctccaatctctccattctctcttaaggttttatctctttctctttagctactagctgcaagttctttctttgatttttcaactagggctctgtcaacttttcttgggcttcagcatggctctggtcgggtgtgagtgcttgtgtttgtgcacacatgatcctcttggtcttttctcgagtcgacaagttgtgtaactctatcgaagattcgacaatctttttgaggttctgtgcttccaattaaaggtggtgttatcagat

SEQ ID NO: 37971 - DNA, 4888 bp, Cannabis sativa
  modified_base (3781)..(3782): a, c, t, g, unknown or other
  modified_base (4637)..(4650): a, c, t, g, unknown or other
tattaaggattgtttaatgttattattattacattaatatttattggtgttttaattttttttcctagtgtacctctatataattataacctctcaattagataattttcttagttccaagtgtattctttgatagaggttctactgtaccttgtactcttctctaaatcaatcaatagattcaattctctgttttctattcttgtctctctctttctataaaacttaacaaaaccaatgtaaaataacaaagatcaaacaaaggagcatttaagcaaccttaacaaaaagctttccggtaaccctatgtaaaaataacaaaaaattgaaaaagagcaaccatgcatttcagaatccttaacaacaaccgttacaacaatcctttcaaaaaacttatgtaaaaataacaaaaaataataaagaaaaaggaaataaagcaaccctatgtgacaataacaaataatgaaaatgaacaatcatcacaacaaccccttcaacaaatttatgtaaaaataacaaagaagaaaattgaacaacccttacaacaatcctatatgtaaaaataacaacaaatcaaatagaacaacccttcaataattttttttactaaatttacaaaatcatatacaacaactcaaaattaatcttacaaaaaaataaatccaacaactttacaaatgagttttataacaatgacaacaacttattattaatcgacaaccttatgtaaaaaaatttaacattaaatagagcaaccctttcggtaactctaacaaaaacattataagaaagggccatgaccatataaataagaaaaaaaaactaaaagaatcctaatagcaacacttacaacaactgtatgcaataagaacaaagaattgagaataccaaaacccttttagcaaccatagcaacgacactaacataaaccatacacttaaaataacagaaaaaacaaatacaataatttttattgtaacactttcaacaaccccgcgtaaaaaggaaaaagaatcaaatacaataacttttcagcaacacttacaacaaccatatgtaaaaagatcaaagaaacaaatacaacaacccgaacaacaatacttccaacaatactatgtaaaaaaattgaatacaacaacccttttagcaacacttagagaaatacttttaacacctcatgcttctctcgtctgtacgaccgaccaacactttttggagaaccttatcaagggtctcacatctgtccaatctcttctatgcttgtcacgtgtcacaccattttatgtcacatcattagggcaattttttgaaataagctattactttgtgatagggttttggtaattggatataagctgctttggtgtaatgaaatttgtaaaatatatatataaatcttgtgtgtgtgttttgtcccacattgcttatgtatgagtactttgtgtgatttatattacatctagtaactaccaaaccataatctcatgataggatttttgtaaaagatattggcgaaaatactaccagaaatatatcgtttgctacacttaacccataaattaaatttttgagagtgcaaccctccaccaaactccaattttgtttttttttactattatattcttataattattaaaactgtaaaaataattattttaaaaaaaaactacaaaattaaaaccctctaatttcccatttcttctctggctcattctctctatctctttcccttctccaattcctctggccactgcatagccatggtaaggctacctttaacccaaacaaattccaaaatccaacaacaatttctctacctctttcaggtaggggtgaaaatcgatcggttatggtcggtttttacaattttataaccgaccggtcggttacggtttttatgttacgaaaatcgtaaccgaagaaattataaccgtataaaatcgaccgtacagtttttggcagttttcggtttggcaattttggacggtttttcgcggttttgggcggtttttggcagtttttggcggtttttggcaattttttggtttaactatttttttattttaaaaaccgaaaccaaccgccatgtcaaaaaaactaaaaccaaaagcgaccgcccaaattcggtgatgacgtggaactgaaaattcagttatggtctgatcggtttgatggtcggtttcggtttatcggtttttatgaacacccctactttcaggctcactctcctctatcatgtctatttttttgacagaaaagggcaacaagtcacaagttaccatctccaaccatcgatcgtagaggacaaaagagttgacacaatctacactaggtcaatagcaatggtgggcacctcgacgataatcgactttcatttctcatatcgacatggggaacctcatatgtgattttccttccatatttttagtagtggaactctaagtaacaagttcgaattgaatatctcaactctcaaatttgggactttgaggagcagatcgatggtgtatggtattggtattgttgtattgatttttcagagttggattttcttttttgtttaaaaaaattattagaggaaatatgagctaatggtaatggtaatatggtggtgatattggtggggatagtggtagtgcaatggtggtggatatggtgtgactgtggtagatacttgcatagtgaaggtgacagtgatgatggtggtggttttagttggggctaaatatcgagcgggttgatcgggtttcgtgtttgtaggttttgggtccaaaaaaatggacccagacccaacctgcgagagggtcaggttggcgggtcatgagttggcaggtcacgggttgacctagtcaactcggtcaacttttttttttagaaaaaaaaaaactcaaattctaatattctatatggtttttttctttatggaaagaatttatataaataaatattttgggaacatttttctttttttttaaaaaaaaaaatagaaattataaataaataaataaaagaggaatgaatcttgttgagttgttgaatgaatgtacattgtatgtatgctattgctaattctcttttttttctttaatgaattaacgtaaacttggtaaatttcctagaaattttattgagctgtgaaattcataataatcctattttatttaaatatttaaattttgaactattgaagtaataatttaaataaatttaatatttaaatttataagtatattgttttttttaaaaaaaaaaaaattattttttgcttattaatttttgttttttttttcaaaaaaaaaaaaaaattattttatatggttttttttaagtttagtgacaagttgttaaaataaaactttgatgttaatgaaaaaaatttcatattaccgtaaagttgaataaaatatttgtttataaatatataagggatattggcagctaaactatctgaactttaaactttttaacactttaaaaattaatttttcttttgggcaaaactacctaacctcccattccgttttgctttgtacccttccatcaaaaaattacagttaagtgtcaccgtagactacacacgtatatacacttgtacacgtgagaaatttttagtggtccatgtaattaaaaaataactataaatatttaaaaaaaattaaaaatcagaaaaaaataaattttaaaaaaattctttttgggatattggcggctaaaccatccgaactctaaacttttttacacttaaccacaaaaatcaaaaataattttaattttttttttnntttttttttctttttcttcttcctttcataaactttctgaaatcctaatctcttagccctcccttccaaacctctctttcgctctctcgtctcaccacccaagatctcgttaaagccgaagcacccatacctcgccgaagccatttgccctctctttctctctctcgatcttctcctttccagaccctctcttgctctttctcgtctcttccttctctctcttcgtggtggtcgctggaagggggtcgaactgaacgaaaaaaacagagggggtcagagaaaaatcgaaggagagagagaagatagcatatcggggttgggattttttgggtcgtgaggtttagttgtggcccgtctaacatgggatggtcggagaaggccgacgttgtacaccgtgagagagtgtgtgagaggggactcggagaaggttgggttgtggggtaggtgattaggtgctagggttttttcagttaagaagaagaagaaaagaaaaggaaaagctttgaaaacagaatgggagtttatgtagttttgcccccaaaaaatcaatttttatggttaagtgtaaaaaaatttaaagttcgggtggtttagccgccaatatcccaaaaagaaaatatttttaaaataattttttattatttttttatttttttaatatttataattatcttttaaaattaatattacgtgggccactaaaaatttgtcatgtgtacaagtgtgtacacgtggacagttcactatgacacataactgtgatttttgaacggaggggtacagagcaaaacggaatgggaatttaggtagttttgcctaggggtgtttgcgatgcgggtggtgcggtttttgacnnnnnnnnnnnnnnaacccgcacatgcggttttttcaatttctcaaaccgcagtcgcaccgcgaaactaaaaaactacaaaaccgcaccgcaaaaaatggtgcggtacagtttatgcgatttctgcggtttggactatcattaaataattaaactatctcaaatacaaataaatttgagcaacacttgtcaaaaataccctaagacatgaaaataaatatgaaaaaaagtttcaagtttcaacaatacaata

SEQ ID NO: 37972 - DNA, 2195 bp, Cannabis sativa
tttttttattttcttttatgtaggacaagcagcccaacaagtgaaagtaccagttcctgaaggttgcacagatccatcagcagcaaactacgacccaacagccaggagcgacgatggtagctgcgagtacaaactctaaagcttctctgcctatatatcttaatggttgctgaggaattaaagatgttagtcctatcttttgttggataatttatcacttttgtcatttatgtaatctttggttttcatcttcatgatcaaatgagttatattcttggcatcttttttctcttctttattgtcatttcccatgaagtgagttatctatctacattccttactatgatggatgatgtctaatagtatttctactaagcaaaaacgacatgtctggtttttcaagtttcctgtcatctaataatacatcaaaataacaatgatggatagtttaagacctttgatattatagttaccacaaacaaatatcattaagaattctaaactggaacataatatttcaaaatcaataaatagtacactactggtacaattgacattttgattctctagcatttcaaaattggattatggataaatactaagcataattaagctttaacaaacaatgtggttttgccaactattattaatggtgcatgaaaaacagactctttccaagtagacatgatcaagatagtcagttctacaccttaatttcctaagaaagaagataatatatgaatgcgtaagtaaggtcaagaagattattaatcgtttattattaagagtacacaagtattgcatctcccacttcagtttgtttggagtattcttccatgattttcctcctccatggctgcaataacagaaaagtcaaaaccaaagaggccatgtaactaagttggactacaaaacactaattattgaaaagggtcaatcatcaagttaccttctccggcattggtagagttgggaaagtgtgatggtccttttgtggatgaacgagttagacttgcagattttgttggagaggttactgctgcaggttttgctgaatggcttatcacagcaggtttagatggtggagaattttcaacactactacttctaagtagagaactcacagcctctctcaccttgtccacaacactcatattttcaccagtagtagttttcttaggactaactgcctcagatatggctcgtgaaagcgctttgtcatcttctcctggctcaaatttatgcaacaggtactcttttactgacacacccttatcccatactagcttatcacccccactaatgcttacatgcttttcggtttttggagccacggggcctgagaatatttgtctggaagaaacaacagcagcaggggctgaggaaggttgtggagatacttgagctgaaaatgtttttgatgttcgaactgaactagtagtttgtggagatgaagggatggttgaagtgtttttagtcagccgcgaagcttctgtgacgatattcaggcttggaatctttgaggcgattgattgagttgtctcgaccactaatgcataggctggtgccgacttctggctctctgtttcagatactgtctttgaataagtggagagcttgtcattggttttagttgggattggtttgatactaggactatgatggtcctccttattcttacttttgttgttgttgttgttgttgttgttattgttattgttattgttgttttctttcatggagccagttgaaggcaatgcatgcttctctgaaatcacaggaactgctcttggatgctgtcttgcagtctccttgtaactctcaggggccagctctgactcatacactgaaaataaacatgagatttatgtaagaatagacacagcagttaaagtacaggtttaaatgatgaaattttatagaataaagggcaagataagattcatgagtttcgtttcaaaatcacttagcaaccaatgaagtaacacatgaactaataactggagtgagagagttaataaaatacttaatccaatcaaatccaaccaatgaagtaacacaagataagattcatgagttttgtctcaaaatcacttagcaaccaatgaagtaacacatgaactaataattggagtgagagcgttcataaaatatttaatccaatcaaatctaaccaatgaagtaacacaagataa

SEQ ID NO: 37973 - DNA, 2406 bp, Cannabis sativa
gagagagagagagagagtttaatggagattttagcagtgtcatattatgatacagcataggaagaacaaaagctagatcccctcatgagttatctactagagagtgttcctaaccaaatgctacaacaaagagaactgcagtatgtgaatagggttgggaaatatgtagatcaacaggtagaacatgttgatgtaccactttgtgataaaacttatgatcataatacaaatcacacagaatctggttggaaaagttgttgtcactccctgcagttggcactgaagaaaggaggaaagaagaaagttggagagacaaagaggcggcgagagaattcacgagtttctttacaaggtcatggcgggcatgtttcacggcccatagaacgaaaggagcgtcacaacaaggtgtccacctctagaggtccaagagatcggcgtgttcgactgtcagcttatactgccatacagttttatgatgtccaagatcggcttggctatgatcgaccaagtaaagctgttgattggctcatcgaaaaggcaaaagctgccattgcatcccttgaggacctgcctggccaaaactatgagttagctgatttttctaactctgtaacacagacagagcaaggagtatgtcaagagaaaataaatcagcttcagcattaccaaggttgtaatatagaggcccaacaacctctgaacgagatcaccatgaacaatgaagtaattttctcaatggctggtggtactacatcattttcaagccagtaccaggactgccttactgaaaataatcttcagacttccaaagcctcgaatttccattgccaccagatgaatcccattgatttcgttggagaactcagccgtcctacaaatttatcaaccttgagtacagttttcatggatttgaattcttgttcattcaatgatgaagaagagtttatctttaactcgttgcctgcaatactgcagcagccacttctctgggaagaagagttttttgctcagcggggaccccttcagtccagtaatttaatctcagttcttgcttcagctagtcctccaatttctttaaatggtcactcccatactcaatcaccaaattcccacttatattcaactactggactttcctctggttgatttcttgggatttaaatctcaaagccattatgaagagcagaagcaaaaatgctgtctcagaaaatgtaatccaagtgttgttcttcgtttttattttcagtgatgaaaatcaccttgcagtcaatatcttttctgaggataaaaaaaatcaatttttatgtgatgtaggctcaataaggatagaaaatatgggtaatgattgtacacaaatttgtgtttttctcgactcattagttgtcattctatctcctctgtgatatttgattgtttctgtttatcttttattcgtaatatttgaacattctgtcacacttgtcttatgaaacttcgttgctcccatacatccaatataatagaaagaaaaagtctactcatatattaatttcagctggtgagcacttaacccctcccccccacccccatttagtggtaaattggtaatgaaacatcgtaaggtaccgatgagagagcagatcctcgacaatttttgtctacttcagagaccacctatgttattaaaaggcccttaaataattgcttccagcaaagaaaatgtaggcttttgtcagagcattggcaacatagatactaacttcaataatagaggggcattataatttagcgaagaaatataactattgtctctgacttgatgtcttgagtgaggcatatgtcaccttttaaggtttatattaattgaatttctctttggcatctgttcgatgaagctggaagctggttacttggttaattgaacaaaaaaacaaaacaggtgacaattataatttttttcattctctccaccccaagacacataacaaggaaaattacaatgtaattgtcaattttatggtttgtaacatgagatagctcaaagaaaggaatagagaaatcagtgtgaaaacaaagaacaaaatatctgccactcttaacaaatagattttctatttacattacaaataccatattgttttgtaggtatacaaagtaaaaatagaaaaatgaccaggtcaatcccaaatccaggtcttttcttcattttgttcttatcaagccacagcatatgactgtcacaccactccatgtacagaaaatagaaatacattaataatgggaataaaaaaatggatcttctcttacttcctgcaatttcagtgatacaatataaaacccacattttggtttgctaggataccaactcttctttctttatatttatctcttccactttattgctttctccattttcaacaagtttct

SEQ ID NO: 37974 - DNA, 2041 bp, Cannabis sativa
aagtttcactaaggaaaacaaactcgggtttcttttggacacaaatgtcagctaggaattgttgggcccgtgggttcccaagcccacggcaattccaactgattgtacttataatgtttggtgggcttggagaccaagacccaccttgtccaagttttttgaaattgtcacatttgcagaattgttttggttattaccaacatcagtttccataccttcttttgtcaatatcacaggccccctagaagtaatagaccccatcctttttcttttcaaatcagctatttcaactatctcctcagttgaataattggctgtattttcattgaccaagataatatggtcattaagaggcataatctagttcccagattttcgggattgagtaatcatgggatcacaattggcatcttggactgattttttggcattgcattaacctcaaaggatgctgttgcagctgtcggatttgcttctggggtgtgcctcacgtcggtcttccttgccggagcgaagccatggagaagtagtcaagaaactctgccgcctcataggagctttcatatctaagctatatggttttacaatctgatcagcaggtatgtcataaaccttatcacaaaatttctcggcatggcccatgattctacaaatgaaacagaaagttggcactcgttcatacttgaaatgcgcataaaaagcttcaccattacaactttgaaacttcatacgtcttttaagtggttcagtaacattaacatttacacacacacgtagataatctcgccacaccccttggaagttgttcggatcaaaagtgacgaaagtaccaatgtatcgggctgcttcacgaagagcccagtcaatcttgaatcccggcttcaagtcgtggatttgcactcacatatcaagtgtagtcatagtcaccattctaggattttcacctggttttagtatttcaaggagcatttgttttcgatcataagtccatggattgccatcaatcaccctttgaatgtctatctcatggtaaaactgaaataagaatctattttgatcaagaatttttatggtaatccctttgctgggcttccataaatcaaccataatattttgaaaaatctgaaaatcttagactttccctgataatagccggcctattagacaccacctatcgtggtttcttcctcccctatgcattcatcatcaaacaatacctcatgatattcttcgtcttccaaacaaatatcaacccattgctttgtgagatgttcccattactagaagatgccattgaatcgtgattagaacaatacaagaaaagaacaagttgatacaaatatcaagcactctcaaagatgagagacaaaacactctgtacggtgagagatgaggtgtgactttaaaatatatactatatttttagattttaagatagacgaggtgtgacaaaattaagtgaaatgtgattctttctcattaattttgtctatcttaggagacccaattgtacttttttttttcttttcttaatagaacttgaggcttaattgtactaataataataatttgacacttaagaatatgttaggcaacactaatactttttagcatgtagttgtctattatcttaaaaaactttatatatatatttttttttataagtaaatattttattgaaagagaaagccaactaaggcagcatagtaaccataaagagagccacctgagccacctctttgacaaaatatatattctttgacaaaatgtatatgctaaaaggcactacatatttttgtggtgatattgatgtaattaagtattagattctacataatttaatttaataaatgttataaaatatcgctaacctctagtgtcttataataatttattttaatcaattttttgacaaaaagatgtcctaagcactccaagagcctttctaatttctcaatttaaatttattttaagcttttaaattacatcctaaataaattctcaacatcatttaaaaaaatattaagaaagtgaacaaaaa

SEQ ID NO: 37975 - DNA, 2786 bp, Cannabis sativa
  modified_base (2746)..(2760): a, c, t, g, unknown or other
aatcagattgtaaagggttttatttagggcacaaaacccaacaattaaaattatccttattttaacaatttatatatagctaatatattccaacaaatgactagttccatttgtagtgctgacaatgccgccaatttcaattcgtctcatgatccatcacttgattcacgaccagctgtgagtcactgaggcattaaactaatttggctttcaaggcttcagcgacccgcaatcctactaacaaggccttgtattctgcctctttatttgaagcattaaactagaaccttaatgcataatgaaacttaaagttttcagaagatatcattataacacctgccccgagccatttttattcgaagcgccatctacaaacaatttccacgcctcctgatttgttcatgttctggagtcttctccaacatttactccttttactagaaagtcggctaaagtctgaccattaatggtggctcgaggatgtaatgctatttcaaacttccctaattcgattgaccactttatcaatcttcccgatacatcaggttttgataacacttgttgcaaaggctagtctgtcaaaacattgattgggtatgcttgaaaataaggttgcaactttctcaatgcatgtaccaagctaagtgcgagcttttttttttggaacaagaaagaaaaattattccaactaccactgaacaatacacactgcctagcagcaaaccaacattcaaagactatttaaaacatccattacatatttgtctctagaattttgaattgacacggtgctagagtggaatctagccttgagacaaaacttaacctgattactcaacattttaatagaataacaaactttatcaaaaacacaacaattacgattgcaccaaataacatagacaacaactactatgatggtcgaaatcaacaaagttgttatctcattcattttctccactgagacaagtaaccagtcattgaggttagaaggccaatcatattttccaaaccaagaggaaatctcagctagcagtagctgagagaaatgacagccgaaaaaacatgatcatgcgattcaggaaccaactcacagatcgagcaaaggacagaatccagagtaatatatctagcaagcaaatctcgagtaagcaaattattattaactgcttaccaaagaataaactgatgctttggaacctttagcttatgccaaactatcttatgataggacaatttctctgccgtgagcaaagaaagattaaacttcttagctttgaacttccccgaacaaccagtagccaacaaattatctttgttgataacctctctcaacttaataagttttttgaagtaccagcttgtatctagacttgggttgaacgactagaaatctcggttcttcatatagatactattaatccatttaatccagaggcaatcttgtttagtagcaatggcccaaatatacttagccatgagggcaatattccactttttgcctttgctaaacccaaggccaccatggttcttaggtaagcacacttgactccaagaagaaaattgcatactgcttctattaccagatataccacataagaagtcacaacaaagcttatcaattttagaagtaaccttttacgaaaggataaaaatacctatccaataattccttatacccagtaagactgaatggaccaagagagctctgcccacaaaggaaaggcgacaacttgcccacccatgtaacaccttttggatcttctctacaattccactacaatctaaatctttctatttggtaggtctcaaattgacaccaaggtaccttagagggaaggaacctttggtcaaattcaaggacaataatagctgcctctaaatactcaggtctataccaaggtaccttagagggaaggaaccttttgaaaggttggctgccgactcagtagtacaacaaaaatcctcaaaggatttttgaatgattctcagagaagcagaattacctttgctaaagataacaagatcatcagcgaagcagagattaacaaggttcagggacttattaaggggatggaagccaaaacccttcattttggacgcttgaagaagaagtctcgtgaggtattccatcaccaaaacgaacagtaatggagacatggggtcaccttgtctaagatatttctcacccttaaaggagccatgagctcaaccattgagtaacaaagagtaagaggttccccttaggcaagtcacgatccttgaaatgaatctagtaggaaaacaaagacccttttgataaatctgccacaaaatccaaatcaactgtatcataagccttgcttagatcaatcttcattagacaacgggctaagatatttttcctgtcgtagcctttgagtaaatcttggaaaattaagataagtgcgagcttctcaagtggagggtaccttgattctgaccccgataatcgtttacttatataataaactggttgctagttgtttcccttcctcgcactagcgctgcacttatggcatgtttcgagatggctaaatagacatacatacaacgcctctctagttattggttttgacaatactggtggtgttgaaagatgtctcttgatttcttggaaggcctgctcacattcttcattccactcgaattgcttattccctcgtaatacattcttcaagcttccattcttcctattagagactgaactgttggaaatattttaccnnnnnnnnnnnnnnntaccatgtatgtttcattaacatcct

SEQ ID NO: 37976 - DNA, 3309 bp, Cannabis sativa
  modified_base (27)..(54): a, c, t, g, unknown or other
tatgatatataatccaattcaatatannnnnnnnnnnnnnnnnnnnnnnnnnnncggcgttccaaacgagcccataaagtattatctttaagaattataccattaaactgccaacaccataccatttggaatacataactcgattataacaagtaggaacaacttaatatagcttatgatggaaaagtttcaactgatattatgttttctacttgaactatatgaaggtaaaaagtaaagttgaaagtagtatagaaaattagaaaagaaattttctaaccaaataagggaacaaacacttacaaagagccgtgaactaaattttagatgtttccgacttgagactaacaaaaggagcataagcttgctgttgaaacaagttcgatctcacatgccaggaatgtctccaagagcaatccgagaacacacacaccacagaatacgatcactcaatctcagggaaaaattacttgaatgtgtttaagctttattactcaaagtagcttatggttaaaatgtgttcaacgatattacacagtaaagaattagaggtatttatagaagaagtacctctactaacataagcctagagaagagaataacagacttaactaactcctaactcctatcagctaactgtccaattgatacaaaactaaaggaaccgtgtacagaaccataggcatactagatctaacacttgcaaaataaagaaatcaacggagaaatatgaatatcgagtaaagctttcggtgattagaccaagaaagtcaatggacagagagccacccaagtaaaagatttagagatatagctgaggacctcaactattgaaggagagaaatatatagaataaaatgggtttgttgtaataatgataataataatagaggccctgctatcctccatatgagtcaaaatccaattgggaaacttcaatcgagttgttttggtaagcaacatcgatgaatttggtatgaaaacaaaagtcccgagaagaatttgtataaaggatatctcaatcccaatccaatgttagaataattaatataaaaatattggaacagtaaaaaaaattgttgcagtatggcgactttaaccatgagaaagaaaaaaaaaatgaatcacaatccacagacataaacagctgacaaataaaaaatgggttaaattagtatataagatagagaatgtgaatgagaatttgagatatatagaatgtgtgattgggtacttagtatgcaagtaggtccctattcattgtcaatgaatgcaatggttgagttgagattatgtttgtaatcgacttctatcaaggaacttaacttttttttttttgaaggaacctaactatttaattggtaatttagaattttttttaactcaacatagaattactaaaacaaatatttgtacgtagttatattattatgaataacttttatgttgaattcttggtaagcgggttgtgtcgtatttaactcttttttttttttttcatgtggtgtattcatgtcaaaacccgtattgccgcacctatttaatagtgggtgaaattctccaaatcatgtcttagatagggtaaaacaaatggagggaaaaactgaaaggggacacaccatgtttcattccattaaaggccacttctcattagtaaatctgacctaacctatactctacactacatgaaaggatgatatgataagagcaacaacacacatacaataaaactaaagataagcttattaattagcaacaaactaataataagcaaaactgtattataagacatgttccttcatctcaaacaaccaaaaactcaaaaacaaattggggaaaacaaaatctgtaaacagaacagaacagagcagaagtgataagttaccatttaatgagggaaccaaagatgaaatgctgcataatgggaactttctccaaaacctcaactttatacatcttaagcaaaccactgttgaccttgttccagttagggactccactgatatcatccaacaatggagaatgctctgaaaagggaccctttttcaccttcttcacgaaagcaatgcaagaaagataaaggtactcatgggagaaattttccaatatatcctcattatgaatcgatttgggtttcatgtacttgtggttaatcaattgagacgacccaaaaatgtaaggaaggaaatgataatcgtctaaaccccaaaccccatgagaaccagcaggctccaaacaataaactgtctgcaatttcctcatcaaagccatgtactttacgaagattctgatcactactgaatcataatcctcttccttgatcaatcctaatctcgctaagcaatacaaccacgccgcaaaattggtctcgtgaccagtaccatagtcgatacggctagaattcccaaaactatcagtgaagtaaggaacgatctccaccgttgaagatcggagatcatcggggaggaatcgaagcattaggttttcgctgttttccaccaatcgctcctgccaaaccctgtacgaaacgttcccgtaccgcgatttcatctgagtaggaggaatttcatcaacccactggattagggtttcaagaatagagacgatggagtcagtgattggggattgatggtgaacaggatcagaaatcttgcggccgcgtacagattcagagagagcgacgatgaaaccaaggaagttcttaccagagaaggattcatggaatctacggatgtcttcaggggattggattcgcttcgaaggggtttggaattgaaacggcggcgtttcaatggggacccgttgggcttggggaactggggtgaggattatagcttgttgagattggtttggagggaggtttatcgccggagctcgaataggacggtagtttgggggagagatttcagaccatggcggtggagcattgaaagcggcggtggcgccgcatttgcagcaggtgggagtagtgatggtggtggtggtgtcatctgtggatgaaggtggcggtggggatagggtttgaggggattcagagcagtgttgatgatgatgatccatggcagagagagtgagaagggttagctaagcttagcttaaagttcatatatatatgtttaaataagggaattgcctaaggagtaataatctctccttttttcatgttgctaaaattgctaaggtcgagttggtttagtgaaaaaaaaaaaaggtaattaggatttttgcagctaactttgacatgtacaaaattaagttttttgaattttttggcagttaaattagtgagattgttggatttaaggactt

SEQ ID NO: 37977 - DNA, 3654 bp, Cannabis sativa
  modified_base (1879)..(1888): a, c, t, g, unknown or other
ttagggtgttaaacaacatacttgagagtagatctaagatcctggtaaaataatttccaacaatatattcgtgcagtaatgagcaagatgagtttcattgaagatggatagctttgatccaaaattgcttattctctaccagtttcttatttatactcaatggtaaaagagtaagccatgttcaatcaaagaggtgtcttagacaaggagatccattatctccctatttgttcttaatttgatctgatagactatctaggctactacaattcgaggaaggagtgggaaatttaaaaggtttgtgattgacacaccaagctccatcaatttcacatttactattcactgatgaagtctcttattatgtgagactacaaatgactatgttatggctattaagagagtattggggccaatcacaaggtctttggacaattgcttaataataataagtcactaatgttattcttcccaaacacaacacaagctgctcatcattttttaaacaaacatttgaaatgcctattagtgaatatcatgaacgataccttggtctccctgcatacttaactcaagataagaaagaattattcagtgaggttagagagcgagtgtggcagaagttacatgcatggaatgaaaagcttttctcaattggtggaaaggtggtattattgaaagcgattgtttaatcaattcctacatatgctacgagttgctttcatttaccgtaaatattttgtcaccaattggaatctatgatggaaaatttttgttggggtacaaataaagatgcctcattagaaaaattggaaattactttgcaaatttaaatttgatggagggatagggtttcgttcctttatttttttcaaccaagctcctcttgtaaagtgttatccaaaaaaatttccaactaacgtggcatgtcaatgtaagccaaagacagagtataggtggagtatagccctgccagtagcgaataggatctccatgccaaatatagcgaaatcgtcaagcaacaactaaatggaatgaagtgagtccacatggggctatactaacatccctggccagccaagaaaagcctataggttgacgagggtgatcatataggccgtctaagatctgggctcaagctagctggcaaaaaaatgacttccataccaagggagcttctgtttgaccagtgaatttgaactctacaaggaaacggtgaacaaagttttcctcaacttccaaaaggctggcctccacatccaatggctggcctcctcttggtaaagctataatgacttgtaggatcctagtagacacatgaccggccaggttctggtaggagtatggccagccagacctcaacctatacgcctttgccacccagacctcccttgtaggtctatgggtggtcaagattaacttggcaggactctatgtacaacctaaaatgtagataacaaggtacatgtgaattgggcccttaacaacccaacaaactgatataaaatatctactttcaaggggcaatttattcttttgtatttaatcaatttaattgtaaatatctaagggtttaagttgtaaattagggtatagactttcctatatgaattccttaactctaacctagaaaacctaagtctaattctagcctctaagtgactctaagtctaaaaccctaacctctcttcctatgtctcttctacatgcccaaagggttctttcttcctctcgctcacacgcctctaaggcaatacatctctctcattattgatctgccaacttgactcatcttttgtatccatatagagagctgtataagatcccacctatagtgatctgaatagtattatctctaggtatcaatacaaccaaaagnnnnnnnnnncattacccgctaactaaggggaccaaacctctataaaaaatcattgtctcacttactttattgttcttgttgtgtaacacgtggaaaaaatcatattgatatgacctcgctgtcggttgatcactttttgaggtcaatagttttgtgctttcactaagagcgtggatatcatatttgatcaaacgccatggttaacatgagaagaatccaagtgcaccatctgcatctttaggttcccctccagaccagcagatgccagattctgatgttcatgtaacaaccacaactggaatttccatgtccactattgatgttgttaatcttgctattttagcaagcatcacgaatctggccactaaagctggcaatgatggcataaacatctcggtggatttgaacaattggcccctacctccaagggaggaccctccacagtttcctccaactgaaggaagaatcctcaggcggcaccacctaagaacaacaatctggtttcgtccctggtactatgtaggaaagacaagagtaggaattggtgagtctactgttggcgagccccacgtggacttgggagaagatctcgagttagctagagttagagaggctgtctttcaagttggcgtaaatgaagaaccaggggctgctaattgcgatatacttgcttagtagtgacgcaaattccgtaaagaaccgtgctcttctgattgcgatatattcgctcagtagagatgtgaattcttgagatggatggatgaccaggaatacattctttgatctcaccaggtagagttagattgacgcaatagagaggccaaggatctgataaggcggttcaactagagaaccggtgtaagaggccaggatctcgtcagagatccagttcaaggaagacaagttgatagatcagggagggtctatcaacaaaatgaccaatttagccccttaggggctaggatagttcttcccttgccaaagggaggacataccttgtctcaaaggtctaatagcgagaatagccagatcccagtaaccaacgacatggggggccggccagggatctcaggctcaacaacagccccgctatccatcttgtggccggccaaccccttgaagaagtccccatggccaaccaaacatctctagaagtccccatggtcagctagacatctctagaagtccccatggaaagccagacatctctagaagtccccatggcccgccagacatctccagaagaccccatcgatggccagagagcactccctccccaaggggagtgagtcacccgaggattaattttcaacagacaaggacagggagcaggttgaaacacccaaagcaacaatttgagaagataaattaatcacttcagatagttggatccaccaatctccagtactttgtgtgatctaccccatgtcagcgtaccaactccaccaactaggctagaagtgtgggctgctagctccttcccaacttagggctagccagccttgggtataccctctcccagggtagggcccacaaaaatctagccaattcgaggcggtacctcaatcaagaagggtcaatcaaccaggcatacattacatgctcaagggctagctagtctaaaaccttcagaacttgagctagacaagttaagaggatcaccattcttgggataaatccaagccttacccttgcccaaattcaagatgccgacttggaggatgtaagaagatcccctagtacacctgaactactttgagatccaaatagatctc

SEQ ID NO: 37978 - DNA, 2758 bp, Cannabis sativa
caccagcagaatccatgttgtcaatagaaacttgttggtgaaattcatcttcatctgacaaggaagaagttgagtttgttggtggatttgctctgcatcttttcaaagtttgccttagtgaaagactttcattttgcctcttgtattgcacattaggattgatattttcttgaccaataggaaaaccagcagctatggtggaagtatgcgtgactaaagccgagggagatggaattggattgtgtatttggctagtggtattaatgacaggaacggatatagtggtagggggataagtggcaaagtaattggtattattggaaatggaagccgtaggattaaaaatcccagtgagatcagtgtaattctctaaggtatcagtggcttgatgtctaacagatttgagagagctttttgtgacactagtagatggaataatcgaagacttatcaagatgggagggggcaaaagtgacaggctgctggttttggtacatattggaagtaataccagtaacttcagatatggggggccgattcaatatagtgttaggagcattgttaatattctcatcaacagcaggaacatgagaacgagaagtctctccaaaatgcaattgtcgtggctgaggcaaacctctaagttccaattgaggaattgctgaagtgagaccttttttagcaagcctagtcaacaaaggccatacatttcctttagagaaatccgtacgatagcgatcgtaaccagaggtaggaagtgcagatcctttgatgtatggttggtactctagatcaggttctatcccattatcaagtttttcaagatagacaaggcatttgttgaaaggatggcctataattccacactccatacaatattcagggagcctttcatatctgaaatctacccagaatttatccctaacatttgataaagaaatcatccttcccctcttcaaaggcttagtaacgtccaatttaaccctcactcgcaagaaaggtccccaaccttcgtttaaagaatcctcaaagacatcaatgtactctccaattatatttccaagagccacagccagagattttgttttgctgagaaagggtaaacgataaatttgcacccaaaatggtgtaaatttaaggtccatagcagtgaagtttttaccgatttctgggttatgcaatacaatatgatggttctggaagtgataaggctcacgatcaaggaccctaattttgtccccttcacagccgaaggataacaaaaacatatcagaggattccgaaacttttacaggaaatctaccatcccaatgctctgccatttgattcttcagtgtggataaccaaactttctttttggtaaggactctggcatacagaaccagatcgatggaggcagcaggagcattcacttcagtatcatggaattcaaagacagcttcttcatcatcggtgagtgtgatcttcgacttcatcttgttagttaggggatccattgatgagaatgattagaatgctttgaaaaccagaagtgtatcagatgtaaaaacaaattggaaacactgctacaacagggataagtaactgctaaaaactggagaagatgcagaaagttagaggagaaacatatgaataactgtaaaaccataaaggacaataactgccacagagcactagataaggcagacgctcctaattttttctctttagaataaataatatattgttaatgaaaactgttttaaaaaaatacggccatcaagttaaattatttttaaaaaataattttctgtttttaaaaaaaaaaaaaaaaaaacatgcactaattttttgtggaagattttcggtgtagttcatcttctctactaggcccagacccattaaactagcggcttctctacagcaagcaactgctaccaaacacttgtatatatataactggtcaaagcacgtcctacacaaaattcagaattttagataaaccaaaataaaaatttgggcccattttcgaatgtacgacatatttctctccacttatccactccttaattgggcccctcttcctttccctctccattatccaacccaacttgagaaactgcttataaaccttgctcatttcatagttgtttactactaagaaagaagagaagagaagagattatgggattctttggtccatttataaatgtaacttactgttctaagaatgacgaaatttctaaaaactgtgggttaatcactttgaagagatcagaaaggaagagaataaaaagaagaagaagaagaagaagaatgagactaagtgagaagtttgataggctccaaaagcttattcctggaggtcaagggctggaatcagatcaacttatgattcaaacaactcattacattatgcaattaaggtctcaactttgtgtacttgaatctcttcttaaactacatgatgacacacaataacttttgctttatgtgtatatatgtatagacattctatagtactttcgtttgtgtttctttttgtgggtgttttcatttgagtgtgtaataaatttaggattaaatatttgtacatattcattgtcagtcttggcacgtataaagagattagttgttaaagatacttgtctgtctttgtggctttgttaaaggtgatcagctcaattgaaattcctgagctgagattaattaaaaaacaaaagtacttaaactgttgagaagtcaacaacaacaagggagcagaaacgacaccgaattga

SEQ ID NO: 37979 - DNA, 1804 bp, Cannabis sativa
aagcaaaaatgattttgtctacatgccatttttttcaattttaataaagcaaaataaaataaaataaaatattgataacgatgtgatacaaaattgcatttaagagtggcagagaagggcgccaactaaaatagaattttaataaaagggggaaaaattataaataaaaaaaattaaaggattaaaatgaagataagaagaaaaaaaagagagggaaatggaaatattttcccgccttggattggtgagtgtacttttggtgaattatctttttgtagggttagtgttatttgtttatatactaattctcttttttaaggtcaaatagtggtgggttctactactaattctaaatctattttgctttgtcatttttggtagtgagataagagatttgaacaaaaagagtactttctaaagtacagttttaatcacagggtgaaaaaaaaaggtgaaaaatagatggtatttgtatttggtttggtaactaaattagtatctttgtaaaagtttgacttgaaaaaataattgatatatttattttagggtaacttttaaaaatatatagtttttaatattttatttataattttaccatttaaaatttttatttgtaaaaatatgtttgttaagtttaaaaaatagtatagtacatttttttcagcataaagtaaaaaaaaaaataactaaaacacaaagagaaattaatctcacaacaaccataaatcatctataagtaattataaaataactagaaaaacaatattataacaacaagtataaataaactatatatataaaataatttattatttttgttgaaaaggcatttttgtaaataaaatagtttaaataataaaaataaaattttagatatttttgtaatttttagtttattatgtaattttttctttaatttacaaacgtgccatcatattagtactagtgcactagattctaccggaattctacaattaagcatgtttgggttagtttttttttaataaaaaatcattattattattgaaaggagaatattcatttaaagattttaaagggtccaagttctacaggtcaagcaactaaacaaacaaccactgattacaatggaggagtaaaaaccaaattagcaacattactcctatagaacaaaccatttataggaagagacataacataaccaaagacaagacacgtaacataacataacatatcgcctttagaaaatatcttacacttaagcaattgagttccaagtcgcttccgagaaactaacttaacaaaatttgaattagagggtagtgtttagaatataattacaatattttattatttttcatgtaaattattatttagcataaataataattatttataacatttttattttggaattatatatgaatttcagaatatttatagtggttgtagcacaacaaaatataactcctttcatttaatgttctaacatttgttcatttttatgccagagtattatcaatcattgaatttgaatctccatagaacctgaatcaaagcaccaatttctacgtagtcttcctcagtgatctagatattgtaacagttttgtgtgagcaatcgttacatcactatgtggctcacaaagagagagagagagagagagagagagagagagtaaataataataataataataataataataataataataataataataataaagaaatagtagaagaagaagataacatgatttaaaaaatatatatatatagaaaaaataggagaaagagacaaaattgagagaaactaagaattt

SEQ ID NO: 37980 - DNA, 2470 bp, Cannabis sativa
acagttctaatgttttcaagtctcatcaggtatcagagggaagaagccaagattcaagcttgggttaatctccaaagtgcaaaagcagaagctcaatcaagaaagctcgaggtatttgtcacttttcatttgatcaatcagctcaaaataaaaatagaaaaaaaaaaaagaaaagaaaagagagtttataattgtcttatatcctaaagagctgttacaaaaaacactcaatgcactttttaaagaatatgatcgatcttttaaatctcccaagccattatattatattactaataagccttaaagatggtcaacaaaattgatttctactttgttgactgatttatagctattcagggtggctttggtttatcaggcgtattattaagtttttgacatggtcattctcgagccacccgctgttgtttggaccccattgtccttatttttattattattattatctttttttaccgactggtccctctattctgatacagttcattcaatactaaatatactatattttttttagctttttcccatacatgcttgaggaatattatcaaaggcaagaaagtcatcgtttaaacattaatttatattccaaaaaatgtatatcagcttgcccccatgtgagaaagtactaacatttagaagcttttgtggggaattggaaatttgttcacaagtgaaacagtttcttgtcatactaatcacattaataagataatgttttagtatatattatttattagtgtgatgctcaatacatcatcatcgttatttaggtgaagatacaaaagatgagatcgaatttggaggagaagttgatgaagaggatggcgattgttcatagaaaagccgaggagtggagagaaaccgcacgacagcagcattcggatcaaattgagaaggcgtcggtacatgcacagaagatggcgattcgccatcactctcacctctctactaccacctcttgtggttgctttccatgcaataatcacttttgctagtgaaaacaataataaatgtataagatagataaagaacaacattcttcttgtgctcaacaccaaatcaaaaaagggaatgagaaaaaagaaaaatccttgttttttgcattgatcaaagggaaaagctaaaatagctatagttggttgttctcacgaggctagttagctagctagagttgctcagtgctgcataggtcttgattttgacatcttcattgtacagattttgcatatattgagtttctttttcatttattatattgtgggaaaatgattagtctcttactaaatcgttaatatgattaattaatctgagacaccgacccctaaaaactggaaaagcaaagaaatgttttctcttttctcactccttatatctaacaataactgtacacaagaaaacatgtttagaggaatgtactatagatattagatagttcttccacaccttgtgtacaaaacgatgttcgtatgtgacatgtcaaaggagaaggaacggccaatacgcaagaaaacaaacttcatcacatcaaatggccttataataagccttattaagaagagcttattagcaaaacgagtccacgaatcctatctgtgattcaataagtgggattattgttatgtggtctggagctggaggtacaactgtgcaatctaaaagtgaaaaagtcaggtcaggtcaggtgtctggaacctggtcaaaacatgcagacagatcattgtaaggctcacatgaaaccaaaatgcaattacagaagtcggtagtagactagatactcatttttggccacgttattagattagtgcaaaccctttaattcatttcagttaatcctctgtaactgaaagtacgtacctgtaacaaaaccccccaaaaaaatacatacagaagagaaaaatcaggagttggacaaagctaaagttcaattctttattgtttttatattgtttgtcagaaggagaaagaagatagaaaaattatttgtagtttgcatattcccaacatgggtcagcaacaactttcacaaccgcatattgttttaatttaattgtgcactgcatttttgtatgttcaatgcaatcttcccagggtctgcatatgtatgatattgataaagagttttcaagagttttatggttgaacgttgaatactaggaagagcttcaagttatactaagcacacactagacctcaaataaattttttattacaactttttagtcaacttttacacttataatcatatgccaaatatatttttttaaaaaatattgttttatagcaatcttaaatttttaattttttttttttttttttatagtttacattatcaaaaataaatatcctaatattctaatttaccacacacatatttaaaaaatttcaaacttattttgaatattataaactattcaaaaaaatttaaaaatttataaaaataatattataa

SEQ ID NO: 37981 - DNA, 1825 bp, Cannabis sativa
tttgtgcagagaatcaagtgaagaaggctgtggaagtgaaggaattttaaattaggcaacagcattaagtttggggtggtaggatgctatccagttgttatagcaagggctcagcaattttatttggtagcataagtgttctgatatcagggttggaaaagccactttgagtctaaacaggaaaaaaaatggtcagaacatgtgattgaagtgttttaatggagcaatcattgggaacaactctttttactcagtccaatcatttggattgaggtactttagttgacccatgtactcaaaaataccaaataaagcatacatagattacttagtggggctttaagcttttggttttagtcaactggggcccttatactaatcagagcccacttgtctctcagcccaatatccaaccctaccacatcatcatcatcttcatttctcttcccattcaaatcccagccgcctgcctttgaattcaccatctcagttcacccataaccaccttcactcacccgagcacatcaccaccaacacgagaaccaacaacttcacgaacccagcaagctaacttggacctaacgattcatcctcaccatttcagttcaaccaaatcgcgcaccatcactttgcccaaatcaccagccattcttccacctccgttcaaccaaatcacgcacctcaaccaccagtattaacccgtaatcaccatagccttcacactcaacccagccacctccttcaccatcaaccaagtaccgaactcgactgaacccagaaaccaccgtagccacccatcccgtcccctcccagcaacaactaatcgaggcattcaactcgacttcaccagaaaccctccttcaccagattgcacccagcaacccgcaacctccattcgaccaccacgaatccagctgctaactccgaaccagtttttattcacccaaactcaactgaaccagaaatcacccctactcgaaccactgcccaattcatcctcaccatctcagcccgaactccacgaaccaatctttgcctccagctccgactctgtttgcacacacagccacaatcaacacccagctaccaagcacaaggaaaagacgaaaatcaacagccaaagcatctcgacatcgaatcaatagctcgggtgcacagtaaaattgagccagagaatcggaacccgcaaattttagccagccgagctaagttttggtttggtgagttaatttgaaaattattttggttgaattgcataattggtggctgtagttggactgctagtaatatgctacattaaaatggtgctaaagattatcattatgattcaagagtggtagccgagtgtgataattttggtctggatgatttgaattggaatttggaggaattttttaatattgggctgagaaagattggtgaatttgagaaaagcagtggttgtgaacatgttgctgcgtggaagatggcttatttggtgtaagggagttaatttggatacattgatagtttgaaattgaggttgtaatttggaaatttttggtgtgactttgaatttctaactgtcctctgccgtggttgttatgatggtgattattagtgaaatggtgttgaattttgatgtgttgtaaatgttgtgaaggtgcagtggtgtgggttggaaagagtggtgaattttgaacaaggctggattgtgggttgtgttggggtagtgtgcaggtgaaaaagaagagaaaatgccgaaagttaagaggaaattagctcacaaagtatattagtatgaactttcaattaaccttctcttgttatctattatataagtata

SEQ ID NO: 37982 - DNA, 2534 bp, Cannabis sativa
tggtttttgtatcaataagatttgggtacaagtcctcgacattatcaagttctcttaatgcctgttcattggtttttggccccatactaggagtctcgagcacctatgtgacaaattagtgtttccaaatataagagctaagataaatatataaaactcaaagcatcaataacaaggagatgatagtttaaatggatattactttcctttttttagtttcttggcattgtttttttttttttgggcagcacaaattattaaatggtactattattttgtgccataaggaaaaaagattcagaaaaatgaaaaataaatgcaatcatgaatacattagtaccatttcatcgaggtatacataatttatatttatagtagtcatacctcagtgtcaattgcattatccatggtctccttttcttccatgatttctgtttttgaggtttctttaagatcttcaattactccttccacctctgtacaggtaacacttgtgatatcttcctttgctggttgtgtctcacctttttcatgcgtaacatgtagcaaattatcaagcttttctcctcctccatctttctgagctgcttctttatcttcttcacttgttaatgctacttctatacctctttctgtagttgtaacattgttttcaactttgacttccactacttcggcagaagaagtatcatcaactttattctcccccttcaaaacatccactagatctaggtctttatcaattgccttatgatctatattcactaatgaggcactaacaaatcctttaacaccatcttctgcttttgaggtttccttaaggttttcaattgatccttccacctccgtacgactaacacttgtaacatcttcatttgctggttgtgtctcactttcttcatgcataacatttagcaaattatcaagcttttctactgcttcatctttttgcagtgcttctttgtcttcaattaatccttccacctccgtacagctagcacttgtaacatcttcacttgctggttgtgtctcactttcttcatgcataacatgtagaaaattatcaagcttttctactgcttcatctttttgcagtgcttctttgtcttcttcacttgataatactactttcatacctctttccgtggttgtgacattgttttcaacttcgacttccactactttagtagaactagtatcatcaactttattttcctcctttaaagaatccgttagatctagctccttattatttgccttctcatcttctatattcactagtgaggcaccaacaaattcttcatcatcctcctttgttttgcatggaacactttcacttgctctagctgtttctaactcttcaacaatctacaaaatgagtttcaaattagagtagtcaatcttaagttttttagaaagagaactaggcttgatgtcaatttcatgatcgtttaacatttcatttgttttattttcatcttctgacacaacaaatgttatatcaataggttgaagaaaattaggaaagaaaattaatgcaactaacattacatattttgagttccatttttttaattatttatattttcatttgtagtatgtatgaaaatatttacttttatgttgcagatggtcacaaacaatatttacttttaaaaaatgcaggtgcataatctataataagtttcatttgcttcctagaagatattatcaggaatctttagtagaacacaccataaaaagctaaaaccgatatattacacttatattataatcatacctctttttttgagacaattgtactatccagattcttcacctcttcttctttcaattccgtctttgaggtttcttcaaggttctgaatagcttcaacctcaaagcaggtaacactatttgcattgtcaaatatcacaccagtttctttgttttccagtccctcctctttaggaacaccattataaattttgtccttctccttgtcatgtgtttcttcactcaagatttctgataagggagaatctgactgtacttcaacgtttacactggttgccaagctcttctcttcaagagtaatatcatgacttaagacctccttcttgtcatctggttcccttgctgcctcattcatgcttgtttcttcaatacgagtttcttcctttagagtttctgtggtatcaaagtcctcatttggtttaacactgcattctatggtttcaggttttatttcctctaccaatgttgtcaccttattttgctcttggagctccaatatcgcgagttcctgttttacagataattcttagtgaccaaaaaacatgtattagcaagctgaaaatacactcaaaagcttcattaccttttcactttcttttgaacttttctcaaccatttcttcttgaagagataaagtttgtttcgcaatgctttgtttgtcaaagttttgttcttttatctctatacttggaggtgttgtctccactccagttattacctaaatgacagaaaataaataattgttttggttaaaagat

SEQ ID NO: 37983 - DNA, 2020 bp, Cannabis sativa
aaaatatactctttactcatctttgactattctaaaaaaaagtatatctcccgatacttaagatggataaatatgtatcatgatctatactatgtatagaatctgtatgtggattcatattaattaataatttctagaatagataatcatataaatttctcatgtatcaggaactagatttgaactggtgacacgagaatttaaagcttcaattgaccactaactcaagatacgtcaaagaattattataaactattttattttttctatattaaactctccacaaaattataaaagctaattccactaagaaattggcaacgacccaaaaaaaaatagataaatccaataaaatcaatacaattaaccaaagagtttccaagattaaactctcgatattgaaaaagtagagcatttccacgaagcatgatgagtggattcatcccgacatcgtgcaaaggacaaaagccatcagtaagcataccatgcttgttcaaattaaacttggaaggaatccaggtatttaaaatttactaagcaaacattttaacgttgggagaaatgttaaggcttcaaaatttcttccaccatcttaaaaacccgtgaaggagaaagtttatcacgctctaaatgttacacatatagttaaatcagttagttagttcaaatgtattggttagttagtttactaattctgttatttttttctgtaacttctttgtacacataaactcatatataaataacagagtaggtcaactatgatgttaggcttttttggcaattctttgtttttgttttcttcctagttcttacctctagtttgtaccttctttgttttgcctttgctctagtttcacatggtatcaatcgccattgacctcggttactaatggcctcgactgatcaaaactccaactccagtgttcatattgatcctctcatcgccactaactccgctgccactccaagaccgacggccatggctacgccagcttagaatctattctcccattccctcactgcttctctgactgttaagctcgatcgtaccaattttcttgcttagaaatctcaagtcgtccccactgtcatcgaacgcgatcttgatgatattctatttactggtgttcctcctcctcagctcttagttacaggcactccaaatcttgaatatcatcaatggaagaaacgtgatcagttacttctctcctggcatcaatcgtctatgacagaaggcgttcttgctgtcgttgctaacttcacaacctcatactccgtttggagagccgttgaatagagattctcgagtcaatctggagctcgattactcgaacttaaaggtcagttctcccatatttgaaagggttctctattaatttctgactttgtcgataaagtgaagacactagcatatgctatagcatttgcaggatatcatcttgcaactgctaaatagtcttggtcctgattatgactttgtggtatctggcatcacttctcgaagtgatcttttgagtcttgaagaagtttaggccattctcatggctcatgagagttgccttgaacaacacaatgttctcaccgatcttaacattcagatgcaagccaacttaactcatggtgctccaagaaatggttctcttaggccaaatcaatataacagttgaggcaattctcaagaaaaccaaaatcgatcaattggccatgggtttagcaagaattttccctctacatctagtttgatttgtcaagtatgtcttaaaagttgtcatactgttgcagtttgccactacagatttgatgtaacaccctaactagcataggcgtgttaaagtgattttatacatactgtgcaactcgttgctagtcaacgaggttaatgaaaatcgtgattaattaaaattttcttatttaattaaaaactaataaacataaaaaatatttcgggatcccgtttacaaaacactttacaaaagtttgctattcatttacgaaatatttgtcgcccaacgactaa

SEQ ID NO: 37984 - DNA, 3922 bp, Cannabis sativa
ccgatgctccacatcactattattcaagaatgctctttaccactagtaatttcaattgtctagtactatatagtatttccttaattactaaagaaattttagagcaaatgcgacattatatgtcaactctctgcttccgaaacccataatgagatttttttttttttaagaaataaaatgtgttggtttactgatgaaataatttcagggtgaaaagaattaaatagagaagaaacataagcctactacaccttgctaccataagagaaaaagtgggagacagagggataaattgatctattaaatagaaagatgaaatattagctaaaaatacaggcttgattgattactcaagatcaagattcatatctaaacaaattcaaaacttcaattattatgacttcttttttcccttcaacacagtcccacttggtaatgaaccatatagactgagacgcagactcccatccacaactcgctggtggaaatagttcttgtataaatcccagaattcatctctgccaattaagattcaccaagaaatttaacgttaaaaggtttcaaagagagataaaataaactgaaatttaacgttatattttccactaataaatatagtgaaaaatacatgagaaatgttattaataatacagcctatattgtataaaaatttgacattgtattttattacggattttcctgatagtcaaaatataaaaaagatttcagcaagtgatgaacaaacctgacttgtggtagagtcaacaatgaatatcccttgacatctgaccgaatgtccagtacaatgactgccaatcttgaaagtcctaatgcttcaatatcaattagcttctttatcctgggatttgtacaaacaaataatcaggaaaaaactgaatactttaggtagacaaaaatgatggcggcctgaagctaaaaaactctgacaatccaacctaacagttaactattaaccgaacataaagcaatgaaagagcgagacagaaatgctttattttgtttcttcaatttttttggcattcagaaaaaccttggatcagggcttatcactcaataacataaaatgaaactgaaaactaacttggaggaagaaacttctttacaagttatgacatatcattacaagtaaataaaagggacataacctaatttgttatattaaatcttgtctaaaaaagaacaggatatgttaagtcagagctgcagttacccctatacaagcaactaaaaaggaaacacagaatattgtagaagaatgatgctttacctgcttggtgtaccactggcaatatttacacggttctttaacaaggacacctgcatataaatcacaaaggaaaattttagtgcccaaccatctcacataatcgtttgaaaaaaaaaatcaatgtgaggaaagcaaattgaactaacaaaagagagaatataaaagccataacaataaatattaataaattcacgcaaaatgctaaactggaaaaacattcaataaatgaaatttaggatcagactgacgtgcaaatatacaaattcagcattgctggtgctttgataatttgattgtattgtgtcatcatctcccaaattcctaggaagcaactaactgagggaagcctcaaaatgaaaattaacaataagaaaacaattatagtaagacttacaaaataaaagctcacatggattaccaataatgaaatattcaaattcagcaacaaaagaaaataataaaaaagagaaatgctcaaacacaggccaaaacctaagataaaacttaaaataattcagccttaatcatttgcttttaatgagtcagcatcttccaaatttttaaggagcaagcaagtcccccagctcaagattcaaaactcaaaaaagataaaaattgaatggaatactatgacataaaaataacttgaaaaagtaaaattgaaatttgaatcagactgacgtgcaaataacaattcagcattgctgttgctttgataattcgattgttcgtcatcaccttccaaatccctaacccctgcctaaccaaaaaaactcaagggaaaagataataaatgaagactacattttcctgaattttggatcagactgacgtgcaaataaacaattcagcattgctggtgctttgataaattgagtgtctgtcatcacattccaaattcctaagcaattcacacctggattaagatggaaaagaaagaaaaaatactcccaaatgcaatacaatgatgaaaaaaaagttcaggaaaagatataaaatgaagactgtatttcataaatttgaatcagactgacgtgcaaatatacaattcagcattgcaggtgctttgataatttgattgtttgtcatcatcttctgaatccccaagcaactaacctggcttaggttaaaatgaaaattggatagagaaaagaaaaacatccaattgcaatacaataaacatggatcagactgacgtgcaaataaacaattcagcattgctagtgctttgataatttgtcatcatcacattccacattcttaagcaaatgaaattataaaggaaaaaaaaaacatcccgattgctatacaatgacaaaaaacacaagttcagtaaaaaacataaaatgaagactacattttcatgaactttagatcagactgacgtgcaaataaacaattcagcattgctggtgctttgataatttgattgtttgtcatcaccttcaaaattcataaggaactaagccaaggcttaagatgaagaaaaaaaaatcaagtgggatataataacaaaaaactttagttcagataaaaaaaaaactacatatatataaaattacatttcaccaacattggatcaggctgacgtgcaaataaaaaattcagcattgttgtgctttggtattttgtttgtattgtgccatcatcttccaaattaaagaagcaagtagtcctcagtttagggtaaaaacaacattaaaaacttgaaatcttacaaaagagaaaaattaaatggaaaaagaaaaagaaaacaaaaaaccagaaataagaaagatagcaaagtaggacgtggggccaagggttacatactcaaatcaaagttactaaaaattacaaatatgttatccaaaatacacaatcattaaattcaaaaacatttctaatgctaatgataccaaaaactagagtaaatttagttgtgtacttatggtaacccatcaactacaatatataaactataactaggtgacatattggttctcatgatttggctttccagatgttctaaaaaagcttgtgcattaaaacaactttagagttagataatgattcattgatttgagctacagtctgcatgtagctcagatctattttcataaccatatatccttagcaagcagatcggttccctattagaaacatctagatactttaaaatagattcataaccaattccaaatcaatgtaaattaaagatcctatcacaatgttcacacaacagaacccaaatatcccaactaactcttgactaatcccagtaccatccccctgctagacatcatctaaacattcacactttaatttatatggttacactaatcacgattcacaaccttctatttctaataccttacaaccaactctctgctctagctcatcaaaagcagattcatgaataagatatagtaataagccatcaacgaaacgatgaaccaagaaattgatgactacctgttcttcaaccttcatatgctttgagaatagcttcactgcatggcattctttagtaagtgatcgaagacccctacagaaacacaataaatacttggtcaaaagcaatgcatatcaagtatatgaaatgaattcagtactttcaaacagactttctgaatataaataaatatatatata

SEQ ID NO: 37985 - DNA, 2766 bp, Cannabis sativa
ttcacttaaacaatctcacatcttcatttgagttactcaaaacaggtagagatgttcttattcccataaattgttcttgtttgggtcaattttttcagtcaaattttagctacacacctcttcaaaacacatcactaatagaaattgcttgtggggtttttaatgggttagtgaaaaggattactctttacttagaaaatccatttggaacaagaaattatgtcaaagctggttcaaatattcacttgccattaaattgtgcttgtcctgataatttgactagtcttaaaggaataaagtatttggtaacataccctttaattgaaggtgataaaacaagtgatttgattaggaaatttggtgtttcacttaatgatttatctgaaattaatcatttgggaaatggagagccaactatttttacaagtacaactattttagttcctttaagagttgattcaatcataaatttaagtatcccaagtttcacacatggaccatccccacctcctaattttcttccaatttcaaaaaaaccaattgaaagttcaatacaaaggaaggtgttgtttatagttggatgtgttattgggatatttctactacttttgttattggtaacttgtgctatttattatataagagcctttatgaaaatgaagaaagggaataataacaagtaccattccttcactactccaatctcttcttctacttgtttatctcctgattttcttgttgggataaaattttctttgttaagttatagtatggaagagattaagagggctacaagggatttttgtgaagagaataaggtttgttctcaagtctacaaaggtaacatggatgatcataatgttaatgtgattgttaagaagatgagatttgaagaaactcgccctgttattgatctacactcgaaaatcaatcacatcaacattgttaagttacttggtgtttgttatggagaaagtgatgatgatttttcatggtgttatgttgtgtttgagtaccctacaaaagggtgtttaagagattgtttaactaatcaaacaactcctcttaaatggcatcaaaggacacaaatcgcctttgatatagctaccggtcttcattacttaaacttttgtacatttccttcttatgctcatatgaatttgcatagtagaaacatttttgttacatcaaattgtagagcaaagcttggtgacataggttcaactccttttggtgcatcttctaagggaaattattgcaacaaccgaagtgttcgggccccagagtaccttccacagagcttggaatcagataagattgacatatttgcatttgggattgttcttcttgagctcatttcaggtagagagtgttgtgatgaaaaatcatttagagaatccattagattcttgggaggtagtggagatagtagtgatcatagtgaaggtggttgctttgaacaactcaagtgtttcatggatccatctcttaaacatgattattctcttgctgaaactttgtgtttggctgttttagccaaggcttgtgtggaagatgaccctttacataggccatctatggaggatatcatcaaagttcttgcaagaatggtgtattcattctaataatttagaaaaaaaaggttactagtaactagttactcattcatcattgtaacttaattaaacatatatgaatatatgtatatgatttcaagaagtatatttagttcctttcttgcattctagattagattctgcataaatctagtgtcttcaagtgaatattgggggtcaaaattgaacaaatcaaacttttttgtccaattttttagatttgttgttgactttttcataatttcaattagtgatctttattatgaagtattagttctaccaatttatttttgtttactcctaagagcaacttcaaccataaacactataattatgttggtttaacacaaaaaaatataattttagcttcattagttttcaaattccaaccatcaacactagaagttacaaaaaaaaaaaaaaaaattaattaaacataatatatatttttttatattattatgttcttaaaaatggtaaaaaaaatataaatttgaaagatatatttttagaaaaatttatagactaaaaatttgaaaaaaaattacaaaaatacatcaatacggaaaaaatttcatttttactaattgaattcttttatttataaaaatatattttcaataaaaataataaaccgtttcttggttgttttatagtctatttatagttatattataactatcatgagactgttttaataggttctttttgattattttatagtttatttatggttgatttatagttatcgtgaggttaatttcttgttatttttttttattattttttactgagcaaagtgtatatttataattttaaaattttataaaaatatttttgtaattaaaaattttaagccataaaattgtaaataaaacacaaaataagtatatttttgaaaattctccatatgaagaaaaatgtaattaattaataaatgaaaagtaaattttagtgtgattaatagtaccaatcaaatttggtagggtactatagacaatgctatatataagataggttttaggttggattggaatgcatttaggtgacgtttggttggaggtaatgaaatagaaatgaaacattaatttttattctattcttttattttgttgcattttaaagtattgaaatatcattctaatggaat

SEQ ID NO: 37986 - DNA, 1299 bp, Cannabis sativa
aataaaaattaggtaataacaaccctactattaaatttagaatcaaataaattaatcaaacaaaaaccataactataataatcgtaataaactatcacactataaatcatgagaccaataaaaatctcagaatttcccagaccatggacaaacactcactaaatttgctctggcaaaattaggcacaacacgtcgacacacttttgtcggcgcataactgtgcggtaaaacttgcctacaatactcagtcggtaaaatggttttttattgatttttatggacgagtttatgcgccgacaaaaattgaaaagatggtgttaaaagatggttaaatctatctgtaggcaggtacaatgaattttatcgacgcagatatgcgccagtaaaaagctcgaggatttttctatgctgacaaaatagttacccgctaataggattatgcgggaaatagttataccagcacacttatgcaccgtcaaaaggcttactagccatattttattgatggttaggttagttaattttgccgatataattttgcaccggtaaaagtttttgtgtttaatttttttttaaatttgatgatttgttatattttttaaaataatttataatagtactataattaattttaaatattaaattatatttaaaggaaacataattaaataaataaaaaaaaaaggtattcacatttataattaaatagtcccaatcaaacactactacaaaagtcagaattagcaacagtcctaaaaataatttttttgggggaccgtcgctaaaaaaattaagtaattgtttaaaactgtcgggaaaaattagtattcttgacggtttataacaataattgcaggaatagacaacgattttaattagaattcataaatttattaggtccttatactcgacggtttaaaatcgtcgcctatactataggcgacagttttaaaccgtcggttataagggcccaataaaaaatcgttacctacttctcgccacattttccacgtgtccacctacttcttttctatttcccacatgcccacctatttcttcaccatttcccacaccataaaacgaaaatcttaactctccaaaatcctacccacgtctccgaaccatcgccctcctctctcactgtcttcctccagccatctctcgatctccctttcttctcgtctctctcgttcatcgatctcgacacacccctcctcccgtcggtgtccttctcgtctccgtcgtatatgtcagaccaccaccacctcccgtcggtttttctctcatctccgtctcata

SEQ ID NO: 37987 - DNA, 4893 bp, Cannabis sativa
aaaaaagtaattgtgtagtcattaaaaaaagaaagaaaaaaaaattgtgtagttcagaagttttatttatttattttgaaaaagagaaccttctcttcggtgggcaagaagacagaaggcttcagtaaagaaaattattaatcgggattgccaaatcgttaaaaaaatatataaataaaatatttacatactaatcgggattgccgaaaacaatttcttttttctcattaaaaaacaaaacagctaaaattattgagttccgtgatgtagtacaaagcgttagacacggttaaaataaacggcgctaaacaggtacactacacgccgttagatcagcctcgacggtgctaagtaaacggcgttttctacctaacgataaataacgatttgaaaaaaaggagaaaaataacagaaatcaaagcaaagcaaagcaaacaagaaaactgtataaaaagatattcaatcgaagaactcacgcacagagagagaaagtgcgacctgaggcccagactactacagcactgttcgctatctgataacgaagaaaaggaagtttaaagagagattgaattgctgtaaaatcatttagggttggtatttggagaatattcttctcacccaatttttcgcttttcccatttctgaaaatagctgctcatgtgtttcagagctcacaattcagaattgaaaattatctttctttttctttctcttggtgaacttttcctaagcaagtgtagaagctgaacaggtactctttcacattatttttttaaagtttcatttatttcatcaattttaacttaatacttctcggatccaagctctagatgaatcatcgcttgttttgatataaatgtttgattcagatatatatcgtttttaaatatttggataatcatttttttttgggtaggtgattgcataattcggttgcagatttgctcgatttggtgttattagtacctaaagacaataattgagatagctaaattattctggagaaagaattttctccagaaataagcatttagagaaaaattctcttgaggagctactacaaaatttcatcagctttttggttccgattctttcctcagaaaattgttgcctggataaaaaaaagtacttaatgcgtctttgatcttcatctgaaggggaaattgctcatcgaaaatactctatcacggatctaagaaggccctcgtcagaattcgaacatttctaactttttttttatccctaaattttagcaattctattaccggagaatttcatttcgaaattcttcagaatttgaaacaaaaaaatatctactaaaatagcatctaagctgtggatggagctttctcaacctcgaccctacggaaccgaaggtatttttcgaagcaggttttttttcttcatattattttatatatttatttttgaaaaaaaaaaactaaataattagcctctctatgatttttaactatgttttttaagaaattatttttatttttttaattttgcaagtttattcacaggaagaaaaccaacacacgactttctgtcactgtacaatcattcaactgcccaacaagatccaagaccagcttctcaaggtattccattcctcttctatttatttattttatttctttttttaaaaaaaaaatgtttccaaaatattgatttatgtacattttttttcattttaatctggttattttgattttaaccaacaatgcgaaatttaggggggaagcaaaaacatagtggtgtgagaaatttatgagtacagtatagttaattaaggaaaaggatgtttcagcaaaaaaaaataaaaaaattaaggaaaagggatgcacgtgagtggaaaatggatcatggatctgggccatgaggccataaatagggtaccatcagattgcgccttgggttttagtggcccccacttaccccatgatttgacatatcacatatgcgcaggtgcatggtatactattctgtattctcttcttcaaccacctctccctctcccttttaccctcatacgcacgcccttcttttctttttcatcatccacttcactttctaagtcatagcccctctttttcaattttatgagactaatcacatggtattaatatggttatcatctaaatttgaaccgctctgcattgaaggtgtctaaataattattatgacgttaaaacggaaatattccagaaaatgaaagtgaatgatttgtgtacatttcctgcttttctctggtcaaagattttttatttggaaagttggaggtagatgttgcggaggtttatcgctgtttcttcaatgatctttgatatttttgtctcacacatggcataaagctatatgtttagcgaaaagtcttgctatttaatcctttcattattattatctataaaaatccttagctaaagtacaacatagcccggcatatttttcgttgtacgaagattaaacacattataacatatatatatatatatatagttcgtcatttaacagtatatatttatgtgcgtgtgtgtgaatctattgatcatgttgatgttttggatcaaatgtcttaatttgtgtttatagattagataaagtactagccaaattctaaatgacgtacgtttggccagcatagtaaaagttggcccgaaaagcaaaatattctagggtaagatcttataagcttaagcttagagttgtgtacttctaaagttcatgcagaatgtttaggcaacaattatatcaactgctgatgaacgtaatcagtaattctttttcttaattttctcatttattagcaggaggttacctcaagactcatgatttcttacaaccactggaacgagtagggaaggctacctgtgctaaagaagaaacctcagtggagatatcaacaagcgagaagccacctcctccggcgccacctccagtggagcacgttctcccgggtgggattgggacttacagtataagccacatttcatatttcaatcaaattcaaagcagggttccaaaaccagaggggatggtttatccagctgctcaggcaagtagtactgacaaaaatgatgagaattccaactgcagttcttttaccggaagtggattcactttgtgggaagaaccagcggtgaagaagggaaagacagggaaggagaatatggttgtagacaaacccggtgttgtaggtaagattctacttatatgtaatgtaatgcatcaagggtgtcgttcgaacatgtcataatcagtcttaccatattatacgataaacttacaattatgagaagaaaataccagactggaaaatactattttgggcggttaactggtcagtatgcccacgtgccatagaatgatctgtacttatgtatagttaaactaaattcaaaatctgatcttacttgtataatttaatgagtattcttagtaaacataaaatatatcataactagaatgttaactgactggtggtgcttccaaacagtcagctacttaggccaggatcattggatttggatcctctaaaatcacaatgactagtaataaatgttcaaaacgggcctggactttcggccgtaagcccatttcctttttatttcaacagcatctttggtttagtttttataagttattcttagtttttttgtgtttagataaaaaattaaaaattaatttttaatttaaaagttcttttagaaaataaatttaaaatttataacttctcttaaaaaaaaaggaattttaagaaattatttttaaaattaaaataatttatatcatttttattttactcacaattttttttattgatatcgacacttttaaaagtaatttttatcaaaaaaagaacttaatataatagctatttaaaggataaaataaattaaaatatataagtaaaagttttagcagaacttctacttttatgaaagacaaaagaaaagacaaatgtatgtgttgatttattattgagctaccaacaacttagcggagctgaatctaatattggggtctgcatctgacagagcctgtggccagagtaggacaatgggcttcaacggagcggccgtcacagtcatcttccagcaatcatcgaggcagcttcagctctctctcttcatctcagtaagccttttctctcttactctctctctctaatatattcacacacacacacatatatatatatataaatgtgtgtattatacatataccggtacagttcttttgttattgtcgaattcaaacattatgcattgttgatagtggatgttatcttacatgtgagtatctatctgtaattttgaccaggccatcagcacagaggaaccagagcttcatggagatgataaagtccgccaagggttgttcccaggatgacgagattgaggaagaagaccagtatattcttaaaaaggaaatctctactggaacagcgcaaagaggtatctatcttctagtcaaatttgtattaagcttcgaatatttttaattttcaattttactatcattaaagaatgaagtggaactatatgttatttacctttcctcttccccttgaagaataatgtggaatgtcatttttaatcaacgtagtggacaattttaaataaaatagtgttactttttccttttgttgtaggagaattgagggtaaaagttgatggcaagagttccgatcagaaggctaacacaccacggtcaaagcattctgcgacagagcaacgccgaagaagcaaaattaatgacaggtaattcgctgctgttttcaacgtgtgacagatgtatgccctgagtgaatcgtgggactggtttgtggttattgctgctttctttatttagtttaaatttattatgcaggtttcagaggttaagaga

SEQ ID NO: 37988 - DNA, 2775 bp, Cannabis sativa
ctggactaatgacaggctatccggaagactttccttacgaaagagaagctatatggatcaagaacaattaattcagattggccacatctttatgaacaaagcttattagatgaacaccaagctttccataacatatacacttggagaaataactagcttccgacatgatgtatttttaatatgcatatatgtgagtcaaacaaaaaattgaaattcggattaaaaaaaaaataccaacttgaaatgatatttgagacaatgcttgagaaatctttccaacagttggtaatattttatttattagtagtagatatcaccatgactaatttgatgggggtacgtaaggccggccatgacattaacagggtctgatattagggttcttgaagctttcaattttaatttcttataaaccaataagctgatctatataccatactacttgtgccaacaagtggtggcatatatttaaatacatgtagtcactatatatgtatattcgatatatatatataggttttatatttatgattaattaccaagcctctttgaccaccactagtagtaacaagttgtcacaagtcaagtggtatatatagcatatatctacggtgaatatattattataaaaaaaaaccttggctgagtcgtgagagagattaaaatataattccatgagcacggtagataatatattaataattgcaaatatatatggtactgatcatcttcttgattgggtcagttttggtaacctacgtacgtatacgtacagaaaattaattaacttctatacattttgatctaaattagctatatatatgttgactattattaattaattagcatgatgcatttcttctacacaaagtagttagctagtcattatttgaggactatatatatacttgaatatcaatatcaatataaatacatatatatcatatgtagatatgtatttgtgtttaattagtaaaagtgataatgatgatcatatattccttgtttatgataacccttgttgttggtgtgaaagaaaagagctataataatattgatgaatgtatagaagctagatgtggtgaaaatgagccaccaataagattccctttcagactcaaaggaaggcaaccaccccattgtggctaccctggctttgatctctcatgtaataatgattctaaccaaaccattcttcacctcccaaatcttcacttgaagttacatgtaaaaaaaatagactatcaaaggcaatcaatccttgtttacaatcccaattgtgtccacaaacaaaattggaaattcctcaatctttcaatttctcctttctcctttggtgggagttgtatgctattaaattgttcttccaatcatagtacagataaggtacttttgagttctccaatcccttgtttatccaacacaaaatattctgtttatgctatgtatgatagtaattacccaagcaacatatggagggatgtagtttcatgcaggagaatgtatcaaaatttaccaatctcatcaggaatattccaatctaattcatcattgggatggtcaaaaccaaattgtacacactgtgaagtgaaaggagagaaatgcagattgatgaagaggcctcatgatcatgacttgatgaacaatattgatcaaattgaatgttataatgataacaaccaaacaataaagaaaggtatgtagtacatatagtgattaatagataatattatacattggatatgctaattattaaacaattatatgcatgtattcatatacatattttctttttgttaatttaataggtggtccttcacaaattccattggtgactgctggtgagtatttgtataaatttgggtaattaatgtatagcatgtatatgtgtctatcatataaggaaaaacaagaataatcttgctaatttttttataattgatcaatataggttcatttgttatcatactggggttccttgcaagtactttttatgtctatcattttagaaaaaacacgagacaaaatggattaagaatcgaaaagtttttggaggactacatagcatttaagccatcgagatatacctatgccgatgtaaaaaatattacaagtgagtttaaggaaaagttgggagaaggagcatatggagaagtatttaaagggaagctttccaatgacatatttgttgctgtgaagattctgaacagtgtttcgaatggaaatggtgaggatttcatcaacgaagtggcgacaataggtcaaattcaccatgttaatgtggttcggttggttggttattgtgctgatggatttagaagggctctagtatacgaattcttgccaaatgattctctggacaagtacatatcagtacgagggccaattgatgacattaatgtatgttctcttagttgggagaaattactagatattgttttaggcacagctaagggaatcgagtatcttcaccaaggttgtgataagcgaatccttcattttgatattaagccccaaaacatcttgttagaccataattttaaaccgaagattgctgatttcggtcttgccaagttatgttcaaaggatcaaagtatagtgtcaatgagtactgctagaggaactatagggtatattgcacctgaaatattctctagaaattttggaaatgtctcctataaatcagatgtttacagttttggaatgttattacttgaaattgtaggaggcagaagatgtaacaatacagacgaaatttactatccagaatggatt

SEQ ID NO: 37989 - DNA, 2780 bp, Cannabis sativa
gtcctggcccaccgcctccacgtgggacaatctcgggtccatgttggctgggatcactcgacggtacctaaaacgaagggttaagatcaagaaagcgtacatgaatacggtggggagcaccagatgcgggcacagcactactgccacgagcaggacgtgcatgagaacagttgtgggcgtgtgaacccacgtgcgaatcccgtccagccagccggctaacgtagcggcgcgcgagaggcaccccaccacgcgaaaccaattggccttgcttcgcctcatgctccacacgtgcgtgtccgaatcgagcaagaactgaaccacttcttgccccaatggcggctccgagcgagccattcgcgccgtgacgattctcatagccgtgtggcggagaatgtcttgttgggccgggcccaagggcctgacgtagtgcattctgggcagcattgggctgctgtaagcttggatcaaattaaaccacgaagcgcatgagaatcgaacggctatttccacttcccccatttttttagcaccacctgggagcaacaccgtaagagaatatgaactcatgtacactcgattagtatcgagcgctgagagccgtacacgtatcttcccaatcctaagatctttaccctgtttccccgcttcgtcgcgcttgtaccttccattgtcaaaaacaccaatggtgagtacggtacaagggtcgtaaacgtcccaagtgtactgctcgttccagcgtggattaaagcggtccaggatagtacgggtgcggacccacttcggtccgtatttggccaccacgtaagcgtctgtagtgccacgtgtgccgtctttggtcttgacgggtaagagattagtggcacctcgtatcccaacttctaataatccaatcggagctttggataattgtttagcagcggctctcacatcgctggtcacgtgcgccgcttcgtcgagcacgtgatacccaccctccaagcaaacccgcacgtgaattctgccagcgtagggctgtgatttctcatctgctccaaccagattaaaccacctggacttgggttcggctctatcgtccgtacgcttctcaatactcgccacgtgtatcttgacgtgtccaactgattgtgcgtgcgtggcatcgtcgaccgtaaccaccaaaaacggctcaaacggctcggctgctacaaacattagatcttcattccacgtgggactggatgaccccaccgaagcacgactggtcttgaaaagctgggctccaagctgagctttgacgtacacgtcagcacctatgcccctgatgactttagcttcgggtccacccgaaccaagctgcaaatcctgggtttggatgaccgttagcctcaaataccaaagcttcggagacaagtaaaccttggctcgggtctccggtatcaagccacctgaatcggactgccaagcctcctgaaaagcctcatcggcctgagttccgatccagacggcaagcatgacgtcatttcccggcgaagtctccgattcgagagtgtaccattggggagcgaggggactatctggtggcacacgcttggggatctcttgaagatcaaacgacaccgttcctaaagagctttcggtaacggtaacggtggtaacggtcttgtcgttttctgtcgtttctttcttcatttcttcttctgtccaaacagagacttcgagattggttgagttgagtccgtctttgtcgaaagcgaagacttgatcccaatctttgtcggagctctgttttttggttttgatcgagtgagttccgatcacgagtttggcgtaagctgaggaattagctgataaagctttgggctttgctttcagaactcgaacgtagagaaagggcattcgttcgacgaggtcgtaagcgctgtgacttcggtcactggctatggatcgaagcttgtgatccattacagtcaaagtcccaccaccattaatttccgaagacgaagtcgttttctgatctttgcttatctgactaatctgtttggaactcgtatcgatttgagctattgctggtttttctacctcagctggcggaggaggcggcggcgccagcacagcaacatcagtagtggctttggcctccgccggtgctttctgatcagactctgttttggaatccttcttctcatcctttttgggttcctctgttttaacttcctcttcttttttagcttcctcggtcgctggttttgtctcttctgcctgcggagcttcttgcttagtctccggcggcggtggaggcggaggattctcatcgacgtagtaaatcttcaaaccgacttcccctttgatctgagaaaacacacttctcttctctaaaggatagtaaacgagtggaacatcgtcggatttgggaaggaaagtggagccggagatcttgactttgccgagaaaagtactctttttgccactctttttgtggtcgttgtagagattgatctcgagggtttcggtgggcatggcttctgaatcgtggactatgaattcgagggtctcgtcccagtgagggttgagatctctgaactgggttttggtccggcgtctctggccgtcgaagtcgaccatggcgtaggcactggcggtgccttggccgtctttgggcattagattcttggcgttggttacctccacgaacagcttccgacaagaagacgttggttccgccattgttgtcgttttgattgggtgaagctgtgatttttgtgttggttgttttatttatgtatttatttttttggttttat

SEQ ID NO: 37990 - DNA, 2311 bp, Cannabis sativa
gttgagtcaccttgaatatttgtatttggatactcacgatgctgatgagtttctagatttggaacccatttcttcatctcctcctccttttatgcaatcgcttgaattatctggtcgattgagcaagtttcctcattgggtttcaggtctcactaatttagagtcgttcattttatacaactcaaaattggcagtgaatccacttaaatatttgaaaaacttgcccaatctaatatgttgtcgattgtatgataattcatatgaaggagaggagctgcacttcgaggaaggtggtttcccaaagctcaacgagctttgcttaagaaatttaccagagttgaagttggtgaagatagatagaggaacattgcctcttcttactgcactcattatacattcttgcccacaaatggataggcttccctatggtatccaatatctaccaaagctaaaagaattttgtagctggaacatgtcagcggattttatggatcgagtgaaagaaaatgagagtcctgattactccaaaattcagaatttgccaatattgaatattaaatgaactttgttcgttaaatttaattgagctcagttgttgctttctgttatttatgcgttatgggtgttaatttttccttttgtatttgtttgtaattttacattttctgtttcttttaactttattgattaaggtttgaaattgattataagatttttgggtgtttttttttaaataaatatattatttatgctttgtacatatataacattgagaggtgtgttaattacaacctcttgttataacattttagtcacaaccttcacgtctgaaataacatgttaaaatattttttttttcaattttttttttccatagaagtattcgttatagttatagtatcatctctgtaaatttttgaaaaattccgaatagtttatagtactaaaaacagagttcttgatattctagtttaccactcgtgttcaaaaaatttcaaacgtattttcggctcggtaaactattcaaaattttttaaaaatttacaaggatgatgttgtaagcatatcgaataccgccgtaaaaaaatttgaaaaaaaaatattctgatgcatattttcgggcatagagattaactaagaggttgtaagagaaagtttacgatagcactcttccataacatttctagagtttagtttttatttattatttattaaaataatgttttgagattctaatttacaatatattaacacataaccactataatagcttcttaacaaagacaacacaatagtatatatgaaaatcaaatagacaatttatgttaagagaaatttatatttttcattatatttatttttaatatcaattactatattaatactatattttaatatataaaaattatttcatatattattgtttaatttttttagatttacggtttggatttctagtgggttgttatacggattttagttgcgatttaagttagtgaaaattacaccaaatatgggattctacaattttttttgataaatatagcttttttaactttttccacccttatatggaatttatctaaatttaaagttatatatagtatttcctttgccacatatttatcccatattgtgtattcagcccaagtttaaagggtatatttgtaatttcctattttttgccaaccgttttttttcatgggcttttcttttttttttttcttaaaaaaaaataagtaaaaattacacaaaatattagaaaattttaagaatttacttttttatggcataaataaataaaactaagtggttatgggttattattttttttttatttattattttttttttttacatttatatgggtctttttatgccatatttttgtaaaaaaagatggaaatatcatatttgtaaacaataataaattttgccgaaaaaatcaccagctccggagaagtcgatggaaaaatcaccgtcccctgagaagtcgccggaaaagtcatcgtcatcggaaaagtcacaatcgccgaaaaaagtcaccagaagtagacgtctcaaatataaataaaaataaaaccggttataattgaaatataaccggttctgtaatacaaggaataaaaacaaataaaacaaaataactcaatctaattataattaaattataaccggttataactaaaacagaaccagttatataatataatgaatacaaataagtaacacacaataattcaaactgattacaattaaaaaataaaggggaaatcagttcctaaattactgaaacataaattaaaaaaaa

SEQ ID NO: 37991 - DNA, 1739 bp, Cannabis sativa
tctatggtagtccggatccgggagggcggaaagaaagttggaagcttctgaagcgcctccatccaatgtttcagggagcctaggtctgtggcggggattttaatgaaatattcagtaattcagaaaagcaaggcggtaacgcaaaaccggattatctaatgtacaacttccgaaaggtgatttctaagtgtgctttaagggaaatctctgccgaggggggtaattttacttggtgcaacgggagggctgccaacttagttttcgaaaagctagacagagtattttgtaacacggattggcttgaaaagtttaagcaatgttctgtctctcttttagattggagaaactctgaccatagacctttattcttcaaggctcaagttttaaattttgatcatgcggataatatgagatggggatctcggtttcattttgagcaggcttgggcggataatgatgagtgtatggaaattattaaggaggtttggagtaataagtattcgaggcaacctttgttaaatctgaatttccttcttaaaggctgcggagacaagcttcaaagctggaataaacttcaaaagatggcccttaacagtagactcaaggagcttaaggaaaaaattagttggcttgctaaatcttctaacccttccgattggttggctatgcagaaattggaacacgatcttaattgtgttgaggaaaaaaaggaggtgtattggaaacaaaggagtcgtgctctttggttgaaacatggagatcgaaacaccaaatttttccactataaagcgtctcaaagaaggaggaaaaacgctattttagggctgtatgatgatcacctacagtggcagacgaatattgagaagatttctgagatagctattagctattttaagaatcttttttcaaaatctaaccgtggggctgagttgtgtgatactcttcatggctgtgttcctaaccgaattagttatgaggaaaatagaaagttgcttgaaccctttgatgagaatgatgttaagactgctttatttcaaatccaccccttgaaagcacctgggaaagatggcctcccgagtcttttctttcagaaacattgggacattgtagggcccgacgttactgaagcgtgtcttgaaatattaaatttgaataaggattgttgtagcctcaatgagactcttatttgtcttattcctaaagtaaagcagcccactaaaatgtctgaatttcgtcccatcagcttgtgtaatgtggtgtataaagtggtggcgaaatgtcttgcaaaccgaatgaaggggagcctcaataatgctatctcttctaatcaaagcgcctttattggcggtcgtctcattcaagacaatgctattcttgggtttgaaagccttcattgtatgaggaaaggtaaattcgggaatgggaaaaaaatggctctcaagcttgatatgtctaaagcttacgatagagtggaatgagactttttggaagccatgatgatgtgtctcgggtatgaggagacttggatctctaaggtaatgaattgtgtccgctctgtttctttttctattttaattaatggctcaattaaaggcaactttacctcagaaagggggttacgacaaggtgaccccctttctccttttctatttttattatgctctgaaggtttgtcttgtttgttgcatgaggcggagagggctggcaagatccaagggctgcggttcggcaatttggag

SEQ ID NO: 37992 - DNA, 2190 bp, Cannabis sativa
tattaaaaggggtgtgaattatgctaatattgtaccctataccattaccatacatgaatactactacatgtgtgggcaattatcaatttttaccagtttttccactctccttcatttggattcaaataccatcactaacagtcattaactataagctacactatccttgatcatatacctaaacaattactaagattaagattggtattattgtttataattggagttttattaatatgtattgtcagaaaaaatttaaacaacagctcacgatgccttctttgtttactaattatttaaaaccataacatatcaaaccacaattttaaataactactcttaatctttatggtcatactaaaacaattttttaaaaaccacactattctttgttaaataaattacaaaaataaatttcaaggaattgagtaaaagatattatgatgttaattttgttttagttttgattctacttagaatgtatatgtcatagttatttatttatgaaaattccttatttaaaagtgttaactcaaaaattctttaacgataatgaaaccttgtaaataagcgtaaaatatttatatctgctaagtatatgtgaaatacaaaaaatttttacgtgattttgtagttaaaatttacatactccacatatcagtattaaatctgattattcttctacagtaattatggatacacaataatatttctaggtatttctaacactttatctctgaagtctttttctctccaaaaaattgatccctatactcgtaggctccatctctatttatagaatttttaggaatgacaattactctattttgattttatctaggtaaccgttcatgaaacgcacgtggacaattcccataagtggataaatgaaataaatgctaataactgctttttatccttatcataaagtagttttctttaccgaaataacatattacaaatatggctcgcgttcttcaatgatgttcaagaatagctggtcacattctacgagatgctagttaagatatttgtcctcgctatagcctttcacaacaactcttggacttagtcttttgagattttgagataaattgtactttgcttatttcccttaatcttttaacattctcacgagtatgtgggtcaataagttgtaagctcttaaagaactcattatctaccctttccagtgatacaattttgatctgttgcacccgagaagaattttatctttagcatctcaccatacactgcttatctcactgtcttattgccaatgtgtaatgcgagattgatattgctcgttattcattatcacttcaagaaaatttaattattactatgatttttttcgtaatttctgtgtctaattatccacatgtcgtgtctatatttatggctcgaaatatgggtataacaatttccccctaaaaaactctttctagaaccgaaaggtttttttttacagaagttacaagcagatattttcatctttttcagcaatgagtactttctttggtagtttcatcttctataaaaaatttattccatcattaaattgtgtgtcttttcaactgatggggttttaaactatccttttgtattattaggattgcaccccagctgcttgatctaaatttgaaaactgatcaatggctctccattcttcaatatacaagggtttttttaccactgccttcttctttactccattcgaaacaaaaaaaccagagagtataaacctattttattcaaaaggttcttgcaagcccagcttgtctttgacctattttcttcatgtaatcaatgccattttttttcaaccacactcctgttatatcccgaacccctattatcggagatttccaatgagaaactaccaatgctattagagaaacttagaagctagtaagccttcgttttccattctctttctttttatttccattgtttctattaaatgttcatgtatgaatttgttctgaagtaataatgtagtttaaattttagaaattctcttccctgaatttaattattttccgaaatttcaaaatcccgataaacatcttcttttccttaagaaaagaatgtctatttctggttcgaaactggaatttttagagttttttaaatggttaggttctggcttaaatgcattatccatgttctttgacttgtttattaaag

SEQ ID NO: 37993 - DNA, 1242 bp, Cannabis sativa
tgaagagcttcatcaacatcagaacgagtaaaaccagccgtcaacatcaaattcatctcagctgtaatggagggagtgattgctgaaagagtaatagtaaaggcttcattatcgacacccgctgtagtgaacagatttgagaagtaggaggcagcttcagtagcaaactcggcttcagtatgaaggactctaccatcaccagaaataagagatttaatcttattatttttgtatctggtcttggctctagaatggaaaaatttagtattggaatcaccactttttaaccaatcaattctagctctttgatgccaatataattcttctttctccaataaatcatctaaaattttctctgcattaagaatttgggccgtgtgagcaggggaattatccatgctattgtgtaaagaagcagccgttgattgagcaagattaatatcccttttcatctgaccatatttatcatgatgccattgttgaagggcagaagaacaagctgagatattttgcaacaagtttggtaaagaacatgttccagctatccagatattgagaatcacctcacgacaatcagggtcggttaaccagaactgctcaaaacaaaatctgctatggtgttgtcgaacctgctgctcttggtggagagaagaaacagaaaattcaatagcacggtggtctgaactaaaatagtcaaggtgcaataaaggattctctgaaaaaaattccttccatttttcattaataaatccacgatccagtcgttccttgatgagtaccccactgaaatgtctattagtccaagtaaacttgtctcccgaaaaggccaatggagtcagattacagtagtcaacagtttgcctaaaatcctccatcaaagtttctcttcgcaaagggccaccatccttgtcatcatttgataaaagttcattaaaatcatccattattaaccaaggctcagaagcagtagaagaagcaaaactttttaaaagattccaggtaagaattctttgatgtgattcgggggatccacagaaagcagtaaagtgaaaccggaaaccacgatcatacgaaacaaaaacatcaaagtgattcattgaaaaggaattcagtgttacatcaatgtcatccttccataataacaataaaccccccttcattccattcctaggtatttctaaaccatgactaaacttgagagaggaacgaacccgatccactgaattacaagcaagtttagat

SEQ ID NO: 37994 - DNA, 2143 bp, Cannabis sativa
gggtggagtctaagggtctctttcagagcacatttcaacagagttagtttgtcgaaatctgactcttccaatctccggtcaagtccgactacgtcagcgatttcttgctgaactttcttgagttcttctggggttttcattagctcagacatagcccattcaatcgcagaagccacggtttcagtaccaccaaacataacatcctgtaaaaaagatagtaataataataaaaatcgaatctttataacgaagagaaaataaaaatcgaatctttattatatatagatatatatgaagtttaccataatgattgctttgatgttgtctctagtgagtctaatagcgttttgaagatcatcagaagattcattaacagtagcttcatcactataaaaagctaacaaatcatcaaccatatcagattcagaatcatcaacaacaccattggttttagctcttttatcaatgtgttgatcgatgattctatcgataaatccatctaatgctttacgagctttaggtagtcttgtattaagaccttgtggatcaacccaagtaagccaaggaataaaatcagcaatattaaaagccccaaatagtttagaaaactcttgaagaatcctaataaactcatcttgattctcttgttcactcgaaccaaaagctgccctgtaagtaatatccatagttaatttaaaaaccaactcaccaacattaacagttgtaccaacatttttagccacagttcgaatagtcttatcaacttcatctctaacagattcccatgactctgctcttttacggctaaaaagcttcataacacagagctttctcatctgtctccaaaagggtccgtagtgagcaaaagccatgtcagcacggtcgtatgtgaggtagctaatggctatggtggccggtcgatttgaaaagatgttatcttgaacttgaagaacttgacgagctgtttcaggagatgagattgccaccatgtgaagataacccattttcatgtggaaaacgcctccgtatttctcggctaatttcgctaatccacggtgagttaattggtccatcattgacatgtttccgattattggtaacccttttggtcccggcggaaatggaagtcgccgtcgccggaatcggaaaattaatcccagcaacaaaacagggacgattataagtaacatgtttattggtttaatggcttctgataaagattccatttttaggcttatatataaatatatatgaatatatatatatatgtgtgtatatatgatgggattggtagagagagagagagaaaaagttttaagggtggcaacaagaaaggttgctgatttgtttgagttgattataagagtttatataagagtttgtttagactgtgtattggtattgactggtttatatttacaagtttatccaattaaatttggacataatttttttatttgaaaaataaaaaataatgttatgtattgactctatttatatatataataagagtttccttttattgttattatttgatatgtataaagtatgaatttggatagcaattatgttgatgagattctgtgtaatcatgtttaaaatctgaattttatataaatatattatgtttatagcatgttgtatattttgagtgttttaaatagaaaatctcatgtgacttttgtaaagttgctatatatatggatctgcaattaatgtggaatgcttgccttttttatattgatccatgcaatatatttgtttgtttgttatatttatacaattaattttcagatttgtgaagaaaagttatgtttttttttttttttttttttttgaataagaagaaaaattatgttaaaatagtgtgttcggttaaatttttataacattaaaagaccatttgttcttaattttttgttttgacaaatccagctaaattagtaaattaatttatttgatgagattatgcaataattaaataactaaatgaatcctttcaaaagggacaattaaataaataaatgatctaatgaaatatattttaaattaattctctctttcatcttgctcgaggagatttgaacctaaaatatttattaataccattcggtttacttatgccacataattttgtaatata

SEQ ID NO: 37995 - DNA, 5307 bp, Cannabis sativa
  modified_base (3506)..(3518): a, c, t, g, unknown or other
  modified_base (3592)..(3595): a, c, t, g, unknown or other
  modified_base (5257)..(5261): a, c, t, g, unknown or other
ctctctctctctctctcttttatccaatacgtgtttgttaatatatatttaaggttttgtttggtagttacaagatttttttattttttgggaatttttggagcaagctataaggttgggttactttctatattcttacgtgaaataatatatatgtatattacattattatgaaaattacatatatattattaacttaaaaataactttcatatatagtacctaagttcggaatacatatttgttggttaagtttgaatatatattatatatatataatatacatatgaaattatgtacttaattaattaataactctaaattttgatgaagagcgtagagctattgctccgacgcagtaccaaactcgaattaaacgcaagaaactcaagaggcttaacagcaatggatataatagacatacaaacattggagaatcccattgatgaatatcattttcaactcaaagaaactctccaaaacgccaccgtattaacatcatctcatcataatcacaactccaccgtatcaagtaatattaacaaccaatcacaagatcatcatcaagaagctgataataataatgatcatcataatcaaaaagactggatcaaatactttcgctataagaaaacaagagattcacccagcgacacaagaaacgctctcctcgtcgtcgcaaccctcatcgccaccgtcactttccaagccggagtcaacccaccaatccatttttcaaccacaacaacaaagtcaacgactatacaaagaaaagtcaacgctaacaataatgatgatcataataataaatattctaactatgacacactcctacgtatccctgacgtcatctctccgtcaccatttgcacaacagatgccttacatcccaagcgagcctttgcctttcacggttgggtttggagtggttttagcgaacttgggaaccctagcagcttctgaaatgttcttattcggaaactcgctagggctcactgcttcgctgaatgtgataatctatttaacagcgggatttcctttccaaagagagcttcacatctcaatatactcgatgttgttcgcttatggttggtcggtgcagggtttggagagtagtgagaatagtaaggttggtatgaggaatgttattctagggtttgcttttcttttaccatttgtattgagatggtttccaaggtggggaattggaaagaggattcggttgtggtggattaataagatgattatgataaggaacactagggttcaacattatccaactttgtggtgaggagtttgtgtagcatgtaataattttattattattaattacacatgcatataatatatgatgtacaacattattaactattgtatgttttattagacatgtatattatatattaactttcattttgttgttatatttcaggtaatgaaagcccccgttttttaaatgcctattttctttttgggattatttcaaaaagaaaaaaaaaaacaaaaataacaaaatcaatcataaaaaaattacaaaaatatggttttacgtaattttaaacattatttttattaattttttaagattttatttacataaaataagacattcttatgtatttctatgttgtactcttattattttgttattagttttttgttatattatttttatgttatttgatgttgtttcctgttgtttttatgtaattttttttgttgttttcttgtgtctttatagaacactgtaatttttttttaaaaaaaatcttttaacataaaagtgtaattttttttttaaataacaatttatgtaattctcctttcttttttaacttccctctttagttcaaatttagagttaaaaaaagttaaataaataaataaataaatattaatggattattaataatagtttactttttatatactttgtaatgtataaagcatttatcaaatattatgtcaactaatttttatatcaaatttgacattatatatagaattacattgagataatggtaataaacattatgtgttgatgcagaaaattagccaaccgtttgtatgtatagacgagataaataagagatgagtagagtaaataaagagacacaaaatttatagtagttcacttcccatgtcgtgatggtaatggagctacgtctacttcaagtttttatttcttacaaaaattataagagaatttactaagtgtgaaagctctaaatttctagaaaaagaaactagagagacatgctctgatcttatgggcacttttttgaatgtaaaaaatgaactagaggagctctccttttataagcaaggaggtcctattgaaataataataaaatattaaaaaaaatatgaaaaaatacatttaagctatttttgactgttgatggtgatctagaggtgaaattaacgatctagaggccaatcgccaacctttggagcttgaatcgtgtctacaggacctttttcagataagttgtagttgaaatttataactctctcgaggacaaaatttggacctgatatcatgatgacttgatagagcattaaaatagtttctaaatgcaagttgaatcacatcaatcagatcaatattgaatgacttatgactattttattgaaggatgctctaataccaacgccaaagttgacatcatatgtcaacctggatgatgggtcaagggaaaaacgtgttgagcggtgtattttttgatgccttagtaatattttgacatcccttagccaatttctttgttttggtgaagccgctcaccagttttcgaagatattgctgtttcacaaaatcgagagactcgaaactacctgattggcaactagttcactttgtagaaaaagtgtatatatgaagttgtgaatttaacttgtctaagttcatagctctcgtttattataaaaaaactagacgaatacttaagacagaatcagaatcggataagtccaacctagcgtaccaggccattcattaacctaggcgccgagtgccttttttcgaagcttccatgatgtcatttttataattttaaggtcttcaacatcaaggatgaggtattctgccccatttttgaccattccaaagagaatgcccagagcgaaatttgtatctgagtgatagatattaatgcaccaggttaattgtaaacctgggcgctgggctcagttttctaccctttgggattcttattttctccccaagtttacttgtatctttgttatttcttatcaaagccttgacccagccataagtgtggtcgacgagggcatcggaccccgtaaggggagtgattgtgacagtcagtagtctcgtgatccgtaaggggaaataccaggtaagttgtacattcgcacatcacttggggaaggtcaagtgggatgattctgagactgtgaaggtatgggactacacagttgaagatggcttaaatggactgattggtgcatcttatttttcagtagcccatcacgaaagaactnnnnnnnnnnnnntgcttgacctggagtaattttaggatggttgaccacttggaaagttttcccaagaagcatgcgagtgaggacannnnacgctagaaacactcgtgttggtttgtagggttagtcatcggtccaggaagcagccaaagtgacgtcctcatgtataagagctattattccgtgggtgtaagggctcaatggaggcttgaagcggggatgttacatttctaatgatggaaatagtgcttggaacacttttttggaagaatgaatggaaatagcccaagctgacaaaattcaacctgggcgctgggcccagtgccaagtgttaacctgggtgctgagtctagtttttggctaccagatgactctgttgaattctaaaaaatacttttatcttaatatttgataaaaacggagaatatgcccggaagactttgttggaattactgatggaagtttcccaggttgaaaaaatgtcaacctaggcgttgagtccccattctaacatctaggttgatctatttctcccccaaaagcacttttttcgtcgttctggatgaagacaaggaaaattattgagatatttctttattatggtggttggaagtgccccaggttgacaatatgtcaacctggacgttgggtgcttgaggcacttggtgctctgggtgctcaaaattaaaagtgctctgatctaattttgactcctcaaatatgtttgtgacaggtataattcatgtcctagtacaaaattttgagccatttttactaagacagatccaaaaactaaaccctagttggaatgtcaacactgggtcaaaaccctaggcaccctggttgacttccagggtattgtttcgtgtattttcaacttccaggccttggacttggattcttcatgtattcatggtacataatactgaaagaagtgaattagaaacaacttggcgagatccaaacacccattccaaagtttccaaagtcaacttgggtgcaaggctagggaaccctcctaggtcgactgctatgactcgggactactcaacttcgggatattttctttcttaccacatgtcaaacattgatgtccatgtcactagggatagtttttaggttaatatttgcccttcacttcttacttgtgtgaggttgacttgaggacgtgaactaagcctattttataggaaactgcgaggtgggcatcaattttgacaatcttagcaattgtcttatgattgtcttcttgtgtgattccctttaatttgagatactatgaaatcatgtcaacactaaaatgtcaacacaagctttgatctttggctatcttcttagtattggttctcttgttacactgcttgtttaagtaatatagatgtagtgtttgttccctcctaggttgcattgttagaggtctttagcattctctaggctgtacttacagtgaaggtagtcttgatcatctcctcagcttcacaacagaggaggccttcgtcaattccttagctttacagcgtaggaggccttcgtcaactccttagctttatagtataggaggtcttcatcatctcctcaactttacaatggaggaggccttcagcatctcctcggctttatagcagaggagaccttcttcttctcctcatctttacaatggaggaggtcttcttgatgactgccaacaaagtgttgtagcagtcgtaaccttggactaggatttttcatgtctttaccaggatctagatttactnnnnngtatgtttcattaacatcctaattgaatttctaaaacaatgaaata

SEQ ID NO: 37996 - DNA, 2528 bp, Cannabis sativa
atttgcgaaagatcctaccattaccgctggcttacttcgtatgcatttccacgattgctttgttagagtaagatcattttctcgctcgctcactcatgaactcgatttacttattaagtaatatgttaaaagggttagtcttaagctcacaaacatagcttaatgatatatattatactttttgtttttaagataaaattgtaataattttgaatcattgttattaattgtactaatggtgtttaattagcaccttttagaagttttgctttgagattagttagcgatatcttttaaaaattattacattaattaaattatataagaatactaagtaccactgatattttttagtatttctcgatccttctttaattaatatcggaaagtataaattacatattgaaatgtagtagtattagtaaattcagggttcaacttgcattattattatccttttagtacaattattatattatatattttttataaaaagataccctagtttctgtcacgagagagaaagagaaaaaagtcttctagttaatattattgtatacattttcttataaccgatcagatcttataattaatcatatcaagctaatacttatatattatatgtcatagtgtcacactcacaaattcaaaagtggcaggtatataccaattaacagcatataataattaataatgtaataaatttctcatatttttttatttattgttaacagggttgcgatgcatccatactaataaattccacatcgaacaagccctctgaaaaaacagcaggaccaaatctaactgtacgagggtatgagctcatcgatgaggccaaaagaaggctcgaagctgcatgcccttcgaaagtctcatgtgcagacatcataaccctagcaactcgagactctgtcattcttgcaggtggtccagactatgcagttccaactggcagaagagatggacttatctcgaaccctgatgaagtcaacttgcctggcccaagccagtcagtcacctctgcctttgccacttttcgagaccatgggatgaccctaaacgaaatggtggctcttctcggtgcacacacagttggatttgctcattgcaatttcttttcaaaccgacttacagattttcaaggtacaggcaaacctgaccccaccatggatcctaacttggttaccaagttaaaagctttatgtgcagttgggagtgatccaaaggtttttctagatcaaaacacaagtaacattttcgataacgagttctatcgtcaaatacgtttgaagagaggagttctgaagattgatcaagagctagctacagatcctgcctcctctagttatgttgccactttggcttcgaatccacgtatgttctctcgagatttcggaaatgctatgactaagatgggaagaatcgctactgttggaagcgctggtgagattaggaagaattgcgcagtttttaacccgcgtcctaaaagtttaatcagtagtgttttagacattgctgagaaaattatagagtaatttctacatagctatcacaacatacatcgatctatgtgtctacttcaaaagagaatctcctcaagtaaactctcaaaaataagagattcctctccaaaagcttgaaacttgtttaattagcattttgttaatgttaattataaatttatccataattaatgaagtagataaaggtgttattggaagtgaattgtttacctttaatttgtactttctaaatatctttaccgcttattgttaatatcataatataattaaagtgacttcgtgcttaacactatctaattaaggccgaaaggtagacaatttaataatatgaattgaaaaaatttaaataataaaatgtagatagtcttgcaattgtttttgaaaactagataatttattattttagccatctcttcatccatatcactcctaaatattatttatttaagatataatgttagactacatataatctaaaaaaattagtatagtccatctggaaaaaaagtcgttctgttatactttttatctgcttcaacatttaaaaaaataacaagttgtttgaacctctcttaattttttaaataatttacggtgtcaaaaataaaaaaaacaaattaattttaagaaaaaaaaaaacaaaaaatacaaaacaaataattatttttaagcttgtttataagcgtatgatataaattatatattttgaaacttagttcataaattattcaaagttttataaaaattagtaagaaaacctaaataattacaatatacattgttatataagaaaaaaaaaatatataatttctttatgtgtcaaaatatatacgttaagggcaaagtacttgccctgccatagaagtatcttatatatatagaataaaaaatatatatagtaaatactaaatagttattataatatattgtaattaactagaacaataatattaagaatggtattgtgctgttttatttatttatttttgttaggctaattag

SEQ ID NO: 37997 - DNA, 4368 bp, Cannabis sativa
  modified_base (222)..(225): a, c, t, g, unknown or other
  modified_base (3642)..(3643): a, c, t, g, unknown or other
  modified_base (3709)..(3718): a, c, t, g, unknown or other
acagaattgcatagaaagtaatgaaaagaaggtacctcaacaagaggcaacatattaagccagagtctttctagacccaattatgagaacccaacacaacactcctcccttccaccgagcacgaactagaccagcgtgggaggccaagaaagagagcgatgactgggttgggttaggcagcttgggctctgtcgtcggagagagagaagtcgaaactgagannnnggtttagaatttgggattttttttaggcatttaggttttttgtttaatatttaaaatcgggtcgggccgatccagaagcccgataagagcccaaataattcgggccacaatcggcccttcgggtcgggggccgggggcccggcccggcccgcgaaaatagcccagattgacattcctagagtcatacctttgaacaacttggaggggcttctatttatgagataagtagcagtttggactaggtatgaccaataaaccaatggtaagtttgattggaatcctagtgcacgagctacattagtatgtggtggtattttcttttaacaaccaaattttgttgtggtctttccacacaagaatggtatttgatgatgcctttagaagcaaaaaaagattataaatttaactctttttcattatctgatctgattgttttaagagatgttaagaattgagtgcaaatcatgttaaagaatgtagggattacatgttggacattctgttcttgagcaagtaaagcaaagtgaatctagatttgtcatcaactatagtgaggaagtatttgttaccttccacacttgttatgtttaagggaccccaaatatgcatgtgaaccaaatcaaatacattctttgaaaaattgtgattggaaataaagggtaaacgtttttgcttagccaaatggcatatatgacaatgtagattaaaattgtgatgtgaaatattgttttctttattgaagaaattggaaatacacatcgagggatatccaaggcgattgtgccgttggtttacattggttttattgaaagaaaaaagagatgtagtagcagctgtagtagaggagttgtcttgttgaagcaagtacaatttgccacatctttcagctgtcccaatcaccacattcagagtaggatcctgaattacacaagaattatgatgaaacaagattgaattaggagtgttaagcataaaatcagatatcgaaaagaggttaatcctgaactgtggtatgtatagcacattgtgcagagtaattttagagttaatcttgatagtgccaacattttggacaggtatttcttgtccatttggtaaggtgacatacttaggaaatggaacattagtaaatgaagagaagcaagcaaagttggaacacatgtggtgtgtagcaccactatcgactatcgaagatgttgcataagaagcagaattattacctgtcagatttttaggcagcaggattcatggcagtgggttcagcatggctattgtggctgagttgctgactgagaagtgagattaaatgctggcattcagaagaaagatcagcattgacagattgtggagcaaacccctgaaggaaataacatttgtcaattaaatgacctagttttccacagtttgaacatgatggccagggtttctaggctcttggaggattggtggaacttgaagccacagccagggggattgcattagaagatccgagggatctttgatgttctccttgaacaatcatggcaaacacacgggacagattgggtattggttcattaagcaaaatttgagcacgaactgatgcataggattcattcaaaccagtcaagaattgaagtacttgattttggttgaaataatccaagaaaattttcattgcaccacaagtgcaagttgttattggttgaaattctttcaactcatcccatagggatttcatctttgtaaaatatgcagaaacagaataatcaccctgctgaagccgagtgagttgagtctgcaattggaaaatccaagggccattgccttcattgaaacgctcaggaagatcgttccacgttttagtagctaattcatagtacattatgctttgtgcaatctcagatgaaacagaattaatcaaccaagacattattatgttgttgcaccttaaccaagagttgagagtaggattaccaggttctggacgagggagagatccgctgataaatgggatcttgttcttggcattcaaggccatcgtgatccctcgtttccatggttgataattgttgttgttgaggacagtgggcacgagcacgagaccgaggtgataaccggtgttgagaaagaatgggctggaatgatcgtcagcaaccaatcacaagttgaatgccggagttcatcaacgatggtggagtggtcctggagaatgggatctgcagtctgaaattgaagtcgcactggtggaatttgagggggaatagctgaggaatttggagcagggattgggtcggaagtgacctctactgcgtgattgtccatcgccgatggtgtagtgccatcttgagaacgagtcgagggcctgggcatggaagctgtggcccagagttcgtctgataccatatgagaaaagagagaaagaaacagaggaaaattagagcttctggtattattgatactcaatttattttacaattggaagagagagcttacatagctcggcttgcatcaagaatttgttggttaaaactaaccaatttgtaacagaaagagtacaactgtaataaccatatctaactaacaaaactaccctaactaactaatccaaagctgattctaaaactaactaatcataaaatgctatttatagaatgtactattgaccatcattggtgtccaataacaatgctcaaatatagtgtcaatgagaatgtgacccaaacatatttatgaaaatgaccactagtatccaacaatgctctggcatagtttatttaagcggaatttttattgtgtgtgactcattttatcgctcctaattgtatgatatatatgaacttaacaatttttccaatatatattaagatttagcgtttatacacggttaaaggagctttttagggtcccatgcatgcatgaatttttcttttgcatcaaaactctaataaaataaaatttatggtattaataatagagacgttcacaataattagtgacatacgtatatgagaaataagtatacgtacaatgtgcgattgattttttcgaatcatatttctcgcactacagattatttgaaatttgttgaaaacctgtaaaatgcatactataattgaaatatatgttgtcatataataataataattataaggataagtagtgggataagtacttaaaattttatgtttgtaagcggcataaactcaatgttaatttttagtggcataagtactcaatgtttgtaaaactgtaatttttctctaattttgtcagtacagattctgatattgtcttaaacagggtacatataaggcctaaatttttgatcatcgggtctagatagaaatatatagtatcagttacttctaaatgttcttttaataaattcaaaacagagtctatacttacaaaattagaagaaaattacagttttannaacattgggtacttatgccgttaagaataaacattgagttaatgccgcttacaaacataaaacttnnnnnnnnnntgccgctatttaccctaattataataacattttcaagtacgaaaaaaataaaaatatctcagattaaataatatgatgcattaccactttttgtttcatgtagatacataaaaagacaaactttaatttcaatgtattacttgaaaaagaaaattgttaaaagcgatacttagtaatttttttagtatcatatttttattagtataattaaataataggtatcatataacttaagaaaataattttttgaaaatatcgaaacctcctaaggtaccacctatagcatagaaagtgttgaccaccattagtttgcaataacttgaaaaaccagggttgaatttttgaagccatcaatacacgtgaattgagaaattaataatcccaaggtctaatctatatagtcatgcccatgagcatatagttaattacttagagcacactcaacagacatttctaacattttgaaggtattgatgtgatgagaatgatgatcatatatttataatttagttcactaagtggaagtttgtcctcaagttaaaaatcttattgaaatgtttcaaattttattgttttcagaatgacaaataatatatctgtctctatctaataacttatgtgtagacgttttgggaaaacaatatataatt

SEQ ID NO: 37998 - DNA, 1942 bp, Cannabis sativa
aacatcttgtagtgctaatatcatttctcactgctagttgcaaggttctttaggggatattattttagatttttgtccaacttgcagaattgtgcaacttagttgcaatcttgccatgtggataaatttgggaagcttaaatttgatatctctcaggcacaacaaaatgttaatttacttcattcctctatttctattactcacggccattcaaacatagttcaaacatcgaagtctattcttgatgatctcttagcaaaagagaaactttactggcggaaacgatcactaattgaatggttaaaggcaggctcctcaacttgagatccaactctcttgttgaacgacctgatcaggtcctaagcttccctattctggaagttcagctctgcctgttgggcttggaggatcgcagcttgttgatccatccactcctgtaatttgcgtctctgttggtcaaaagtatcgcccatagaagcgcgtgtttcttgttggtcatggtgcaagaggttagtatgaccctaagcttgtcctatggcctctctaaatgcatgtttcttgttcgtcaatgctagggtcgccaaccccaggtgtagtctcacaagcatagacacaaggtcccatccctttgccaagaatttcagttgtgggctagactgtgggtccagtagagacttgctctcctgggcggactgttttggaagctctgggcagctggccggaatgtggtggccggccagccagggctggattggtctcgacaggtggcacttagacattagggtttgcggccatagggtctcgtgattcagtcaaattttcacatcttgtgacagccatgctgaagatgagagcttcttgaatgagaattatgggctctcaatgaaagtaccaaaatattgactgtggatttagccaaccgacatgaagtctgactaggatcatggcttataactaccacatgtggaacaataataaatgtaaagagacacacagagttatagaggttcgaccccttttgtttaggtaatgacctactccttttagttgtattcactcttaagataataccaagaaaattacaagctaagaccttgtaatttctagctaggctctcttcagtattacaatgtgttttgtaggtgagaagtataggaaaagagagatgacttattcctatagtgcttatgagcgtgagtgagacttagaatgtgagtctgagcatgtgtatcttgcctttatatagtagtagggcttacatgctgcacatagagatgttcctggaaaatagaaaagttacaacacatatttaaaatagaaagcaaataaataatgatccccaaagaataggtttgttatttgttgatggagagtcctatctttgtgggcagttcgaattgatccgcaattgtcggaatgctgaaggcgagttggaaggcttgtgagaagaacacaagtattggtgtgtgcttgcacctttggccagtcaaccttgttgaaggctgcccggtgcttgaaagctgacactcttggccgaccaactataggtccgaccaggaccttactagcaggttcatagatctcatttggcttgtgtgtaccatgcaacatagaatctcaaaggttgagaggctgcttgtgactaatcctagcaggttagtgctgacctgttctcaacgtgttttctactttttgccatgtggaggagccacgtcaggtggacaaaatttatgataacagattactattaataaaatagcatgatttattaaaaaaaatatagcccatatttctaaaatttgggtatttatttgtaaaaaactcaacaatttaagtatttatggcacaatttttttaatataaaaactcattacttaatcaacgtcacctacacttagttttcattatacatatatttaatttataagtaaatactattttg

SEQ ID NO: 37999 - DNA, 2170 bp, Cannabis sativa
gtcaccctgacgaagaccacaagacggggttattttcccaacctgacccccatttaggcagatgtttaaagtggtggtagatatgcattgcgatatccagttgcggaatctgacaggggtcccacagcactccaacacatgatcaatgaaacgccaactcagcctatcatacgccttgacaagatcaatcttgatcgcaaaccaaccttccttgcctttctttcggccaaaggaatgaataacctcttgagcaataacgttgttatcatgaatgtttcttcctggaacaaacgcagcttgagtaggacaaatgaatgagtgtaacaaaggttttattctatttgccaggaccttggaaataaccttatacacgacattgcagagagagatgggtctaaaatgactagttctctttgggttaggaaccttcgggatgagaacaatatttgtcgcattaaaacctctatgcatctttccagttataaagaagtctgacaccgcctcacaaaaatcagctccaacagagtcccaataatgtttatagaacagaactgacattccatcaggcccaggagccttatgcttatccatagaaaaaaagggttcttctgatctcatctgctccagggcaagaaataagattgtctgcctcttccatagaaattctctcttgaaataacctactacaatcgtaggtcaccccgttgtccgacccggagaagatacccttaaagaaatccacaaattctccaccaataagatccctacctgtgatccaaatgttgtctttgtttaataaactctcaatggcatttctccttccttttatagcagcagacaggaagaaaaatttagagcacttgtccccctctttgatccaagagatccttgccctttgcttccaatagatcgctttcctttgccgggattcatttaaagctctgcggaggtcattctcccggttccagtctctggatccagccggaagactctgcatagagtcaagctgcttttctagatgctttatctccaaatcaagcttgccaaattgagtgcggttccagtgcaggagggccacccgagtggcacctacctttctaaaaacacgcgcaggagcccacgggtgattaacagacttccacgcactcgctaccaccaatttactcctttcatcccgagtccacccttcctcaaacttgaagcatctcttgaatttgggctcaagaccacccgactgaagaaataacggcctgtggtccgagttactagtatgaaccgagcagaggatagctctcggaaagaggtcgacccaagcaccattggctaatcctttgtcaagggcagattttacatgacctcgaccagaacgatgattatcccaggtcattttttctccttggatggccaagttgataagaccacgggagtctaaaagattcgagataatcgggataaaggggtcccttcccgaggacccttctctttcagaatcactaagaacaaaattcaaatcccccaaaataaaccaaggacccccaaatctatccccccaattttacaaaatcattccaaaaatttttcttagcatgcaaatatggggggccataaacacaagagagtaaccacgggtgggtaggagggtccgaatacactaaaccagagatatgattgctcgagcaggatatacattcaaaattaaaacctgacttccaagccaaaataataccgccagcagaaccagtaggcaccatacaaatattaaagtaaaaatggagggactttagagtacgtaccagaggcttggggtccagttttaactcagacaggaaaacaaactctggagaccgcgctgctatcagggacttcagttccagaactgtagaggtctgccccaaccctctgcagttccaagcaatgcctctcatggctcctgtggaggagattcgacattctcctccacagggtttcgagagtacgcagacacactggaaccagaatcttcaataacaaaagaacctatcagcggattcttcataattccggaccggctcggagaggtagaagaattctcagaaggctcctccgacaccatattgggttcatgatcattatgattagtgtcccaagggaagtcacggatgacgccaggatatcttcggtgaattttatg

SEQ ID NO: 38000 - DNA, 1630 bp, Cannabis sativa
agattaattgatgaataaaaaaggtattattcaacttaccccaatgctatactaagtggaactatcacgtgaaccatgctatgtgaataattaatatggtcagtttgtctattttgagtactgaagcttataattgattgaacatatatactcattattttctatgttgttgtgtgaaatgatcaactttaattgactcaactcacctaatgaactactcttcttgaataatctttttgaaagttgagaatcaatgttgattttggcatcaatagtttggttcttttaaatctttaatatggaacgaaagaaaaaaaaagagggtacaaccacatgtagcaaaataccatacaaatcaaatacaaagaagagcccccaaagaaaagaggaaaaaaaggatcattgtgaaggtacccccataattttgatttttggtagaaatggaatatgaggtttctgtacttttactccaacaatcaaagtccctattccctaacagcacatcgtatagagagatggaaatgaagagaagagaggtagtgtcgttttccatttagaaactctgttccgtcaaagtccaaagtcttaagtatgttttctacaaaaaaataaatttataaaaacttcatgtggaggcaaagccaagcaaacaatggtagtaccaaacaaccccttatttttataacataattttaaattataaatataaatatattgacaaaaaattaaatttatattaattttacttctcttccaacctccccttcttcaaaaaccaagccaacaaacaaacacagcctttcttctcagtcccatgtctctatctctttaacaactttcttcacctctaaattaataaactccttcaaaaatatatatacaaatttaaaataataatatatagaacaaacaccttgatagtctagcccaaatgctaagcaaggttaggtaagagatagctactttaaacaacatcaaaaccatttctttttttacagcatttctattcataggttcttgcagtagttgaactcagtccttctattgggattgatttttgccattgtccattgctaaatgaaataacaccctctcacaaaattaacaaaagagaagaaacgtacgtgagagagagagaaagagagagagagacaaaagtagtactagtcttttcttcttttggggtgttgtgattgtgttgtaaagaagaggaataggataaaataaaaatgcagcttcatatctcaccaagtttgagacatgtgacagtgtttccaggcaaaggggtaagagagttcatcaaagtgaaagtgggctcgagaaggctttcctaccgaatgctattctactctctcttgttcttcacatttcttcttcgttttatctttgttatgacagcagttgactccattgatggagaaaccaagtgttcaactattggtacgtatgtcatcacttccttttcatttaatataaataaatatttaccatgttatattatatatgtaacgttcgaagtttttcattgactatatccctctttcttgtgaaaatgaaccttatattttttatgtgtactcttcaatcatcattattaacagattgtattggtattttttacctctcaata

SEQ ID NO: 38001 - DNA, 1183 bp, Cannabis sativa
gttaagctaaccgtaaatgggttttcgtgtcgatgcaaaacccaaaacccaaaaatgagagtaaaggcagagagagcgagagaaaaagagagaagatgaagagaaagggttcgtttactgaaccccaaaagagctttttaatacccacagaccgaattgctttgcagtattaattgagagagagaatggagggagcaaaaggggttcttatttgtaagagttgaagaaagcgactggcgaaaactcgatgcagtggcggagaggggagagagaaagagagagagagatggcgcttttcagggagcagtggagagagagggactgagtgagggagtgagtcacgcgacgcgagttatataaaggaagtgaaaagacgcgccgagttggaaatggaagtggggtccagggagagttgtaaccaggtaatatggatatttttgtaaacaaagattatttttggttttttgaaaacccaaaaatttattttagggtttttaaggaggctggctgagttgtgatcaggtgatgtgggaagtaattggtgctatagattcttattttatttgtatatatttaggaagtaatatccaatcaaaaattatatatatagcagaaaaaatatagaagggtcataaaattgtgatttttttaattataatatatctttttaataagaaaatgatttgtatacattgaacctctctttttttttttttgaagaagaagaagaagaagtgaacctctcttttaaacaaaaaattgtacacaatttattaaagctatgactaggactttgagtacaaatattgtaatagttgattatgttggattttattttttcacaaattgtgtcggtttctagttttataacttttctaataaattagtttttttttttttttgagagaaatttaataaattagttgaaaccatagggtttaaaaaaaataaaactgtatgtgcggtacttaataagtttttatatttatatatgatttaggagtgtcaagtaacttcaaaattttaaaaggcaaatacaatctcatggagagatgttaaaaaaaattacaaattgcccaatttaaatacactacccaaactattaatgtaatacccggaattaaaaatggattagcaaaaccctaactagataattatgaattaattgaggaattatattatt

SEQ ID NO: 38002 - DNA, 2928 bp, Cannabis sativa
tcccacatatgaatggtgttcaacttttggattgggttttctctgcttacccaagagacactactcaaaaggcagctccaattcaggttgatgcgcctcccccccaagctgaaactgtggaaaagaccctcccaaaccagagactgtgtaaattgtgatgctgcactaaaccagaaattaaaaggtgttggtctcggattcatttggcgtaattggacaggggaaatcaagagtgctggtatggtttatctcccctgcaactgctccacagatatggctgaagcatgggccatccttgaagctataaagcacatcccagccacggtcactggccctttcgaaatccagtccgactgtaagacagtggtggatgctctgcatagtcaagtctctcatcttagtgcaattagcactctccttcacaagatcaagactagattggaagactttcaggattataacataattcatgtacatagagaaaataatgaatgtgccaatttgttggctaagagaggtttagaaactcaaacttctcaaattttctctcatttttttcctagttggttagccaatttttgtaaggatgacttgcctcatttgatgtagtcttgtttctttgtttaataagattttcctttaaaaaaataaataaataaataaataaatagcttaaacacctaggtaaattcgtatatgaaaaaattagttttctaaatttcaatttataagtaaatctaaataactatataaaaaaacaataaaactaaaaaacacttctaatacgaaacacatgaaagtgtaccgaaacaccttttcgataggtgtgcgataaaattttcttaaaatatttgttcaatctttgtttttagttttgtacacgagcaatggccattaaagattagatttagaatatatgcatgcattgtatgtacataaattaataacagggacatttggagttttctaattcaaatagtcaaataagactgagaattgagaatttgccaaagacaagtcaaactcaaacactgcttcaactcattctttggataacccattactattacacactccagttgttgattttcagtttcagaagagctatggtaagtgcccaactttctcccattttaattttatctatgtttctatggttctaaatttatttaatggtggaataggaaagcagtaatgagcaacaccaaccaaagttgaagctttactcctactggattagctcttgttcgtacagggtcaggatcgctctcaatttgaaaggtgaccatcactcaccaatcacgattcattattgttaattgttcattcgtctgatattatcccaaatgatttggatttgtagggataaactacgagtacaaagcagtggacttactgaaaggagagcatcgcaccccaggtttctttcttaattatattctgttgattaatctgatataatttattgaaatctgttgtgatttgtgattttgggtgtggttcaattagagtttttgaagctcaacccgattggatttgtacctgtgctggaggatgaagacatagttatatctgactcatttgctatcttattggtcagtggttgttgacttactcttctactctagacttgtaatgttttttatgaagtggcatactaattttgttaatccaaaatttgttcagtatttggatgagaagtaccctcaccatccactattgccttctgatcttaagaaaaaagccatcaatttgcaggtaagttatctctctctttttcatttaggtaatttcaagtttcatcggtctattttcatggttcaagtagcttcaccgttcggtaatttaactactatttagaagatcaattaacaacccacatagtgtgataagaagagtctctattagctactaagtctaagacttgtttttcatgagatatgaaaaaggagaattaggagaaagacattcaaaatgacgatttgcaaatagtcttaagcttggtcaagcattgtgttgagcataataaagcgtgtttgagagagagcttaagaaccctatgaaaaccataatgaagagcttttattctctgaaataatcaaaatcggataaaggacaaccccactagtttttcaagcctcatgacttatccattatccttcattttgtttatgcttttgttacgttattgggttggtagtatatttcagctgaaataattaatgttatgagctgacatgtaggctgcaaacattgtttcctcaagcatacagcctcttcagaatatagcaatactggtaagtggtaattatctggtttcattgctgctttatttcagaagaaagctattataattaattcatgacattgatccatttccagaaacaacttgaagatagagttactccagaagatagagattcttgggttaaacattttattgaaaatggctttgcaggttcgtgttcactaaagccaaatggatacttctaattacaggatataaatatagatatagatatatatgtatttgctacctaatagactatagtaatagtgactttaaagttttattgttttcgtcgtaacttgtaccgaatgagtagtgtggctaatatgactactctttgcatttgttccagcactggaagagttgctgaaagattatgctggaaaatatgcaacaggagatgaagtcttcctggtttgattttttttttttaatttttccttcccttgacttgattagttccttattaacattttttctgaaaaatttttatgctggctagtcagttagctctgcactttttaattgtttgaatttattgacacccagtaacagacccaaaatttttaatcagtgggggcttaattattataaaaatatttattatttattttacattaaaattataattattttgt

SEQ ID NO: 38003 - DNA, 3036 bp, Cannabis sativa
atttgagatatattttggttacctacaaaactaatttgtatacatcttaataattaattaattatttttaagttatattatagtagcttataatttaaaaccaattagttacttttacattaatgacattctgatttattccgagattgaggaagcacatgagaggcatcttcaaatgattttatagcgtctacgagaacatgaactttacaataagtttaaaaagagtgatttttagctgtcccaaataagttttttagggcatgttgtgagcaaggacggaattctagtagacccagcaaagattgaggtagttcgggattggccacgacccaagtttgctactaaagtcaaaagtttcttagagttagcatgatactacataaagtttgtaaaagggtttgctaagatttctacacccttaacagagtttcgaaaaaactgtaagtttgtttggactgataagtatgaaattagcttctaggagttgaaatagagattgattactgcaatagtattaactttgttgatcaaggatgagaaatttgtgatttactgcgatgcttctaaacaaggattaggttgcatattgatgcagtctggtaaagttattgcatatgcgtctaggcaactaaaggattatgaacaacgatatcccacacacgatattggtagtggtggtgtttgccttgaaaatttggcgtcattacttatatgaagaaaagttgttggtgactgattttggtggttattgaagttgttggagttaaagctttaagcttgagttcatggaactcaagcttgagctttaatggtaactttgtaattttgaggtgatttgttgattctatgtgtttggttttgttttatttatgatattaagctattctgaaaagtttggtagggttcagaggagttttggttaggtttttaatgtttaaactagtttttggtcattctatagtgacaaacggttaactgtttctacagagtattgtaaaatggtgaacattttttcccaagttgaacccaaaaaacggtgaaccataatgggaaaacgttgagccatttggggtattttccagtacctatgtttttgtgttttatagatatttagcatattcctacgctatttatcgatagaaaaatgtctaattttgagtttaagtcttagaacgggattcattgagttatttactgatttattattgtcgtgacataggacttaagatcactgagcattattccactcaggttggctcgtacacctaaatttagatttgaggtaagaaatatcaattgtatcacattacatggataattggaaaatggtaattactgttaacatgaaaaaaaattataactataatctgaaaccattgttggattttttacttatcgattgcctcattaggcaacgatagtgacattagttgactcgttagaaacgagggttaatggataatttatgaagtatcatgaatagcttatcttattatataaataattgaattattatatagcgtaatgttttatataattatatatctaaatgtatggttgttaatggttattatttcattaaattcatgaatttgcatttcctacttttcttgttgagtctttgtggctcacgggtgctttccggtataggtaaggaaaaaggaaaagtggatcagacacgagtcagaggtttctcagcaaatgtacatatcaaccccatcgtcttctgagctcagtggataggatcatgttttaaaatattttggttatgtacaaatattttgttgtaaaatgtaacgttacattttagtaaagtttggaacaaggggatcccccactcaataatattttgagaagggtttaacatatattttaataagtaatttagtaaatttttaattaaactacaatttctcttaaattagtagtttattattataaattttataaaagtacacatgtggcgctcttacgggttacagctttacagccttagtagcacaaataaattcattataatacttctcatagaatatggtttagaatatatctcaggtcatggtattcaagtcttgaccttaggacatgatctcccactagatacgggcatcctctcgcaacataaatatagcacaactaacccaattgttaccctcaactcgcataaagtcaaagatagagattatcatgctcatctactgttccacctttcgtggatgagaaccaccctcgaacactggtgggttctgtttcctgaaccgttcgtacaacgactccaagcaatttctcacgtcctgtggcataactagaggtgccaaaggaataagaacttgagcaggctatacctgctactcatgaagctcccttatctcattccctcagatcatctcttacatcgtgacatacatttgttcctaattttgtagaggtggaggattcgtatctccacgccaatcctgagcccagatagctcgcggttaagcctatcagatcgcctcggaggcataactcaatacacttccgaccataggtttcccataagttagagctctcgaacaattattattactaatcaacatctccatacttaggcaaatattatgttactttcaataattcatatcatgcttttctagcaacatattttttcacatatcacataagcatctaatcaattaacagataagtaaataacacttattgtatcatgagtcgaactagtcttcacagtatatgcacatatccagctggtcttcaagatctttaaactttagttgctctgataccatgttgtagctccctaatctataaggccgccacatgtgtacttttataattactaacagtttaggaaaaaaattgtggtttaattaaaactttaccaaataactttcaaattataaactacaacctcttaaaagttactaagctcagagatccccttttataaactttttacaaaagtgccatcatattattttattacaaaatatccatacatattcaaaacattgtaaaacatgatcctgtcaa

SEQ ID NO: 38004 - DNA, 2242 bp, Cannabis sativa
attaatcttgcagttttcctaatagatctcaaactgtatgctctttcctagccagtacttgtccatttcaatcacagaaataaataacagaaaagggatctttgattctgtacttgatacagtaaaatattggatacacacctctctgcaaattgggcactttgattctctacttgctgtttttagtcctttgaagatcatcacagacgcagctgagcaagcacatgcattgcagaaaagatggccacagctcaaagcacatgggttgaaaaccatttcctgccaaattatcacattacacacgttaagaaaaaagtgtcactatcttccattttgcaactgaaatctgaaagactgagaggaagatcttaccaagcatacagcacaagtaagatcatagtccaactttttagaatctggaagtatcatagtcattacagggggcgtggcatcaagatcactcgaaaaatgtccagaaagcccactgacatgtcccccatccgatgtgtccaggtttagataaaaagcacccaattcaataagccaaggtgattgcaagagttcaatatgttctgattgcatctttgatctgaaattcttgccattttcagagcaatgtatctgcagtaaaagagtaagaatcatcagaacaattaattacatgattacataaaaacaaaatgagggaagatctgtagactatgattggctaggccatactttatcatacttcttaaggatcttcctgatggcaattgcattcattgtagcatattcaatcagcatctttccttcttctaccatgttctgttgatcattcttgaaacatttacgcaattgcattaagtatctctgcattccagtggaaatgtgaagaggacggaggtctctgactctggaactaaaacatccaacaatctctaaggcttccttcatcaactctgagaaaaacgtctgatcacacactaagaaaatggagaaaaagcttcactcattagagaataaaatcacttatgatgcacaaatttcaaactgataaatcccatataattaggcattaactacttctagactacacattatggtttcagtcactataataataaacctcttggtctttagaccaaacatctaattgtcttccaaagtcaaacagcacagaattagtatgacagggaagaaaaagcttcactcattagagaataaaatcacttatgatgtacaaatttcaaactgataaaacccatataattaggccttaactacttctagactaaacattatggtttcagtcactataataataaacctttagggtctttagaccaaacatctaattgtcttccaaagtcaaacagcacataattagtatgacagggaaaaaagagcaacatattccttacattctctgaaactacatggccagttgaaattccttcccttaaagtacaataaacttcctcattgatgttgacagtagtagtgataaagataataaaacaaatacatgcaagcaatttcccattaacttcaacaaattatcaagcagaataaagaatacaataaataattgtcttattccggcataaggagattctgctgagcacccataactgagataccaaaatcttgaacttaatcctaattggttagtttctaatacaacgacaaagattttctaggtaggaaagatagatgctagtcaaaacttaattcaaacttagtaccatatatttaagagcattgtattgtacaaatccttgaaaaaatattgattaatcaatttctctcaatacgtgggcacaccattatactattagtacggcatattcttccacaggcattaaatatacaaaactgaagatcctaaacaatatttataataataaattattgataaaacctgcatctttatatatcttcacacataaagaacagaataaaacaataaataaataaaaatcaaaagagagagactttacatgggcaggattgacattgacataattgttgcttagcagcttgattgtcgtcatcgcaaaaatcctccaattgtttacaactcctacaactcttgagaacttttttgagccgcttatactcaatatgggaacaattattaatagatccttcttgctccttcagcaaatactctttgaatgtctccccaaatttcattgtcttctaaattattatttaaataaacaatttaatcaaattaacagcaaaccctaaaaaaaaa

SEQ ID NO: 38005 - DNA, 2039 bp, Cannabis sativa
taaccccactattgtctcatccccataaatctctataaccattcaatcaaaaccaaatagaagaaatggatatcatacaatccaggtcagagctgtaacaggtaaggattatccattcaaatcctgagaaatatcaaaacttaccaaagagtttccaaaggaaagcttctcgagttcaaccttaatggcttcagctcctaaacgacatctcaaaatgtcaggcgccgggtgctcgattcagctaaaggtagaacagtttgtttcaaactataaaaaattctaagaacaaaaaagtagtatatcagcataaggtacaaagagaattatgaggtatagcaagatattcaatttaaatgactatatatccaactagagatttagcaaagcttgaaactttggtgtagtagcacagccatctttcattaaaaatctcaaattcaaccacattgttaatgaacatactgcacaccacttactgatctgtttcggtttcaaaaagtcagctttcttcttctactcttcaatccttatagccgtcacttccatatccttctcaatctcctctctttgcaatctcaactgttctgctctctcttgccgcccttcttccaatagctccacaaatttatcctttatctcaagcaatggatctcggtcgatcaattcatcacccttgtaagcctccctcagcactgccgtctttatcccacctttcaaagacatatagaaaatcccagagtgccttgtgaacacgctcgagaaagcatttgaaaatcggtactcgtcgccaaacttcccaagtattggtactggaattctcttgtgtatggacaatgacaacagctcgtggaaaaccccaaccgtcctcttctccatttcctgtgatgcttgacccaaatgtgagatatcatcataaggcgatacataatctagctccatccagtccctaacccattctctcatttcctttctcaagaaaaaccccgatggaagcttgtaatagaaattaggccgaggcctgattccggttacccttgattcctcctctgatctctgctcaattaccgattttgcaaactcggggttccatgaaaccaattccagaaacgatttcccttcacctggagaccctactaacctaaaatactgtgaatatttgggcaccaaattgaccaaaaaatcattcgggaaaccaaattctctcttcacatgaaccaatttatctgcactaagaaccctatctttggacatcatcaacaatttgcacaatttagacacaatcaaaggctcattttttgtgataatcctttcctcttcttcgagaaatagttttagcttattactaacacggagaaactgaactggtgcggtcttgggtttgatcctatcataataaacatcaaataaaccagggtaattggtgaggaaggttctagctttgatgttaaggcgtaatctttcgcgtcgtttctcgaggtaccgaagcggaattacttgacctggttcgttaaggacctccctcacaacccgggaacaaagcttgaagtgtttgtccttctctatggcatggtctagtttaacatccttacgccataccactttcagactcgaaatagcttttgcttgaaggttgaatccagggtttgtatgggatgttaagagctgtgtgagttttggtaagtatgagcaaatagttcgggttttgagtagcatatttggaaaatgagctctccaacaatctgcaaaatctcaagtttgagagagaaatggaggaaggagtgttcaataaatacatatcattttcaaaaaaaatttaaaccgaaattgtatcataaaccattctcattttgaccctaaccaatctctaaaaagtacatgtaccataaaatatctgccatattatcacactaaatctaagttttcttagaactctccttacaaaggtcttggttcggtagctaaatctagaacgatcaagatgttgcgttccaataaaaaacaaggagcaagggtcttctttactggttttaaagctttaa

SEQ ID NO: 38006 - DNA, 4846 bp, Cannabis sativa
gcttccatgtcttccaatatagagtcttccaattctgtttgtaaccactgtaataaacctcagatttctgactatgacctatggcacaacaggcttggtcacccatctgagaaagttgtcaaagctgtgcttcaatgttgtaacatctctgtttgtaataaaaatcccttaagtgtttgctctgcctactgcttaggcaaaatccataagctgccatttcccaaattctcatctacaacctacactgaacccttacaattgattgttgcagatctatgggggcctgctaaaaccacatctatcaatggttacaaatactatattcattttgtagatgccttctctagatttacatggatctatatgctgaaaaataagtttgaagctttaaaaacctttttgcaattcaaaactgaaactgaattacaattaggcaaaaagattaaatgtcttcaaaccgattggggaggggaatttagatcctttagtgatcatctaaaacaatttggcatcactcatagacacccttgtccaacaactcatgaacaaaatggattagttgagcgaaaacatagacatgtggttgaaaatggccttacacttcttgcacatgcttccatgcctctcaaatattaggatgaagcatttcgaacttctgtatacttggccaatagattacccacccctgtgttgcacaatgtctctcccattaccaaactgtttggaatcataccagattatagccagcttaaaccttttggatgcaaatgctttccaaatattcgaccttataataaacacaagcttcaatttaggtcctcaccatgtaccttccttggctatagtttgaatcacaaaggatacaaatgtttggatgcttcaggtcgattatacatctctcgcgatgtaatttttgatgaactatcctttccctttgcatctattcccaaactcaccactgattcctattcctacacagagttctttactccagctcaaattcccatagccaacatgcctaattctaataatgatcattctcacactgttattactaatccttttgtgccacctgtggcaagcacatctgttaatatgcaggattctgtttctgagttacccacttcatctcagcaaccaagctctgcaatcaacaacaatgttgctgaaccactcaccaatactcgagttgctgcctgtcctcctgctcctggtgctacaccaactgctactgatactactgttgctgctcaattgcagcaatctgctgcagcacctactgctgcaattaggcagacaccaccacaaaattcccatgctatgaagactcgtgctaagtctggcatacgcaaaccaaaggcctatgttgcaacaaaaataccaagatcagtcaaagaagcgcttcaacttaaacaatggaatcaagcaatgacagatgaaatgttggctctaactaggaatggaacttacacattggtgcctttacccgaaggtagaactcccataggttgtaaatgggtgttcagagagaaagaaaattcagacggaactcatcataagtacaaagctcgactagttgcaaaaggctttcaccaacaaccgggcttcgattttactaaaacttttagtcccgtagtcaagcctatcactattcgaattgttctcagcattgctttgtctcgtggttggaccatcaagcaacttgatgtcaacaatgcatttctaaatggcactctcaatgaggaagtttatatggtacaacccccaggttttgagattccatctgctcctcacttagtgtgcaaactacacaaagctttgtatgggctcaagcaagcaccccgtgcatggtttgacaaacttcatcactgcctgttggacttgggatttatctcatcaaagtctaatcattctttaatcattcaacacacacctacatcaactactatgattctcatatatgttgatgacatattgataacaggcagcaaccccacaatcatcaacaacattgtcactgccctcaatcaaaaattctctcttaaagatcttggtcagttacattattttcttggtgtagaagttcatcatacttcctctggtttacatctgtctcaagccaaatatgttcgagacctgcttcttaaagcacaaatgaatgatgctaaaccagcccccacaccaatgacaagtggtctaaggttatctgcctatggaagtgaacctgtccaggatcctcatctatatcgttcgattggtggtgctcttcagtatcttctcataaccaggcctgaaatttcatttagtgtgaacaaagtctgtcagtttatgcacaatccccttgtttctcactggcttactgtaaagcgcatccttagatatctcagtggcacaatcactcatggtcttcatctcaccaaagctcctcttgatgaaattgttgccttttgtgacgctgattgggcgactgaccccgatgacagacgatcgacatctagatttaccattttctatggtcctaaccttgttgcctggcagtgcaaaaagcaacataccatttccagatccagcacagaagctgaatttcgcagccttgcaagcacagtagctgagttaacttggatacactctctcttctctgagcttcgcatcaaactttcacagcccccaatcatttggtgcgacaatctcagcactgtgctcctcactgcaaatcctgtgcttcacgcacggaccaagcatatcgaactcgatctctacttcgtgcgtcaaaagattatgcagcaacttgttcaagtaaaacatgttccagcacaggaccagattgcagatggcttgaccaaggcaatctcaactcaaacgttccctcactttcgatccaagcttacaattgaagatgttccttcagaatctgacacttcgaattgtaaccttgaggggccgtgttaggagagtgtgtctgttatgtttgttagcagagttagttatttctgttatctgcttttccttttcagttgtaactaattctgttagattgcatctaactctcctgtaatctaaggctatataatgcctctaatcattcaataaagattagattgctctttctttcaatctctctctttctctgtctttctcttctctttcctttcttctctcttcgttctctgttcttgttagttctgttttcttctggttcattcatggcgaagagatttgacatggtatcagagctctttcccccattgtcagctaatatggcaaatgttggtgccaacaccaatgcagcacagaacaattccaacaccagcagacctgtgaatcaagtcaatggagcttcgaatccaacccgatcaagaaacaactcagatgagttcaatcctgtttatttcaatcataatctgtctattagactaaatgatcacaatttcctcctatggaaacaacaggtccttgctgcaattcgtggaaacagactgcaaaaatttattcaagatcgagctcctccacctcgattcttgaatgataatgatcaagcatcgaacaccttcaacctagattttcttgctgggaggttcaagaccaactcctagtgtcctggttactatcttcaatgacaaaaagccttctaacacgcatggttggctgcaacacagcgaggcagatctggaatgcccttgaaaaacacttcactcttcaagtctcttccaagatcctggagtttcgaaccaaattgcagaaaattcgaaaaggttctatgtcactgaatgaatatcttctaaagatcaaacaacatgttgatctgctagcttcagttggagaaattctcagtgctagagaccacatagctgccatttttaaaggactgtctcctgagtacgacacattcataatctccaccaatactcgtattgaagagtattcagtcgctgaaatcgaagcacttttgcttgcctcagaatctcgaatagaaaagactgatcttgaaccagaaactgagatgagtgccaaccttgctgctatggatctggatcaatactctgaagttaacatggcataccagaattatccaaatcgcaccaacagattctataatcaaaacagaattccttcttcatattcacgtggatctaacagtggattcaccaatcgaggagctcacactagaggtaacaacactaatctgccctcttttaataacactaatggtcgtggtggttttaattccagtagcagaggcaatagatttcccaccccctcgaatcgtgttcaatgtcaactctgtcacaaacttgggcataccgttcttgattgcttctatcgctttgacaaaagcttcactggagtctttccaagttctaacactccaaatgcccaagctaatgttgctcaaacaacaccaatggatgacaccagctggtatccaaattctggtgcatcaaaccactgcactcccaatatgcagaatctgaacaccagcatcgagtatgagggagaggaggaactctatgttggtgatggttctggactgcccattcaacacataggtcagtctttcattcaaactcaatcctctcatccccttgtcttaaacaatttacttcatgtaccacaaattacaaagaatttattaagtgtctctcggtttgcacatgataacaatgtcttttttgagtttcatgctgataaatgctttgttaaggatcaggaaactcgagtcatccttctcagtgggacacaccagaatggcctttatacctttaactcctctcagtttcatgtgcaaccttccaaatctgttgctgctccaagggtgttgacagcttccatgtcttccaatatagag

SEQ ID NO: 38007 - DNA, 1719 bp, Cannabis sativa
ttttcccatattttttaaaataaacctttatttacttatacgttatttttttatcaaaataaaacttaataataaattgatatagagttatgataacaaaactgtttctttttctacattggttcctattaaaaattatctttaaattaattatataaaaaaattatcaaaaatagaactaaaaagtcttatttataatattttaaaaaaataaaaaaatccattttattatttaacattggttttatatattataattgaattctgaattgacaaaaatatctggaaatccttttttttttattcctttagaaaaagaaataaagaaagaaagaaacgtaaaaaaaaaaaaaaaaaccgcacacatttacagcacaaaaacatactatataagaacaaagaatttaccctacccccacggtcaaaattcccaattttttaaaaccctaccaaaacccagaaaccaaaaaccatgataatcaccattgtcgatcaccaggataactcctatacccataacaactacgatgtaaagatcgggctggtgactaccgtccgaacattagtgaccatctccggttccatggtccactcctggatccaggacatcaagcgtatccacagtcagagtctccaccgtcttatcgttggactcgacgtagagtggcgaccatccttcactagcggcgtcgagtctccggtggccataatacaactctgcgttgatgataaatgccttatctttcaactccttcacgcggactatattccgaattctctgtccgagttccttggaaactctaatcacaacttcgtcggtgtcggtgtcgtggccgatgtagagaaactgcgcaggcattaccaactgtacgtacgaaatccggtggaattagggaatcttgctgcgtataagcgccaggatcagagtctgaagaatcaggggctgcaaaggttagcgacgtacgtgctgggactggacttggacaagccgaggagcgtgacgatgagctggtgggataatcggtatctgaattattctcaagttaagtacgcatgcgttgatgcttatgcttcgtctgaaatcggtaaggtgttaatggctgagccagagccgtattttggatttcgttgatgggtttagtttctactctagtcgccgcaaatagttttattttcttataacagtattgttcatgttttagaattctgtttgggtaattgtgaataatttagtttcaatttcagttcggtataatggtctatagtattgcttttcgattttagttcagattccaagagaaaagtttaatgtctttcaattccatgttcttataagatttaaatcaatttgcaattttttttttagtaacatggagatttatattgatttagtttgaagaatgtaaagaacacaacgagaagttgcttttatttcccttcgttttcagctgtttgattctattggcaattatattatataccaatttaacataaaagagaaagctaagtccacataaaatcaaaatctaaaaaaaaaaggctacaatctcaacttaagaatattttaaccaacagaattgctaaaagtaaagcacctccaatcgggtgctacttatagatagtattaggtgctcaataacaatgctcttaaatgtatatttttttacctactttcccaccttaaatttcgtaatagatggaatagtttataaagaatta

SEQ ID NO: 38008 - DNA, 5029 bp, Cannabis sativa
tgcatagccataacaacagggccgaccctgaaattgggtgggcgttaagaaaaatgaaagatcatcgagtcctttattaaaaaaatatatatgtatattttaaaagtgaaatatcttttttggacctctgggttgggtgggctttacgtgcaagcctagtccgcctcagctcaaggccggccttgcataacaaatgtgttatcaaattcaatcttcttggtcaaacataataagaattatattatcttcaatggggaaatttacttgtatagaaaagatttacactttctcataccattcgtgttattaatgtagggctatgtaatcccgaagcgaaactattggaacttcatggagacgagagctgcacgaagactcctacgatggaggccgaagaagattagcgattttttttttttacattaacaaatttgggtaatcttccctcatcttgatcttaccagatgttttttacttctcaattttgaccgtaaattcttatatttttcgactaaacgaaccgcgggaagaggtctcagtaaaaaaaaagaggatttaggaatgatagtgttgttattattaggaatgtattctttcatgtcaaaattataattctttttcttgtttcatatataaaatatcaaatatggttcttttaaatttattctgccattgttaagagtttgaaaatagttggatttggatgtgtaatgaatgattcaactttattatctctctcactccatggaacaattttagagcaaataatgtaaaaataatttttttttttaattaaataaaaaaattgagcataaaatctcaaaaagttctctttctacttctttttcattttgcactaccattttattatcttaaataattatgccttgcctacaaatttggcttttatttatttattttttgttttttatgtaataatattaagtcaaaatggggtaaattagaaaatacttcttttatttatcaattaactaaattacctttcatttatatttaattgaaacatattttttttatatgtagtgtacctaaaatatcttgagataaaggagtcacatggaaagcatttgaaaagtaacagaggtaaaataggtataatattaaaaaaaaatggtaaaaatgattttttttttttttttaaaaaaaagataaacataaaagaggacaatataaaaaaagtataaagtctacaattatcattaaatttgaaatctttgttaaatcaattttccttacttaaaaattgtacttgaattcccactttttttttttttttgacagaacaataccatgcataagtgaagtattaataaaatttaatattattcacttaaaaaattatttaatacttacgtagaacatattttattaatttggtattaacaatgtaaattacattaaattttatacgttatccgccatctcaagccacgtgattacattgagttggtcaaacacctacaaagattgtttaataggatctgtctgaccaacctcgtatagtttatatcaaactagtgagtttaattacgagtgcaaatggatcgagtcaaatctgatcagattataattcgactcgatctgaatcagtagacaatcctcctggggcagatcatgatccaatctccatgtattggtactagattaggacaggacgggtcagcaatcagaatctcgctcgaattatttcagatcaccgctaatccgtcggatcaaagctctgatctactctgtccaattagatctttttgccattcctaagtttaattgggacctacaataatattcatacaaattcaatggtgagatctctctatcctcataataatatcccatgtgatatgccatttctctttctataaatttatatatacatataaatatattaaaaaatatataaatacattctaaaagaattagtggtatgggagcccatgttatacctaattcattggtgtttctcatcaacaatgctaacaattctagaaaatatagtgcatgacatgtggatagtagacatatatgtctataagcttttttctattttagccttttaatttggatatgtttagaaatattttaaaatgtaattattcaatcttgtactcaaatttagtaatgatagtcacacactcttaatttatacactataatatataaataatctcaactacacaattaaatataatttggtcaaccctacttaatatatatatatatatatgtgattaagattagttacatattgtattgtgtaaattaattgttcaaaataaatctcactatttatatatataaatatatttcatggtcaagcattattaatctattaaaatatatttttttatatgtgccttcaatttattttcgtatttaaatataaatcttgttatatactttttttttttataataagcgtgataatattcattaagcaataaactacttaaacctcacggtcgttacaaaatagatccctcagaattgaggaaatcgaaatagagccatacagttggtgggaaaaatctcacttagccacattatgggcagcaaagttacaagacctactaacatgagaaaaattacaactaataaaagcacgagaagactaaatacaaaatgagacatagttctcaagagcccaatgagataccttcccattgagtgcattgatagctagcctcgagtcactctccacaataatatatatatcctagatccattgccatcgaaacagccaaacagcaggccacagcttctccacatagcgcatctgagttctccagtcgagaagtgtcaacccgaatcaccttgcccagatgatccctagcaacaccagcaatgcacatgctctctaagcccactctaacatcacaattcagttttatcatgcaactctgcaaaaaaagtacaaatattgttaatacatttcaacatatctggggggagttattatgtaccagttcgttgcgtgtcctccagatactgttatataccttggttttatatatttatacttaaatttaatatatcctaatttaatgataaaattctatagaaagatttaaatccattttttttttaattaaatacttgatagcatatacatcaatatgacatatatttatctttaaaaacaatatcacatatatatttatatatgtatatattttagatctgaagtaatcaattttgacaaatgtcaacaagccatacatgtgtggccaattaatattataatttcataacatgattttgctatgattgagttatataaatatatatatatttgtggtattattaaaaatgttttttaagctttcttgtcaaacataattattacaatataaataaataataatatatagtaattgaattattttgatttgatataggaagcttaataattagtctataaacagacaaactaaatccaaaagcaagtaatagattggccaaaaattaaaatatataagataatgacattaatttatgtaatttaaataaagaacaaaaatataaataaataaatagttaagtgaagttgaagttacataacctaaaaagtttaatatcgaataaataaataaatagtataaatggattaataattgattggaaaatcataaattattcaaaaaaaaaatgtatagtggaaagaagagtggtagccaagacatcaatggactaagaaagaacaattataggcccaccaattagtgtgggcccctttgattgggcccaccaaataatgtgggctttttcggttgggccatgatggactaatcaataatcattatggtgggttttcttcctagacacactattttggagaaataaaggagaaattaacatgaatagaaatagaaaaaggagtaaaatgaaattcatgatgagtcaatgcaagtatttttttcttttaagaaaataattaaaataagattttcctctaaccattgtagatttttattttagattgaaaatccattcaaaccttcaatttaaaatccctctattaataggaggattagaactctctctctttaaatattataaatttcaaaaaatactttcaataaatattattaaaaaataattataagaacgtaatagtaattttataaattaataattatctatcccttctattacttcatctttcctaccaaagaacataaaataagtattattctccttcccctccctcccttgtactctccatccttcattaactctctatccatcttactctcattttttcctgccaaacatagtctaatggtaattgacagtgaactcttcttatgttttaattttagacacttaaattcttgatctttttttagtggcaatacctcattaattttacttttctttataaatttgaggcgttcgttaaattcaactgttaaatatcatctagaatgtcactatgtatagatgtgtatatatgagagtaaaatttcaaattcaatgaaaatataccacgtatattattactaacaccgccaccaccaagctatctgtgatgatagagtctaccttctggtgctatcacaagcagagacgtctctgttagcaagaacgacaatgatgctatttgaaaggaaagaagaaggagcattgttgttcatggaggagaggatttggaaaacgacctctatggtgtcttttagagtaggaggtttttagtttttggtttttggattttagattttaggtttttttttttaatagaatatgtatttttattaaataacatttattttaaattagttattaggtaaaaaaaaaataatgaaataatatgaattgtccatgtgtcaacataagtttgaaaaattgaggttttgagtattaatactgcaacttttaaaaattaagtatttattagtaacaagattattaaaatgaatatttgtactgtaaattaataaaatatttttttattctaagagcatttacatcaacttctctacttaatttcattttatttattttacctcac

SEQ ID NO: 38009 - DNA, 2468 bp, Cannabis sativa
aaatcctgtgcaccaccgaccggaagcccaaccggagctgggctcgggcttgaccctttgtcacagcgcctcattcacacttggactaaacaaccccagcttctctacaactctactttaccccttactattgatcaggttaaaaaagaaaagactgcatagtgcattgctttatttgtgttatataatggtagttttataattgtttgttttattatttaaatttatgtagaaccaagcaactgacagtgagaaaaaggtaagctggactttgacaagggatgatgagtttaatttcagagcagcatattgggctgatcttcatggcattctatataaagatcttccacctgaaatgttcttttggggtcacctttttctgtcattctccatttgtagtgatacaaaatcagtgaaagtaagggctaaagtgcttcaaactgaagataccattgaatttgttggagatttgcttgttgcagctgatggatgcctctctctagtccgtagaagttttctcccagaatcaaaactgaggttagtccatcagatttccaaaataaaaactaaaaggttcaattttgtgcatttgtaatgtatatttccttttgtaggtactcagggtattgtgcctggagaggggtacttgacttttcagggaatgagaattcagacaccatcataggcatccgaaaagcctaccctgatctgggcaaatgcttgtactttgacttaggttctggaactcatgcagtgatatacgaactgccccagaaaaaattgaactggatttggtacataaaccaaccagaacctcaattgaaggtagttagtagccacatcatactctttattttccgaagaggatgtactttgcagctgtatcttaaccattaatggaattttaaaaatttgcagggaaaatcagttactatgaaagtaagcaatgacatgattcagaagatgcaccgagaagcagagaagacctggggtcctgctttggttagagtaattcaagaaacggttgagccttttatgaatgtgatatacgacatggatcctttaaaacaactcttttgggaaaatgtggtcttggtaggtgacgcagctcaccctactactcctcatggtttgagaagcaccaatatgtcgctgctcgatgcagcggttcttggcagctgtttggacaagtggggagttgacaagttggaatcagctttggaggaatatcagtccattcgtttgccagttttttctaagcaagtcctgcactctaggcgaatgggaagaataaaacaaggcttggcttttgaagatcgccagccttttgatcctaagactgcttctactaaggattgtgaggagctgcaacagaagaacatgcccttctttgctgattgatggatcttatacttacaagagagtatgagtttctggcaatcgaaacaagacaaaacgagagaaaccagaagctttggcctccattagtctattgttgtaatgtatcttatctattctgtatctaaagccacagcttaaaataataagatagaaacgctatgaaaatttgaaattttattttttgtaactttgttttctgaaaattgttttcaaaaaacaaagccaaacaagtcaaattgttttcaaaaaacaattttctatttttaaaaaacaaaaaacagttttttagttatgatgtcaaacgtgcacttagtaacctatttgcatgttacaaattttaaggagtaattcaaatgtcaagaaataaaagttataatcagaagtgagcacataccaaattacttttttactgcttttttagttccctttttcagaggaagatgagtatgtgatcatgcctgaaggttattattacttatttatcattttatatgaagcatgttgtaatgttagtagtgtgtgagttgtgggagatagctgatacaaaagagatccaaaatagtgatagagggagggagggaggaacatgctcatctaatgaaagatgcagtcttgacaagttgaaatcggcaattgggacattataaaagtaaggattggcccttgaaggacagctttttcatccaaaggatgttgttgcttctgaagtttttcagtagctgcaacagaagagtatgttcctcctttcataatttgtttggtatggtgcttttagttttttgtgaaagggaagtttaaggaaacctcaacagttccattaaatgttttttacatgagaattctggaaaaagtagtaaattgggtttggtattttgagagaattgtaatcctttgcaatgggttatgactgtatttgtttgcgcttgtgctccctagaaaaatgtcttctgttgcagctcctccccaaccccaaacagatatcctttttctcataagagtaggtaattttttttttctttttccttttaaggaggtgttttaatgttaggaaaggaagatagacaaat

SEQ ID NO: 38010 - DNA, 2898 bp, Cannabis sativa
ttatatccaaacacaccttgcattttaaaatatagtataattactacactatgtaattaccaccttagtaattacacagttacttctaaacacaccttaagtattcattgctatcaaaaatgatatttgaataatactttcgaaaatattgatgtagttcactgtataaaaaaatctagacacaaacaaaactcaattttcttgatatcaaattaatgaggacaaccttacaaaaaagaaaattaatgaggacaaaactcatattcactggaattgactaaattggcgttaaagcattgatgtcaagttaagacgtgaaatctttattattattttgaattcttttattattacaatcaataattattattataattattgcaaaacttgaaaaaataggtataaattaagacgtgaaatccgccaatattaattaattatatattattattgatacgtgcatggcacaattgtttgataatatgggtggatatgaggccccaccacacagctacaactaaggggacacacgtgtgagatataagtgggacccaatcctagctggcgacaggggttcttttaccaggtcaaactaacacatttccttgttcttactaccctagctcccaaaacaatttttaataataaggaattaaaaattatctaaagtatattaattataaaaatatttgaagtatattgattaattatttttttttatattgtttaaaatcatatatatatatatatttaataaaaattataagatttattcgttcaaaacaatagaacgcacttcagaggaacagtcctctaactgaaacacacgacctgtagagaaacaagagtctattggcaagcaataagccaacttatttgcagatcgttttacaaaacacaaatcaataaaaaataaagccaaaagcaaatttcgaacatcttgaacaacaagaccaaactgtgaaggcataataaaaatattgatataaatcgcttgaacacacaccaagttgtctgtttccaacatgactctatcccacgaatgagttgtaatccaactcaatggttctttaatgcctattatctcaacaatttcaggttgaacacatccaatctcccctttcttgaatgcttctaccatagcaacatgatgatgatgatgattctaagctacacaacccatgccaaaagacaagactccaaccataaaaaactaaaaggaaaagactaaaaaaccatgtcaaaagacaagactaatgggaaaaactaaaaggaaaagactaaaaaaccatgtcaaaagacaagactaatgggaaaaactaaattagtttcaacatataaacacgatcacaacattaaaattaattaaggaatgaactccttatagttctaaccccataaaatcataaatatatatttaagtatattgattatatttattttattagtagttttttatttaataatctttataatgaggtgatggtttttatgccgtttacagtcatttttgtgtttttcatggcttttgtgctttttacgatttttgtgctatttattatagtttatcccaaattatttaaggtaatttcgtagtacagtcaatcataacttctacatcaacgatctttcaattttaatagataagtatttcaagtctttctatttatcgattgttttatattataatatgaattattttaccatctttctttcattttatctattttttcattaaattttgtagtaatagagttttatttattgttgttttgtaggtcagttttgtggagagcttacgattacaaagactttaccgataagcttaattcaaagattgtctcttctaatacatgttgtttcttggtgttgtttgttttttttcaggtagtatattagtattacaagctaaaacttagggtcttttgctatcaacaaatcaagtgtgttatttaatgagttgggggtgatgtttgagaatgttatagttttattgtctaaatttttgggacatttttttcccatttggctctcgatatgtattatgcaactcatggtttgacaaagcatgccttttgattaaacgatgagctatcttggttcgaaaagttgtcaccgccgattgtagaatataaactgctacattattaatcatgtgtgattttaatcactgcgtcaacaaaaacccttgaaatttaatacgaaaattaaaataatactaataattgggaagagtgagatttgccttttcaagaggaaaaataaaaaaagaaagaacatagttgggttggggcccacagacggttgggagtaatctcttggaagttgaaacaaacagcccacggcccacggcgtggacagaatcttcctgtgccaatgccgcgaaacgcgacggtaaaaggctaccactatgcaagcttgctccttcgttttccattttcttcttcttactcttttatttaacatttttctcggattttgaatctttgactgactagtatactattttttaaatttatttatatatataaataataataaaacttgtagagaagtttctatatcatttagtcctttttgaaattgcatcacaactcatgcatgttttagcatcacaatctcgtatattttagactttttctcttagattgcaattttatgatttaggaaaatatttattatttaaaaaaaaatgaaatttctatgacaaatcaaatcaataagaaacgcacgcgaactcaagcattttgagagttttatacgaaagattaaaatttggctttttataaaaagaaaaaaggaattatttcaaaaatacacgaaaacaacaaaaaaaatacaaaaaatacggttttgcagaatttttaaacatttttatgattttttttattttattta

SEQ ID NO: 38011 - DNA, 2711 bp, Cannabis sativa
taaatacaaaattagaggtaaattagattaattgattaatagtatttttcaacttacccccaattaatcggcctaatgtaatcaacatttttcccgataaagttacagtttttttgaaaaaaaaaaaatcaagaattataataaaattattgttatttaaaagaaaattatatatcaatttttactttcttttaagaaaaaaaataattaataaaatatgattaaaaattaaaaaattcttgcacaaaatattatcacctttttcttaatatatggtacgtataaataaagtctctaatattattttcgttgtcatattgttattagtgtaattaagtatcagattttatataatttaaaaaaaatagcttctaaagaatataactaactaattcttgagcgccatttataaaaaatattaaatatcagtgataccgaataataatgcccataaataaaagtaaaaatgagaagcacaattctcacataataaaaaatcttggatgggaacagtgtgataaacacagcgaggctacccaaataaatgaatacaattaatatggattttcaatgactcacccacataatgttacacctaattaaacttgatattgactactaacatttaattgtttggtgcatatgcccttataatatcacattattattttcatataaagtattaaaatatggatctaaaataagaactgatcacaggaaaagcaaaaatatgaagtcattatttaaaattaaaataaataaataaaaacgttgtacgtataccaaattaacattttatcaatatgtatattatatatgacaaataattagttatacaataattaaattagtgagaatttgtatttaattatttttttaataataattaactatttcacacgattacaactgtatctatacaaatactatttttttagtaataaataactcttttttatgattaataaagtaatatttagtaataaatattatgtttaatgtgattttataaaaaaaaaattacatttaattataaaaaaattatattacatactaaaaggatattatatatattataaaaagtagtttttttagtgtatatatacgtacaattttgttttaacaatttttttttttctttacaattgatataaataaataaataaatttatcatattaacaataatagatcacatatattactatactattacttaccaatacatttagagacattaaagggtgcatgacaatccgaagggagtctcaaggcaagagtggtattgatcttgagcccaaggttagggttatccttattccttatgagaacacacatgcatttcgagtacttatttatcacatccttgaaccctacacaacaatccggtgtcgggtttttcgattcaccaccaacgaacgggagacacgtcgctaaccctaccaatttgtcaccacattccgccttgtcttgctcgaaatccgagcttccaaaccctaccaaacacaaaactactaccactacatataaaaatatgtagttgtaataatttggactcatttttataatataatgagtatgagaaagaaagaataattgaaagagaaaaaaaaatagtatatatatagctaggtttacttgttgtagagggtagaagttgtttatatagatttttttggttgatgagatagaattgagagtgatatgtataaataatattatatgtgtgaaaatatgattaattcattatatcatgatgattagttgtcaatttatttattgaaaataaataaatattaatgatctatagtatagtaatgaaataaagcatatatatctttaatgttgatgaatttataagatgatgatggaatatgtgaaattggttataatcaattcggtggtattgaatagtgagttgggatatttggttgtgatataatcaatttagtgggacaacaaaagtagttggaaggtatacccatttattattgggtcactttaaaataatttatattttaaccaaacacagtgtacatcatggatggagactacctagcttatagtactaaaacacacaatatcgtattacattgctgttagtataattaattattggattccatataatttaatatgataatatttggaaaaaatatcgctaagaattctgaaagtagtacctcataatagtagtgcctaataacaacgtaaatatatatataaaaaaaaattaattaaaaaatgcaaaaatttaataaaagaaagataaaaaaaatgttgtaccctgaaagcagtacccgatcttgagccacgtggcttaaccgatgttataggactacaaagttcgagaagttcctcgtgagggctggtatcagtatttataaggtaaaatgctataaggatattgttaggaccgtcgaatatcatctatctccacattgttatgatattgtctactttagacctaaatcctcacgaatttatttttggacatatttccaaaaggtctcattccaatagagatagtatttatctttatatacccaagatctttctcatttctaactaatgtgaatttttaattatacacccaacacatattattaattttattgatgttgagaatcatggagttccatctcaaaaccaattgacaatgagtggagtagcccatgttcttatatatagctcaatacttttacatttaatc

SEQ ID NO: 38012 - DNA, 3638 bp, Cannabis sativa
taacagcaggacgacaaatctttgttccaggtgcagaaaggttgaaaatattccttattataattggaatgtcgtatttcatcacaggaatgattgagcgtgggtgcaaaacattggccccaaaataagactgtacagatgaagttcacattaaatagactgtacagatatgctcacattacatatgtcatatatgaataagatgagaacccttgacattgaaaatgatgagtagtaaaattcaccatttcccaagcctcttggtaagataatgtcctcagaatcacagcttcactaactgcagaagaaatgttgttagtcatttatgttatggaatttagccagaatacaattagcagcaataagattctattaatgtaattgcagttggcagcatttgattgagagcaattacaacaaaccttttctagggtctgcactatacacaccatcaacatcggtccaaatggtaacttgacgggctctaaatagagcacccattatagctgcagaaaaatcacttccatctctcttcaatgtagtaggtatattttgaggtgtgctagcaataaaaccagttgcaacaattgtattgaatggattttttgaataccacttctctagtctttgcctagattcttcgtaatcgggatcgacctgattagaactagtagggtttacaataagaacttccctcgtgtccatccatccacagtctacaccagcctgcaagaagaaagcataaatatatatatatgtatatacattatattgattgtaaagcaaggatgtatgcattcagaacttgttccttaaatactataaaatcaacagacctttctaataacatatgacaacatctgagcagaccatagctctccatgtcccacaacaaaatcactaaaagattcagttgcatgaccagctgcaaaaattaagctagtaaattaaaataataaataaaatcctaatgtaagttgaaacaaaattgaagaagtgaaaaatatctgacagatcaaaagtcaattaaagttgtagaaagtgaaagtagtagaatatcatcacaaatcaatgaaaaggaatgaaacagagtgatgaatctgatggtattaccaatatatattgctcgaagcattgcctttaggttattgatgtcatgatgcaatcttgataggaaagtaccaaggtcatccccatcaagtaaatctagtgctgttaatctgtgcttttctaaaacagcctccaatgcagataaataagactcgtcacgtgattgagccttgttgatgagatcatacatcatatctgttactttagacatggctgagacaacaaccaacttactctctgaatcatcagtcaaaactatgtttgcaacattcttaattctttctgagtttcccacacaggtgccaccaaacttgtggacagaccaaacaccagctttagaaagcttaactaattcaggggatgtttcaactgacgtgtctgtcattatattaagagaaagaaaagtatgataaagataaatcttttaaacaaaacaacattacttgtattattataagagaaagtaacaaggtgaagtacagaatgaacctgtaactgaggcaaatattttagtctttgatgccacttttctttccaaccgagcaatagaatccaatctgaacattcagaataagttcttcgtcaaatgaaaagtattaatgaatataaataaaataatgagcagctcatatcttaattcagtatgaaaacttaagcaccaattacaatcaaatactacaatgaagctcatgctccagtagtaacttgctactgtctctggagctttcaaaccttactcaatagttcacttcagaaaattccgaaacactaactggattagtagtacacgggcataattttgcacattactattactcagcttacaaaaaaatatagtgtaaaacttaggcaatcggttttttttttttgaaatttttagttttggcatatgctgcgaagaatttgattctgagacacccacaaaaatatgtggattccattttcagccaactttaaaactccaacatcagaatattcatatgaagaagaattaagctatacttagtttctcttcttgcgttaagtggaaatggtagcagcagaagtacctggcaatagaggagcgatgaggagggagataaaggtttcgagattgggaagaggagcagatcttcttgtgcttgggttcatgaggcaatggttttggagaaagaaaatgagcatggttagagatcgctgaggagaaaggcgccatggctgaggctgagctcactcagagagaagagtttaggtttctcagtgttggtttggcggctctgtgttaaaagtaattcataaaatgatatgatgatatgatatttggagaaatgaatgacatccttaattaatttacaaatattctaaaataaactcctaaaaagttagtctaatgttccgaatttggaaaaaagtatttttttttttttttttgtaatgacaaattaggtccggtcacctctaaaatgactgatgtgtagtctataatttgtgttgttagtattgtccatattaacaaagatattgtgggtgtttaattgtccaattctacttctagtttctttgtttaattgggtataaatatattttcttgttactgttttgattaatcattttgattggagattaaagattacgtttctttcttgttttgtttttgtgtttcattataggtattaacaagaaactccattcttgtgagttaaagtttcagagcaagtcctgaagtcaagtagtgaaagctgaatcgatttcagctaaggcttggtgttacagatttgaaggtgttcagatctagagctttgttgaaaggatttcaacgaacaataagcaaaaggatcttgcttgttttgccaaaggatttagtatattgggataaatacttctgtaagggatttgacaaacttgtacgaattggatgttgtaaatttacaaatcatttggtgaaatttcttaccctggtttagggaactcaagtaatacctaactgaaatgtgttttcagtaacaagagaagcttgtaaattgattgtctcttattgttgtttctttatttctttgatgcttgaactcgtgaatcaaatttgtaataggattaaacggaaatttggagttctaacttagtaattaggcaatttagaacttacataatttttttatggttattaggacaatttgtaaaaatttaaaaaaatttaatacgcgccacagattgtttgatcctgtttttggtatgttaaatttgttcaaatctcttaaaattttgcaaaatatcttaaataactataatatagacaaccatgaaaaaaaaattgaactaaaaactctctcaaatgctgaaaggatactaaggtgtctaacactactatgaagtgacaccctataattagttagcaattttcagtaatcttttgatccaatttttgaattatactaataaaaaaattacacccgggtagaaacttataaccatttatttttttaccgcgcatgttgtcattataccccttccatctattgtggacattgtcccacatggaataaatggtagag

SEQ ID NO: 38013 - DNA, 2136 bp, Cannabis sativa
gctatctaatacctctaaatagtgttaaaaactattaatactttataacaatactgtaatgctattgaaactattcaatatcaaaactttcccctcttagcctaaaagttcttaaaaaaatacctaatttaattttaaaaatctaagtatattctaaacttttactactatatattgcaaaagaatcatatttaaattttttatgattatatattcaaatataattttttggtctaaaacactcaactaatttaatttgcacatattttaatttaataaataatacgaactaaagaagaggtagtgtttcttacttggtaaagcggttgatcgcaaatccgccatccaaagcaccttcgaaaccgaggctttaggcaaaagaaccaatgttgtagcattggcattagtctcactagccattttcaaagctttcttcacatgaggatcaacatcagccacactaataacaacacttgggttatgaattttgatcaaacccttaacactagcataaatagcttgtacaacgggcacctccgaattcgatatccccgaaagggcacccacatccaaatcaaaaatcttaaaccttctttctttacaaacagatttaggccacttgagagcacttgcagcatcttcacaagagcaaaatttgccaccagaaacagcaatgtaagcctttttaccaacagttgacctaaacttttcgagtaaaggtgagagtgctttgacttcatttagggaatgagcatagaagagtgcatcaattttttgagggtgcattgcagcccattgtgtgatgtaaccagttgatagagccttccaccattgatcatctctaacttgaacaatgtccttaaaaataactgttgtttccgaaacataggctagtctgtgttcactgtctccccatgtttccttgtcctttggatcaaccggtactacaaacgatcccgcgtttctgtacttttgaagttggtagctgcaacgaaaggatacgttgttagtaatgatatgttaactcaaaatatacatttataattttagtgtcacactcaactttttacaaaaaatactgttttttataaaagaatcgtaaaacaacaaaatagaacaattaaaacaacagtgaaaaaactaaaaaacaaccgtgaaaacttaacatagtacacaatatttttgaaaaaaattttgccccacaataaaaaactaaaaaactaaaaaatttcaatagtgtaaaaatttctaaaatattacatacaacgaccataagctaaggtacgcatagggcccacctaacctagagctccccattttttttttttttgcaaaaatatacatatttttcaaaattaccatatttcttttaaataaaggcttaaaatattaagaaatttttatttttacgatttttaaggtataagttagcaaaaatgtggatttttctcaaaaaaacttattttacggaaattttttagaaagaaatagaaaaatatgaagaaaacaatataaggtaattggttatcttcttagagtaactagttactcttatttgttttttttttttttttatatatatttttttcaattttttattgagtttttttaataattttttttttttgtaaatttttacacaaataatagtataaaatcctataaaaaaaatcatgtcactatctaatgttttggtgcatttttagtgcaaatataacaatttttttgttttgttgagtggagttggtaatgtaaagaaacttccaatctaatacaatggcagccaggtttggaaatggtcagcaacctaaatcaatttgaccttcaaattcttatttaacaaaatcaaatctataataacaatattcatcaatatgagcacattgtgtgattcaaaaaaaagggcactaaattaaatttccaagaagatgttattttagccaaaaataaataaaaataaaaatcacataattaacaatagtggaatgcagagtaagaatagtggaaacatgaagaatatatagtactcccttttgaatatattatgaatcaatttgctataaaataactaatcaaaatgtttagttaattactaatcataatgaataaatgggactaatgcattaatctaagtgt

SEQ ID NO: 38014 - DNA, 2949 bp, Cannabis sativa
  modified_base (59)..(66): a, c, t, g, unknown or other
ttaaatgtcaaatcattatccacgtgtcatttttttattagtatatttaaactattttnnnnnnnnaaaaataaaaatttaatgatctggacaacaatctttgattggtccagatacctacagaaatttaatgatctggaccaaacaaagattgacacgtgccaatttacttaacatttaacagtcagatacctacagaaattctagaattataacttaagtattattatcgccaaaaattaaactaaaacatatatatatttgcagccaaaaataaatttatatatttatatcgtaaattattataattattataataaaatactaactattctttacactcacctctcgtaatagtattaaacactattgatctcataatattaatgttgatatatagtagtagtggtatgtaatattgaaatgagataagagaggtataattaaggaggtggccctcaattgaattgtgtcaaaggccaaccaccacacaccatttgagtaggcacatgcttatgaaggcgttgtgttagttaggcagctcattcataattaagcaacatcaacatgtggccaacactaaaatatttctttctttttcccattaggattattgttttttttagatatctataccaaccaaataaaaataattaattaaaaaataaatttaagcaatttttattaataattccaacggattttgtccccccaaagaaattaaaataaatcatttttcagccgacccactcgagctagctatatgtactataataattaatgtcgattatttcaaaattatatatatcattaactatcaactatcattttcttatagcttggattggagtataattagattttatatataggtttatggttctatgaattaagatgagatgaaataccgttgtgggcattaagttgatgaaacatattttctttcatatattgaaataatatttttcttttttttttttaatcttttaattttgtatattatcaaactaatgtatcacaacttgcccttgttttattttcttatagacactattttccttttctttttttttttttttaaaaaaaaagatgattaggagtatataaggatatgattcatcttgccccatataatatagtacaagataataaggtgttgctatttttattagacactttgtcatgatttaatttatagattaattggaggttagagggttttgcatggtgttgcacaatatttgttattttttagattggtaatttttttatatcaaattattgataataatataaaatatgacattataaaattttaagaatattggtctaaatatttgtctgcttaatttatagattattttgcctacaaaaactaatacaaagagagatactttaatgtattattaatatagtggggaaaaaaatagctaatgaatatgatctaataaaatctttacataaacccaaagatatattgctttctttctctttctctcttttttttttttttttttgaaaaatttggcctcattaaaatcgcatgaaaatctcattccggaaaaagagtgtcaagacaataacattaatcaataagaatcgctatggtacaacataaaaactataggcagagacattttcttatattcatgaaatgattaattcttcatcttgctaaatgtatatagtcgagtagaaaatgctattatttttctagtgttgcttctctttttttaaaattttattttttgaaaaaaatgtgcttctctatttaagatactattactataaccatttccaaatgttgcttctctattggagaaatattattgggttcatcgttctaagcagagttggggtgatcataatcttttttcaacaaatgtgcctcacctaggaaaaaaagaaatatactattgatcattttcttgatgatgatggtgtggaatggtttggtgatcaaaataatatttttcctatctttcagaaatattttcttgatattttttcatttgacttgtcgatctgatctactttgaaataaagttatatggagccaattcttaatattgttgtgcctaaagttacatctttgatgaatgatcaaataattagaccctattatgattgttatattcacaaagcattgtttcaaataagctcgttgaagagtcattgtaaagatggtactgctaaattttatcaaaagtactgaaatactttagtacacttttattttttgactctttattcattcttgatccctttttagcttctccattccccctcttttctctcctcctaactcttccatttatccctctttacccttaggtgtcaatcctataaagattttctttgacatgtgtctattattattacttatgaagtgtcataacatatctttgacaagatcatttatatcaaatgtgagtcatcttgttcgaaatattgagtcatctcgtctgaggtatacgagtcatcctattagagatatacgagttatcttgtcggagatatacgagtcatcctgtcggaaatatatatgagtcatctcatctgagatatgagagttatcatgttcgagatatgtgagttatctcatccgatatatgtgactaattccgtttgagatatgagagcttagattgaccgagataggttatatcttagactgactgagataggccatatctaggaacgacgataggttatatcttaaactggtccgagataaaaaagaatattttaaactgattcgagataagaagagtctaagaatgaattgagataaatgccttccgatcctagataatatcttcatcaacacaatctgagatgagaattatctttgatcgatccaaattaaatattacttcgactcattcagtggggttaccctcttaattatattctcatatatctgctccttgatattactttcttttt

SEQ ID NO: 38015 - DNA, 11045 bp, Cannabis sativa
aaaggttaagtttgacctgaatagctatatgctgttgcgcctgagccaaaatactatcctgttccgatttggattgcccagcgctacaaaagaatattcaacaaaacatttcatgcaagtcagtcttcgactataccaaaacatttaaaataaattcggaatcatacaagacatcaactacaatgcctaactacatcctaaaggaaataacattgtaaatatttcaaataaaatctcaaatgttgtaattgcataatatatgaatcaagtaaaaggaaacttcatgtgagttataattaatatttcttagtgaatagaacctttctttaagattatatgaagtggaattgataataaataaatctgttatagtaaattgtaaaaggaattaataagcaaataaggaacaaacatggaagtttgagatttgaataaattgagatattccccccctatcggttgcatatggcaagactatttaatcaaagagtacaaacctcatagtagcacgtcgaacagttagagttttatcccccattttcaaaccattaagagaagcacaggcaatgtctgtcactgctgggtcctgaacttgtttcaaaatcaacaaaatcagattcgagaggaatactctggactagttattacaaagcaatgtgtgcatgaataaagaaaataaaacagccttatcatcaaccaatcatattaatttcatcacataacgacaaccatcggtagtaaggttagcgactccaaagatgaaaacttaagtttccatctaaactttgattgttcacctgataaacacaaaaaccatatcctttagagtttccagtgtctttatccttaacaaggtcgaagccacggagaggtctgcattgtaaaatttgaaaacttagatgaagtactaacagtttgtctgacacaaatgtgagatctatgagtgcaggtatcttcttccttgtttaatttatttcatcaaaaagaaacatagagaacaacataaacaagcataaagcatcgggcattaaaatagtcaataatgtggctcgtaagtaggaactgatgttctcacccaaaggattccaacaattcttttatctgctcttcagtgaagtaatacggaagcccaccaacgaaaacacgttcaggtccctctgctccagtgattgcactgtcatccgagtaacaagaatcagcaccgagactttttcaactttagagtgcataaagagcaatccaaattttaaaagtactaaaaagctaaccctggaatgagtccgacagcagccaagttaaggtgaggactaggttggctaggaccaagtgttgcagctaatgcaggattatagtcggttggcctccgcacccttacagcaaccccctataaataataaataggaaatctatttcagtcatgaaaaaacccatagcacaatggagttgagctgcaatcagcattttctcaggtcacatcacaagctttccaatggtcaaacaaccaaccacagttctctaaagttattcaatccaagagtgtctcatctggttaaattcacttatttacacaatttttctggttaagataaccccaaaaatggaacaggttcaatagacatgcatttgtacacaaatttctacaccgtgataacaatgttagattaagtagatcgaatagatgaaatcaaaacactgtaaaaatagttgttttcatttctaacatgtgttttaatttcagccaatagatcatcatcaattagacctaatgatgtttatcacggtataaatatgtccttatcaaacttgcctcaaatatgatcccatcaagtgccattgcattacttgcttcttcaacagttctcatctccacaaatgcaaacttcttctcatgattgatatagacattaacaactgcatcgcctgctaagcaaatgccaaaaaatacatactctactcaaacagtgcatgagaaagaaatgagctgcacattcggttcaaaataacagactataaaataatgcttgttgtaaatttctatcgtgagatatataattacctgagccggaggagtttcctccaattgcagccatgacaccgctaaagaatgttgcaatggtctgttcaaacataggacaatccttcaaagtgttcaaaggaaagcaagacatatttcttactacctaaaacagatgatcagaaaaggaactcaaagaaaaacctgctcattagctaacggaggaagtccaccaacatatactcggcgagcatgccttgtagcctaaaagagagcaaagatgacaaatatgaatcatagatagtaatcactaaatatttctatagacgtacatatggtatttataattctacctgctgagtcatagcctgggccggcatcatgggaagagaaagctgaaacatattaaaggcaatatggtattaccacaccaaattacagatgaaaacaagggtatcataaccatacaaaatgatgtcaatgaaagatacagacttgtgttgttccaaagggtaacatgtttggcaccactccaggtgttgtttgaggaacagccaacagctgccctgtgttgttaataaaaaggaagaggtgaagttcagaacgattgttgaaatcatttaaaagcgaaaacacgtcccagccaatgtgaagagataatacatttaataacctagacttacctatttcatttacaacgaaaccgaaaagagaaacctaaaatataccatcatatatatatatagtaagaaataagttccgtcacttcagatgctagggaattattagtaagtctaccaaatggaaactgtagaggttgaaggcgaacaagatccagctaactgatgcaatcgtcgatggacataaaggctacgtggtcacgccaacccaacattgccttcttacccaaaccatcaacaaaatcacaaacaaaaaacacacacaacagccaaacaacagaacaatggctctcagttcccatagtaaaccattataaaatagttttcaagcaaaaacactaaaagtagcaagagaccacaattcttcttgcaacatattatactagttaacgacacaaactagaattattaacatgtcaactgaataataactttacaagctaaaaccatacctggcatgtcagcaccgggcatcatgttcacagaaggtggcgccacatcgaagaaactacctcgcttgctgaagaagaataagtacattttcaaaagataaatcactactagtgttccaataagataatggtaaattacaaacttaaagtggcaacataaactgaaaaaccaaaagggtatatagctaggggattttaaatcaatatgaacaatctaaaattaagctgaacacgttgaataatcaccttttagaacgagaacgtgaagaagagggtgatcttgatctttcctttgagcgtgaacgttctctatgcctaggccttctatctctatctctttctctttctctctctcctctatctcctctatctctatctcttccttgatcataatctcgtcgcctacaaagaaaacatacaaaacccaaatcaatacacaatttaacataaatccacacattttttttctaaaagaaacagagcgttcatagatttaacaaaagaaattagacctcatattcattacagataatgttttctggaatgctagatagatccaacactccatttaagttgtgagcataagcccacttcgccacactataggcaacaaaattacaaattctactaatattagagaaattacaacccaaaaacatattagaaatcattttgcaacgagtacaataattttcaatttcccacttcgccacattattttacataaatccacacatttacatagctcattccttactggtttgataacatttccataaaatttaataaaaacctgtcatgatctcggctgtgacgacggtcatagtcattacgaccgccccttcctctgtcacctcctctaccacttctatccttatagtccctcgtcatggacctctcatagcctgacccattagaattacgctgagaaaattacacaacaataagtccccaaatatacaataaagaaactccataatctataacactaatttcttcactgcatcaaaacccacacaatcaagaaaaaacttaactaaaaagtcaatgtcattgacagttacttgaattcaatcactataaaaaatgaaattccacaaaaacatgtaagagtttaaccacttcacaactactaaagaaccctaatttgaaacaagaaagacatacaagccatcacaaaatcaacggcgaaaccactgatttcttcactgcaaatccaatggcgttcacagttacttattgaattcaatcactataaaaaaaaaatgaaattccacccaaacattgtaagaatttaaccacttcacaacaactaaagaaacctaatttgaagcaaaaaaagaaatactagccaatcatataagaaaaaaccccattataatcaatagtgaaaccactgatttcttcactgcaaattcaatggcgttcacacttactaacttgaattcaatcacttttaaaaaaatgaaattccatccacacaaacattgtaagaatttaaccacttcacaactaataaagaaacctaatttaaatcaatgaagaaatacaagccaatcataaaatcaatagcgaaaccacagatttcttcactccaaattcaatgacgttcacagttacttacttgaattcaatcattataaaaaaagaatgaaattccacacaaacattgtaagaatttaacgaataaaaatcaaaacctaatttgactttcaaattgagatatatatacgaaatgaaagcgtactttgctccgaaaagtagcgtagtcgtcaccactaccatcattatcagacattgtaggtcaaattcgaaacccaaacacaaaagattttgggatttgagtaaagctcagaagaccagcaaagttttctcttcagatttttttttttttttttttttggttgcaaagaaaatcttgggatgaatgagaaagcttgtcaattcattgtcgtctttatgggctctcttttgaagagaaagctttgcaagcccattaaaggcccagcccattatcgaatatggtatttttttgagataagttgaaaaataccttttttttgtatccattaatcaaaaatactctcaaaatatatttcatttaaatatacttacttttacagtgagttgaccaatataccatcccactctacttaaatctaacacataatttacattaatctaaggatataatgaagacattatctataaaagtgtatattttaaaaaatatagaaataaatgtaaaaaattaaaatatgtaaagtaaagtggatatataatgtaattttctcgtaattttttgtaaattattttaccaaatacacaaaaataacaaaataattataaaatatagttgtatggaattttgatttcttataattttatttacagaaaatacaatattttgatgtattattatattatatttttattaatttattgttaattttctattagttgtacatttgttgttgttgttttgatattattttactgaattttctcattacattagagttgttacaaaacactataaaaatatataaaaaaaaatatctttaaacgtaaaaatgtaaaaaaaaaaaatacgaaaaatagtgttttatgtagttaatttaatatgatcaattcgaggtattagggcttaatgcccattgcccactccagatcgaggacctccagattgaatggtagtttctaaaggtattattttagaaatactaaaaaataataaaataattacatttttatggagtaaattttttttttttaaaaaaaaaaaaactttttatgtatatttttcttaatacatactgttgtttttaagtttttttaaaaaatatgttatttttacgttacaaaatataacacaacattacagcaacataaaaatttaaaacaatgttgctttcccttacaaaaaatatataagaatgtaaaaaaaaaaaaaaaaaaatgtgtaatttaaagtattttgtgtaaattttcgttttctatgataggtacggtcgggcctataaccattgtaaatcaaaattgagaaaattacactctatactctttttatattgtcctattttatttttactcttttttttaaagtctatcatttttacttctttttttaaacattataccaattttgtccatgtcacttcaagatactctccatgtgactcaggaagagtatcttgaagtgacagggacaaaattggtacaatgtttaaaaaaagaggtaaaaatgatagactttaagaaagagggtaaaaataaaagaggataatataaaaagagtatagagtgtaatttcctcaaattataagcctaaatagttgtgttatattttggtattttgttgcaaattctataagttttgtggtatttttttaaatattataaaagaatagtagtcttgaaagtataatcaacccaaagaaaccttatataaaatttcgatagcacatgaaaatgtcaataattgatccacaatacatatgaacctcttcataatgggacgagattaagcatagaacaacaaaaatttatggaatatatactaattacataattgcatacaaaaagattagggttctactcaaatctccaatatttgggtattatttgttgatatttattaaacaaaattatatgatgatgtgagttttatgccgggccaactcaagagtggtacagtagaagctacatctaaagctcttcacccagattcaaaaaattctttaacaaaaagattataaatttactttagcgaatgacaaaacttctttaagtttatttttctttacaaatttatagcgtcagttaaatactaaatagatgaccactgtgtatatctatgtatacatgaaagtaaaatttgaagactaatacaattataatcgatttgatatttaacaacgatatcttgttggtacctcaaatttataaagaaaagtaaatataaaagagttttgccataaaaaaataaataagggagttaagtataaaaaatcaaaatataagagggttttatagcaatcaaccctttgtgtttttattattatttattgagaaatataactattttaatacttaatttattttttaaaatactatattttatattttattaaaaaaatgctaaattatattttcaaaacactattcttaacactatataaaaacaatataaattttttcatatattaaaaactcaattagatttttttacccaaaatttcaaataacttaagatggccctgattttatgtgcatgaaaaatgaagtagttatgcctattaattttcatccatatttcaatccatataacttgaacaattactattaaacaaaaacaaataacccaaaaataacacatttattttctccaaattacttggtctacattattccatgaatttaagcaataatattagtagtaccacaacacaaccaaaaattgagaagtacaacaaaaattgtactccatcaaaataaagcccttattttgtaacatgtactagtattgttatgtgtagtacaacatttcattcataaaacaaagaaaaagtactttctagtactctaatgataaaattatatataaaactatacaaaaacacaagcaatgccaaagagaagaagaaggtttttgaaagaaaagatggtagaggagtctatcaggggtttcctgagaatacacgaatcgatattataaaatgtatgtgattcgataatttttcgtgtgttctcaggtcgcccctgctagattttttttctactattaaattgttttggatgagataagcaaatattgttcaggtatttaaattttctctttatattatatttattattatggttgttataaaaaatgaaaatctaaattattattaagtgctaattttttaaaaaataatattacaaaaatgcaaattgaatgacttatacactaattttttaaaaaagattaagtaaataaaaatgctataacatttagaatttataataaattaaggataatagaagttttaaaaatgaaaaaataaaataaaattttaaatttaatagattcttttctcttctttaacattttaaaccaatcaaataattaatcaataattaaatatcttttaatatttatatatttgttaaattatttaatgctttatacaatttataaaaaataatattaaaaaaatcgaaattgagaaacaaacaagcctgaggtacaactagtacatgtttgtctttatctaaaactaaacctaattattacactaataataataattgaaccaaacgcggtatatacacgtgtcgttttaagagcaaacggccacgtgactaccataagacatgtgcactgacgtagcatgggatcaaaatttcattctagtctgtctttagtgcaatagtggactgtaccacactgaataataacagcctgtcaatgggccaatgggctacatcaacctcatcatttgcagttttacatacaagtgggcccggcccaccaagataaatttgatattttttccttttttttaaaggaaaaaaaataatttcatccatctttaaaatattttataaaaattattaactagattttttatttattaaattacaaaataaattatgtactctttaaaatggtataaatagaaacatgaacttaatttttgataattttttttaatataactaatttaagaataattcatgatacgtaaaaaaaaacataattaattttgtcataacgcatcaatattatgtaattattaagttttattttaacaaaaaattaattcagagtactatttagtactattaaaaaatacatggtctaatttatcatttaacaacctaaagaatccaatcaatatcttcagagtttaaaataatttttaccttatttaataagtaggtttaacagaattaaattaattttccatactataaattatttgtaatttttaaaaatttataaaaaaatattataattataataaacatcatcataaaaatatgttagagaaaaaaagtaatcttagaaataaaaaatatataatgttctctctatatcaattttaaaatggacatattctttttctggctaattataatttttgttcttgaaattttgacatatatcaaattatactttctgaactttgttattaaaaattctctcataaactattaagattgttagatttaagattttttgtccaaatttaataagcaaagtctaacatagataaaaatttaaggaacataatttagtatatgtcaaaatttaagaagcataatttaatacatgccaaaatttaaaaagcaaaaatcttaattaacctctttctcttcatttatctattctcaattattattttggatctatatgtataattatattgtcaaaagaattttttttaaaaaaaaacaaaacatttaaattaaataaatattaattaatacttcttcctttttttttcacgcatgctattattgactaaaaatggtctttatttgtactaaaagttttaagaaaaattatgaaatcctcacgtgtgtgtattccacataaaatattatagtttcaattctctacattttcatatttaaatgaaattaaattctaaaaaatattgtactcacactagtgtataaagtatcgtacactttaactaattaaacagtaaatatttattgtttatcacatatttaattttacttaaataaaaacttaatgagactttttattttttatattaggtcctaaaaaatataagtcttagacatgggtctagcccgcctatacttagggtcaacctagagccgaccctgacttacacacatcttttttttagggttaagtttagagtcgaccttgagaatatatgagtataacgtgatttgtattttggggcccttacttataagacttggactcgcactattgtataatgtatcatacactctaatttatcgagctatgaatatttgttatttataatacataatttttttaaaataaaaacctaatgatgtcttttattttttttattttggtctccaaaaatataagctctaaacacaggtctagctcacctatacttagagttgaccttggttaagtccaaaatttataattatgtttgttgtattcttttttagctagaaaactaattaatttacaaatttttgaacaacttacaatgacaaaaacacaaattattgtgaagcatattgtatatataggcaatgcttatacttaaaaatatattttcaacatagtaaattatttcaaaaaaaattagaattgataatttaacttttaacttttgctttatatatatttttagcaatgttcatatatagtggtcaaatttaatgggaaatatctaatatatataaataaataaaatttaataaagtaagatataagtataaataatagagttaggataggtggtcaatttaaataatatattttacttagaaaaatccattaattagtattttaatatgacaataatccattatgtactacataggagctttcttcatgaaataattatttagtttattaatgtatcaatagaaaattattaattaaaaaaaacattattaaaatagtttggtgtagttgataaataaaaaagaaattagtgtagatacttgtatcttatatatattagatatttatgaatctaatttatagattgttgtagttggaacttttgaaaaatatgtataattaatatataaattatagcttaattatatttgtaaacttattttttttagaatatataatttgacagaaacattctattattatttacgcattgaattccaatgcattgggaatgctttttaaaaataaaaaaataaaaa

SEQ ID NO: 38016 - DNA, 4285 bp, Cannabis sativa
  modified_base (244)..(254): a, c, t, g, unknown or other
  modified_base (1039)..(1048): a, c, t, g, unknown or other
ttaattagagaagaaaagaatgttgaaaactctattgagaaagcctctaatattggttttgttctcaaaaattcgtacattgcttctgatttcctactgaattacctcttgaacactattgaagtccacttcttttttagccaaaaaatgattaaaaaaacataaaaacactgaaaaaacctattctgtttaaaattagaaggggcggtgagttttctactgcgtcgactgatagtattttggnnnnnnnnnnntcgatattgctcggaattggacgatttgatgttccagaaagatagaagagagatcaagaacttttatgttttgactttctccaaaatctgatcagatcataatggaattcaggcttgaagttttgactttattttttttacacaattttctctattttgtagttcatctttttgtgagatctttttatcttttttccatcttattcgtttgatattttctaatcttcttctattttaaatctgcaaaaataaaagatgaaaagcataaaattgctccaaacaagagtagaactaaatcaaaaacacactcaaaataatactaaaaacaacctaacatagacctagaaatcacaaacatcaaaagaccacattgacactaatacatctacgacatttacatcttgttcatagtggttttgacaagatcattcactataaagagaacatgtaccaatatctacttggacgtgtgtccatctgtattccaacatatggatatgcaatttaggggtggatattagtatatcttcgaattcatagacgatcactctagatatttaccttatgcaaagaaatttaaaatatttaagaaatgtcatggatttttagctatggtaaaaaccaattaggtaagtcatttaagatcttgagaattaatatgtccaatgtcatgaatttctagccatggtcaaaaacctaggcacctgggtcgacttcggggtgttttttcatctcttctcaatctctaagccttggactaggattcttcttgtcttcttggttcnnnnnnnnnnaagatggtgagttggaaacaatttgacaggatccaaacgcctgtttcgtagtttctggagtcaacctgggcgcagagctagggacccctcctaggtcgactactatgacttgggactactcaactctaagatattttctttcttgttgcatgtcaaacattgatatccatatcatcaggttcattttctggataaatagtttgaatgttgaattatttattattaatttatataaatgtcaaaaaaattattatttatttatgaagttgtgactagtattgtgcagagaacagatctcgagttattaatgaaatagtaagcaacatattaaagttagagaatttttaattaatagttgttagtgcgatttaccaatgcctataattcagtacaagcgatcttgttttggatcgttgatgtagatggacctcttggtgaaagtattgtatatgataggagcggtatgtaattaagttgtctttatcaaagtaactgtgtgcccaagaagacatgatgtcaacctggacatcagtgaagtgaagtcttggttttgaaactagttttggagcttgggacttgtttgtggcatgtctttcatgattttttgtggtaattgttgagaagcttaaaaatgtgatctaagcatccacctaagtaggcgctaatgctcactaatgctcacctgggcactgatagtattcccaacatgcaggtggcacaaccctatttgggataaggttaaacgttgtccactttataagctaaattttttggtaaacaaaaatattaaaagtaaattttcaaaaattaactgaaattaaaatgttctaacattggtgctgtataaattttatttttttaaatttcagatggtataaataaacccataattaaagccagataatccaacttgcaacaaaatgtaaataacaaggttggtaaaatcatattgtttcagtttcatgtgtgaggctaatttacataaaaacatgtatgattcatagttgactgtaaaatttggataccatatcgctgaaagtactaagctgttacggttttttttttcattctcccttttctcgagttacagtttatacttatttacaatgttatatattatatattagattgcagcatcaactataacctttcccctgaataacttatcttcttggcaatgcaagaatttcataccgagtcctcttggtcttccagggatcgcctgcgagcctttagattgagttcaaggctttgaggaagaggaggtgttcgtccccttcggaaaagaacagccagagctttcattttccggacaagatcgaatacctgcaagattatgcaaagaattattgaaatgaactaataatcatccacatatgaagattttagaggttgctgtgtttcataccgatgatgcttcgatttctgcaacaccttcacaaccttttccacctccttgcagtaagtcacagtattttacagcttcattctcatcttcaaatacctacaacgccaacaaaaaaccttgtcaggaccaaatgaatttagtcagagtttgaagggcaagaaattatgatctagctcttattatcaaaagaaataggattgtttatagcaatgttttcaattattaatttaagggaataccaatttgttaaagtacagaattggcatcttatattttcaaaaataatgtttatcgggcaagaatatttaaaatcgtacatacgtacgctcaagtttagtcacaagctacaggttactgaatgggtacattgtcaagaataacatagtactactttctacgaaataacatatacaggttactttatatatagtttataccaatgtatatacaatgtcaaattacagaatactcgataatcattatctaacatagacataaagttctatttaataatttgggctatgttttggatattggattttggagtaaaaagaaatgtataagaaaaatgtaaggagaaaaaagtggggatgataaaaataataataatttcttatgtttgatatggaaagaattatatagaaaaaaaaattcattcaacaaaaattttcatattgaacataaaaaaattgactttttttctttccactttatttttcttacattttccttacgttttctttttagtcaaaatttaacttccaaacataagttaatcaacaatacactgaaaaaaagtgcaaaattgattaaccacttttggcaaacagaaagccaatttatttaatgaatctccaactaaaacaaaatctacaatgaccaagtctttaactaatacatgaaaacacttacaagcagtccttctcgaacatcctctacaagcatttgaaactttgatccgctttctgatttttcagtctgatttccaattcccgatctcagttttcctccttttgaaaacaacatcccgagttccttctcaacttcactgtcaaaagacaaaatctctaagaaaggcaaggactaatgcttgtgagtaggactccagatataagaacgtatcaaacctgcgatttattcttattttcatagtacacaattggttttctctctgggttaatacatatacaggcttggaaggatctctccatggattggaatctaccactgttttaaaaaagcaatgtgtaaaatatctttactcatatgataaggattaaggcacaatcgattaataaaataaaatacaaaaatagtctcttgatagaacaaattaattagttaatcaaaaaaaagaaaagacagaactaattaattaattagacactattaaaccacttgttttccattggacccctatgcttcataggattaactataaataaatataattgtagccttttataatgatactagttcatagcacaacacccagatggccagatagcaaatagtggcaaaaaaccaactccaaaattgaagtaacaatcaattaatcgaaacttcacatacacaaaattgtcaaggccagaagtctttagtagcaaaagaatttaagcaaaaggccacagccccaaatttctgaaatcgttcatttgcaacagagtaactatatcataaacaaattggacacctcgatatgaatagcaacatatgatatatagccaaaaactctttgaatcccaataacagtaataaaaaatcaagcgatcagctaacatgttgtatgtacaaccatataattaacttgaagaaaaaaatgcatcaat

SEQ ID NO: 38017 - DNA, 4423 bp, Cannabis sativa
ttttttttttttttgaagaatgtattttggttaatcaaattgtactgaaacaacttataactttaataggtaagatataaactccagtgtccctaattgatgaactgtattgttagccaaaacctcctaacaacgcttttgaaaagtgatgatgatcgcacttggattacaacatcaaacacatgtcgtcacaaataaacataggttttctaatctaaaaatttgaagatgcctggatactgtgatagcaaagacacccgaaaagcctaaatctttttttctcacgtacaaagttgaggttgctatatcaagtgagattttgagagttctgtattcctttcttccttgtattatattatcaattaaatgtaaccctgggctagaatcatttcctctctagatcaggccggaagttgaagcctggcattgtttttccagctgcaaaaacaaaggaattcattgttgctataatgcaaaaaaacttcaggtgtggatccttcacattaaggtgcaggtgtcgttaccttatgaaatagtagtagaagaaatcagcatacaaagccgtctgaatcagaccagagacgcaggctacaaaattcaatacatgtgtcagatggcaaacatgagaactgtattagtgacaggaaaggtgagaaaataaagagggtaaatttgtacctatccaccgactgaaacgagcctctgtgaaatagcgatagatccagttcaggatgtagaagccacggtaggctctgcagaaagaaaaaaaccggtcttgtgtatgtcaccctagtgcttatttttgagacaagtgcattacattgacatttaacacttcatgcatgccacaatatgaaacttagatatcaataattattgtatcaataattattggccggccatgctcctaccaggtcaatcctggtcggccatgctcttgccaggtcaataacaaatgtatcctttgcatcttaccaagaagttaatgacggtgccacagtaagatctaaagcaaagctaaacatataatattgtaaatcaagtcaaattaaatgtttatattgatgtaaatgtaaaataatgtacatccctttaaggttgggggtaagtgaatggcatgtaatccatttcattagttggttaaagttaaaattattgtaatgccttttcaaaggaatcattttggtggaatggccaatccttcaaaaatgagaagaaagtcattccaattctcgtgcctctaatttcaatatcccccaacaaaacggaccaacacacaattgtgtcaagtaaacatatgatattgttttctcacaccattggcattctacatttttaatcatgtagtaagctttaaaattaagagcataggagtaggatcgtgcaaatctaattagtaaagcagaaaatttgcagcttgtaaagttcacatctcagagcaaagtagaacttccataagaagagaagaattgatcatcataatagaatagacatcctggtatacatgaatgtgagaaaatttaagcatagaccgggaccacaaaaattccaacatgttaactctaaatctctaaagctacattcactaggatagtacgtacacaatgagaaacttataatcatcactaaccttgaagagccaaactagtaatttgtttgaatgaggaaaaaaatcatcacttaccctagaaagaacacatattgcccagtcaaattgtcaacattcccacttcgttgtaacaaaaccaactggggaacaatcgcaagagcctccaagtatattgaaaatgcccagaatacctgcaatagatttttatccaaattaataggacataaagctgcactatgtaatttagctaaaggaaggcttggggaacaactagattataaattgtgagatacggacattaataatgaattccacccttagacagaagaaagaagtcctgatatgatattattgtcttctttgataggataatcttcaactttttcaaaggagtaaatcagcttggtgtgaaataaagttagtaaagtttccggagttcaatatttgtttgatcccagatataaaacgaatacatttacaacttgaaaattctacacaaaataaccaaacatagcaagctaaactgaaaataaaacttaagaaagaaaagaaaaacatataaataatccatcattcgagtaagataaatagaaagcagcatatagtagcactacatatactttcagttactacaagccagcctattttaggtaagaaggagacattataagaaaggtaatttactacattagtaagtaaatggaggagagaagaccaaaatcctctcttgtttggtgatctctgacttgagttgacattttgttccctcttcctattaatagttgattaaaatagaggatttgtttcattgctaaatctaaaatcagtcttatcatgcaaccactgtcccccaataattctaaccatcctaacactcgaaaagacaaaaatcaaatcaagtcacaaatagctatgttgaaagatagtaacctcttgaaatgtatatttctcgtttagaataagggctaaaacaaagcatcccccaacgaggaaataatggcgaaacgtatcgagctctttatcgtaggtgcgcttcaccattgggtgcacccgcatgtaccagacgatagccatagagctagctatgaaaacgagcttcatcactgtgttataaacggagataaaatccgtaaatagatccatatagcgagtcagaaacacgagtgcgtagagctcctgagtcttaagcgaaatccctttataagaaggaaaaaaaaaaacagaagtgttacaacccataaaaaagaaggcattaatatcacaaattaacttatttctatgaacacgaacttcaacactgtttcggtttgttttcgaagaagggggaattcatcattccgctcatacaaaccaacaaaatatatatcatattcgaattttctgctgtttcgttgctcagcaaccaaatggtgaaaccctaagcatataaattttaataatgaaaaaagtttctaaaaaaataatataataaatggaaacccaactacacaaaaccatcacaaaaaaaggtcttcaagtaaccgcaattacaacgtgaaagctttccaattgaagaaaaaacgactgatgtgcaagcatattcaacaatggagccaaagagaaaggaaaaggttagaaatggttaccggaacatgattttgtagcataaattttgagaagaagaaccacgatactgatcaagtgggtcatatcgccggcgaacctgaagatattcatggtttcttctgatactgaaatctagagagagacaaaagagatttctagaaagagagacagaggatttgaagacctaggaactttaaacaaaagatatgaaggaagagaacaggaggtgacgcggcaactcaaaatggattttcacgattgtcatttttgggtgaggactctgctaattggaacttgtttagacatctctaatgttaatattttggaaaatactacacaataacaataacattgatgctatgttttttttatataataaaaaattagaggtgcaatatacatattttttttttaatataaaaaaaaaatatatgtataataatgtgtaagattataattatagcattttaaaaatatattatactattagaatatttttaaaagtaagggtgaaaaaaataatgtggaaaaaaaataaaataatatatatttagatgatgtatagatatgtagcatcttcaaagaattttaccattggagatgcttttctcaactttgaagtcctaaagacacggggtaaagttataatatcatatttgtatttggatcttgtattttataaaaattattaattagactttctattttgttaaataacaaaataaatcttatattatttaaaattatacaacttaattgattttatattaaaagaaaacttaataataatatgatctagagatgttatgacaaaactgattacattttttgtatctgttcgtgtagaaattgtcttaaaattggttatattaaaaataaattttttgtatcatggtcctatttttactattttagaaaatatgggatccatttttacatttaataaaacagaaagtccaattaataacttttacaaaacacagtgttcaaaatagtatttaccctttgtaaaattagtttgatatatttttaacatatatggtgaattaaaatattagaaactttattattgatgctttaaaacttttacaaagagaaaacagagagaatcagagagtgacacgtggagtccacatggaacatctgctcgggaagataggccgagcaggatgcctcactggcatgtctagaataagatattcagcgatc

SEQ ID NO: 38018 - DNA, 2043 bp, Cannabis sativa
tttcttggtggagtgttggtgggatatctcttcagttccaagaaataaaacaggtaccataaaaaattatttaacatatcatggatttggttttgctgtttttccatatattttggtcttagtatttttgacgaagcattgtatatatatactgatcaatatcataattattgatttcttgtgtaggccaagagtgtgaataaagggagcttcacatatataggaatgatttgaagagatttcaatttggttttttatcttactcttttgttcgagtacttaattagtgagaaataatgtttgtgttgtaattaatatggtgtcttggattaaaagcttcttaattttaattttaatttcaagtacatgcatgcatgcattatatatgcatgtataggttcttcttggcttaattaattatgctcttttatatgtgagttgatgtttcttatgacattttctctgttgtataaaatttatacaatagcataacgtggtgatgaatcccattgaaaacaatcgaaatcccattatgtaaatttgagatctgtaatcaattttacagttcaagctagggcaaataatttttggattattattaattagttacaaaatttaattagtactgcgtgtcaagaacatataaaataatattctatatattttatcttgggatttacatcgaaggggttgttccaacaaacaaacatagaaaaacaaaaccaacgcacactaatttctattctcttttttctctagtcttgaacatataaaataatattctatatatattaatctgcatgttttttggggcataacaaagtttatcacaaagattacgaataaaagattgtaaatatgttacgactcaaagtaacaatacatgtaatttgaaaaacacaaactaaagatgcaagaacactcacacacttaaacgacaatcttaagtgtagagttttttttttttttttgagaaaatctaagtgtagagttaatcaacataatgattgtcctcttggattataagaagcactttggagatgatacttaaatgaaagaagttatatattatatctcaacttgtatgatttgagatttggtacaaaatgatgggattacatttctatttatagagatgcccacatattttcaaggttaattgagccgtcttcacataacaatctatctatagagacaaacacaacaacaaattccactctaatcttcaaacttaactatttgcgtttggcttcatgcaacattagaatttcctaataagtttctaaaaacccaaaatgagctggaacatttagatctttccaacaacaaaattaaaggaaagtttcccaaatggttcttcaccataggggcagagatcttaaattcattaaacatgtctacaaattttattaatgcttgtcttgggaattctagatttaagctacaacaaatttcgagacccattacctctgccatttcttataaatgatttctacatttcaaataacaatatcgggggggtaattaatccattgttctgcaactttactaggatctaagtgttctagatttgtccaataacaacttcaatggtgagattcttccatggttgggttccattagctccctttcaatggttgaaatagtctaacaacaaatttgagggctctattccatcctctcttgggaatttgactcagcttaatttcttatttagatctctttaaaaataggctttctggcggaattcctcaactgagaaataactcaatgttctgcactttaagcaatttcgaagttcttgatgtctcaaataatcagctaaccagctatattccacaatgtttggatagtttcagccaacatttcaagtgttgaacatgaaagagaattattttagtggagagatgcctcagatatttgtgaatggaagcggactaattacgctagacctgtcataatcaactaaaagtaatggttccacaatctttaaccaaatgcaacgaattataacttctaaatttgaagtctgctacaaggata

SEQ ID NO: 38019 - DNA, 2135 bp, Cannabis sativa
aaagccccataacctaatgtcttgcaaggatatgctttcagcaaaaaccaaactcaatccaatcaagtacagaattattcttacaatttgagtagaattttcctttgaagctctttctaatctatctacttatcaaacttattaatttaccataaatttccaaaataaatgtcattttccatttgaattcaaaagaccatctaattttgttcatttccctcctaaaatccaggttaaaacaaggggctaaaggactccagtggattgtgtaaataaatatcaaatcttttatcaaattatctgattgcagaaagtgtgaactaattttaggcagcatatatcaattatatccatgattacttcataatctgtatcacagaaatcaaaactgagctaatcatcatggcataaaataaatttatcaaataccaattataaatttccggaaaaataataccaactacaaatgttattgtttcaaaatcaatcacagaagcgaccaaattaatttcaatctggcctaatcaccaattcaccattacgaactactattaataagcttttaatcacaaaaagaattcataccgatttactggcgcaaacttccttagctttctcaacgactcttgcagcgatcctcctcaaatcactatcgacaaacggcaagacctcagccgcgcctaatttcgccatgacgaatccataagtcagtatcaaaatcacacaaacaaaacatatggaaaattcagaattgagctataaacaagaattaaagcgaggttaccagggccagcgagaccgacggcggaggttggagtaggcttagcgtggacaagaatgagcttaaatggaaagttgggagcataggaagcaaagaagcggtctagagtccattgtagagcataagagctgtggtcgctttcgtcaattccaaccaccatgactggtttctcagcggtagccattgttaaacctttttcttctgcttatgttttttccgtgatttctccagttgtcaactacatcacgaatatatatagagagagtatgtggagaaggcactagacgataccgatcatctgattctcattcttctggaaaagtaattagttacaaggctttgtcgatacggcgtcgtttaacatagataattgaaaatcttcggtaagcgtaagcagtaagcacggtcggatttacacgtacgcaagctcaagaaaaactctccatagatttaatatattctacaatctaatcgagatatatcgatacatctctatctagatattttgtaaagttttaaaaaattcgaaaaaatttagcacgttacaaactacttttaaaatagtgtgttgcaagcgtgactattttattttatgtgcgtataaaatagacggtttgaatattgttttttatattttaaattatttcgaattttttaaaattttatagaatattttaaatagctataatgtgaatatgaaaaaattagactagaaaatttttctaaatgcgaaaacaaataaagaatatatcagtacatccatttagtgcaatgtattgtacaatcaccttaatatatatttaggattttgagagcaccatctttgttctaacttataacttattcaatcaaagtattttttttattattattattagttaaataataaagatatatggaattaaaatgagttgggcaatatgttataattttttaatattattttattttatataaaaaaaaataaaaaattagtgagatttcttttttattaaaaaatcattaaataagaaaaatcacataattatcaataatattaattagattaataacttcaagcatcttttttgtatgtattagatttatgttaagtggaatacacgtataattaatttttttttaattaagtgatataatccagtatatgtatgttaaatttttttaattaggtaatgtatttttattttttaatctttgaaatagggtttgagatgggaaatttgattttctatacttattgttattccgaaattaaacacagtaaaattggaacgaattaccgatagaataatctggctgagtcgcggacaatgtcgctctctttaagatgtttcgcggctctacccgaagtgtg

SEQ ID NO: 38020 - DNA, 3757 bp, Cannabis sativa
ctaacaagaagtacacaaatacaaagggaactaccttaacattacaattatgattggtttgatattactattaataaaatagagtgaagtctctgatgatcactttaagaacatttgtaagtaatgtaagactccatacttgaattcgaacaaaaggaggggcaatccctcatcagaactcaaaatgattaaatggtataaagtagtgaacacaagtgggagcaagacccatatgagaatggccaggaaagcaaagaatgtaattttctcaggaaaatcaatatcccaaatgttagaactagacacaatcttcgatttcttctcgtacaacaatgctttagtacccgtgaaaaaggccaacacagataaggtaatggaggcaatagttaaaatcattgtcaaggtaaaaggatacctgtgtggcttaccaagtaacctgaaataaagagcaactgcaatgtggattatcatagaggccgccgagaaactgaaagccaaggaattgaatgccgtgaacaatgtgaaagcttcgaggctgcttgaactgctgtatgtcgccgccccggccatgctgatggctgcttgaaatgttatgtctgtgatcagtgtcgacaccactaaatttatgtctgccatttgctttacttccttatcaataatctcttcctttggtacagattcattagtcattattgatggttggatttcttgaattttttcatcactttttgtagattgattcactattgcagcttcatgtagacttaggagattgctttctgtatttattttgaatttgataatagcctgcaaagacaaaactatatgtattaatgtgtttgaaagataaaaggaaattttcatccaaagagttaatcatacaaatgtttcaaaagagatgaccaccctaatcaatacaaaatatttaagggcgcatttggaaagccaaaacaaaatggaattgcacagttttggaagtaatagagatatcaattacaaaatattttgcttatttgtctaattacgtaattacattcagttgagattacgagaaagagacagagagagagatttctgaagtaaattctttattgattgaaatgaatgaagtaatgtagaaagagctatatttatagtccaagctaataacaacaccaagacaagtaaagacacaaactgtcttaactaactaagtcaacagaaaacaacaaactaacagacttataactaccactaactaacagtttgaactagtcttgagtatcctcaacacattctaacagtgtaactgaaaataattgagatatcaattacactctccaattctcatattcctatgagaattgggtgtaattacactatgtaattattatctttttgtgtaattactaactattttgtcaaataaaaaattaagaatttatacgtacttctcacctcatattcaaacacaccttatattttaaaatagagtttgattagtatgctatgtcattactaccctaatgagaaattagcctagtaattatagtaactgaaagtctaatgaggctcaaacaaaattgtgtgactaatattcttcgactactccttcaaatatgagtaactcataattaagatagctactctgatcagcattgatttatttaggagagtaggacataggtaccttttcaacattaccaagtagatttgatctgtcgataatgtctaaagcagtcatccccatctcattcatgattctcttgtccgtacgcgaattacttgccaaacttacaaaaatttcataataaccacaaacagcagctacatgtagagctgtatttcccttacagtcttgctcattaataacatcaatgaaagctttattatttaatagagtatgtgccacatgaacctttttgtgctcaacagcaatatgcagggcactcctgtttccattgtccaacacctcaccaatatctggacattcattcatcaattttctaatcactcccaaatgtccattccttgcagcgatatgaagggcagtcataccttgtttgtctttgttataagcaagagattttttggcttccaaaaatagtttaacaactcttgaatgtcccatgcttgctgcataatgaagaggcttccatccaaattcatcttctcctttatctaaaatttgagatccacatttgtttaatgcctttgtaacaactcctaaggaaaaagagactgcatctttgcaaatttgggtaattaggattattgaataagcattaaggaaactgtttagtatttaatatttagggtgtgtttaaaaagtcaatttgtaattgaaattgaatcattaagtttgattgtttagtatagggaaacattcctaatcaattgaaattgggggtgtttccctataagaataataaagcattagtaacaaaggaaaccattgtacttacagcaattttccctgatcatggtgggcaccaggtttcctatcattaattacaagacagacacaacaaatgattaaatctatacaaacatataatgaaacaatatatttacatatacttatacacatacctgggtcatacaaacgaatgacagcagcatgcatgaaattcataccctttcttcctaacaaagagcaaataggaaaagtgtccaaaattatggaagcaatatcataaaatcctcgatccacagccaaaaacagaggagattcaccggcattgtttactaaatttgtcaaagttggatcttcatctattaaccgctctactattttgaagtgaccattaagcacagcctcatgaagtgctgtgtttccaacatgattgactttcttcagcagacttgtatagtcattaatatggcatggttccctagcatgatctatcagaaccatggcgaaactttcattccctaacctcgccgcgacatgtaaaggcgtgtcgcctttgttgtttggtttgtaggagagaacagaatgcagccttagcaagatctgcacacgtacagcaagtggattagttccgcattttactgcatcgtgaaaagcgttgtttccggcctttgttatccggtgaggatctaattcgggattgacaccgccggctactacatgttcttgtaacccacgatggcaaaacagagaactcatgtcaaaagccaatttcttggattaattgtagtgaaaagtagacatgatgcaattaagtacttgcttactcaacacaagaatttgctctaaacatgaaaactaatccagtgctataagcatttgagttattaattaatttattttgtttgaaagtgacaatttgcttcattagttattggttttttcacgatctaaaatacgaatatatggctacttgcccaatcaactctattacttttatcaaaattcctaagcagccacacacatcaatttttttattatgtaaaaaaatattaaaaccaataataatttgctatgtggattgtattggtagagataaaattttatatatcttacccaacaactcactttattctttttcacattcaaacaaattgcgagagtgtttataaaaggaatggatagctttgttctattttaatatcttaactctatttttaatattgttgttggtgcattttaatatcaaattacacacaaattgattatattttggacaccttaagttaggagcaatatttaatttgtttattacgaaggaatagaatattcaaataagaaataataaccctgcactgtcatttt

SEQ ID NO: 38021 - DNA, 3961 bp, Cannabis sativa
tattaactagtaaatctgattatattaaaatgagttttatttaaggcacaaaacccaacaaaatgtcctactggatgctatttcgaccgtccgtctagtttttcacagtgacaatgatatatgaagtcagagaaattaaatttacaactttgcatttctcatttccagctcacccaaaaatgaaaagtttcgagtctctcaattctgcaaaacaacaacatctcctagaactggtgactagcttcgccaaaacatataaatggactaagtggtattaaaatatcacttaggcatcttatagtacatcccttggacgtttttacacttatccagcgtccaggttgatgtcatatgtcaacctgggtgctgggatgtcaacttgggcgctagatgtcaacttggacactgggtcatggactgtcatcagtaaaatagtcataactcactcaattttgatctgattggcgcgattcaacttgcattttgaagttaatgctatatcaagtcatgtctcacactctagacataattttgaaactatcatcgtcaaaattcacccaaaggaagttacaaaaataagctctaggttacccgcagcgcaactcgcggggctttaaaaaatgaccataaccacaaagagctaattttcaccgttagatcatcatcaacagtcaaaaacatcttatttgtattttctccctatttttgtggacttcctttcacctataaaaggagagcagtaatagtgccgttagggatcccttagcttattttttattgtaaaaaaactacccacaaagtcagaacttctctctctagattttttctctctaaaatttttagagcttctgacacttagagtctacccacaaagtcgaagtagacttaattaacaaacctcaaattataattaattaattaataataatgtactcaattggcaaattgaaccaattaattaaattacagtcaaattaatctccttattctttcttttttcaaaggttcactactaactatatatatagagctttattagtgttttcaatttagtttatgaacacaagtcaaactaatcccaattattaatcacatagtgactcatcattaaatattaattgtatctatacctaaatcacgattaacaaactatttatatatatatatatatatatttatatataaacaaccgttaaggcacgtacttgtacgtagttactaagactaggccaatttcatgcaataatgtacgtacctaacaataattattatataattacataatataatttgaaatttattcacacatttgctaattaaaatatttacttaatgtaagtgtgcttaattaatataatttaattcatataagtcaacaaagtttggttaaatttattatttgaaaaaaacccaataccatttaattaatatatttatttttaattccaatttgggatgagaatagtttgaaattgtggttatataaagggtttgtaatgtttagaaattactataattaagtaattaattataattataattataatgggaagaagtccttgttgccctaagaagggattgaacaaaggagcttggactgttcttgaagaccaaattctcactgattatatcaaaactcatggtgaaggaaaatggagaaaccttcctaaacaagctggtaatttttatttttattattaatatataaaaatgttgttaattttctttttattattaagaatatatgtatgcacattatgcaaattatataagtttttttttttgttaattgggttgctcgccttatgattagagcgtcttttttatatgttgatcgtattttttcggagtctaatctctattttgatgttgttgatattgttgagaccgagtttgtctagttgatttagggttaaaaagaatgtttatttttgttaattatttaattttaattattaggtcatcaaagatgtggaaagagctgtataaattattaattaggaatttgttattaagaatataatttatgcaaagtataatttaggttttgttgattattattagtgtatatatattaatattaatagttatatatattattaagaatatatatatgcacattttgtgcaaattaattattataaggttttgttaataattaatatatatttattatgagttaattaggtctttaaaagatatgtggaaagaactgtatattaatataggaatttattattaagaaatataatttatgaatattataattaggttttgtttattattattagtgtatttatttatatatgtacacattttaggcaaattaattatcgatcataaggtttttgttaataattaatatatttattatgaattaattaggtcttcaaagatgtggaaaaagctgtagattgaggtggttaaattatcttcgaccagatattaaaagaggaaatatttctgaggaagaagaagacttaattattaggcttcataagctattgggcaataggtaattattattgttaattttcattctatacattttcatatattaattatctataattctaactgtctgtactctactattttttttaattaatataatttcatattacttatttttaaaaaaatttaaataatttacatgtaatattaaattttcttttatcaatacaatttttcggtttataccctttatttttttaataaacactaaattattcaaaaaatttcaagtataaatgaaatatatgttataaatacatatatacattacacattttattacttcataattattttttgttttaagttatatgtatattatttaatattttctttttaattttgacattattttatatatgtaattatattttactggccagtgcctcaatctattcggactattcatacacataattgtaaaataataagtatttagtgatatattaaatatttctcccattttattttacttatatatttatataatagtctaaccctagctagccatgcatgcattgtgtggttgtacgtataggtggtcactaatagcaggaagacttccaggtcgaacagacaatgaaataaaaaattattggaacacaaccctagcgaagaaacttgttcaaaaacaacaacagattgaagaaaacgacaccaaacacaatactgctacttatcaagtaccaattcgaactaaggcaacaaaatttacaaacaagggtttagtatttaaaaatactaactttcaaccaaataataataacgatattgattttgactttgactttgaaaattttcttcttgatcaatcagctgtggatctatggaaacttccatgtaatgataatgatgataattgttataataattttgatattaatgacggcggagatgatgatcatcgtgatcaggatcttgatcttgatgatcgtgaatgtggtttggaggaaatgctcgagaaatggattagtggaaacgatgaacgttaattaacgttatcaattttagagtcagtagtgctcatgcgatgaatcagattagctatgtcttcttagagcgatctacttaggatttcaaaattttcactcatcgagcttataatttattaatatactactactactagtattattattattattattattattattattatgtactatgatagttaattagtatttagtatcgagctagataggttaacctaatttagaataaatggcacatgtactatattgtagaatttataattacgtactaattattatatatcaattatatttagatgagattattaaaagtcttctcttatgcttgtaatgcatttttctttttctttgtatgacaaaagatgcaaaaaatattttatgggtaagaaaatttaattagtaaaaaaagacaaaaaaaaaaaaagagacaaaggatacaaaaactaaaacaa

SEQ ID NO: 38022 - DNA, 2140 bp, Cannabis sativa
aaataaaattaaagttagacctcatggtcattacaaaggatattaacaggtatagtagatatctctaccatgcctgtaacattgttggcaaacgcttatttggccacattatggcaaacgccctgttaatgccatattatatcatgcaatgttatttctttaaaagtataagttgttgtttggatggacaagaaggtaccaactataattaaggatagcattattcagagccataaaaagtgggaaatcaaacttccatatgagggcaagtaacatgcaaccaagcagtttcatatgaaataaaatgaacaagggtcaacactagatgactttcaatcatgcaaagaagagaaaaccagaatatatagcttaccacaatacgaattgtaatagaaatatcataaatctgcaagaatgagaccaataacatgaatagacataatcaatctcttaaaaagtaaatttaatttttaaatttagcaaccaaaataaaaggttccaaaaccaaaggacatggtctttttccacaagattaaaacaaacacaatgagcaaattaaatctgttgtaccagggcaagagccatcagctatgatggagccattgaaaaataaattttgaaaggaaagcataatttgaagactattgaagaataattaaacaaaataaataaatagatcagttagtttttttttcttcataacatgtcctaaactattattaattaggaagtataaaaaatacaaagatatgaactcattcaaagaattgcatgcgaataccataattttttgagcttgtatattattatattttcttctttttgtgagagcatgttttaaaaataattttttttcttaattaaaaaaataataaacacaaaatagatatcatatccttctatacaatctcactgctaatttttcttcagtcccattaggaccaaaaccaatcaaattacataatcaatctcttcccaaagtaaataatctctaaaagaagaacaaaatgaacaaacaaaactacaataacaattagtaacttattttttcaaaaaagacaaaacactcgaaaatatcacaaactcaacacttacaaatctttgaaaacaaactcaaccacagtactgttccttcttactcctataatgtgaaaaaaacaatcaaatatcaatttacatacaaatataaaattaaacttaattaattaaatcaataatcaataactaaccccaatgttcttcacttgaatcatttgggttttcatctcggcttacctggtcgtagaatccggcattctaacccttttgtattcaaattctaattaatattaatgaagtttctttttaaaaaaaaaaatatcaaaactataaatgcaactaaaatatttaacaaagcatgttggagaattcgagttcaatctctcacaccaagagagttcaatacacaacaaagaacattccacaaaacactaaatcgagaaaccagtagataaagccaaacttaaaccagaaattagaacttaggattgaaaggttatttaacccttttggatttttttagtgtcagttttaaaccgacacttaaaacaaaaggtactattactatatagtgtcagttttttaaattaagtgaaacttgaaccgacacctcattttcttttctctcattttcatttcactctgattgttttcaaattttctctctgtttccataatcttcttttggctcaaaaaattaatcattgctcaacctctcagatttggattcaattttttaaaaaaaacgaaataataagctttcggagaatgactattccaataataaaaaagggcatttcaatactattatttttattttctattcaaattgtgattgtgattttgattcttttcttttttttattattccaaatcaaactcatgctaaatgttggcgtactccaaaaaaattcattattattcataattcctttctgcccctataatcaaaatgctattataatatcttacataactagaaataaatatatgtattaacattccacacaatataagcaatgatattaaattgacaacactatataattctccaagtaattttatgttgattaacatgaacatagacaaacaggaccatttt

SEQ ID NO: 38023 - DNA, 2207 bp, Cannabis sativa
gaagtttggaccttgtcatccccttaattgatatcaaccaaaaaaaaattataaaaacaatctcaatccaaaatatttcccattttagaatcaaacaaaggactatttcaaagccaaaaaaactaaccactttcaacacataatcgcaactcatttttgggatttccttccaaacttgagcggaacatggcatcaagaacaggtaagaagagaatgtaaaaggtattattttcaatagattttattggctcagaagataatatctcttcttccaaatctagctcttcttttgcttccaatagaagcatttgagtttccatggcaatttcactagctgattttcccacacgtggtatcatccaccatattttgaatctaaacagagataacatcttaaatcctctgcaataaccaaacaataaggaatgttatgaaatatctccaaacatatatcataccaataataacaaaaaaaggagctcactcaagaatcccaagactgaaaacaagacgagaactggggtatgcagaagtggcaccaatgaaagctgagccattgctgagaggttgtgaaacgacaacgttttgaggaactccggtcaagaccagcttgtctcttaccatgaggcagccagccttgatggttggtaaggcagtgattgtcatgatgactttaagttacttactgtgttcaatcagaaaaacccaattgagaaattaaagaaagatacaatctttcacaccaattgacactaactatgatttgttgtatttatattataagaaagagaattagaattgtccaagttcagtggtaggttggttggttccagaatacagattacagcttttacaatgttgatataaatgatcccaatctaagggcaatgccacgtcagacacacgtgggatatttctatatgagaaatactgaagagtactagtggtgcctagcatgtataatattcttattagtccaattaaatatcggatctcatatattttaatataataacttttagggagtattgctagccaatcgcaagaggacatgttgagaaagtgctaaacactaatgatacctaataggaatgctctttccatacgagaaatgctaaaggacaccagtggtgcctagcaccctcttatgtgtcaatatcgctattggtctaactaaatatcgaatcccatataatttaatataataatttttaaaaagtattactagtcaatcgcaacggaatatacctaataagaatgctctttccatatataccaaggtcaacaagatgaaaatcgtgctatatgcacgtgtatgtgtgcaaacacgataacagttaaaagttggctttgtcttgaattgaaaaaaagcacgtgatcaaagttttggttaagaaaaataatggagctctcaaaataataattaagtagttaatttctctctttttatttatttatttatttttcttaaggaagtaaagcaagcaatctccaaccttgataccaagttttgtattgcaccaacaacatcaacgatcaatttggcacaatttaaaaaaagttaaaacctgctttttaaaataagtaagaaattttacaaaaatactaaaattttagataaattttacaaaaatactgctacacaatattttttacgaatatactgtcctgaacttttttttttttatttcttttatactgtccatacctccaaacacatacgaaaactctatcttcaatacctatggaccgaacaactagagaaacaccaaaacagctagaaaataactattaatttcggcaagatgaaacaaaaaaattaaaatcaacgtcaaataaacacccaaaaatttcgtcaataacataaatcaacggaacaaaaaggttagaagcttaaacccacccaaattcttttaaatccaaaattacaaatgatgctcaaatataaatctcgaaattcttttaacttgttgtttgagcactttaaattcttaaacataataatattggggttgtcatcaattttttaatgttgtttttgagttgttccactgttgcgttttgtatatttaacaaatgttggtttcaaattacacaggttaaactaactactaaatatttgtttgaggtaaccataatgaaagaatcatggacagtagacctcaaaaagagaacatgaacgcgtaacaggttactacacaagctct

SEQ ID NO: 38024 - DNA, 4635 bp, Cannabis sativa
aaaataaaaactaacaaacttgaaacttagaggcatgaaagagactatgctaatacatacagttttttttttcttctatattaagcatgggtggagacaaaagaaaaactcaacattggcgtagtgtgtccctacactgctcaaatcgatgcaattcaggaaaatcttcggggtatgtatgataaattcgatggctttcatgtaaaggtgaagacagttgatggattccagggtggggaagaggacataataataatgtccactgtctgttgtagtagtgataatcattcatcggatttcaaatctgaacgtcggagaattaatgtcgctcttacaagggctaggtatgtaaactgcgtgttttatgttcttgcattaatttcacatctagcaactcactactgggcctattcatgtctccaggaattgtctctggattttgggtgatgaaagaagtctagctgatgatcaattagtttggcaacctatactcattaatgcgaaaagtcgtggatgttttttcaatgctgaagatgatgaggatttagctgaggctttaattcaattcaagaaagagttcagtccaattgatgatatgcttaatgctaagagtgtattgttcaggaattcaaagtggaaggtacagttattagtgcacacaaaaatagttaaatctaacagtttccacatactcaagaactttgttttcctccttttgtgtccaaactattgtaggtctttttcagtgataactttctgaagtcattaacagcaatcggaacaaataagtcagttaggaaacttctagttaagctttctgagggctgcagaccgagggaacatattgtagtagctcgtgagagttctttgccagtaaagattttcgaggttgaaggtttgtgtgttgtcaccactgttgacatactacaaggggattttggttacgtgcaagttttgaagatctgggacttgctgccttatgatgatactccaagactgatagaattcattgaccgtatttttgtgaagtacaagaaagattttatcaacctctgcaatgaaattcgttttgaagggtatgttgctttatgttttattagttttgagtttgtgtgtctaaaacattaaatgtgtccttatgttcttttgctattgttgtttttggttcccagcaaatcagaagtaccgaagagttggccatcctatttagatattgtcgattttaaggatctttccatggaaaaaggtggaagtaatttagatggagctgtttctgatcaaagaggttatgataagaattcgaagctcaacgagagttcactgcctatgaaattctactctatgtcaagttgtgtagcgaatcacatactatctgaccgtgatggtagagagttggatctccccttcaaagtactagacctagaaagggagatcatcaattgtagcacaagtacatttgtacagggacggtcaggtactgggaaaactactgtcttaaccatgaagttacttcagaaagaatacttccatcatatgactatggaaggattttatggagtcaaaaccaatgcatttggacctgtcaatcgaaattgtgggcctcagaataactcagcagaagctcagggaagtggtttacgccagctttttgtgacagcaactcctaatctttgtaaatctgtcaagcaacacatttccaacttgagaaggtgcgtaaaaaagaattattgaaagttcaatggttaataataagtggaagttttatgtatgtaggggcttaaattattttgttggattaggataggatcttggaatttatattagcttttacttaacttgatcattcgatctatggtatatttaaatcatattaagatgcttgaagtttttattcgtgttgaacatcaaaaaatgatgatgattaagaaaaatatgaaaaccataataaggcctagaacaaaaaagaactccataaagtctgtagattaagtctaaataatgtgatatagacatagagactggagagcagagaccatgcactgccttatatctcctgtgtttttacttcataaaagacatgtaagccttaaaagtatttttgtgaacactaggtgaattttctcaagtcttctttatttgtatgtgataatattatacactataaatttatgattcaaaaacttgttcataaaaactcttctatttatgctcccttatttattattttcaaactttcaacagttcatgtagtgctcaccatccggctgaaagaacgttgattgatatggttgatattgataaggaagaatcaagattgaagaacatcccagattctttccaagacattcctcatgattcctatcctcttgttgtaacattccacaaatttttgatgatgcttgatggaacactgagtaaatcatatttcgaaggattaattgatatgacagaattttcactaagtcacatgccatgctcgagatcacgtattatagagtccttcataaggaccaaggaagtcaactatgaaaggtttagttcacaatactggcctcattttgattccaaattaacaaagaagcttgactcttccacagtctttactgaaataatttgtcgtattaaaggtagcctgcaagccatgaaagctagtgatggtaaacttacttgggaggactatcttaagtttgcaaagggaggtccctctggcttaagtaggaataagagacaaacaatatatcaaatattttggtcttatgaaaaacagaagatggaaaatggtgaatttgatttggctgattttgtaaatggtcttcacaaccaactcagagatgaaagatacaaaggtgatgaaatgcattttgtgtatattgatgacgtgcaagaccttacaatgagtcaacttgctttgtttaaacatgtatgttgtaatgttgaagagggttttgttttctccggtgatgatttacgctcagcaacagatggtatggattttaagatccaagatatacaatctctgtttgacaagacaattatcatcaattcgactggcagaagtgaagatagagaagacaagggaaaattcacaaaaagtttccatttgactcgaaactattgttcctactcaggtatttcgaaactatcacaaagcattttggaactatgctatcatttctttcctctctctaccgaaatgatcgaatatgaaaccacaaaagtaaatggtggagctccagttttgcttgaatgtgggagcagcaaaaatgctatcataacactgtttgggagaagcaaaaatgctagccgaaatgctaacattggttttggggccgagcaggtgattttggtaagagacgaagatactcgaaaggaaattaaggactatgttggcaaacaagctcttatcctaaccataccagagtgcaaggacaagtttcaggtgacatacatacataaatactttttctatgtttaatatataattaaattgaaatgccttgccatattttctattcgattaaagaagggatatgattttgtacatcagggacactcctcaattttcttccagtacggaacttttctactatttgctaccttccatgctgaaacgataaatatttccttttgtaggatgtattattgtacaactttttcgggtcatctcctttgggagaacaatggaaggttatatgcaactacactaaggaacaagatatgaatcttgttttcggatcatttcctgtttccacgtcacctacttttcctctcttcgacatatccaaacattacattatgttgcatgagttgaagctattatacattgctgtttcatgtacaaagcagagattgtggatttgtgatagcacagaactatcaaagcctatgtttgactattggattaagaagtgtcttgttcaagttaaacaactggatgattcgttcgtattttcaatgcaagtcccaagcagtaaacaagagtggaaatcacgaggcatcaaggtttgcttcttattatttaactattctatttgttcacacatggtgtgatcagatttcaagtgaagtgatatttaagacgttaatgaagatttcgaaaacaaaatcttatcatctgtttttgtgctgttactatgcctttttaaaatttttctttgatatttttgtcatcatcataaagattagaatttatatgtaccactatgttatctgtttcctgtttcggggaaataaaatgctttcatcactcttcccacaagctattgcatccttttctacttgaaaacttagcaaattaaatgtcttcctgcagctgtattatgaacacaactacgaaatggcctcgatttgctttgaaaagtcttttgacatagattgggaaagaaaatctaaagcttctggtcttaaggctatggctgatcgtatctgttcttccaagtctcaagaagctagttctttgcttagggaagctgctgagatattcatagctttagacgagactgattctgctgctagatgcttttgtgatttgggggagtatgaaagagcaggtataattttctaacctttctaaacaacttgattctataaacgtttttcttttactcgaataatgaggtgccattccagttttaa

SEQ ID NO: 38025 - DNA, 2227 bp, Cannabis sativa
  modified_base (1994)..(1998): a, c, t, g, unknown or other
taaaaatacagtatttttgaaattctttccgtgtgatagtatttttataaaagttaagtcaaattccaatatttttgtaagttccctacttttttattaatgttatatgtgggtgttatagagaacatattatcttgaagtggtaattattacattttaaaaacaaaacatctctgcatttttagttttcactaataacatttgttaatttgattttctatcataaatttcttacatttattttttaaataataaataataattaccctattttagtgatgtgattattgagattttttccttttacgcatttccacttttaccaaattatgtagagattgagtgtggttctcaaacatataggataacaatacaaatttaccattattattaaacatttttatttattgcttcattattaaatgtgcattcatcattgctcaaatttacgaaaaagaaaaaaaaaacactaaatcacatcacaatcaacaaatgttattaaaaaaaataataagaagaacaaagactacccttaaacaaaaaaattgtaaaacactacccttaaacaaaaatgtttcactactcatctaagatccacattgatattattagtacatataacaacaaacaacccatatctgaaatctacttccaaatatgtacaaaacaaataaaatttttattctaagaagtttgtaaagaagaagaagaagaagaaattgaagtagaaggactaacaagatgagaagaagaagattgtgaagaagcagaagtgacactattgtcagtgtccggagaattacggcaaagtgggcaagtggcattcattttaagccactcatcaacacaaccagcatggtaataatggttacattcaggtatagttctcaaagtttctttaggttcatactcacacaaacatattgggcaagtgttatcattgggctttggtaatctcttactctcacccaattcaatctttgggaatgattcaattgtgggcccatcatagcccattaccaccaccaccggcataggttgctccggctcggagaagcgttggccgcgccgctgctgccgttgcccgcaagctcttactcttccacataagaaacttgctaacccaattatgcataggagtcctggtattccaactcctatgattatgccatattttgcacctcttggaagacctgaaaagtcaaacatttatgttatggttagtgacactttgtctaatcaaactcaatttaaatccaacttatggttgagtggaatgtaatgagcattaaattgtcatatctgtatttttggtcagaatttgacacttctccaaataccaatatgggagagtgttattcttggaccaatgtaaaaatcattattgggcttcccaacttcttggttagcttttaagatgtttttaaaacacatgggtccacaaatttcaacataaaaccaaaaaaaaaaaattggtttttttcttctcaactttataaattattttttatatccttcctagaaaaataaaatgtcaaatgtcaacaagcaagtccaaaaaattaaggtgtttttaaacatgttatggcccactttccaaaaaaaaaatgtagaaaattacagcatatagtcatacatttttttttgaaaaatatttaaaataaaaaaataatattttttgatggaaaattaaaacactaactttgaagagaaagacctaaaattgacaaagataatagcttgaagtatttaaaaaaatcacttcatatattatttttttatttttttttcaattttatagtttgagttgctctattagtttctatatgagttattatacggatttagattacgatttaaggtggcgtttggttagaggtaataaaatgaaatggaaaagaaataattttcattccattattttgtttggttgcatttaaaactattagaataccattccgatggaatggtctttccatcattttggtggaatnnnnnttccattttaaaatagaaggaaaggtcattctaatgtaagatttgaaaaaaattaataatttttttatgcattttaaattttatttcattccattcctattgtaattctcattctcattcctatttttatattttcattcctcacaatcaaaagccatctaatttgtttcgttaattgatacatgcgttactatttgaaattctataaaaatacaaaaataaaaaaaaa

SEQ ID NO: 38026 - DNA, 2897 bp, Cannabis sativa
ggtaaaatatttccaacagagaagccatgaaagacgatgttagagcagagctggaaccgatcagagctgtagaagtttgtccaatcgttcaacaagtgggaagatcggcagcgtaaccggagccaaacacaccagaagtgggaggattgaacataaaaagatgagctctgatcatttttgacaaagatggaatagtcggaggagaacagggcggagctacgacatcggaaggagtggcgtcaatggaggagatatcttgactggagatgatggtgagaggaggcgagggctcgctgacagaagcggcaacaatggaggagttccttgttcttggagccatggaagatgatgaatagtctagggttggtgagcatctgatacgatgatagagatgaaaagtatcttattttattgctgcaataatctacagaaatcccaaagtgtctttaggttattacaaagagatgtatgtatagggcaaaggagaaggaagcccatgaaacaaagtgggcttaaaataatgggccaactaatactaaagctaattctaatactttttaattttcacaatcaaaataaacagaaaatggcaaacctttttaattgcatgactagcacagctataacaactctaatccacgtagcactaattgtaaaaatttcaaagactaaattaaatttcatatattaaattttaaattataaaaagtcagaaaaagataaggaataaatatctaatatttaagtttgttatcattaactattaaaaccttttcttttctaaaacatactcgatgttgctaatcattgtttctattactacctcatctgtttacgttactaaatgtttattggacgtacagatggtaccacataattcgtctaacctagtaattggtttaaatattatttaaattaaaaataattatttaaaattgccactttataataattattaattcaaaatttcatactaaaatttaaagaaaaaaatcaattcagatcgattcgatttactaaaataattaaatattttcacaaagtgaaattcaaattagcaaactaaaaagttcaagttcgaatctcttctcctaatgttaaaaaaaacaattaaactcttttttttaaaaaaaaaaattaattccaatgtataaatccaaaatgatttgcgactttgctatggacttctttatgtctctagttctcataaaccagagatcaaactccaaggataaaaattgaaaatttcagagttactcatattaacatgattattcataaggccaacaatttttttatttcaaattatctcaacaaatgacctaagaaactagatatacaaaataagaaacaaacttacatataatttttattatttccagtcgcacgaattaaactcactatcgattgagatgcgtggacgagatgcttaaagcatgtttcgtattgttttctattttttattttcaaaaaattgtttttagaaatgagaacaaaaaataggtttgaagattttaaaacacaattcacgtttagttagtgttttttaaaaacaatattgacaaaaaatgaattgttttttaaaacagaatataacattttgttgttttcaaaattcttgtttattgtaactttattttttaaaaactgttttcaaaaaataaggccatacaagactgattgttttcaaaaataattttctgtctttaaaaataaaaaataattttttatttgtgataccaaatatgcacttaacattttccttaaactcgaccccagacgtccaacaatccaagcttttcctcacatatcaattcttcgtttctcagtctagaagttgtggaccctttgttttagtttacttatttagtttatcatatttttagtttatttatttaattgagttattatttatattataagaaaaattaaactgttttattttaaaaaaaaaaaaaaattaatgaagtggacaaaaagtataacatgtgtatgttgagtaagcagttcaaaaaaacatattagacaataatagaaacactaattttgcatcattgagtatttttaccacaaaaaagtaaaatttgagtagttaatcataaccaccataaaacattgaacatttattcgaaattgttctctaaaaaatcttgtcttaaccaaaagatattgcctaaaacccatagtgtgtaaaatcagcccccaaatttatgaaaagccttcatggtatcagaattttatggatgaagtccaggataataaaatatgcgtgaacactatcacaattttagcccaattcctgagcaaggaataattcctaacatttgtgacgtgttcaaccactcttcctagagcccaacttaacaaaagtaagagtccaggaacacttggaaaggagaagctcgttcttcaacaagaaaaccatccttgattgagcatcccagataagcaattaacaatttaaggcattcgaaaagcgctaagactctgtggccacatgatggtttgggagcagtctaaacgcttactcgtgttgtcgggatattcaatcaactcaggtttgtagattccatttgtggtggtgatcgagacaatcctaccctaaaaaaagaagtaagtatttttagacatttcctaaatcggcagaaggaataagtgtcaagcaaaatctaaggtttgaagtattggctgttgaaaccgtaaacttcaaaacaacctaagataatagcccttaaaatgatttaacatgccaacagacgagaatctaagctcaaaataagaaataaataaagcatgaaggtctaaaagctattgtaatgcccccacggaccaggcaaataaaattgtctttgcggaaaaaaaaaattatagtcatataatgttgggttttgtgccct

SEQ ID NO: 38027 - DNA, 2285 bp, Cannabis sativa
attacatcaataatggtatgacacaaaaaagctactaagcaccaataatacttttaacaattctcttacaagctatatcatgccactggtagaaattaaccgaggataaatatagcgagctatataataaatgcatcaaaacttgcatgaatttcaaaaatacttattttttatgttttatttataattttacacttataaaaattttaaattacaaaaatatatttttttaacaaaaaataagaaaacgactaaaaataatgagaaattaacctcacgacaactataaataaactgtaaataatataaagaagactgggagatttagatcgagaagtgagattgacaaccacatctttatattcagatcccaatcctccaagaatataaggaatgaaatcatcattcattttcagaatgtattcttcaattgattgtggtcctttcttggtggattgaagtaaaccctcttagttgcaaaagtcttgctcttgatcttgtggcaaacagtgaggcaaaggtgctccaaatctcaacagaagtacaacaataaataacatgcccaagcatgttttcagtttcagagttcatgagccaatatataagaaattgatcaaatatcatgatgatctagattaggaatattaccaacaagagtataactggtgatgttggaagtaatccaagaatgtatccatccagatcatacatctccacgggcatatcaacagttaggactaaagatctctaaattgtgtagttcgtacgatctagtcgaaaattctagaaaaagcagattattgtacgggaagagccattcgagttgtatcatactgttcatgttgtgctctttgtagttcatgtggaatgggtctttgatcagacatggctctgataccatgaaaaaactctaagaaaatagagttgttttgagcagtgagagaaaacgaaagagaaagagaaatagacaaagtgaagatgaaaatagactgctcaatccaacaatgatggccttgatctttatttatattaaatcttcataacataatacaatagaagtagctgaagagaaaagactgctagcttaataaaaaacagttacaagagaagactaaaagctaaaggcctaattgtctaactaactattttcttcttgtactctaatatttatacgtgtaaaattgattatttttaactctaatttttggtattataattattttagaatttttcgaaagctagtaaaatgcttactatagctagaatgtagaccgttatgtacatattaaaaaaattgataagtagttttccctttgaactttgattgagaaaattctgtctcttaaattattattgatgttaaatatcttctctgaactatcgccgttagtgaaatataaactttctgtaagataagcagtaactttaccctttaaactatgatcactattatattttgttgtccaaattttgatcattgccaaagtatacctctttaataaatgaagacaagatttggctgtagtaagagtttaaggggcaaaatacgatattagccatattttgggagtaaaattattaaatatttaacaaaaaaaaaaaaaaaaactattaaagtactctaatagaaaacccatattcactaatatttaaaattgaagaagaatatttattattgctaataatttagagggcacaatcttatagatgacaatttaaaaatcaaaataccttttatttatttttattcttttatgtatctatacatgatattattaaaagttgagaaacttaggagctaggttacaaaattcgagataataagattcttaccttaaacaattaataaaattaactctagtttcttttaattagattttcctttttgtttctttctatgactaatgatgctacattgactcgtgacgatgttgtctataaatataatataattttatgtaggacatagtttatactgttcttgaaatatattttaggcttcttatactcattcttttttgcaattctttaatagaatcatcatattttcttaaattagatgaaaaaacacatgaatataataggatagccgagcaatcaaataaaataaatagcattagtattgagcataatactttttataagtagtgattcatgattgatcagtgatattctttaaaatttattttattatgttatatgagacttaatgcttaattatattaataacaatgtaagactgatgatggtgttaaacactgataatacatttttttttttttttt

SEQ ID NO: 38028 - DNA, 3018 bp, Cannabis sativa
aaggccgacacaccaattcttttacccacatttttaaccctcttactcttggtatcataacaataccaattttcagtttctacgcaagaaattacaagattcccattactcaaaaagccttttggaatacaggtagaacgttgaccaagtgtattaggaagaagactaagtaaattgactgataaatattgaaaccaagactctgagtcaccgtatttcttcataacccaaatgtcaactacttgaaattcattcataatgaaaaaagaaagacacccagaaaaattagctaacttcctaaaattacgtggttttaccgttagaggtgactttataagattaaatttctctttacttgtatcaaaagcaattatccctaaagatgatttgccataacaagttgtattgccaaagcaaattatccaatgaatgcacccattaacaaccatggaacagtccaaatatgtgtaagtggttatatcaaaagtagaagaagattcaaattctgaaaagatgttaggcattgccattgttttccatgaattgcttctcaaactataaatcccaatttgattaccctctttaaacttattacaagtgctaacaacaccattcccatcaagagatgagaactttaccactttgatatcattggtcaagggatcataaccaaccccaagctcagaatgattacaccccaactcaggagaaggtgttagttctttagactcattaatagtggggttccataaataaaccactttagatcttaagtcataaaggcctaatacaccattatcactgcccataattgttaatatcggttgttgatccatctcagtaaagggaaatttctttaaagaaatctcaacaaaactctccccattacaaatggataaatggtgatcgaactttctaacctttttttgttggaaaactacacaatgtagttgacgcttgaggtggagatcgttgaaatatggggtccgtagcagagtgagccaagatttagagacacactcacatcgtttaagagatttgacatcgagtcttgagagaatgtccccaagaaaatcacaagggatatcattgtaattgtaaagcacacctttttcttcattggccattggagaaagagatttggctaagacagttgaggagattagttagtaagagagattaagattagagtaagagaaaaataaatgttaattaatatggcattgtgtaaagataaaattaggggtgttcataaaatagtcaacccaatctaatctgcacgatacaatctataatctaatttgcaaagttgccatattcgtacttgagcggattagattggattggaaaatccaaatttacacttgtggagattgaatgttaattgacatgtaaaaataatcgattcaattcaatctatacatatttatataaaattttaaaaaattataaatacaattacgataataatataaaaaaaattagtaatttaaaaatataatacataaaatataaatatattttaaaacttaatatattaaatatatattttattcttatagttaaatttgtttattacccattaacaggtattaataagtaatatctatatatataataaataaattaattaataatataaaatttatatacaacctgcttattcatagaatatatttaaatatttatcagtttttttatgtaaaaaaataaaatcataacttcctttcctcttttttttataattttctatttattttttaatttctaattattaattaatatatttttattcaaggaagcatattttaaaaaatatattttttataactcaaaaaaatatatatatattttaacaattaatacaattttatattgaaattaaaattaaaattctaatttaatttattcaaacaatatatattttgaacactaagagtaatatatatttataaaaaataaattatttataaataataaattagttactcacattcttaaattaaaacttataaaaattttaaatttaataaacaaaatataacacacccgaaacagtttgttaattattgtattaaacaaaacgttctcctatacaaattgtagtttactacagttcaaactttcaaaacaaacccagaaaaaataaaacttgatatccataaacttttttcttagaaggaaaatagcagccataccttagaaaagaagcacagagatgtgagatgtgaggttggtgagaactgaatatgcaatcttcattctttgcctctcttttatggatagacctgtgatgtgaagcaacgactattgacttttccctttcttttattgaaatttaatttaattttgttaagaaaaagaaaagaaaaaaatagttgtataattcgaaatccatgttcaatacttcaatcaatccatattaaattatttgagatggtattaaataaattcattaccagtagtttgactaattcaaaatgtttataatttcttgttcagtgaccattttagaattctattcaaccacttgaactaaaccagatcactttttttttttaagaaaagcatgttattaactcaaatcaaatcagctgttacaggagcactaataaatttaagacaagcatcagtccacaaatgaacctctatagaacttgtaacagactttgctagtgcgtgggccacaccattcgcatcacgcgaaatggcacaacaagaaccaccaccaacaacagctaaaagagaaataatctcttcaacaattggtttaaacataataatagtatcaggacaattaatccaagagctaactacagaagagtccgtctccactctcaccaacttgaaccccaacctggttgcccacaatagacccgtacgcatagcaaggagctccgccaccaccacctgaaaatccccaacaccaccaacaacccatgctgcccaaaccacaccctaacctccttgaataacccccaaaaccccgcaaatcccctacccggagtgactgccgca

SEQ ID NO: 38029 - DNA, 2072 bp, Cannabis sativa
  modified_base (2043)..(2046): a, c, t, g, unknown or other
tacccggtgtttccccttacggatcacgggactactgactgtcacatgcatccaatattaatcataggcattacatctattttgtaaatgattacaagtagatatacatgatattattcacttaaatttaaatttgaagcattggatgctttcctaaaatttaagccttagttgagactaagtttgaaaagaaaattgtctaaaagctaatggagggggtaaatgtcgtgctttctttaatctatttaaaactcatggcatagaattcaatcatccctgccctcagacctttgaacaaaatagaagagatgagcaaaaacatagacacatagttgaaatgggtcttacacttttggctcaagcacacatatgccattaaaatactaatgtgatgctttttctactgttgtttatctaaatagattaccaactcctgtgcttgcccataagtctacctttgaagtactttatgataaaaaatcaggctataccttcttaagaacttttggctcaccttggttcctttgtctaagaccctaccaagctcacaaattccaattctatttagtgaaatgtgtcaacttaggctatagcgactcttataaagggtaccaatgtcttagtcccgcaagcaggttgtatctttctaggaatgtgatcttcaatgaactcgagttccctttctgttctggttttctcaacaaatatcaacaagaatcccttattcttattcacaattcaacatatactaccttgccagcaccaacactaaatccattctctccattagcatctgcagaagcacctcaaacagcaacaccctcatcaccaacctctcctcctcataaggtacattttgatgattctcctgctcataattcaccaagtttagtttctagttcagtaggggcatacctatgtttgctgaccatgagcatacacctgaaccatatgaaccactatatgagcctcaccaaatatttccttaacctaaacctgaacaaccacaaccacttgttccatatcagcctactcaccccatgataaccaaagccaaggcatattcaagcccaaatcctacctgactcaagcctaatttcaatctattcttgttgaaacacactattgaagctgctttaagtcatgttggctggtcatgtgttatgaacactaaaatagatactctcaaggccaaaaaacttgaatcttacaattgattggaaacaagttgatgaactaaacaaattgtttttttttcttttcaaaattgcaataaattatttaaactttattgttgatgcattaaattttaatgtcttaaataattatgttatacactattatatatagagcattgctattattaggcaccagtggtgcctaacattttttcgacatgtcgcattgcgattggctagcgatattctctaaaaactattatattaaattatatgggacccgatagttagttggactaataacaatattgacacataggaaggtgcttgctaagcaccactggtaccctttaacagttctcttataaatataatcaagtttaaaactttattagtgtaaaaaacacaaaaggggtacatgggtgctggtgcaccataaaatttcccaatattttatatttatattcaactaaatttggtaagttacacgtgttaatgaattgaatgattaaaaccaaaaacattaacttgggattttgtaatttttttttaaaaaaattctactttcctatcaaaaagtaaagtgatgatttttcatttatctttaggatattctaattccctacaagaaacattaaatttttttaccaataattacataaacattacttttttaagaaaaactaattcataagattttggatcactattggccacctctggtgcctaacactttctataggtagcgtagtacaattaattagtgatattttctaaaaactattttcttaaattatatgagagtcgatacttaattataccaatagtggtatgacaacggcagggccgaccctaggcataggcnnnntaggcccgtgcctagggcccacactt

SEQ ID NO: 38030 - DNA, 3405 bp, Cannabis sativa
atttgattaggcaataagagagttaatcccgcgattttgtatccattaccgacttattattttatttacatattatgattttaattttaaagtactgcaactaaatacatgtgaaaattcttatattttattcatatattataattttatatttatgtaagaacaaaattcttatctaaaaacatagtatttaaaactaattaaatactaatttcccataagaaaataccgaacataactaactagtaactacttactaccttctcttctctctgcctataaatatcactcttacattctaaacttctttccattcataacccctctctctctctcacaattattttgtgtttgtgtactaaaatcaagctggttaagatcaagaatggaggacttcaactcaagcccagaggagttgaaatcaaaatgtgaaacattgatttcagagctgaaagatttgatgagaatgatggacaagaagattgaagaaatgttaattagtaacgagttaccattttcttgtgatgtggatatgatgataaagaaggaacttcaagaaaatttcaaagaaagagtcattcaattggaaactaattacttttgtagtaatgataatgatgatgatggtgatgatcatctcaaggtttcaccaaaaattgtcaacaacaaaatgatactcattcttttgaagagaaagattcaaaagttgaaggaacaacaaattaataagtctgttgctttagatatagtaaaggctatctcttagttcttcatttaaatttttaatgtaatatttagaatatgttttttagtatatgaacttttaagtagtttgactctttggtttattattgtattgtttaaaagaatttatgttaatgaagtgatccaacttttagttcttgattatctgatttgtttggttttaatctctgagtaaattgaattataaaaaattatgatgtttagaatcataggagtgaatagattcaagaaaattaaggaattaatggccaagtttgttgttttctctaagtaatgtcgtttctgctcaagtttattgtcgtttttcatgtattgtggtttaatgcaattcctgctgtcctttttgtaaaatatatgtcgtttttcattttattgtcgttttataagtttaatatcgtttcagcattgtttctttttgaacgattactgtcgtttaacaaaaggcgttgtttgaatgtaatgtcgttttatgtaaattattgtcgttttttaatatattgaataatatataaatcactcttattatattggctcagaaactatttaaattaatgaatgttagttacgacttacgatatttttattgatccttttaaaaaaaaaatattccttttaaataatgtcgtttgttcaaaaaaaaaaaagaaaagaaaagaaaaatcaattccagtcatttatgtgaaacgcatgtcgtttgtcaatttattgtcgttttgtaactttaatgtcgtttcatggttgtttgtcaaattaaacgtttaatgtcgtttttgttttctcaaaaatgtttttataggaaagtccacacaacagtgagtgagcacagacactcaatggtcattaactaaattatagattttatacaaagtgaaaactcaaagaaagcattaattatttgaagaaactaataaaataaaggattgctattaagtacttaagatctctaataggttacgttccataattaattagcgatattttgtaaatataattttttaaattatataaaattcaatatttaattatacaaataacgatataacaccgaaaaatatattatttttagcaattctctcaaaattaatgtgttttgacaatgattaatatgttgatgaaaaacaaaatgattgaacaatttccattttatatgaacgaaagatttttttttctttctttttctgttctttttccaagtgaaaatgaatgagttaatcttctgtcaaaactcataactaataaagtatcaaattttgcttatattctcatattgatttaaatacattctcataataccaactagggtcatgaaaatttccatcaaatataaaaataacaaacataaaaaaatgataaattgaccaaaaaaacaatctcttcatttcaaaagatcacaatccaagacaacaacttagtcactaataaacatcatcataatccaaaagatctaataaaacatataatagctatggtgacatatcacactccatcaacacaccaaaatcttcaactttctgtttaagattttccacatgtttctctagtcttccaatttcagcctcaaaaacctcaacttcctcaacaagtaatatgtgttcttcaagcatcttaacacctttgatatccttttccattatatcaatgatgtaattcaaccttaacaacttcatttttatctcaaatatgctttcaccatttccaatagccatcgattcagttcttggaagctctagattctcccacaatttctcaatttgagaacccaattttttatatgacatgacatttacatcttgtacatgcacaaaatttgcattgattttattaatctttttaaaaataccatcaaatgttgagctttgcaaaaataccaccggatataaacttgggtaattgaaaacaacttcaagactcaaaatttcattcaaaattaaaccaagtaataattgatcaatttcacttttctcatatgatatctcaatctcattcttcttctttttatcaaaatttaacattcctattatcaatgcagacatgaaaaaatcattggttaaagaataagattcttcattctcatgatgatgattctctctaaaaatacttacttgttccaacaaagaatctatattctgaaaaattgaatcttgatcttgattcattaacaattccaaccacaagaatttgattaggcaatgagagagttcaataccgcgatttcgcacccaatgtgtcttaactttctcttttatctcaacacttccaatcaatttctttctcatttctttgatctttagagaaaaaaatctttgaatctcttctttcttgaactcgaaacaatttttgtcgaaatctcttagattcgccttaatttgtacgaatgtagacttgaaaggattgacataatcatgatcaattatcatatctttgaccagtttcttcaaactattcacatcttctaacatggtttgaatgagttgcttcatttctaacatgtgagaatggattggaagatacaaaatatttctcttgtttcgattcgccattgatgatttttctagatgaaaaaaaattgcccaattgagaagaagttgtgaaaacagaacaaatacaagtaaaaatcattgaagagaaatatgtatgtaa

SEQ ID NO: 38031 - DNA, 3393 bp, Cannabis sativa
agaagccacgttttggaaatcagtagcggaagtgacatagtagagagcatagccatttttgctcaaagaagacatcgtggggtttctgttttgagcggtagcggcatagtcaacaacgtcactctccggcaaccggctgctcccggtggcgtcgtcacgttggaagggaggttcgagattttatcgcttaatggggcattcttgcctagtccttctccacctggtgcaaccggtttgaccgtttatttggctggcgggcaggggcaggtggttggtgggacggtgaccggagctttggtggcttctgggccagtgattgtgattggtgcaacgtttatgaatgctacatttgagcggttgccacttgaggaaggggctcaagtagtggaagagcaagaaggtggagtaaatcctatgcctagtggtagccatgatcatcagccatcggttccaattttcaatttgccaccaaatttggtgcctaataatgctcaggtgcctcatgacatgttttggggttctcctcctcggccaccacctcctccttattaatcactcatatcagaattatatataaacagagaaagtgacttcttttttctttttttttttcatatttttttggtcattttgaaaaatgttatgttgatcgttttaatctgaagaaaagaagttcgaggggtttattttctcaatagaagatatttctttgatggttggatccatggatgaatgcaatattggccaaatcttgtaaaatattggtattggtgtttttggtatgttcatttgttctttttgtgtttgttgggacatatgatatgatcatacccatagtataggaggttagaatagtggatagttctttggtgtaacacatgcattttctacatttattgtaactagagaaatttagaagtgttatcttattatttcaatataagtaatatatattaatatgtattagcaatcattggtcaaggagttatcatgagttcagattttcaaatctatatgtaatcattaaattattatatgaaaaatagtaagatttcttaaggcttttctcaggtaatgggaaatttcaattcttcaaatttgctgcaaagttaagcaacagatctgttatcactgcagtcaaggatacaggtatgtttcctatttctccatcctaaacttgtacctatggaacatctttgttgtgatcaccaaatatttcatcataaaattccatttttccccaatggttgtgaataatctgatcatcagatggttgtgatatgaaagtagtgattttctggtcttcataaatgtcaccagtcacagaacagtttggattgtataatcctcagtcaatctaaatgatattgttagaattgggtaagtgtatggttgaggaagtaggaataggtgagtgtatggtaaggtgcacgaggttccatctcaaaactaattggcttgatcacaagtggcgctttttggctcactatatctccgaatcagaagcggctctttttggttcatctttagcttggctctgatatcatgttagaattacagaagtgtatggttgagaaagtatgaatagagtgtacggtaaggtgcatggggttccatctcaaaacaaattggcaatgagaggaataactcatgcatcttatgtatggtatttagtttccacacattattaatgtgggactctctaacagatattttcaaaattattatagaacagagaatatatcattttatgatattattttaatctttacataaattttatcagttattttgttcatgcgaaaatatcaagtttgatatcactttcttcaacagcatgagagaacatgatagagcaaccatacatgaagcaatggaacaacaaactacaagtgttgctaaggtaacaatctttgatgatctatgagtactacatgttcttaggaaattttgtttgaagttgataataaattgtacttttaactgaaactgcagcctatgatagtgttccatcttggttatagtcataaccaaagtgtatgaaagtctcattttcggtggtggaggggaagtaaaataggagttctaattctaattgtgttctcccctgatttgatttcttatagtgtcttctatggttttctgtctctttctaatatgcatggtttttacatttcacaccaatcctaacaaaagaagctgaaacagttatctcaaactattaccagcttcaaagaacatctgcaactcacaatgcaggttcagaaatgacaacagtccatattaaagtatcagtccctacctaagattttggttttgtcaatgtttctttcagcacattgcaagactaatgttcagaaatggggtgacacggttagatgccattactacctcggctattgtagacagtgttgggaatgctctacactcgaatttcacagataaccaaaatcttatacataagtttacatgttcttggtcagctccttaactgttgttaactttatagataatatatcaaccaagaaagactggttcttgaaaagctaatatcattttctgaatcttctgaataattgttgggcaaaggaacataatgttgtttgagtttgacataggactctcaagtgacctcaagaagagatggcttccatacaacttaaactgaagagatggatctcatcaacaatgatatatttagaactttagggaaatgggggtctcggtgttgctgttatgcggtgactaggggagggacggtgcttgaagcagagttaaaaggttgggaagctcgcttggctctggttcttgcgaaaagtagggaatggaaatcggtaatgattcaggtggattcaaaagttggtgtttctatgcttcaggagaggaaagtggcaattcatttgggaatatacctcacttttgttggcattttgaagcttttagaatgttttaatggtgtggagtttgtgtagtgaaattggccagacaaaagatattataaggggaaattatagcaaatgattttaaattataacactattagtaaatattttcatttcaaaatttgtagagaaattatctttttacactatttattatttatatgtttttttgctacaaaaattaatgttttattttatgtatatttttaaaattaaaaataatttacttaaaaattatatttatattaattttgttaaaatattttttattttaaaattgttgatttatttaattttttataagttattgtaggttgttggtatatatattttgttgtacattatatttttgtatagtatattattatttttagatgattttttatttttaatttatcatgtataatagtggtatataattttgttcgcataatacaaatattttaatgta

SEQ ID NO: 38032 - DNA, 2604 bp, Cannabis sativa
ctgtaaatggtgatggatcgtatttataggtagtcctgaagtcaatttgaacttctcgtctgaatatggtgggaatcttaacactgacacaccaaccacatttcctaaaggttcaattctcttttcatttcttgcattttccatgctagacttctataataattgctactcaattgacagttgtgggccttgatttcctttcatttcccaacttatggttttttaggaagttttggcctaggaggtaaaggggacaagactggtaagggtggcaagagctttgtgccaaaaccttcacgaccacttgagctgagtgttgaagacggtatgtagaaatgtatacataagatatgatttttagatgccaatgtatttattctatgatttgttatttactaccaaaatctagctgctagatggtatgtctcttttgattcgaaaatcatctgatttggtcaaagccctgttataccttgctcttggtctatgtagaactaccaaagggtgcaaaatgtctaatggactgtgaggctgctgatatattagaaggaatccaagatcgcatggtcttgttgtccaaggatcctagtattaaaatcccaaagtaaggacatagttatgcattctcttgtaaaacaaatggatgtctgggttatggcttcacccaaatttattgtgtatatgacaatgacgctacaattgttgtttggttttagatcatttgacagtggactgcagtatgccaaaagagagaaccattacacaagttctcagtctgtgaaagacattcttgagtatcctttgctctttcttggagttttacaacatatatatacatcttataatctattgtttataaataggaatctatgtctttgttatgctacctgcaatgctctttatatttttcttatactgttacacacttaactcaagtttcagcatgctgtcaatatatgggctgaaggaggccgaggttactttctgaacctcaattgattagtacttggttcttactataaatgatgtgatcttaactcaaaatatgttggctgcagatatgcgtaatcgccaacatctgtccagaaacagctgatgaagtttttgctctacttccatctttgcaggtactcttacatgttgattttgctcatttccactattgaaagtagagatagtgtatattatttcttgatgtctatcaattgcaatcttgtagttgttttttgcctcatctactggtatttccccattccctcttaaaatatagcaagttaacaattgtgctcttccaggctaagaaaaacatgcttcgcgaacccatcaaagatgttttgcttgaactggctaaggttaagcagtctactccaacctttagcatataaagatctgtggtaagatatatcacagttgcttcttccattcggaagagttatcttgctgttcccagcagtattgctttatagagtagttttccaatttgataaactgagtgcagactaatctttcatcgaaggcctggccctgggaggcggggatgacattacagcattgctatggagcgatcttgtttggatcaaactattaaacaagggagcgatcttgctatggatttgatgttttgatgtaaatgaaacctttctttctagttagaaagaatgtcttatctttgttcttattccactgcttcttttttgtgaattaaaagctgtggacatggtaaataagaaatgggtaagctgtgttgtgaaaatttttttctagtataaaattgaaaggatttaacttgtttggtgcaatatgaactattgtttttttacttaaaaaagttggatttgaaaccaggacctttccaaaatgtggtagtgttggaagtatggttatgttgagcatgcttatatattacaattgtttgaattttgatttcaccactaaattaatatttatttctttatttattttttttttttttaaaaaaaaagttatagaacatatttataacaacagtgccacaatgtttgtttatatttatattataaaataaaggggggaaattttgttttgtttttcttaaagatttttttttataatctttaaataattatattaagttgaacaatataaatgtattacgtgtaaatgatggtacacgtaagcagtttatgtcaagagtcaattgagataaatggatgacactttaaatttattaatactttagcagtttagagagttctgctaccaaaatttaagattagagtgttagagcaagtaaattgataattgggagggttcagccacaaattactccttttaaattattagactttttaatgtgttgttctttcaagttaatttatttgtactcatatatagtgtattagtgtttattatgacgtatcgtacttaagtttatattttttttttgtaccttattgtatctacgcatatatttttttgtgttgaatcgtacctctaggacttgtgccagtttcgctcacgtcccccagcccataagcactacacacatatgatgagcattacccaatagaaatgataaagaaaatagccaagaatatgaacatcttaaaaaaaaaaaaaaaaaaa

SEQ ID NO: 38033 - DNA, 1963 bp, Cannabis sativa
atcttgattactttccactgtgttaacaacacaataaacaagaatatcaatgtgataaggacttggatgactttataaattaaataaataaagaaatgatcacatgaaccaaataacacattaaatgagtaatgaaaataatttttttttattgataaatgaatataaaagattacattgaaatagagttttatttaggcacaaagcccaacacaaacatgttctgactcgaggcccagagattttgtgtttgctagaatgagccccaatgtaagagtacatctttgagctggcttaaaccaaaaaagaaatgctcgcgacgagtacgtcccaccctaaaatactcaatcaacaggacagaacatgccgaatttggccaacgccgagggagtatcccttgtcaacccactggccgggttggccaggcaaaggttgacgagacaaaatctggctggacaagggcaagtcgaagttgatcctgcagtgcaagcacaattggaccaactcaagaacatgatacaagacctgtctgaaccaaagctgtcagacttagagcaatacaataatacatatcagatatttaaaaaaatttacaaaagtcaatgtataatatatatggcatatgccaagacaatataaaaatcagagaattaaactacaaatggaagaaaataattaatttaattggtaatcaaacaatatgcactgaataaaatatgtatataccaaatatatactaaaaattatcggaatttttagaaaaatattgaattttgggtgaaggtttacatttatactatcacacggcaaaaattacatttttactatcttagccttttttttttcttttatactgtaaatactgaaaataaaaaaagagctctccatcttccacacccacggacagaaccaccacagtaccactagaacaactaaaaaataactattaaatccgacgagatgaagcggaaacattaaaacatcaatacttgggctgtcatgatttttttaatgttgtttttggattgttccgctgttatttcatatgtttcacaaatgttagtttcaaattacacagttaaaccaaccgctgaatatttgtttgaggtaaccagaatgaaaaatcatggacattaatagtcttacctcccattgaaatggtaaaatctagaagacaaaaaataaaaggatgaaagttggctgagaaaaaaaataacataacaaatgcagcaaatgtggggagctaggacacaacaagagaacatatagaagaagacatcaaaaattaaaagaaacagaacaattaaaaacaatagtggaacaacagaggaaaacttgacacatattggagcatatgatactgaaaaaaaataacttacatacaaatttcattattttcttattactattaaaaatagagcagtacaataatatttaggaaaatgtgattaagaaatgaaagaaaacaacaataaaacaaccttaaaacaataataaaacaataacaaaataaaccagcaacaaaaaatggtaagttaccgaaagaaagtggacctagaagtacggtagagatggagccaatgctttaagaccaaaataactgaagaacatgaacttagtgagagtttttgaaagatttctacaagaagctcatcacagagtaagctctccatctctttctctcacacacacacaaccacactcttatctttcccattcttctttctcttcttcctccttcagatactcttttttttttttttttggttacctactacaaaaggagagggttagcttttatttggataatattgtagacttgggattaaaagaaaaaaaaatgaagaagatgatgaacaggggtaaagagctcaaatacattgaaaaataaagggaaacttacaaaaatactgcttttttagcaaatgttttcaaaaatactgggacacggcaaactttacat

SEQ ID NO: 38034 - DNA, 1823 bp, Cannabis sativa
tcattttattttatttgtttttatttttatatataaattttttaagatatatctaattttacagataatgttcttattatatctcttaaattaatgtaaattatgtattgtataagagagtgcaggtatatttaacaactcatttgtaaaaataagtatattttaataaaatataatataagtgtaatttttattaatgaacaaaaaaaaaaagtattttttaatttattcttatataatgtggacaataatagagattttttttatttttaaaaatacaaataccaattaatagagacgtgagcaatagatctagatagggcacaatctcacgatgcatatatacaaaaacatattgtggctttcaaaaaagaaaataaaataaaaaataacatatagttgtgtataatgcatataccctactatatagtattatgtaacgtatttaatacctttttgtcattttcatgtgtggatggatacaatcattgtaagattaagatatttgtttttctcaaattaatttatgacctcgccagaaacatgcattatggtgggccgggcttaacataattgtcaataatgccactttttagtttagaccgttcggtagaatttttgttttttttttttaaaaaaaaaatttaattatgaaaattaaaatatatttttttttttacttttgtgttttaattgtttggttatatttttatttttttatgttcaaaaacaaaaaatggtggtaacttttatattatggtcaaagtttgagagaaaataatcgagagaaaaaatgaagtaaatattaataagagaagtataaaatagactatgatgagaagattatttaaataaattgtgaaagtatcttattttatatttaagatttctaaaattttattcttgtttaaattaaataaaaattgaaaataatataacctaacatatattttttgaaaataattttatttttaattaaaaaaataatattaaaaaaaaaaaggttgtaacaagatgtacccttaattatccgaattgaccattattattaattaattcccgactaaaattctcttattgatctactaatgccttatccacataacatagtttcatcatctttatataagtaatacatataattaatagtgctataagtacatcccacccattgttattattgtaaaaaataaataaataaataattgatagcaaagaaaaagaaaaagggattctatattcacttactaaaactgtgtatgtagttcaatttttcattagaatatttttctaatataattatttaatttgttttaccaaaaaaaaaaagaaaaagaatagagtacaaattaagtactcacttatctcaaaaaaattaaataaattaattaatttagtactcccttagtttatttttgtcataatttattttaataaagtaataaattatatattttttttttacctttttttgtatttctaattttcataaaatctttaaatatagtataattttataacaatataaattagaaaaaagatggtaaaccaattctattaaacataattaattgcaaaagttatttttttgaaccatatatattagtaagaaaaagtttaggaatgtaatcaataaaaacaaatacttacacaaatatttgatataggatacatataaggctctgtgaaaaattagagaatttaatggcccaactgttagaaaatgataaacaagaaatgtgaggatatacatgaataccaaaaatgacaaagacaaaaagaaatatatattagagatgaagacaaaaataaaaaaataaaaa

SEQ ID NO: 38035 - DNA, 2550 bp, Cannabis sativa
cttctcagttctcactctacactggtcctccgcttctctgagtcactacacaccattactactgtgcagagtcagagacaggagagctaagctggtgagtgaggagccaggcggatcaaccacaaaaaggttagtctttggttgaagcttttctcctacaattgcaatgcttcgtttaatttgcaaaagactctcgcttgtaaagcccactgcttcacccattacccatggcttctctttatccagttcttttattagacccatgtcagaattgtctagttccaatgacagacagacttttacggtttcttacctccaaaactcatgtgggttgtcccacaattctgccattgtagcttctaagaagctcttatttgaaaactctgaacaacccgatttagtattggagctattgagaggtcaagggttaacaaagtcccaaattgagaagattatagttactcgtcctcaattgcttgaggctgatttggaaaatacacttaggcctaaaatggagtttcttgagtctttggggttttctggtgctagcatggtaaatttgttgactaaggagcctcgtgtacttgattgtgatttagttgactcagttcaattgtttagagctcatggttttagtaatgagcaaatcaaggcattgaccattaagcgtgcttcattgcatttctacaatgtaaataatactgttaagaaacttgagtattttaaatttatggggttttcagatgaggatattgccagaattgtttcatctgagccttacattctagaaaggagcctggagaatcaaatcattccttgtattgaagtgcttaaacgggttcttggcactgatgataatgtgagaaaggttataaaagcttgctactggatacttgagtacaatttggaaaagatgcttgtgccaaacatatccttgttgaagagccatggtgttcctgaggatttgattgtgaaattgttcacaacccacccaagaacactgcttttgaggtctcagaagtttaatgagattcttgctaaagttgtggaattgggtttcaaaccaaatactttgctctttgttctagcgattcgttccatggctgtgatgagtaaggcactgtgggagaaaaaggtggaaacttacaaaagttttggcttgacaaaagatcaggtggatttagcattcaaattgcagccaatgtgtatgcttacctcagagaagaagatcaagaaagtgatgcatttcctcattgacaagttgaatatggaagcttctatgatttgcaaaaatccaaatcttttaatgcttagcttggagaagagactcattcctaggagttcagttctgcaacttttaatatcatcaggttttctgaagaaagatgtcaacattatctattatctcagaatgactgaacctatatttgtggagaagctggtaaggaagcatatgaaggcgcttcctgaagttgtatccgcgcacgaaggcaaggtagaatttctaggctttccagttatcttaaagtcataactactataaagatgaaggtaaagagagtatcaaggataccaagagctaagattgagttcattgtctagcctcctctgcaggctgctcatcttatttttaggtggataagtgcaagttattaagagagttttcctaggatgtggcaattgtagcacttaagtgagacttttacagggtggtggtttcttagacttctttctatggtggtatagtagttagtctcctcaggtgtgagctgtccttactaagggtttacattttgattattcatcattcttgccatcaagccttttatctctatttttggctgcttttggtgactgaggatctcttttgtttctccttcagtgtagatcaaatttaactacttgttttcccttttattttgacttttcaatcgaacctttgctaaatcaataaataagatgatcagtacagcaaaaacactaatttgtcgccattgttggaggttacacagaaggttttgaatcttccaaaaaataaactttcttttctcttgagtatttccccatgatggagaatgagataagcactacctttttgtataaacacaattcatcgtatttatacattatttacatgacattctaatactatgatatttataacataattaattacttaattttgtattaggctttacaatgcttaataagtattcacaattgaaagacaattagattgtatggaattttgtattagatgtttgataatatgaaaagtggatcatttatgaatattaatgttatatgagtatcaaatatatattgttaatagagttggattcacaatagtgtttacttttaggatagtttggattcaacagtgtggtgcttaggttatggtctaaatcaacattagtgtcataatgtcataggtagggatgcacataggagccgggagtttcaaggaatgcttcacttgctccatccttgacctccgcctaatcccggtaaagggagggcaggaaagtgatgggcacctgtagcagttca

SEQ ID NO: 38036 - DNA, 1918 bp, Cannabis sativa
taaaagaaataaaaatgggtttgggcagtaaaaatgtaaagtttgccgtgtcccagtatttttgaaaacatttgctaaaaaagcagtatttttgtaagttttcctaaaaagaataatattataaactatatgttattggattatgggcctaggctcaaatagtttatgtttttttgaatatttggcccatataaacgattgaaagtggaccaaattatttgtcaagattcaagaatacacgattttacttctatacattttatgaagggataatttcaaaaatatatatgtacaaaaacaacaaaaaaaattataaaaatacagtttgtacgaaatttttaatatttttacgattttttaaattttatttacataaaatacgatttttttatgttgtactcttgttattttattgttgattttttttgttattttcttatgttgcatatgaattcttcttttttaagttggcaacatgggttggtaaattacatagtataataacttaccaagctaaaaaatagtaatattttgtaacttcacagtgtaattacataaaattctcatagataacttcaattactttcaattatatggttactgtataattatctaactatacaaatatgccaaaccttgtagttacttcgaattatacttaattccaattacatagtgaccttttagtacttacgcccaattctcattggaagagtctaacgagaatcttttaattacctcaaattacacacttacaatataattacatggtcaaacaaacatatcaaattgtctaattactttcaattacatcgtgactttccaaacgtgattaataattttacatataaaaaaacacaaaacattcccttattcgacatctttataagcttttcgtcgacctatacaagatcatttttaccttcatctctggaatcaactctcattaaatcaatataggatttaccgcgaagttcgcgtgcaaacacacccttaaagtagtccacaacattaactctcttaaattgcactggtgtctttggtgtcacaaggctcggtgttggacctaggtcaccatacaagctcggaccataaaatgtagcaatagaaagcctctctttttctgcattaactgttgctcgatgctcaatactacgataaattccatttgttataatctacacacaaccatacaaaaaatgataatgagtgcaaaaatatatatttttttccttctcaaatgacctaattattaaaataggcaaacataaaattttgtacctctgtcatgtctccaatattgacaataaaagcattaggaagtggtttaatagggatccaaaccccatctttttttatttgtagaccttccgtttcgttgatttgaagaagaatggtgagacctacggggtctgaatgagggttcaggccgatcacaagctccggctgaggacatggagggtagtagttcatcctcatagattgccacccttctccaagtacctcattcatttcatttggctccattcctagggcttttcccatgaaatcaaacactttcttggcaacattctctagctctgttgagtaagcttctagggtttctctatacaaaaaatttgatataataatttaatacaagttgtatagaaagaaaatgtatatttaggcatttttataggtactgctaagatgtattattttaatgagttgaatgaattttctgatttatcaaaataataacaataataaaggtaaataacttgaccaaagatcacatcaaaatcatatactaaagtatttttttgatgagtttcgagtaatgtagtttaatttccaaaaaatataactaaataaataaatgttaattaatagtcaagttgctaaacattaaattttatttttattttcacaattt

SEQ ID NO: 38037 - DNA, 2189 bp, Cannabis sativa
aatttttttttaagcaactaattataaaatgttgcttagtcattaattcttcataattaaattaaacaataatattttatttttctgccaatttcctctaggtgactattatttatataagtacttttctatgagttgaagattatttatcaacattgttattgggtattttaaaaaatttaatactacataatgtgacacactctataatttggctagcggtttttcatattatttattacattaaaatatataagatattaaaatgcactaataatatttcacttcttgtgatgcttgacatttaaatatctcttagcattttttattatttatatatatagggacatgttccttagacacaaaattttacacaaatttatacactagtttattctatgggatcaaacatgatcatccgaaggcgatgataaaaacagctataaaaataaatcataattataaaaaatcttacaaccatgcatcatacaaaaaaaaaaaaaaaaaaaaaaaaatcttaatgccctcccccaatctcccccaatctgatcattgttactattaccatcatatcatttatcctatttgggaagattcaatcaaacaactaaaaaaataaaactattcataaaacttctatctttttttttctttggcagaaacctttatatcttttttcttctctataataattttttctctaaaaatcagaggtattttggtgtatattaattttgcccacattaaaactcataagattaattctctaattggtcaaaaagagatttctctctttttatttctctctctctctctctctctcattttttcatttatttttttatttttgtgaaaatgaaatgggttgctgcaatacttaatttctattttgtatataatgacttgatgttcaaacattcttacaagccacaccttactaaaagacaaacactacgtacctatagaacaattcataaactttatataattttttttttattttatatagtgatattttaatgaataaatattcatataagcttctctcctgtttctctgctgacatttctttcaaatgtagatagataaaaatttggtccttaattaatagaaaaagggaagaaaatattgaagcatgtaataacatcaaaataagaaatcgaaagagccactaatatggctaatattctgagaattgtttcaggtttttaaggttgatactctcgatcaagatgacaacttcagttatatttggaagattttaaattttctaaatataactttaattaatgtttttactaattatattattctactttgttactgcaagctagctgctataattatgacttttagattatatttgatttgatggattgaaaatagtgtataaatttgtgtctaaaaaacgtgtcaaatatattaattttcctgtaatgtgcttatacatttacctcttaatttttgatcagaagaaagaaatgtgttttagtttaattatcactagaaaaatgactctaatatgatgattatatattaatttagcaatttttttttagatttcaataacaaatatagtatttatttaattaacaagaggatgatattttagcaagtgtcaattaatgtgtctcagttattaagaaaaaaaaaacatgtaatttcaactacatatattgattttaatttaatttattatttttctccatttatatatttaataatatatatatttatataccaacatgggtcatagtataaataataaagaattgtatacatatatatttatatatataacaagtaaaaaaatttgagagagagagagagagagaaagagactagtataatattttttaaagagaattgttcttcatgatcaccatctattctgggtgaggtaagaggagacgaagacataagaaaaactcattctctctctctcaacacaaaaatatgacactaaagtctcatcatgatcgtttgctcatgatcatcctcatcaacattaagtcaggcctaacagattgatcacaaaagagatctatatatagatacgcgatcatggcggccgagatgatgagatcaagtactactactagtgatgaccacgatgcaggttcttctcaggtttcaaagacaaacaataatcaggactacaatactctggagcatattgatgaagaaga

SEQ ID NO: 38038 - DNA, 5471 bp, Cannabis sativa
attttgaatttaattaaaggtttaaattaaaccacactttttcaaaatttatagattagtgataataagtttataaaagcacacacatggcatccctgagggtcggggcattacattgaataaggatatgcaacattacaatgataatgttgacaagaagaaggggaagaagattgctcaggaggcaaagtacactgttagtggctatgtacctgcctttcaatactgggcatgtgaagtcattgagaaagtgggcaagaagtatgctcaatgtagcgggatcaagtttctcagaatggtaaattggaaaactctagagggccagtgggaaaacaagattgtcaaggcaaccgacattgcactattgttcaactctcgggtatgtttcttttctgttctgcaatattttttttcgttaattcagtaaaaatgcttgtttaaaagttgaattagttattcgcgacttgcttcacgacgtttaacgattttattcacaattttttgatttatagtttgtttttaaatgttgtgttaaattgcgacttatttcgcaatattttgcaatatcattttcgactaactcacgtattgctttttaattcacaacttgtactgcgataatttgcaattttatttgcgattcaggtatatatttcttgtttagacatgttatcgacatgtcgcgacatgctgtcgactatttgcgatatagtttgcaacattttttgaccgtatttaattcttgtttgtttttatttttattttgcagttggtcataaagaactgcttgtttctccggcccagtgaagaagaatatttcaagaacattaatgagggtaaagcccctctttgttttgagatggacatcgaacaaacagtggagggtgatgctacacaggagtctgtgtttgaaagcgaagcgaagaccattaatgaggccatgacaaaggtaaatttagttccaccaccatcggcatcagaagtaaacgagccatctacttcagtcactccgtctgctccaaccaatacatccatggataatgacctggaaaagatgttggatagacttcaagccgagcaagataaacttgaggcctagcaagctgccatcatattggcacaaacgaaattagtaaatagccatctcaatatgaggcggtccttcacggagagtcagaaagatctaaaggagactttgtcggctaagatggacatgttgatggcaatgttgaagccaaatgagggggaaccacagcccaccccagcaacgaaagattaccgaccaatgaagagcgataataaagatgtattcctagaagattgggaaccaaatgataatgagacaacgtcaactccattagaagcaattatcacagtcattggtgatacacaatcatcggatgatgtcctacttctgactggacccttagaagatgtaccatttgtgaggaagaggaagccacctatgtacttgaaggactacactgagaaaaagaacaagaggcaagttcttccacagaacgtagattcggaaagaccaatagaccgtagattgttatgtatgttcaagaggtcattgattagagacattcccaatacccgacgtaggaatataaacactagcgtcggtgatgtgaagttcttcacaaagttgttgccgatgggggattggttggattatgatgtaagtattaattattttattcttttataatgtttttattattttttgttttttgtttttttatcgacatgtcgcaacactgttgcgacacaaaatgattaccatttatcaatatttttgcgacatttttgtgacatattttgacttaaggagatttaagttgcgatgaaatgcgatttaattcacgacatatcacgatgcagattgtgatatgatgtatttgatgcaatattcgtcctttagtttaatttgataattttttctcttattttcatgtagcacatagatgctatatcacacatgctgaggaagagatgctttcaatttctagaatcgtaccctcaactaggtgtgatttttaacacaacactcccacaattcttcacgagcatttgggtgtgtcactagggtgacaaaagtaccttttaatggccagaagcagtgactgagtactacaagggtacggagagtcattacctaccatgttggaacgatcaaggctacttatacttcgtcctgtactttgaaagacaaaaattttaggtggttgttgaggtagacattgcttgattgaaagatttgggtgtacgataatgttatctcgtgtactagcgaagatgattttaaagcccatatgctaccttggactgagttgtttccacatctgctgaggtcaattggctattacaatacagttacattctcaatgtagagttaggggagagtagccaactgagagaaatgcatcctaaacgcatgccaagtgaggtggttccccaaagtaaaggtaatattcattaacatattatgttaatattttcctcatcattaatttttttagtctctaaatgtattattttttatttttttagtggtgatttcaaggtatatgtcattaagtacatcgaacacctcatgatgaatcgatcattgaaaaaattaatgatgataacatgaggatgttcagagatcggtggtgggtggacttgttttaccaaaacctgacttggtaaattgttaaaattttagagggttgttattttttttgtgtttttttactctataattataattgtacaaacatcgttctatatcttaagttatcatgaattaaatcaagatttatatcgctatacttaatttatatgtcgaaactgtattttgtacttcattttcagtaaatgtgtttttgtcgataaaatgtcacaaaaatatcaaaatacattgtgaaaataccaacataacaaattccacatacgtcgagatcaatgtcggtaaacaacgcaaaactcttactaacgagtcatgtttctatttgtagtaattcatcgcatcatatattgccaaatgtcgtaaaatgtcacaaaatatccctgattgcacactacatgtcaaacacatgtacaattcaacatttaatggtaattaatttttgacatttattatcttgccttcccaactactaatatatgtcgataacaatgtcggtaaacgtcctaaaatgtcgcgaaaagactaggaccatttgcatatcttattgtcgcaatatgtcgctgaatgtcgcataacgtcataagatgtcagctaattaatttttgacatctattatcctacattcccaaccaccattttggtctataaaggaaaatttctacttcataagttacatacttttcttatgccttaatcctggagtgttattctcttataaattctaaatgtctagtaaagagagcaaacaaaaacttctatctactaaagagatcaagcaggagcctagtgatgaaattactccagaaatgcaagaatatatagaagcttttaaacattttgaaaatgaaagggtggcaaacgaatggagtgctacggagtcaaataaatgatgagtggatgaaatatccatatccaccaccagggttccccaaagggtgtcgtcgttgcagattaggttattttaatggcgaaccggtcaagcctggatcgttatgcccgtattgcgagtctcaccgacacagtaaagacttttaaattgttatgagtggctagttttaaagtttgtttagtctttacttatgttctgtcattttgtgtttactcatgtgtaaaaattttcactggtttcatctttactcatgtgtaaaagtttaaaattgaaaaagatcgtgaaatatattgcaaaatgtcgccaatgaaatcgctaattcttcaagagacaaaaaccatttatgtctgaatatttcgcatctaaaatcgcaacatatcacaaaaagtgtggaaaatcaaacatctcaaatgaaaagagaaaaactatatgtcgaaaatcatatcgtgaaatgtcacagcatgtcgttggcatgtcgacaatgtcatcgacatatattgcaaaatgtcgttaaaattacacccagacaaaaaaaaaactacaaagtaaatttcataaaccatactaataatgcatgcaattaaaatacaaaaataagccttgcatgtagctttgttgtgtcccaaggcgccacagtttgaacaatggcgaggttccacaactttttgactgttagatggatatcggttagtctgtattcttcatgcatttctcttccttggacgacctatgggtttcttccccactggtacactgactctcatgatctgcatgtcttctagaagcacctaatcatcctcctccctgacaagattaattgttgcatcgtaagtattcttccacgtctcttttgtgtaatagggggaggattgagtgtacaaacactgacattctgagtaagcaccgcgggggacaaggaattttcaacaattgaaacatgccgcatgtgcatgttctctgaactaagttcacatccccacctttctcacagtcataaccgtcataacttctaccaacgttaaacaattgtgcaccattacgtaggacgcttctaaacctaccatcctcgtgttgctttactaaatctttctcaaaatgagttgccaaaggggtagcacacttactttcctttttgagacggttagcgaaccaatttttgcagtgtgaaccttatgaactcaactagagtaattattggatatttccaaaattcttctgtcacgttgttgaggctttcaacaacattgtttgtcattatgttgtacctatctcctggacaataaggacgagcccacttttctaatcctatactctcaacataagcagcgatgacaggatccatctatcgaagcagctgtaaatgtctatcacattccctcttcgaccatgcataagcagctagccatatttgcgtgttacatgcatcagtcttgaacttgtgggtgacattcatagaagtatgtttatagcatgcacagtggcatgcttcagggaaaataacctagacaacatgttcaatgctttgatgcctatccgatacaaacactaagtttttaacctcccaaatcacttcgcttaacttctacaagaaatacttctaagagtcatgattctcaatgtcaacaattggaagggcaatcagaaataattggttttttgcatcgtacgctaaacaactagcattgtgcccccataccttgcctttaagaacgcccataccttgcctttaagaacgtatcgtcgatactaatcacaggacggcaaaacttaaatcccctcctacaagcatccaatgaccagaaatagtacttgaacttgttgtcctctatgacaatgtctgtaatagtacccggattcttttgttccagcatgtaaaagtaaccaggtaactaactataagcttct

SEQ ID NO: 38039 - DNA, 2417 bp, Cannabis sativa
ctttgtggatagctgcctttatttgtttgctttgtttgaatgaatttttctttttttttttcaaaaaaaaaaatattttccatctaaaaaatttatagtccgtaaaatataaaaaataatttagtaaaaacgtaaaaaataacgaagtattttgtgtaaattttcaatatatatatatacaccacaaatttcgaactttttttatttattaccgtggggtggaatttttttcaaacatattgtgttttttttttcaaaaatactgtgtaagtttcatactatgtactgtgttaaatttttactgttgttttatagttgttctactgttgtttttaattgttcgcttttgttgttttacggttgttttaggttattttataaaaatgataatatttttgtaaaaaatttcgtgtaatagtaaaattataaactttgacctaaaatttagtatttctgtaaaaaaatccctatattaaattattatgggccaatgatataagagacggttcgaggaagttatcacgttgaagattttgggctcaaaagtccatagactacgtcggtgggccgatttcaatgtggaacccaataatattcatctatgccgcttacgcacgctcacacgtatctctcctcccttgaacgtgttagggttttagactcgactactaccattcatatataaatagccgacacgccattttcctactctcctcatttctaagattagggtttcggccagaacttcacagaggaatttcgccatgggcaggagtaagttttctcctttcactagttttgttgctttgttgatttcgtaagtggattttgtttgcctttgttttcgttgtaagagatatgaactgatttgttgcttgagttaagatttcaatttgggtattgtatattacaattgtaataagattgatatagatttatttccagctaggaattaggatcaaatgtgcatggatctgaatgtgaaattttagggtttatttcgtatcttattctatgcaataatcgttgagttacagctataggattatttgtatagccggttttgactttttggttatgaaaaagcacaaacacacacatatatatatatttgatgagaaacatcgtttgagattttaatttacatgggttgagttttgttattgtgctctgtatttctttttgttgctgtaactgtttttaacttttcgcacaccaggaccagccagatgttatcgtcagattaagaataagccatacccaaaatcacggttttgccgtggtgtgcctgatcccaagatcaggatttatgatgttggaatgaagaagaaaggagtggatgagttcccattctgtgttcacttggtttcatgggagaaggagaatgtttccagtgaagctcttgaggcagctcgtattgcttgcaacaagtacatgtccaagtttgctgggaaagatgctttccatctacgtgtccgtgttcacccattccatgtcctccgtatcaacaagatgctttcatgtgctggagctgataggcttcagaccggtatgaggggtgctttcggaaagccacagggagtttgtgccagagttagcattggccaagtccttttgtctgttcgttgcaaggacaacaacagtcaacatgctcaggaggctcttcgtcgtgctaagttcaaattccctggtcgtcaaaagatcattgtcagcaggaagtggtatgttgcattagattttctgttttgtactggcattgttattatttttggacggaattttcattagggtatggtttggtactgtctgtattgtaattctgttattctgtgtgaattttggcatttggaggccttgcctgtgtcctgaccttttgttcttgtcacacttgcttaatcttcaggggattcaccaagtttagccgcagtgactacgtcaagttgaaggcagagaaccgtattcaacccgatggtgtcaatgctaaggttagtttctatccaataaacttgattctttatttgcagttggcagtgaatatattgctggttgaatcgaaatgttcttttatttctaaaactgaataagttttattatatttctcctgcagcttctcggatgccatggacctttggccaaccgtcaacctgggagagcattcattgatgctgctgttcaagcttgatttcttctaatctttagtctggacgagcttttttccttttatctagtctgaactttgcataccagttgtcgtttatgtacttcttttgggattatttattctgcttttcatctaatggaaattttgtatttcatacaattttgttatcattggattttggcaaaattttatatttggtgagttagtaaaaatatcattagtccttttgcactctttgttgatatgtttgatgtct

SEQ ID NO: 38040 - DNA, 2913 bp, Cannabis sativa
  modified_base (2834)..(2870): a, c, t, g, unknown or other
atggaaaagagggtgctaaagcacccgatggattaaagaaataaacatactacagcaagtagcaaagcaacaaatgttcaaaggtaaacataaaaacaggacaccaacagaaagtaaaataaatactacaacactaactgaaagtaaaacaactactacaacaactccaacccgctgctacctcagacacaagctacaaaaattacccagcatgctttctccactccacataatcgttcagcacattcctgtcaaggctagcaagatgagtgttccccacaaccccagtagtgcaagcccacttagcgatattatgagccataaagttgcccatcctcggaacatggacaattttccattcattcagcgcgctgcagatactaagaaatcgtctacgaagattgactaagttgaagtcagctgcaccttcaaactcagctgaaaaagcattcaccactctcagattgtcactttggaatatgaccttccccattttcctctccaccgagagatccgctgccaaacaaacagcatgcgcctcagcaatctttgggtcagttacaagtttattttcagcttttccagtaaagattgacccattctcatcacgaaccagagtagctatcacagacccgtcctcactcatagccacatcacaattatagcacaaccaagaaaccagagatggcgtccaaacacagacctccaccacatccccaatggctactaatctatgctccgagattctccgattcaaattgagaatcagctccttcacattggatctatctcttccatgaactatcccattcctttcttttcacatggcttcaagtatacacaggccaacaatcagaatttcctcaaaagaaatatgaggaggccgattatgaagaattgtgaaccaagtgcaccattgttgccattccctaacatcaattctgtccactctaattcccagcccagagttaaaccatagggctttagcaagagagcattcccatagtaagtggaaagcagtctccattccctcaccacagattggacagctcacaatggataattcaataaaattagcaaatttacctctagttgggaagacatctctctcaagttgccaccatatcagctttaatctcgggtgaattcaagatttccaaatcaatttccaagtagcatttgttgcatccttccgacaccatcccataattatcttacatgctgattttattcagaaatttccaatcgattctgccagccaaagccacccatcctgtgtatcttcatgtggcagaggaatattaagaatttccttggcatcctctctgtcaaaccattccctgaccatatcaaccttccatctaaaattctcatcaataaattggctaacccaaggtaccccatgtgttgcatctagcattggagtcggacacttggtcagctgagggacccaagggtcaatccaaattgaggtccttttaccatccccaatctttctacataatccttctgacagaagagagcgagttttcacaatagctttccataggccagagtcaccacatagacactcaatatccataaagtgtttgtgtttcaaatatttttcttgcacaattcgtccccaaatgctttggttatccatgagagctttccaacccaatttcatcaggaaggcttgattgatggtttctacctttctaaacccaagacatcctctcagttttggatgacatagagagttccaagagatcgtacggatcgtccttttcttgtttatatcttcccaccaaaagtcccttaattccttatccactttctgagcaattgactttggtataacatctgaagccgccacataagtagcaatggatgatcctactgattggatcaagcacgcccttcccgctttggagagtaactttgatttcaagctattaaccctttgcatcaccctgtcaactaagaattggagatccttggttctttttctcgatcgaaacagaggcagtccagaataaatgagtctttactcatttttttcaggccaagcaattctgaaatctccttagccaatggaactgaaactcctttggtaaagtggacagtatatttcgaaaggttcactgattggcccgaccaagcacagtaatcttcaatgcattgagcaaagccgctgcttcttttcgagcggcttttccaaacaacataatgtcatcagcaaacattaagtggataatagcagggccatttcttgatatcttgaagcctgcaatcaccccagtagcatttttatccatgagcattctagaaaggacatcggctgctattataaataacattggggatagaggatctccttgtcgcagcccacatgaagggtaaataaatccttgcacagaaccatttaggagcaaccccattttctcaacctcaatacattttggcacccaatttacaaagcttccattgaattccaagttgttcaaaacctccaagataaaaccccaactcatcttgtcatacactttttcgatatctagcttaatcatcatgtagcccttcttcccttttctattttccatagaatggacaatttatttagccaagaccgtattttcagcaatcaaccttccttgaacaaaggccgattgcgcaggcgaactgatctgaggcagaagacttttcagccgaatagctagcacctttgatatacacttgtaggcgacgttgcatagcgctattggtctatagtcattaacccctgatggacaatctttttttggaataagaaccaaattcgtgttgttgataaacttgttggaaattatttnnnnnnnnnnnnnnnnnnnnnnnnnnnnnnnnnnnnnaacaacctaatatgaattctaaaagaatgaaaataaacacata

SEQ ID NO: 38041 - DNA, 2625 bp, Cannabis sativa
ctttttgaatttgacccacaaaataatttttcaaaaaaacaaatcatatttttataaattttacttttaaaaattcataaaaataaaaattgcccagaaaagtatccaaaccatagatacaataaagaagcatcaacacacattttagggctgtagttatgtggtaaaggcaatttggcaagatgattattttgaggttcaaacctaataatcattaataatttttttaccacctactctcaaatacttctgttttcaccataaatacagagaattacactctgaaatgaggacactattctaatctccatgaaaccaaatgcccttgttagtgtcactatacgtgacaagaagcaaaatgagcaacatggatttctttttctctttgttttacctaactagaattttcattttttatttatagagataccagcgattgcagcaattacatcatcaagtgagacttctttcaaatctttctggatatcggaatcattaagagttgatggtttgaactgagggtcactttcctcaaggatcttgttcaactgcttgtcaagcacattttcttctgatggaatactcaaatcccataccttgaagatatcatcagctaacggttctatctcgtccactgaataactcggatcagtttctaactcgatagttttagttgcgcttgagccttctatgtaggttggcaaaaatggatttcctacaaaagagagtgactgcaaatcattagggtcccttattggagaaatgtcactactacttccagcttcttcggttatggacagaagactgttaacatgttttggagactcatcctcattttctgcccttgttcccgaaagctgaccatcttctgcagtttcggtggaattaaccatctcaacatctttttcttgaggacattcatcactaacagatgcagaattatacaaaccaggattagagctcagaatttctagcaaagcatcagtcacagaattccagttaccatcagaaacttcagattctttgatcaaacaagaatcgacccaagcgatatcttctagtgaaagagcttcatttttctcatcagactcttgaggagaagatgaaccttctgccacatcatctcttagaaccatggctgcaaaatatgaagcaacatgtcagtacaaaggaaaatcaagattattggttggagttatctttttctataccaattgcctggcacatatcttcaaaaacattcatattccattttacatgaaagtgctgtaagtagaaaacaatttaaagtcggtgcactgacaaacagcaatcaatggcaagctagaagctctctttcaatcaccaaaatgtttggtttttcgaaaactctaatatgcatagaatggtttctttcatgcaatttgtgtagtcatgtaaaattaacaagggaagtgttctgatcaacatacaattgaataaatgagactataaaaggtcagaatggattctaatcatactgattagcagtaaaacattgtttcagagaatgaagaaacaaatataaaagaaccaaacaatgatggctcacaaaagaactatatttctttcattagaatgtaataatttgacacgaaaagaaacatatttgtaactacttgtaacactaaaatcaacattcaaattgttaaatgtgaataaaggaaaatctcaaaaatcaaataacgtttggccattaaacgaaatagcttccaagaatccaatttcttggtagccacttgttaaaaagacctggaacaaagaacaaagtcagaacctcttctattattatctttagaataaaaattatgttttatttttgggtcaattcacaagtaattttctcagaaaaccatttgacattagaagccaaatttgactacagtttaaaaaattcttagttctaatgctgctaccaagattaagcaaagaaacaaactaaacaagactgaattacagaaagacagtgttgaatctagtagaataaaaagcttgttttattattctgccaattcactcgtgaatttcccagaaaacaatttgaaatgaaaagccaaatttgactacagtttctaaacaatattagttctaacgcttttacaaagattaagccaataaacaaagttaaaacacgattgaagtacagagatatattcaaatacagatatgtttcttgtagcttcaaaataatatcaagaacttcaactttcagaagatgaccaaattcatcggcaattgcataatacaatctctcacaaacaacccagtacctcaaaaatggacttggaaaaaattacaaagtacccaaatgacaattgacatgatttaaggagaataagagtaaatacctgctagcgataaagggtggaaagctgacgaagtgggttgggtgagagacccaattggagggagagaatttagggtttaaggagagtttgtacgaatttgagaaaatgagaggaataagcactttattttggagtttactaaatgggccatgttttgttgaaagtgtttcttcactttactaaatgggcgcgaaaaccaatatttttgcaactggttacaaccggttgtacttcccattttcaagtcaaataccccttt

SEQ ID NO: 38042 - DNA, 4003 bp, Cannabis sativa
aagaaaaaccccttgtttctcacaaaattcaaagattgtattagaagcaaaaaaaaaaaaaaaatgaaagagagaggcaaagctttggaagcttacaacagaaacgacatggaatattactcaacgacatcggatatgccatgcaagaagcatccttcttcttcttctgttgggatctgcgcttactgtctaaaagatcgcctcgtgaagttggtttgctccgactgcggtgaacagagactctcttcttgctcttgttccgagatctcctccaacagaaactcctgcaccgtcgaggttgggagcgttggccgagtgtcgtttctgatcgagaatgaacgaagcgacgtgtcgtttccaagtaatcccgtcaagaacgacaacagaaagacccaggtgggaaaaacagaggagggtctggtgctgaggaggagcagcagtagctgcgttgagatcaagcgaagtgggttttggagatttggcaagtttttcaacaaaaagagaaaggaaaaagattgtgggaacaaaagtgttggtggattcgatgacaaaagtgatttatggcttgttgatcatcatcatcatggtgtttcaagatcgagatctttgtgtagtttcaggggtggaggtggtggtggtaatgggtggttcggatcagaggacggtggagatttgatggtttccggcgcccgtagctcgatttcgggtgcccggagttcgagcgttacagcttgtatggttttggactcgggaagacgaagtgggtttagtgaggcagagccgagaaagagtggtttcgatagtgaaaatttggtctctgagttcggtatgagaagaataggccttgtggaggttgataatactactactactaataataataatagctataacaatggtggttttaatggtggagggatcaacagacgtgtgttctcgcttaaggagagtgattttagtggaatggatgattctggtttcattgatttgaaacttgattactctgctgagtcaaattcaaagactgatcatcagttttcttcttcctcgatgaaaatgggtgttaacaacgtatcagattctgattctgcttttgggagcatgagaaggggtagtgagtatggaatcaatgaatatggagacccttttgggagtagtgccgccatgggagatgggattttcaatagaggaggttcttgtaggatcaccgttaatgacagaggattgaagaaagggaggaagagcttgaagggttggcgatggattttcaggcatcaacctagctggggaaattcacggaagaaagatgaagatcttatgttcaaatcttgataaattccaaaaacaaaaacaacaacaaaaattgtagtagaaataaacatgagaaagagaataagttaaatttgttttattcatattacaacaacaatataattatctgtgttcttattcatcttctacttcttgttttttttcccacttgtaacaaaactacacactcacttttttttcctttgaagaaattcacttctctatttagtttttctgtttttgtgtttatgttcttttttgagttcattttagatgatttgaattggatcgtataattagtcttagatcacactattataatacaactaaaaatgtaaaatttagctccaaatttcaaaatacccatccatcagatactcttctataatccatttagcttgtgtttgtttaacttacttgattggcaaaaagagaattaatgtcattttcctcttaataaactcatttcttttttctttctatgtacattcaaatgtttgattaaaatgttttagattgtattgttttattaattaagtattgatgatgattaggctgagataaaatatttcatttaataaagttgaagagtgagaatatggggcacttacagttgggaatcttaaacactattagccaatattttaaactacttggacctctcttattaagacaatttaacactattgttatgaaattctttatcataatatcaactaaatggaggtagcgtgcaaataatgtgtgttatgttacatgtacctatttttttatataattttttttttttcaatcatactttttataggttgaaaataggtgacacgtaggggagaaaaatgggataatattattatatgatgagacttcttattctttgaacattaattaatgtactttggaagtagaagtgtagacgttaacacatatactagcaaattggtctttgttcggaaggactagttgattagagagagacatagaataatgctaaaaaggttgcagcttgaatatttaagcacatactaatgtaagacatagagatctacaaacaataatgcatatatatataaagtttgcaaaggttatttatattagtacgaatttcacatatggacaatacatatatatattccccctttagcttttaacaaagtgaaaacaaataaagtggggttgcggaggttaattttttactagtatagtgattttgttggacaagcgttattttttactcatgtcactttttatttttataaagagaaacataaaacaacacacagaccaagattgtttctacaagaagaatacaatctagagagtctagactatctagtattaaatttggttgccattcacctccaatcttgagtctgaattttgaatttggccaacaaataaaattgaacaaaataccatcttcttttgaaagcagaataacactttcgatcttaaacatattttctcaaatttaaagatagaaactttaatatgtgtttccaaattcccagaaaagggcacgtagtagggggttagtaatatcacttttctgtgtcatattattatatgtgtaagaaataggaactaagaagcgtgttggccaagtagacagatatacttacctatcaacattggcagattctcttgttaagccaacacacacacatttttaactatttatttaagaaacaaaaatcctgttttggcgcgagttttcatcttcgctattttgactcctttattctattattttataacttttccttttgtttcctgtttttttttttctttatttaaatctttaccatttagattgtgacataacattcattcttctcgtttataagaactgcaatgaaaatgagtgttcattcacatgctttaaacatattatcataaatgcttaatctctgatatgatttttttttttctttttcaaaaaagattactggtggtaaataggattgtcattaatttagcctgcggaagaactttcaatcaatcaatgtttttatgaacatactcaatttttttatgagcatagtcaaaacatcaggtggaatcaaagttgcacaagttttatggagatgactcaaagtttattattaatataaagcaattgtgaaaagtccggctggctaaagcaaactaagcttgtatttatgggtcaccaatttaaattacaagaaaagaaataaaaaaaatatttatattgtacatctatattttaaaaattgaatttttacgtttatacttttttttactttatttttaatacaataataagattttttatttattaattgacataatgtaccgtagtaaatattaacatattaattatatactacctattatattatatactacattttaaaaaatcataagattttattagagatttttttatttatatattttattgatcttaaatttggtcaatcaacaacaaagtcgtatttattactgatgtttgccacgtgttacacaataagaacagaaaagtaaataagacacgagattttataaaggttcagcccccttagctagcgagtaatgacctacttcttttttagttgtattaataccaaagatatactactgagatcacaagtgttgtggaatctgcagtagctatcttaagattaaaatatatgaatcaagtagccaaatctcaagtgagagagagaga

SEQ ID NO: 38043 - DNA, 2192 bp, Cannabis sativa
ctgtatcaaaaacgtaatgaaattgttttattatttgtttgtcaaaaaaaataaatacattattacttgaatacgtagaagtagcgtgtgaactgttcttctcaaggccgtccaagaaatggttacttaccatagctgaaaagacctcaggccaactaaaatacctgccacgcgtccaaagcccattaattaaagtagaagtagccgttaaacgaatccaacggtcgttatctgccggctccaatcattaatgtcccaagttttcgtccccaaccactccgcttttttttttttataggagaagaccctttcttttttctctttatatttcttctttttctttttctctttgtttttcatattccagatccgttatcaacggtcataacatttaattaaaattaattattaaaaaaaaaaaaaaaccaagtcacaccccaaaaccataaataaatcaccaaacatcaattataaaagcgcgtttttttttgggtaagtgtcaattaattaattaataataaaataaatacaccagtactaattaaaagaaattaataatattaaataaatgttcctaatacgcgtgagtttggtctcacaaacgacagctctaaataaagccacaccgatttctcgccattcacattaaactcagaagagaaaattcaaccaaatttagtctccaaaattttctcaacagattcctggtaaccaaacagccaccaccacacacaacaaaccaaagaagctctctctgtctagtcttccaatgccaaatattttagttagaatattccttatatataaccttctcaattccttcctcctttcgttggtgcccaagaagctaatcccttttttaccttcttcttggttccaccaaacaccacaaactccattaacgaccgtacaatcatcggcactcgctacggccatcagtaacaagaagaacaagatcgagagaatggagccgacggagctgagtcgtgtgttccaaatgttcgaccggaacggcgacgggcggatcacgaagaaggaattgaacgattcgttggagaatttgggtatctttatccctgataaggagttgtctcagatgatagcgaaaatcgacgccaatggcgatgggtgtgtggacatggaagagttcggcgagctttacagatcgatcatggacaatcgagaggcagaggacgatgacatgaaggaggcctttgatgtgttcgatcagaatggagatgggttcatcaccgtggatgagctcagatcggtgttagcttcccttgggcttaagcaagggaggaccgtagaggattgcaaaaagatgatcatgaaggttgacgtggacggtgatggcagggttaattacaaggagtttaggcagatgatgaaaggtggtggctttagtgctttgacttagaatttttatttatttattttattattattattataattatttttcatctttatttggagggaagggtggatttctattaggaaactttttttttttttttttaaaatttctctgtaaatatttttggagaagtttcaatctattgagtttgggaaacgtggcttaatctgagcgtataagaaccgaaatggccaatggtgggtgttatgaagcttttactttacctttcagaaaacataagaggagcaagggaaagaaaagatgtttttttgaaaaatgtgtgttctaagatgggcaagtgtgatttttttcttatcatctttcaattgtaatggttttgttcattaatgatgtgaatttaattattcgaagtattatgatactggtaacataaaaaaaatgtagggagtctccacccaatctttgagtaaacaacgaccacattttttttagcgcgtatgcccttgtgaacattttgactctttgaaaattctagtaaaaaaaattagtgcattcttacattaaaattctagtcaaaatactcagcacaatatatataagtttctattatgacagatcacattgttaaagtaggtaagactagtatgtgtagaagatcatattgttaaagtaggtaagaatagtatgtgtggccaagtgacaataacaagttgacttgctaacacttccctagaattctctccatggtctaagactaatccttcacacatggtgcaaaatttccatgtgggtaagtttgggtgtttttctt

SEQ ID NO: 38044 - DNA, 3145 bp, Cannabis sativa
  modified_base (1893)..(1899): a, c, t, g, unknown or other
tcacctcaaaaagtattaagtaccatccggtgatgtttattttatatagggagataggctggccttagtccactccttatgagattggatattactttgatttggagtctatttagaagcaaaaccgatctatatactttactttacccatgttggccatcgatggttaggtaatactgacatcacgcctatgtcgaatgttagtgagtatgctgagaaatacttcattgctagggatgttaaggggttacgtcatcgacgcctttagcgagtgctatttttcaagcgctctatccatgcattacagatgagatacatgacgaaccaaaccctatctattttgacatggaagataaacatactcaagttgaccagtgttgccaacttctagaagtatattttgtatcctcctactcctagagttgtgggagccccaattgcagagagagcttgtcctcgggatggagaagtctgacttgtatgatggcatttctttgtctcatatagctcaaaatctagaggggaaagagagggccctctgccaatgcttggccaatgggggttcagttagtgatgcttctctccagattaggcctcgaggctcgaattctgagggacctacttgccctttgccttcatctagaagtaagggcaaggtggttgttgaggattctgatagttcctcatctgaggatgatggtatttgatagttaatggaaccatctcttacattcttgtctatcattgaatatttatgacttgctttttgactttgctactttcattttgtagatatgtcttccaactttagaggcctcgatgggggaccttctgaagagcacttcctttcatggatgaagagctcaaggagctcagtgatggtgagcaagacagcctttactccactggtcttcgggatctatctgtgataagttgtaattttagcttcgttcacctttttggattttctgtaagcgcactatcaaaggatttaaagcatggggttggccaaccaaggttgtatccttaaggggttggctagccatagcagccttagagaggggcttaccagccaatgttatactttgatattcattttttcttgttttgctttcaggccttcatgaagctgagctcttcaagcgataacttcttgtcctgattgtgtagcttctgagctaacttagtaagtctttgagtttgctcaagtaggccacaattttttcacctcgaactgtgtactcaactaggatttaattcacaactagttgaaaattgttgaatatccagcttgtcaactcgtacttcatatgctagcttgaggccggctattaagcctacatattcagcctcattgtttgaggctttcaagcaaaattttattgctccgtgcagttgctgccccaaagtgttataaaggcaatgcctgtatcagacaattggtcagtgcaacttttgtcaacatggagtttccatgttagttctttagttttccgctattgctcttgttctcacttcttttttggctcttacttttctcctgaatcttgagatatttaacgacatgagtttgtgcattcaatcaagaagtctacaagggattgaccctttatgcatattcttatttgatatgttatctcaaactggcgaagctgaatggcccacttgagtagtcggcctgatgcttcaagtttttgtcaaacctgctgcaagggttgattagggtacacctttatggggtgtgccttgaagtaggaccttaactttctgtaagccaatgacaaaatataagtcagcttttccatgagtgtgtatcgactttcagctttgattagtctttttctaatgtagtgtaaaaggtgttgacaccgtcttcttctcttgtgaggacannnnnnncaacatgttctgtgactgctaggtacacatctagctcttcatagtctaggggtttggacaacacaggcggttgagccaattgtttctttagctcttggaatgttttttcacattctcttatccactcgagttttttgttgcctctaattatgttgaataagggtacgcatttgtcagtagacttggacacaaatctgcttaatgcagcaatgcatcctattagtctttgcaattctttgatagttgtgggtgacttcacgtccaaaagggcttggatcttgtctgggttttttttttctattcccctagcgttaattatgattgaaaagaattttcaagagtctactccaaaagcacatttcatggggttgagcttcatgtcgtagctgtgaaggattttaaagcatttgtctaggtcctccacatgctcccagcctttttggacttgacaagcatgttatccacatacacctccatgttgctgccaatgagatcatttaacatcatgttcactagcctctgatacgtggcccctgcattttttagcccaaagggcatgactttgtagcagtttaggcctaagtttgtcatgaatctagtgtgctcctagtctggaggatgcatctttattttattgtaacatgaatacatgtccatgaaactcaagatttcatggccaggtctggcatgtaaaacttcgtcaattctcagaagcaaaaagcaataatttggacatgctttcttcaggttggtgaagtcgatgcatactctcaaatttttgttggttagggcaccagtactgggttggatagccatagttgatagaatgcctccattatgaagtcatgggcttatagcctctcgacctcatccttggcgcttgggcgcgctccttgtctaacaacctcctgttgaccatgtctccatgtgaccatgcaaaaaagtctaggtttgcccttacaaatctatcaatattgatttaatttctagtgctaaacttctcctaatttttagtcttcttgatgggaaagtgggatcaacctctacttcttccaactcttctacaggtttgaagcttcttggaggatccctaaagtgaggatctatgtctgtgtccttgctttggcctggacttcattactttttactagggtcttctttagagttcttggtgagcatcttctctttcttagctttggacaaggccaagttgtaacattaacacgcaaactttggtctcccctca

SEQ ID NO: 38045 - DNA, 3548 bp, Cannabis sativa
ttttttaagttatgttttgtataataattagtgtattgaataataaataatgtgtaatgtgtaatatttaaattcatatgtaatttaatatttttatacatttgaatttttaaacaaactttatttttatattaggtaattcacagccctgtccctaccccattatgggattcccctgttcctggtggtgtagggatgcggacagggggagcacttcccaccaatttccccgcgtgtgtgcatccttatgtattacatcaatattattgtaaaattattctaagtatttaagaattatccaaatttacatataaaaaacaaaacaaacattcttatataaacaaaacaaatttagttgttaatgacagtaaatatttatttgattgtatgagtggagttactttattatttgtatatcgttttattaacaaagtagctcataaatttgttagagcttcttattttcaatagaagtaatattcataaatttatgtctacaatgtttgacgatttgtcttggtaataaaatctatttttaaaaaaaaaaaaataataataatactcttgtgcggcttacaacataaaaataaataattaaaaataatcagcatataagtgttagatttttaaacattgttgcgtcatatacaattataggaacacgattttgtcctcgtgatgtacttttacgaaatgtatcacgtgatgtaccacagccgttagatggggtagttaagttaaaaaatcgtaacgtatgttgagactcatctaatataccacagaatacgtgaaagtacatcaccgacaaaatcgtgtccaattatattttctttttacttacttattattttgtctcaattaaaaactatgatttaaacttgttatcattatttttgtttaggagtggaaacgtggtactctttagcacttacgctttccgttaagtaataatgaaatattatatggacttttctcctccgttgggtgcggcgaaaatacatcaataacaaacttgatttgtatttccttttaattattaaatgatgtggacttacttgagaaagttccttattatattaccaaatagtgatctcattcaaactttgtgtttggaacttttgaaactggtttgaacttcactactatctccccataatttgggagccaaacctggcccactatgctttctaactgttaataatttcctgccaaacttgacacactttggctccgatttacaaatctctctagtctcgaaatttaagttgtttcggtagttactatgctaattgcttaaatttagagtaatttaaattttgttatgtaaattttcgtaaatatacaaaaaaaaaaaaaaaaattatttcaaaatattaaaatagaaaaaaaaaagtctacaatataagagttacacatttctcactcagaccggcttaagcataagacaacttaagcaattgcctaagaattcacaggcttacattttaaaggtaatatacattttttttatataatatgagtgatatacattgaaaaatatttttaggaaaaaaaaacttcttcattcaatcaatttgagcactaatattcactactaattgccaacgttacaatttaattaatttttaagaaaaatttacataataaatcaaaaattttgaaaaaaaaaattacaaaaatacgttaatatcgaatttttttttattttactcttcaaacttttttatatacaaaaatacttcttcattaaaaataataaaccattttttggttgttttataatttatttatagttgcattatagttgtcatgatgttgtttatggttgatttatagttgtcctgagtgatttctagttgtttttttagttattttttttaattgttactaaagtctatttttgtaatgttaaaactttataagattatttttgtaattaaaaattttaggccgtataattatataaaacaaaaaagaatggtatttttaaaaaatttcctaattttaaatttaaaattttgaaactattaatcaattattaatgactttgtgtggtgtaagatttatgaagttctttgagcatcgtatttttatttggtctaatcactcaaaattataataatttacttgctagtttaaatagtattatcttttttttattaaacgatatgatgatatactagtcaataattttactaagattgctgttatattctagtggtcgtttcaattttagagtctgttccaatagatttgcgtccttacttggtaacagaagtttgtgggtaataaaattgattattccaaaatgtatatatcattatgttttcttataattagacttattttagtgtaattctttttaagtatttacaaaaatatggaaaaataaatagaagttttaatatatatggcatgtaaaattaatatcactaaatatgacattttataaccaaactaactaaatatatgagtatttaaatagaaaattctatataaaaaaaaaatatttaaaaagataatcaatttttcaaaatatatgagtattcatcaagaaactgatttttcatcaagaaattagttttttaattaaaaaattggtaaactagtttattcatcagaaaattggttttgatcatataaaagtaaaatttataataaaaaaaacctataaatctaattttgaccctattaaaagataatatgacaaaacttataataaaaaaaaaaagataaaacacaataaaaaaaaatgaagcaacaccattccagtaaaacaaaagtgctcgaaaaacacaaaaatcaaactactctctccagccatacaagattttttctctctcctgctattcaaattgcttagtttctcatacgatcaaaatcaatcaccaaagattcttcatcaagaaattaattttttcatcaagaaattagtttcctcattatgaaactagtggtttcattaagaaattaatttcttcattagaaaattaattttgattatataaaagtaaaatttataataaaaaaaatttataaatccaattttgaccatataaaaagatcatatgacaaacttataataaaaaaaaactaaacacaataaaaataaaaatgaagcaatcccattactgtaaaacagatgtactcaaaaacacacaaaaattaaactaattattgtaactataatattcaatctcatattataaatcttgtattataagtttgtaatttatagtgtgtttacaattaatcttttttttttataattatcatgcactaacaccagtactactaatactacaaacaacaacaaacaactatatatacattttgaatacaacacatatataaacacatatataaatgaatgcgtaatgtaaattaacgaaattatatattataaatattaaatcaccaaaggtctcaaatcatggacttcaattcatgacactttttttttttaatgaaaataataactttacatctctgttaccaaattaggcaacaaatcagttggaacagactccaaactgaaactacaatca

SEQ ID NO: 38046 - DNA, 5095 bp, Cannabis sativa
  modified_base (1671)..(1676): a, c, t, g, unknown or other
  modified_base (3859)..(3861): a, c, t, g, unknown or other
tataacttaagtattattaccgttaaaatttaaatttaagtatttatttataactgaaaatttaatttaaatatttacaccgtaatttactcaaaaataaattatgtatatctagatcttagaattcaaaattaggaaccatatacttctataatataatatatttgtgactttttaagctatagtggttaaaattggtgcatgttattcatcactctatttaacaagtaatctatatattaattaattaattaagttaatcaccaacaaagaaagaaacaaatgaggttggtaatcatttcttgtacggatcattatttaatcaactagtaagattatgagattaattaatattaatgtataattattattatcactagagaacaccaacaatatattatatatataatattaaccactatacaaaaattacatgaattttctcacacaatataatttgtatacatttcgtgtatgtttgagtttctttctttcacacatttgaaaatgaaactacaattatataaatatatctatatataaatatttatatatatattttagaaaataataataatagagagctcttctcacaccacaaacaaaaaaagacaaacctaatttgtcaatttatttttctttttttaaaaaaatccacttgtgtatttacaaattaataaatcattgttatttaaatatataaactattttgttgtaagatttatatatataattaatgtgaattagttgaacaagtctgaaaataagagagatttaaggcgtgagaaagagtttcacgtggtagctgagtttaataaaagtcgtacttataatttgtcttatataatataaacttctaataattaattactaatttatatatatataaatataaataataaatattaccaaattatttttatatttgaaaaaatgtgtcatgcaaagctgtatatttgtaggatatatatctgatcactatgtatgacatctttcccaacttttttgtaaatacatttctataattaattatatatagaaacatatattggtctgttaaatttttcaaattttttaaaattttgtagaattataattgtattttttttttcttaaaagaaaattgtagaatattttaataattataatttatgagaaaaaatttaattagaaaattcaatatatatttgtagattatttttcttatattatataaattaataattaataattatatatataaaaaaaattaaggtggaaaacagagaggcaaagctacttttatgtttttttttggcatgagattcactttattggtttagtagtgatctaaaatctaaattcatatttggaatcctattagaaaactctagaagatttatatatattttcaatttatatttaattagaaaaaaaataaataaaagagtagaatatcaaccaaaacataatttgtccttacatgcttaaattcatatcaaccacagaatatcctaaaatcattaaaaaaatcctaaaaaaattaaaaaaaaaaatcaattaataattttgttgtgaatctgaaaggaaaatatatatatataaggaacagctcatatcaattcatatagcaataagatacctatgtaatttccgaaacataatatcaaatctaataataataataataannnnnntaataataataataatattatgaagaagaataataaatatgggagcacacattccatgttgttgtttttataattaaagtcaataaatttggtagtaaaattagatcatatatattcatgtgtggtctacatggataaggatgccacataatatgaaaacaatatatcacataaaataaatattgtttttatttttttagaaagacagcaaaaaaatcttttaatgattactatttaattatcaatgaaaacaagttaagtaatatatttattcggttttataaaaaaaaataataaatatacaaaaattggttatatatattttttttaatttcattttagtgaaaatattttgaaatatgaacttgttgggaaatttcttgtaattatttcttaattgaaggtctaaatgaaatatttagcaataataatataagagtacaaaatgtatattattaattaattaatgttatttttttttaagtttttgtgtaagatttatgggatggaaggtgagggttctactatatacatagatagtcattattaattatgtaatcaaattttagtagttatcattatgtaaggaggtcaacttgccatttcacaccctaccttattataataattataaaaaaaaaatggtataagtgtaaataaatatcaagtcttctatattttaatttaaaccaacttaatttgaattaagtaaattttgttatttattacactactaataatataacaccttattagaggtgttggacaccatactcaagttaccttatcatattggtatatttaagtaacagatctcatatattttattttaaattaaaaaaagaaaaaaaaatatgaaaaggtaccaagagtatttagcatcttactacatgataatatcactattaatataattaatgattgagtctcatataatttaatgtaataatttttatggagtattactaactaattgtaaggtgacacgtctagaagctgttaggtaccattggtacttaatagccttttgcattattattgggcaccagtaatacctaacacattttaaaggtggcaccccacgagtagttattccctaaaaactattctcaatagtagtatgataccgagaagggtgctaggcaccaataataccctttagcatttctcaataataatactaaaaaaatattaaaaaataataatagcaccctaataccaccacgagataataaactgtaattaattatcagttctcatatttttttttaatttaatacttattaactatttgcaaggagtcaccttataatagtgcttaatattaatgctccaaattaaaatatgtgaaatctgatacaaaattacattaatagcaatatctctcacaaattctctattatattattattttttataatttttttaatattaatttttttgacaataattgttggtctataggggagagaggactctgttactgactctcccaataaaggactcatattataaatagaagcattatagtcccaatattcaatcacatttcttagatctacaaaattaaatcaactactctctctctctctctctctctctctctctctctttttctatagaaaaagaaaaattaaaagataaaagagagatctttaaattaaagaacagagagtagagagaagattattaattatatatatatatatagtgagatcagattatagatatatataatggggagtttaggaacagagattagtgaggagtattgtattaataatgatgatttgattataagaagaagaagaagaagagagtagtggtagttggagtaataataatggttataatggtgttaataatggtaaattacctttattatcccttaaccatgtttcttatgtttgtaaatcagtggctaaatctgtcaaattttatgaacaagttttgggttttgttcttatcaaaagaccttcttctttcaagtttgaaggagcttggtatgtcttctctcttctctctctctctctatatatatacatatatctatataaatggtttttgtttttatgagtaaaaattatagagtgatctttcgatctacttgtttcggcatttacaattttttagtctagttttttttatatatatatatttatttaaaatattttataaaattnnnagaaatttaaaataatttacaatgtaaaaaataatgttcaaacgatctattttataatagttacacgttaaacacagtgtttgaacataatttttgatgtatttttttgaattttttaaaagaatactaaaacaaataaatatttatcggtacatcctccctttcaaaaaggtgcaatattatagaattttttaaaattatatataccgaaatgaaaatgttgatgatatatggagttgttaattaaaacttgactatgatgagattaaattagtacattatattaattattaggttaatttatggtattggagagttatatgtatgcacatctttatgaaatttgacttcgatgaaatcaatatataaatattatgtatcaaattgttatatacacgtatgcatgtctataataaactaattaatattaattataaaatatagaatagaatagaatatacacatgtattattagataaagtctctatcctagaaaatcatgagttattaatacattttatatatttacaattaatattatattaattgatcatcattaatatcctcaactatccttattctccacaattttatttatgctcttaaatatttctaataattcataaaataatactatattactatatgtttaagtgtatattttaagtacgtgtagtaccattatatttatttatttatttaaaaaataataataataattacagaggagagtgtcggcagttttgtggaatttataagtatttattattattattattgttaatatttttttctttttgaaatggaaaaatatgagtattaagtagtggggtatatcaattttgtgtgtggatgatatttcgtaattactattatgaattatgagatcaaatggtatggtagtgaaagtgataattatgatgatgaatagtgagtaaatagtggggtcactctactctcacacctccataattatgccaactgtccacaacaaaaatatttaaaataaaatatattattattagtataatttaataacaactttcatatattttaatttaattattattattgaaattaattaccaaaatataaagtgcattgaacactacttacttagtacataataatattgttcgaaactttttttttcaacataaaaataacaagttttattattattattattactattattattatgggttttaactattttttgttttaactattt

SEQ ID NO: 38047 - DNA, 4120 bp, Cannabis sativa
  modified_base (2180)..(2185): a, c, t, g, unknown or other
  modified_base (2504)..(2506): a, c, t, g, unknown or other
tatatatttatatatatgatacatgcatttattcacatgttctaaatctttatagtagtaaaaatatttggtagtgatagagagtgctgtcccacaatgatttcttttgccaagtggatatagtataattttgcttctaacatcttaagatttgcataatattattacaattattttttaattaattagatgattcactgattttgttctcaattctatgattttattatatatcactaaatgaatatattcatatacaatgatcacagtcatgaatttttcagtatgcgcgtatacacagtaacacaggagtgaactcaaaaaattttgttagttggggcataaaattagagcattgttaggaaatggaaatgctatggcggcatcaacaatgatgcctagcagttttagagcatctttaatggggataatttaaaaaacacttgatgacatatcttttaatagatgcttactattgaagaggaaaaaaatactattgataataagaactcatcaactatgttaaggccgaaaaatcaaatgtagaatagatgatagatatgattaactaaagaagttctagtaaaataaacaataattgtgaaaagtgcctcttgtattagtttttagagcatgggattacaaaacttgattttttaacccatttacaagtgttcaaaaggggcttttatacttgagctctaatggctctgaaatataagtagtttcaaaaataaggggataaagttctgattgtactataaaggttagtgtgtcagatgtatagtggaggagtgttggtcgaatatcaacttgtacctagagtaagacaaatggtgtctccactacttgtacttgtagtattcgtcgtacaaccacctcctctcttcatgttttgttgaaggtgttttagctttaacagacttgcccttagtcgtacatccctttggtatcttttccattacaacttgtacttataatgagggagccacactaggaaatttggcaaagtgttgggagacggagaaacacttggtattttaattgtattgggagagggagcagcattggtaatttggctaagtgttgggagagggagcaacacttggtaatttggctaagtgttgagagagtgaaggggaaaaggaacttgaggagagatagagagatgaagagagtggggagaggcaaatggagtggggagctactttagcgcgcaaggagtgagtgaggtggggagctccctttggtgggtgcagggagtgacgagagcgaggagctcccttggtgcatgtggggaatgatgggagtgaggagctccaactcccttggacacgcacgaattgtggagtggtagtggggagctgcttatgcggagagctccactcgagccttgactccttctcgtgtcggcttgcccctttacatgggtcgacttctatttctgggagcaaaacaagaaaaatgcccgagacaaaatcacaatcgaatcgatggaactacatgttgttatatccaaaatttggctgccatctcagtggaggactcgtgtcaagataaggggaatatggatcgatgcaatcgctttacatggaataactcattaattatgtgagtatcagagtatatttgtaacctgcagactataaggtcttaggcgaggaatcaatatacaaactgctgcttagtttattagcgagaaaccatatgttgctcaatgcgaatagcgaggcatcaaggacagtacacataggaagatgaaagtgacatatatcaattgcgaaagcccttagtgtacaaactaagtgtaacagtcggattggctcgagaccaagtaagcgaggtgcccgtctcgctatgggaagagttcctgtaacttcatccagttaacgtcagtgaggctcataaccctggcaagtcaaaagctaactttcaaatgagcttcgaagaactctttgtaaataagaactgcgatcgacacaagacatgcatcgtcgaccttggaaggaaaaaatggtcccagctcgctattgagattactggaaccaagcttctggcgagacaactccagatacaataattgcatacgtgtttaattcacgatcattttgacccagtaaaagcgagaaaatcacagctatatgattttcaaatcataaccgcatttacactacgtgatnnnnnntcaaatcccatgattttagggatgattgttgtgaacatattacggttaactttgtaattaactatccactatgtaattataaatagtggcaagtcggatgaaaatggggacgaaaaaactcatacaagaggagccctgaaaaacaattagaaatttgaataagattgactcgtggactatgcaaagttttaactacaaaaccacgtaaaaaatcctgtgttcataattttatttttacagcttttaattttctgtgtgaaatcactactgtgaggctcaaatttggataataaaaatctgcgttaacagtttggtgctnnnattgagagcctctgtgaaaaagcttagaaaaaccctcccttcttttgaagaaaaaccacctccttcatggctgaaaatccaaaaaatgttaacacctcaaatgaggaaactaatcattattctgggaaagagcccatgggctccggaaggtctaccaacccgtggtccagacggaccacccgttccaggaggactcaacccgagagtggccctggtacacggaccacacgttcctggagagcccaccccgatgttggtcttagtacgcggacaacacgctcgaggataactcaacgtgggagtggttagaaccctgggacgagggatgaaaagctcaatcgtggagatgcccagtctatgggagaaggtacttatgaaacggaaaactgccgcctgagacgctgtctagaagaggcgcagcattgaaacgctgagttaaagcgtgatgcagcctcggccaaggtggcacatgggacaaatcctcaaaatcaatctgaacctggagtaagaagaccacgaggcagacctcatggctcacgaaccaagagacaggaaaatgccctagaagaacaacccagggaaaatgaggtaccccctgaaaatcaaaacgaacagccaaaagggagacgggagacaacccgaaactgatgaacgagaaatccctcatgacaatgaggaagatcttgggactcaaccgggagaacataggtcacctgctagaaatcaccagcgttcttcccaaacccatagagcgaggactcgtacagactctgatgggggaaatacgacaaaccgctctcagggggaaagaacagagcgtgaagaagcaagtgtggcctcgaggcagttaagaacccataatcgatcaactcgaagaggagaaagtactcaacgagctaatgatcaagaaagtatgggaactagtaaatctgcgagtcactcaaagacaaagtctatgagtaggacgcgatctatgagtaagacgaggtttgccagcaattactcccaaccgaatctgcgagagcacttgaatcagaagaaacctgaccttttccaacaacttggtccaaagcaagaggctccaattgcgaataaacgagctggaggacaagtttagaagatatcaagtgggggaactagagaaacaatctggatatgactcagacgaggagcttgagccatatcatctagatataatgaataccccttttcctttggggttcaaaaccccgtatgtcaagtcatatgacagaaccactgatcgagtctcgcatttgaataatgttaacacaataatgcgagcgagtaatgtgacgaacaatttatgctgtattttgttccccacctcgtttgttggagcagcgagtagctggtttaacaagtttacacatcattcaataacctcctgggaacaactttctagggatttcaacaaacagttctaggctgctagggatagacgacccaaagcagcctcgctaaccaatataagcagcagctcggtgagacacttaaggcgtacttaagttgttttagcacgggttgcgactagggttagcaatttggtgttgggttttatgccctaaatacaactcatttcatataatcagattt

SEQ ID NO: 38048 - DNA, 1811 bp, Cannabis sativa
aattaattttatcattttacccttctcgggtcacaattactaaaatgcccctggctcaccaacgggatcttaacatattaaaattcatattaattccgatatactgaactatataataatataattcctctattattcataattatttaattagggttttgctaatctatttttaaattctagagtgttacaaataaggcttagtgaaaagagatttaacaaaaattctatatagggatcccaatagcatcagtcatgtgcacttatccaacaccaaagtaagcctacttatgagtgaaattgttcacgtccgaagtgcactgggatgtagctccagaatcaggattctaagcaacattaactatgctatttgctttggtaatatttgtagattgtttgtcaatattagtagcatcaactcctagaaaattccatattgaacttttgatagcaacgagaggaaatttatctagatttagagcattatcaataagttggtcgaccaccagaagaagaatcaacaggagaaaatgaaggctaagtggcatgaccaatacaaacagaggatgattagtctgagcaaaacctctacgaggagtagtaacatagggtttccaagtcccatgaccaagagatgaattgtagccactgcctgaaaaattaggtctagttctaaatgaattggaagaatatttcccctaccatggtagccacgattggtagcttgattgaatcaaaatctttagaatgggtatatatgtaatgtttttaaaaaagtaacaacaactctatttttgaaacaatataaagaacattgcgagagttaataaaaattactaaagtgtcataatcattgggtaaatttttgaaaatggcaatcacgtcatctatgacataaatctgatggccaacagatcctagacagtcaaaaatacctttggtatcatgtattcattgatagaaaacaatcatttcttgatctttttcagttgagatgtgaattgatcaatctttgtcgaggtttgagtaacgaagaaaacctaaaaagttctccagacttgagataaagtttcactcccaaccatacaagtgagaattcctagtcatcgaggagagaagccacgaatagagtatttgatcttgcacctccgatggaataaatagaggactaattgtaccagaatcttgatcaatttcactaaagaatttcttcgatggagaaaatgaatcggacatgcagtcaagaagacgataaactttgatagcagataggctctgaggttgccaaagtgagaagtttttattgtggagtttgacagacactactacaaaattcacttgtagtgtcggttataaactcacaattaaacctatagtgtcggttcatagaactaacacctattccaccgagaaaaaaaattatatttttatttggtgttgattttgaaccgagccttctgggtattggtgtcagttctaaattgacacttactggtgtgcaattcattttttcactatatgtcttggttaagaaccaacaccacaaaaaaaaaaaactttcaaatctggccacaaattactccgagccaaatatgcaatccaaactatgaaatttacattatcaaatttagaaataacaatttctcaacaaacaacaatatacattttaaaatccaaacagcaaaccatatattataaaaaaaaaatagggtacataacaacataagtacccaaagtttcaagtttgtaagtggcataatcccaatatttatttggaaattttacaattttgtatacattattttaattaa

SEQ ID NO: 38049 - DNA, 3196 bp, Cannabis sativa
tagaattttgtcaagttatgtcggtttgtattttttttcggttttgtcggtttggtttagtcgggttattcgggttgggcggtttatgaaaatttatgtacagccctatgttcacctatttaacaacaataaaacaattaaacaaaccatgaaagaaaccaaccctaacataatagagatttttaaaataaaaaatacagccaaaattataataaatatacctcaacaaaagagtggtcgtaaatggcagttattacatctgaatatcttgaacaacagacaataaagtcttgaagttaaggttaacaaaagacctcaacacaataaaactattagccaacgattcctaactggatataacttcttccaacttatcttttaacaaatctagatcatcaaaatcaatttttttaggaagatgaaccagtctcaaagattggcttaaatgagcacaatcatcaatagattcatcaacaaataagccatccaattcgagagttttcctttcttcatcagtaggacaaatgtttttcaactttaacggtaaaagattgcaaaagttaccaatcaaaataacaaaaaaaaaataaacaaaaaaaaagaacaaaatgggaaacaactataagaaaatagataacaaacttagaatcacctactttaaagacaaatcaaatatcttatctttcaaaagcttaaaaattgaatttttggcctcaagatcattcgttcaattgagaattctcagaatactagatgcaacttgttgcaaaaataattaagcatctcgggacaacactcataaaactagacaataaacacccacggacaccccaatgctctgtaccagccatcataagactcgcctccatttttctccttcagatttttcatcttgatcccatgatcaattttgcccttgaatgaatttattatcaactcaaacgactccctacccatacaatactcatcccaccgacctctatcaataatatctaattcttacctatggacttccttctcaattgtgttacttaaaataaaataaggtatgaaatactgaacaatcaacttcaaaccaagagaattgtcattgccccacctaatgcccaaaaatgcatctttgatagacttatggtcaatggttttaattctaggaaagcatatatcgaccaactggtttgattcttggctaaataacattttattacaattaccaaagcattccaaaccagatatcaaatagaactcctctgcactaaatcgaatataatagtcaacaacttttgcctaaaattcttttgcattgggcttattaacctccctcaataaaatgctatggacaatttaaggatagaatttgtactacgaaatgtccaaaaaatgattgaattgtgtatctttgaatatcttcaacaaattatcataaatagtgttcttaatgttattaatgagagaataagtgcatgtagtaacacactagatttgtaataatctcaagaattaaatttgtaaacccaatcctgtacataaaaaacaagaaatttcaaaacacaaaaaatataaaccattaatctttaagcagttataatttcaaaatggtataaaaatcacacaaattaactatatatacagtcacacataacaactttaatataaattaaaatacaacaatctataaaatatcattacgaatacaaataaataaatatcaaagaaacctaaaaataatgataaagaaaaaataacaaaagaatatataataccacgataagaaaaaaaaatggcaaaaactatagataaaaataataaaataactataaaaacaataaataaactactaataaaggcaaaaccatcaacatagattaaaataaacttaatataaacaataaaatatataagaacataaaaaatagaaaaatcaaagaaagaacatacacaaaaaaaataaaaaataataactaaaatagaaatcaatttcaaataactgaataattacaaccaataacaactaaaaaaagaataatacaaaagaaatcgaaataactaaacaaatctaaaccctaaaataaaatcaaaataatatacacaacccacaaaataaaataaataaaatatcaaagttggggaaaaactaaaaagaaactataaaacaaacctctgaaccatgatcagcttcaaccttccctttcttattctcagatggacaaattttctgaggaataaaaactttagatttcttcttagcaggaccacgttcccgtttcacaataggcggagcaaagtttgagtcatcatcttctacgactgggtgtttgcctttggatttatttactatagatttaacacctattttgaaagtttttttaggcaatggagaagggaacaaagaataatgagtaatggacattaatatataatttcaaactgaaaaaatagggaaaagaaaatgggcagttcggttaaggggagttagagaagataatggcagaacaaactttcgatcgtgggtatatagcttttgatcgtgggttgggatgggttttaggtatgaaaaaatttgaaaaataaaactgaaagaagtgaaagaaaattgaactaaaattgaaaattagaagaaaaaaaagagagaagagatgataggtgtcaatcacggtcaactcatgtatggagtgtgcacagtgtgtgtaagtggtattttagtaaataaaaaactattaggcaaaaatgttggccatgccgtgtgggagtaattttgtaataaaaaagccaatttgtatttttttatgtaaaaaattctattttttttcatagcaatattcgttatagttacaatatcattcctgtaaatttttgaatagtttatagttttgaaaacagaatttttaatatttcaatctaccacaagtgttcaaaaaacttcaaacttatttttaacactgtaaattaggggtgagcataaaattcaaaaaacttaaaaaatcgttcaaaccgacctatcgaacattgttggaactgaaatcgacgaaaccgaaaactgaaaaaactgctaacggttaaaaccgccattgaacggtcggtagtgaccgaaaaaaaacaaaaccgaccgttatacatatatattaatttattaagttttttttttgcatgtattatagttactaataatatattatttttttattaatattaaagt

SEQ ID NO: 38050 - DNA, 3463 bp, Cannabis sativa
gtatacaatttactatagacccaccgacgtattgaattattttctaataattatagttagaaaaatttgtaaaaagtacacaatgtaatgtgagggtgtgaatgatacaagtgacgccacctactactcattccacacaatacgtttacgtctttcagatcaaatattagattctttttctgttaacaatccattattattactttctttttgaatagtaaggattatcatttggaaaattttaaaaataggttcattttacattaaatcccaaaatactcctttcatttttgaaatcccacttctctctctacacccatgttctctctcgttcaataggcccttcaacatcccaactcctggcgaaccaccccatagacccccactgattcacgacgcactcccaccaacccacgacgctcccccaccgacccacagcgcactccatcgacccacaacgtacccccaaccaaatcagacacaatgtcaaaagtgagttcgtgtttttagaatctcaaatctgtgatttgagtaaggtccgatgaggcccgatggggctcgatgtaagtttgatgggatcgaatgaaaatgtaatgagtttgcgaggtaggacacgtaggtccgatggggccgggatctaatatggagtccgatagtgtccgatgtgtggtccgataagagagtaggggagctcggcagtaagagtgaaaaagagaagaggagagaggggagtgatgtaaatggaaggtaatttagagatatcataaaaattatgatatcttacaaatattagttattatgagtttagggaattttttttatccaaatataatcataaagaattaaatttccctattattattattataagatgtgttatggtagggggcttctggttagggatttacaagctattgttatagctgatttgtattaataaaattaccacttattcaaaaaaaaaaataaataaataaaagaagaaaaatactataacgcatcgtattcgcaaatgtatagatgtaattctgttataattacaataataattaagctcaagttatgattataataaataatgaataatggtattgatgactattgaataaaaaaaaaacattggatactgattattattaattaatctttctgtctagatatatataaaatgatgtggtattagtacttctcttttgtggcaattatttgctgtgttgtcactataaagacggtgctgttcattaattattcagtttgaaaaatatcactatctcagccctaatcacctgataatagtccatagtaatttttttttttaactattagtctatagtaatttatttacttacctttaacattttttttctattagaaaatacatatatgaatatatatcgtactctattaaaaaaaatgaaatggttttgagcggaatttaaagtggtttaattttaagtttagtgcgtcgtactcgtgttattatgtctaacaactctttaaagttttataactataaaaaatttgaaaatactatttagaatattgtgtaattaattgaatatgaatcagagattccaaatatatactccgattaaaagtaattattcgtccctaaataaccatgcaaacaattatgataataataaatatcataacacttttttattttttgaaaattgagattgacaaaaatgatgagtagagtagaggagtaataaaaataaaaaatagaaaatctattttggactatgatgcggattcgcagtacatatctcattatcaaaacaaaaagaaaatggtcattacaataaagtcttttctgttgttttttttagcgtagtgctgctatactatactaccgttatcttctcttatcatcatgcaaataaattaataaataataataataataaataataataataaaagaataccaaatatagaacgtcactcatctaacattttttttacgtggtaaatagagtcataattataattgatagtgaatttttttaaaactaatatagctcatcgtctaacgaaaaaatatgtttagtttaatcatgaattacaaaattcttatcgcgagccacatgaaataaaattactcctgaaaattcagactataaagttataacgtcttcaaacaacatcctattatattgaaaaactaccttctcattattaataattattgttagagataacaaaattgaaaaaatatcacaacaccaaataaaaaaatacagttatattagaatgataatctttaaaataaaattaatatacaaacttagaatttaatatacaacccatatcattagctaaaaaattactaaaaaactaaaaaagcaacaaaatttctaagtataactagttaatgatattacccagtaacaacatattagcactctaatttaaaacggttaaaaataatatcaaacagattatatttaaattaaacttattagtaaattttctgtaattgtagatcctccacaaaacaacctacaaaataacaaaaaataaaactctattatcacacaatatgataaaaaaagatatataatgtgaataaaaacgatggtaaaccaaatcatattaaagataaagactaaaagtttgaaatacttatctgttaaaagtaaaaaagtcattgaagtagaaatcatgaacataaaaaaaaaaaaaaaaacataaaatggatcaattctcttacttattgaccctactacaaaattaccctcaacaagtaaggacataccataataaatgacaaaaaattaaaaagcacaaaagccaaactataaaaaaaaattatatatgagcttgttgtttagtcatctaacttttgaataatatatcaattagtatctaattaattagtaatgtaagcaagatgacttattttttatttttatcacaccctataacctcttacctatttttatcatgcattgtttggtaaaatattcgaatccatagacagagagagattcgtgctctctttttttttaaaaataaaataaaaccttttcacacattagtagtggaagattctaaggtcatattggtcgacttttatttttatattcataattatgataaagtaattaaagtgattaacaaaaaaaatgttgtcttcatatttatagttttgatttgatttgacttggggttcttctttctttgatacatataggtgtaacacaaaacaaacctattataaactccattacttcataataataataataataataagaataataatataagattcaataattcagaaaagtgataataaggacatgttatatatgtatatataataaaacatgagaaataatataatgcttctgtgctcttgtgttggctagatcaatactacaaggttggatacttgctcaacatatactctccaatcatgggattctcaacaaaattactttattggaaagct

SEQ ID NO: 38051 - DNA, 1530 bp, Cannabis sativa
aaatatgtgtcaaagtttgaaaaaaaaaacaaaaaaaaattatatatatctatatcggggtcggatatggtgcagatagtattattcccgctcccgccccaaccccgcttcgagtattgaaattatcccccaccaccaccgccccattaaccactaagatgaggaatccccaccccattaaagccgagtccccgcggtataaatttccatctctaattaaatgtcttgagaaccacttatcttgagaaccacttatcttataagcattaaatagctatgcattatatactactaaatatttttgacaactctaaatattttatatatcaacccaatggaggaacatcttattcactatacataatacatacaatacaatacaagtaaccaatgaaaaaaaaacaataaattaattactataataatgtaatatataactatatatcatatacacaacatgtataccaagaatcaattaatcaaaaaaagaaaagaaaaaaacatatggtattattaattaatgtttttgtgtggtcttttgatacttatttttgatccaatgaaatccaagtgatgtgccttctttaactttctttaccccactcgaagcaaccgccttcgttttgacgaacccttctccaaccttttgcttgtagttagcccccgacccggatccggatcctcgggtcttcttgggttcatgaatcgggtctgggttgtagtcccactgatccgcccatgaggtttctgatgacttttccattattatgaatattttctgtaatacaaatgctttggttttatggttcttttgtaataatgttaagtgatgaaagccttatatatatagcattttagaacaaacacgtttagaaggttaatttttttggttgacaagaatgcccttttgactttttaagttttcttctttttcttagtctagaagattggaattgtcgaaatagataatctcaaataaaaaaactgtaattattaaagtaatataacgccgtgtggaggaggagatgtaatttggttgggttctagaattgtcgagtagctaactagatttgaccaaaattcattgatggctttttcttggaaaggaaaaggaatattttttgactagttaaaatgaaatgaaagataaaactaaacactctctcttaaacagattttgtttttgaaagtaggaaagttggaaaacaacagctctatataatataaatgagaattgatattagtcccagaggttcctgacatatcgcgttgcgattggctagcaataatctttaaaagttttatattaaattatataagacatgatacttaattgtaccaatagcgatattgacatataagatagtgcaaggcaccactactaatgtcctttaacattacttaatataaatatatataatgggtattaccaatgattggataaaattagaaaattttgagtttttatacttgattttctatctaactaaaaaaatctcacatttttatatcatatgagctgagattgtt

SEQ ID NO: 38052 - DNA, 2249 bp, Cannabis sativa
aaaaagtaattcccgtccccgccctgttccccatttagacggggaatccccgccccattaggggcgggtctccgcgggcccatctccgtggggaaaatatgtatccctacgtgtaaagctcagatacattatatttatttattttattttaaaatttaatattcttaatatcaaaaactaaatgttgatattttataaaaaagattggtataatttaatattcttatatttctctattattagaaaaagaagagatatttaaaaaaaaaatagaaaagaaaaggaagagagatctctgtcttctcttctctcttatgatctcagttatcactcaaccattctctcagtctctctctctcgtcgtcctcctcctcactacgaatttcacattcttcttcttctctcttccaaatacaaatatacaatgacctttcatcatcacaacaaaatctctgaatatgcttgaagttgaagcccaactctgaaattcagatcagaaggggcagcgaaaccccaagtcatgttcggctgcaagtgcctctattggaacagactcgccgatttctcacccccacaccttgaatatttctctctccctcaacccttacccacctggcctcaaggtatgagatttaactttcaaggttgaaacttttttccttttttagaatttctaatgtggatttgttgatttttcactatttaactcgttgggagctctgggattttgttaatttgattttattgctttattacctttaatgggtaatctctgttgttttttgatattttggtttgagtagttagttgcttgtaaaaatatgatttttttttttcttaaaggtatgaaacttgttgattgttcgaactttcacttcaattgctgatatgggtgttttatgaaatacagttcataagaccttccttgattccaaacatattgattccatggtttgtttgaaaatccatttttttgctttttctttgcttacatgttatatgctctttggacctgttttagaatatgattctaaaattcttatagtttgtttgcctaaccaagtggaaacttgttcatttactttgttatggaaattaagtaggtatttggttagaggtaatgaaatggaaagaaaacgacttttattcaatttcagtgtttggttgcattttaaagtattggaatgattatcattttggtggaatgattatcttcgaaaaatcatattctaatgcaagatgaaaaaaagtttaataagtttttttatggttttatgaattttaaatttgatttcattcatattcccatttcttattactttttctatgtttttattccttccaaccaaacgccaactatttgtttggttgggaggaatgaaaacacaagaatgggaatgggaatgagaatgagaataaaaatggaatggaatgatctttccatttcaaaatagaatagtcattctatcaaattgatagaaaaatcattccattggaatgaaatatcaatactttaaaaccaaacaaaggaagaataaaatttattttctttttattctatttcattacctttaaccgaatgccaccttagtgttttgtgtgcctttcaagaatatgtactctattttaaaattttggaatctggggtggtagagaatttaattctatgtctcctttttcaggtcaaggttttgcttctgggagaataaatctaggagaattagaggttttcaaagtcactagatttgagtttgtttggtgccataacccatctcaggacaagaaaaaaggtgttacattttacaaaccagtggaaatacctgatggatttcatattcttggtcactattgtcaacctaataaccaccctctaagaggttatgttcttgtagcaagagaagtaagtacctcaacacccgaaatcgctcatgcttcgagtgatgctattgctaagctaccagcgctttgtgaaccacttgattatatcttagtttggtgtcctgaggactggaccgagcaaagatacggtggatgtggctatttttggctcccgcaggcacctgaaggatacatgccagttgggattttggttactaacaagccaagcaagccgagtttggatgaagtgaggtgtgttcgggctgattttgaatgccaaataaaagtaattaaaaaattatgtaaattcaactcaaacccacaaaaatacttacacaaaaatacttacacatatatacttacaaaaaata

SEQ ID NO: 38053 - DNA, 2592 bp, Cannabis sativa
  modified_base (27)..(27): a, c, t, g, unknown or other
atcttttatgtaatttaataattttanacatttaaatttttaaaataaactttatttttacaataggggattctccgccccgtcctcaccccattaggggatttcccgcctcgtctccgatggggaataagcagggatagagcgggaggattaaaatccttaacgcggatggagacagggagagaaagagtactccacactaattctccgcccgttgtgcatccctactcacacactaagtaatactcacattactattcaataatgtttctttaaaaattaaataataaagtaatcaataaataataagagtagttttattttagtaatttttttatttttacactttaaaacagtttgttttgcaatttacagaattctacatagaaatttctattgcaactagcaaagcatcctaaatcgtaatcaaaaatcgtataacaacccacataaaaaataccgaaaaaatcactttaaaaacccaaaccgtaaaattaaaaaaaaaatgttaaaaaaaataatatgtaagataattttcgtttatttacttttttttttttttgttttattttgttttaagaatatttgtgaaacatttataattgttaaacgtataattttaattaaaaaataataacaaatatatgttatcttacaattttattacactagtatttttttttatcattaagtattaactgaaaaatacatgttatatattattatattacttattaaataaatatatctctacaaatacaactacaataaaatactgtttatattattttttttactagggtcgtgtataactgaggttactcacaaatacaaatgtttttaactatcatagttaagtggaatagagagagagagagggagaggcaaacctgcgtcagtgttactttgggaaacctagctttgaaggcgtcaatggcttccttcttgagtggtgacccaccgcaggtaacggtttccaacgaactcaagttataggcagccattacatcagtgctactcttcaccagagccaccacaatcggtggcactaacgccacgttcgtcaccctaaactcctcaatcgctccaagcatttttctcagctcaaaccgcttcatcatcaccaccaccgtgtcccccaccgccactgatatcgcacagtaaaaaaatccgtaagcatgaaaaaacggcaccgtttgaagcgctaccttgggcgatttcttccccattcgcttggctttcgcgtggtaaccaccgatcgttgcaatcacgttccggtgagtcaacatcactcccttgactttcccggtggtccccgaagagaacatgacagctgccaaatcggattgcctcacagtaaccgactccaaatcccgattcgaactcgttgtgagtgagtcgaactcaggcgagtcgattaacatggttctaaggcggtgatttcggagcttgtgagccgtttctgagctggtgaaggcgaataccggcttgcagagctggacgagtctagcgatctctgactcggcgctaagcgggttagccggagagacgactacgccgatggtgaggagagcgaagtagagaatcggaacattgaccgagttaggtgatagcacaaaggcgacgtcacccttggagagtccgatctgagtttggagatttgcggctagcgttttggtccggcgaacgaagtcgaagaataggaggcggtggccggtgtctgagttgatgaaggcgactgattctggccattttgggtgaatggagaaagcgtattcagggactgagaggggaagattttggggagaaaaatcaatgggaggtctgaggctatggaaaattttggttgctgagttgaaaccgctcctgggatcaattccactctttgcttgatccattttagtaaggatacatgcatacacacaagcaacacaatattacctttatatgaagaatatgtggcttaaaaactttataataaagtaagtttattattgaagatttatatatcttttaataaactaatttatctcattttttgagttattaaattatagaaaaaccaaagtatactccttaatacttttttggacagacaaataattggctgatcccatttaaaaaactacatcttttttcagcttaggaatatattctggagcttaaaaaagttttctttttaaaacattttaaaatatcaaaataattataacttgagctacttcatacgattgattttttttttaataataaaagcgtagttatattaagttaaaagagttagacttaatcgtcattacaaaataagttatctataataagtattgatcatacttattacattacgtgcaaaagtttatttggccacattatagacctcaaagttataacttctaagaataaacaaaaaattataactaatcaaaagtcttgagagatgttgacaataaagcacatagttatcaataccaaataggaacaagttccctttagcgtattgattatcgtctcagaatcactttcattaattacaaaagaatgtttccaactgatagataattccaaagctaacaagcatgtcgtcgcttctct

SEQ ID NO: 38054 - DNA, 3883 bp, Cannabis sativa
ttagggggtatttttaactacacttataaattaaggggcatcatagtatagtgtcataagtacagggactaaaaaagctaattattctataaaatatatactgcactcttttttccttagctcaagttttgtctcattgaattttcttgacaaggtttttaacgaggtagctttaaatcatgttaacatctttatgtagcgagtagagaatgcgcgggagtgaaattatgacataacataattgagaaacatatggactacactcaataaaaaagtatcaacaccagtagttctttatgaagataatactgcttgtatcatttaacttaaaagagagtacattgaaggagatatatttaaaacatatttcaccaaattcttctcaatacatttcaagagaatgcatattggtgtctaacatattcaatcaagtgtcaatcttgtagacttatttacaaagtcattaccaacatcaatattcgagaagatggttcacaaaattagaatttgttgattagaagatctccacaatttcctaaataaggaagaatgaattcatactgcattctttttcccttggccaagttcttatcctattagattttttggcaaagtttttaattagacagttattatagatatccaaagagaatgttataaaatattatatatatggatgtccatgttaccaaaatcaattataccataaaatactattgtattttcctttatttcattgatttagtttttcattattttagtcatatttttgtataaataggagttcaccccattgaaataaactactgagaaaaatctcattcaatatctcattttcttcttctctttgtgttctctcttctcctatgtctttctctatattcaattttatttataacagtgtcttatttttgtttatgtttatgtatttgatttgtttgaatatcttatacgttttttaacagttgtataagtattattttttattgttctatttacacgtagggcaagtgtaaattcctagttcttaatattccatttgatgatgtatttgacgatcttcttggcaaaagagttggaaggtaagtggttgtttttttgttattttagttgttatatttgcttcattattttttatttatttttgggttgttttagagttattttagtagtttttgagcaaaaatctttgttttgatgtgctgaaataaatcaaaatgaatgacataagtagtgcatgcatgatgtgtaaaaatgtattttggtaaataaaacattaaaaaagatataaaagtttataagcattgttatttgacactagtggtgcataatactttccataagtatcattttaccgttggttagtgatatttttcaaaagtaattttcttaagttatatgaaacccgctacttaattaccacaataataatttgacaccaacgaaaatactagatagcaatggtatttttaacaattctcaaaatttatctagccctgtgaagatatatttataataaaagttggcttttatattttttttgtgtaaatttttttaatatttatatatttatggcaataataatgacaacaacattaaattttaactttttaagtaaagtgaaaagatgaagggaaaaggaacttgtttgtttgcgtaaacgtttagaattttgaaataatcttatatacataactttgttaaaatttcgtatctaaaattaaaaaagaaagaataaaaagaacctcacaaataataataattaataaaaataaaagaaacaaaaaaaaaaaaaaaaacacaagcataagcgtaataaacaatgtagcaccatcaccaatgaaaaagaaattttacaagtcaaactgaagcatataagttaggaataaaagaaaaccatctgaaaccacaactccatttatcaggtaatgaaggagatttgggaagccaatgccaagtcctcctacttgatttgaagtagagaatctcaggccatgtataacaacaaatgcatatcattccctgatgccaaaagcaataaacatgctgataattatggtaacacacggacgtgaattttctacacatcatttcaggtactctatcatactccaaccactcattccccaatcccaattcccacactttcaacatcttcgtaatcccactcactcctatacctccgatcaagtatagcctttcattccctcctccttctccaccattttcacttaccaatcgagctaaagtgagctcccctggaacctctgcttctgatctccgccaaacccttttctccaaatcgaagctaactatggaaaatggctccgccgtggtgaaatacagtgcccctttatagtaaacaccttcctggtggtgcctgtcgttgagaattggctcgaagccgtctgattcagtccaggaatgactccttgaatcgtaaaggtaggtggattttgaggacgattgagaacagagagcaaagatgctgtagccaaatggggtggaaactagagtgagaagctcgaatgggaaagggtattttgggaatttgatttctctctcagtacttgccaagaggtttgagacaacgaaggaagaggaggtagggagagagaaacaaaggaggccattgtaagaagaagagagcagagaagcggaagaaggtaacgaaacagaggaataaagagctcgctttcgccaagcgtttaggttggaatcataaagagggaagcgacggggagaataagggtgagaaagcaagagaaaagaagaaaaagattgtaaagaggaagtgtgtttggaaatgaaacaaggtgagaataccatagacctgaatgtcttgcaagttgatctaatgttaaagaagtttttcagaggtagaaatgaaaggattagctccatgagttcctctggcagcttgctccagataccgggatccatgtccgacgacgacgacggtgtcatatgagattgagccgtgatcatgattggccggctaaggagcttagaggaagaaaagtgaagacgactgtttcctttgttaagttgatgtttcattggtaacaccgaagggattatgctttgaaacaaggacagagagaactttttagactttgcccaattttacaaaacttggaaatggccaaaccaaatgggatgtgttttagatcaagagttagataaaggcaaaggcattgactgactcaagcctatatttacatttacttttaatataatatatgcttatgtacaagaataaagattaaataaaaatgaagactttataaaaccaacttgtcactatctgtcaaggtttagccgaagtttaatccaagatcgcaactatgtttatttaaaatgttcattttgtcgataggcttgattgaaatatagaaagaatgaacactgatgccatgtattgtatgtcatccatatagtcaatgcactcaaatactaagtcctacctaattcgcatcttctctatcactctcccatccaaatattctggtgtaaataatataatgagtgctcaaaattttacccaaacggattaaatgatcattctttttcgaacacggattaaatgatcatctttattataatttagaacacgaaaattttgaatattccatttatattggatagataaaaaaaatcgactattttcttcgtcaagttttttaggagaaatttcactatcaatatataataatatatcatttattaaatttgagttcccttattaatttttaccaaataattttttttttattacatgaacttctcattttactcttttttaaaattaaaaagaaaatgtaaaatactgaagaaaaaaaaaatccaaaaccccaaatctctcttccctctctctctctct

SEQ ID NO: 38055 - DNA, 2304 bp, Cannabis sativa
aataaactttagagagtaatgatatgtacacacaaaactgtgtaatttatgtgtaattacatcattagtcaaatttaaaatttaagtcttcctattgttgtttttatggtttttcttccttaatttagaaactgtgagatgggtttgaagttgttgataatttattagtaattaatgataagaggatttcatataacaatgtaacaataaaacctacatttttatatgcagggaccacaatatgtttgcacaactttttccacatttgtctgtaccaattgtagtggagtgcagtaagtgttgatcttcttcttctgtttattttgtttaattgattaatgcaatgcctaaaataattcattttctctatttgttgattattttgagttgggaatttttcagtcgcgagtttactcatcgggtaaaatcactatcagtggcgaaatttaccgctgaagaagtttgtgcacttcaggctggtgggaatgaggtaataatcaacaatgatatctcatttttatatttagttatggatgaagaactgtttttacttgtcccatttacctgttcatgatcattttggtgttgctaaaatcccacatgctcaatttgaaaccatggagatagacatttatgttataattaaagggtttgtgattgcacatattacaacactaatgtatacttttagttaaaataattgttctcatatgtattttttgaataaaagaagaaaattttcttctaacaccacttcaatgtttgtttatgttgaggattatcaatgtttaaagttgtggatttaagcctgaaggcattttttttgcgaggctaggcgtaaatctcaaggcgcattgagacataaattgaggcgtaagtctcgattattaattaaaataatatatttagagtatctaaaaattccaaaataaatcttacctatcatataaatgtactgatatagcctaaattgctatctttatattaaacttctaatttaaaatgattaaatttttttttcttaaaattcaaaattcaaagttcaaattaacttcaatatattcatctaaaattttcaattcaataaatgtattaatttaaattttaactatagcacacaaatatgacgtgcattaaacgtagattctacctagtaatattttataaataccaaaaataccataaaatgtctcataaaacaaaaatataacatttatttttggaattgtgtatgtttagtttagttgggcgtttttcttaagtttatttgagttttattaagttttattgtattttatttggggtttttttataagttaaattgttattggactctttttgaattgttgaatgaaaatgggctaagaagagtagcctcacaaaatttttaatcgcctcaagcgttttcttttcgcctcaatctattgcgcgcaatgaggcgcgcctcaaaaacgcaattttaaacattgaggattacatctttctctatagcactaacattagaaaaattacaaaactcaactctagtctttaagcttaatttaatcaacaaactgttggctttagtcgaattacaagtatcttcgaaaatacagctatttctgttacaccatatgtggtatatggcggctgctaccacagcagaaacaatgtcatccagaaggcattttcgagggccattagagatggttaacttctctgacatgagctagtctatttcacccaaccagtttgaaatttcaagaatcaactttttcgagaagatgtagttaaagtataagtgagcatgggattcttgatcctcaagacaaacatagcaaatagtctacctaaatgattttagccagcaagtcttgagtgagaagtttttcattaaggcctgccataaaataaacaagtgcttaggagctttgagtttgttccaaacatccttatgataggaaactttcgggattgagagaaaagagctgtaaaataccaacttatcttgcttattagccaaaacccaaatgtacttagccataagagccacattccacttcctcccctccttaaaaccgatttggtaaacaaactttctcccaccactactacaaattgtacttttggtgtcggttttaaacagacacttatacttttagtgtcggttcatagaactgacacctattccataatcacaaaaagtcaaatttttagtgtcgattacctgaactactctagagaaaatttctacaaagttgatcaatctctgaatcaagataaagatgcttatttaaaaagttacgaatgccaagcctaacagaa

SEQ ID NO: 38056 - DNA, 2218 bp, Cannabis sativa
tcgaggttgttgggtcatcgggaccagctcgctttatagagaatcgatctctatgctttcgcaggaggattgagagattacttgcatatatcgtggtatatgcgagttaagtccgttccttggtcccacataatgcgagccttgcgaatgcgattaggcttggccatattcgcatcatctcactgagtttagctcgggcgaggtttaaactcgaggagtcccccatcgacatctcagctttccttagggaaattgagtacatgtgtcctttaaacaggagtccggtctcgagtttctaggtgagaaaaatctcactataacagatatgattatttgaacgatttgttttgtaaaagtaaataaaattatatgatatgacactgacttaactgactaaacagccacataattttaattttgaggggaagcagtttgaatggaagtaatgtattatttaacaaactcacgtattgactttcacactcagtttccatcatttgctttagaaaattaccccaaaaaaagttagtcattttgttcaaaagttgtcgtttttatttatgggttgcattgttaaaacctattaaataaatatatacgcctgaaacaacttcgttaaaacctattaaataaatatatacacttgaaaaatctataatcatatggaaattttgcccataactattaggcttaggtgacgattcttcacagtcaaagtacgattaattatgcgattcttctacctttatctctgttgcaatcatcttccaattcctttggttttctgcgaaagtaataaataaataattttcaatagcaatttcaccaacaattcttattagaaatggtaaaaatccaaactttaagaccatgtttggtagaatgtggtttagaaaaaaagtattaccttaattattgggtcagttaaatcgtcgaggacttggatcaatagacgatcggacagccatgaaagcccacatgcagctccaatggagaccttgtaaacctgaaaaaatgaaataaaaatccaaacttttcaagcccaaaggaaataaagtaagaaatgagtttgaaatatatatatatatatgtttatatctatacctctcgttcgttaaatatggggatttagatcaagacaacagggaaattagaggaccccaattcgatcttgaatgggttcatagttgtatcttttctctccccatgaaaatcattaaagacatagctaagaaaatgtaaaatccaatcttcagcaagggccctatcaatggtgctttaattagctccaacataagtccaatttgagatgcaatgacatattcaccaccaaatccttcctgagacgagtttgggatcagaattttctgagctattttggcactgataacgttggatttttttgattgggtcagaatagaaaagtcaaaaccatatgcatatatgtgaataatgtatattgtacaaagacctcaaaagtaagacaatttaatttactttttccagtggtgcgtataaagatgagagagcatggaatatctgatctctcaactatcaaagatgtgttttggatgatgagaatcgatttttgatcgatgtccatgacgatgaagaaaagtagcaactctgttgggtgcgataatggtggagaagacaattgttgtttcgattgattctaacgattttgactgaaagtgagtcgagggtaaaaagggaatgagggattaaaaaaataatttttattttaaatatatatatgtaataatattataaaattaataaagaatattctaggtaattgaaatattttattaaagttaacttagaaatctaaaaaacctatttagttagcaatattctttaaaagttattttcttaagtttaggaggagatatgacacgaaataggatgctaggaaccaataataccttttagcaatccctttagttttatgaagatagatagttacaagttagttagacaatttgttatggaaaacttacattttaaatcattaattggaattaattttcaaaattctatttaatacctatattataccattttgggtaacattttaaaattaattgatttttttaattttgtattaaaatgcactacaaaaaaataattatatttagtagcaattttttagttacaacaaaaattttatatgactaaaagtgactttttattagttacaacaaaaagttacttg

SEQ ID NO: 38057 - DNA, 2580 bp, Cannabis sativa
cgttgcgtttgtgtaatagtaacgccaaaacaatattttttcagaaacaaaaaaaaaaataatactgtatatttataaaaaaatatatctgtaaaatgtaaaaatttatcattatttttttttatatttatgaaataattccatagctccatacatttagctaaggttctttacatgcaattatgtgagagattgaattacatgtatatttttttccccaacaaaaagaaaaaaaaataaataaaagaaatagaccaataaaatccacccacattgaagagtagcctaaattaatacatcattaacttccccacaagtttcaaaagggtggggctttgttgttcctcacttgcactaatgattcaaagttctttctccaccttttgtgtgagaaaagaaaaacattacttttatttttggttcaatttttgtcctttttctctcctaatatttggtcatagttttaggccatttcagaaagaaaaccagcatatatctctagtttttaattttagaaaaagtttctcctatgcatgaggctcaaattttttgaattaaatatatttatacaagagaataagagaaataataaaagggtcatgataatgagattcccattgaacacatgattcacttaggtccacatgaatagatatcttcactccaataaaaggtaagccaaaagtaaaaaattgtaatgagtcaaattccaattttataatctggggtaggctcttgattaatttattgacgagctttgtttgtagaataaccaatttttgacataaattaaagactttacaagtacttttgtaaagataatgtttatttaattctttcttttttgggccagacaaacaattttaattcaagttatgaatacatgattttaatcttctcatctcttccttacaggtattattttactgagacattaattgtttcctaatcttccctacaagatttggacaaaatagaatttggaccactatgccaactcttccaaataaaagccttaaatctcaattattttggcagcaaagctgttaataaactacttagttatagatctaagcatatatatagaaaatttaaaagagtgaaaactaattagacaaatgatgtttaggccaaaaaatgatagcatagcagtaaactaagggcaaaggaaaaagaatttgatgggatcatcattaccatccgatcgaggaatcctgtgtgtggtatgattagtccaacagttcttttatttttgctaaagatgattattagtccaatagttgtttcactaagacaagtcatctattgctatttgagagaagagaattattaaaatgttttattggtacctaacaccttcctcagtgtcatactttattggtaattaagtatcgagtctcatataacttaataaaataacttttaaaaaatatcgctaactaattatagagtgccacctataaaaaatactgggtactactagttgtctctcttccctgtcattattgtcggtgtcttattcaacaacctctcctccacaatgtccagcagccacagccgctcacaacacaacctaatttttttttctgttataaaatataatataaaataaataatataatcttaatataatttttttagtaatatatattgttatatccaatttttgagaaataaaaaaaaaaaatcaactttgcaactttgatcaagacttaaaaatgtcaaataaattaagacatcctatttgagggccccatgatatctctaggagtctcgaaaacattgaccaaccaattagtgtcgggactcacacacccaagtgtgcccaaattagaatttatgggcccacgtgagtattttcaccctagagacctcaatccgacaaggaacccagtaaggacttgacttatttaggcataaaaaggcttgaactagaacataaagttaaaattgcacaaggagccattcaataatgcatggccgagcactgccacatgatgatggcaatgctctctctctttttgtggagcacaaccacaagaggatggccgttttctctactctcaaaataccaaaagagacttctcaaaatatgttccctcaacacgcatgagtgcaacacaagtgaaagaaactatttctcaccaagaaattaccctagctaacctatgccatctttgtgcacaaatgagtggcagaggttggccacactaaatgggaaggagattatttgccaaaagtaatttttcatcatatacatgtcaaaaccaagtgaggaaggccaccaagtggtgtagaaaccacttggccaaccactgccatctttgtggtccaaagagtggcagtggtcgactacaacaaatggtgaggaatttctttggccaaagcatatttccaatataaaactatcaaatacaagtgagaaaagtcaccaaaggatgtacaacccctataggcgaccactgctatcttggtgtcccaaaagatggcagtgctctcttctaccaattggccaagaaccaatgtggctaaagtatttttctagcatccatatgactaaaataaacaaaaaaaaaaaaa

SEQ ID NO: 38058 - DNA, 5187 bp, Cannabis sativa
aaataccatacttttaacatttctcattatataattgatacacatatattacaaccctattggagagggttggtgtttacttagacaaattaggtcgatctagtcaattacaaattagaatatatataggttattggggtactgttagaagttgtaagatagaattattatatgaccgaacctaaaatatattgttaataagaaagaagtatccataagtcaaattaaaattaatctgaaggaggcaaagcgtagcagtagtagcatagcactagtatatagcttattaattgccgtgaaatagagcgacaatcataattaaacctaatgcgtgagctaatcaaacactaattaaatgaagttaattatctattctttttaggtactgttttggtttgatcaaatcccaaacatgaaacgtgcacaaatgtcctccactcattctgaatatgtagtacaattgataggaatattttaattaattaaacaaattacacagctagagatagatcatagatagatatcatttttattatgatcatcatcatcacaaaaattataaaccaaaattaaaattatttgtaataagatgaagaatgtggggggaccatatgatgagtttgatggttttagtctttctagaaagaattaaaaaattggtaaaataattaaaaccctatttgttctcaagatagtacagctaatagatttacaaatcacagtgagtatagcagtagcaatagtagaaggagaaagacctcacgtacgagactatatacttgtgtacattcattcattattaacccaaaaagtttggtcatcactcgtgatatacaaaattggtagttctttagtcctcccattttcactggtgattcttttctatgtccacatcgtcacataaaaatattacagaaataactgaatatctacatatatattgaagataggaagggacactaattgatgctctcctttcggtagtaccacttaaaaaatttcttataaaattattacattaggttactagtactttttccatagcggtaagagatcgagtttccactttcgatgtttggagaaattatattccaatactgttatttgatggtttatgtgagaaatttacatttagtgtgtaaatcaaattaaacataatcaataaacaataagtaatgacaagattaacaaataatactaaacacttagaaataaaacaggaatgaagagagtattaaacctaaaaacaattaaagcagtaaaataataaaatcaacaccaagatatgtacttgttcaagtcctatagattgatatgatatatggctctactctaattctataataccatcgaaattctctttattgattgagcaagaacaaggcacaatatagattctttgttggattctctcaaaatatgtttttctatcacactcttaccaaggaatcttcttcatctatagaagattcttcatacaaaatcaaaatccaatctctctcttttctctatacctctctctctacctcttagtgactctctcaagatcacctctcaaaactcgtctgatcttcttctatcttctgaaatgctaagtgtcgatggtatttataggttcaagatatagttcctaaagtgtgtggttgcaagtgctttataagttgttaagttagctacgatttaacaaacttaaaaaattctttgtacgtaactatatctccatgctagcttaagatgaattgcttctggatgagatgtacactttctagaagacagactaaagcatatgctgaagagacttcccagataggacaagcacaactggagtcgactattcataactctcttctaagaaggaatagctagccatccgaaatttcttttcagaggaagactagctttcctaaagactctctctaggtggacataataggcatctgggaatacccttctgaaagacacatgtcattccacgagacttcctctagaaggaagagttaaacttctgagaactcccttctagaagacacataactttccataaccagaataacttttagagatatttttatttggaggaactataccataaattccacctagtttcttcaaattaaaaaatattgaaagcaatgaagaaagaattcagccatcatggttggtgtttccataaatcttaatttactaacttttgaaattgatcaagtccaagtagtgcttaaatttgtttacttgcaagaccttagtcccaacgttagtaggattatcttctcttctgaccttctccaaatcaaccagcccttctttaatcttctctataatccagtagagtcttatgtctatatgttttctcttttcatgataaaatcaattcttgaaaaggttgatggaagactagctatctaagtacacaatcactcaaccttttatttgtttcaatacaaataaaattccccaaagccataaagcttccttcaatgctttcgtggtggcccaaaattctgctttcgtagtggaaaaggcaaccacggactttaactgggccttttagcatatacagttccaatttttcaggaaaacgtaggaagtggttgattttctcatttctttattcaaagcatagtcaacatccatgaatcctttcaactctagttatccttttgctttctcataggtcagaccataatcccaagtgcccttcaagaaccttaataacaatttgagggccttccaattttcaagaactagatttgacatgaactggttcaggatgcttatagcatgagccatgtctggcctggtgctcaccattacatacattaagcatcctaaaaccattgcatatggtacatccttcatttcctctttctctttcacactgttcggacattgttcctttggcaagacaaactgtccacctaatggaatggatgtactctttgcatcttccatgttgaacttcttgatgtacccaaactactttaagttcattgtcccttccttcatgttccttgaaacttcaataccaagtatcttttgaactggtccaagctccttcatctcaaactctctcttgagcttgattttgatacttttgatcaatgattggtcttttctcattttgagcatgtcatctacatagagcaaaaagaacacaattgtagattgttccaaattcttgaattataaaaagtgatcatatgctcattgtttgaacttaatttgttacatataactatcaaatcttttgttccattgtcttggggactgtatcaaataatgtaaggatatgttcagcttgcaaactaacttatctcatttcccttccacctgaaatgcaagtggttgcttcatgtagatttcttcatccaagaatccattcagaaaagtagttttaacatcaagttgttcaacttcaaactccatttgagctgccaaggacaacatcaatcttatcgtcatgtattttaccacaagtgagaagattttagtgtagtttcttccttgcacttgagtaaaactcttagccactaacctagctttgaaccacactggttctttctcattgattccctccttcaccttgagaatccatttgcactccacaatctttttgctcttaggctttggtacagctgtccaagtcttattatttcgaagcgaattcatctcctcatccatctcttggagccattttgacttgttttcacctgaaattgcctcttcgtagcttctaggctcttcaattttagttttttgtactgttgctagttcaaatgctattaaaataggctgtttctacacaccttgtagggtctcttctagttctattgcacgccaattgataaccttctagacatgtctgtctgagtacatttggaacctctatttggtctttgttatctttcaattcagcatcagcctctgtctacgcactatcttctggttctagattagcttctagctgtgaaccttcttctgaatgtttcgttccgtattattccatttctatgtgtgtagtgttcttatttctagtttttcctacatcatacagagacactctacctttcccgaatgtcaagtgaggatattccatctcattaaaaacaacatttttagcaatcaaaacctttggtctacccttcttagaaatataaattctataccccttagtacgtaaggcataacctaggaaagttcccttaactggtctaggttctaggttgtcaatagattggtgtacatatgttgtacacccaaaagttcttaaatgtgttaggtttggggttctgttgtaccacatttcataaggtgttttcaagcctataactcggtttgggcttctattaataaggtagattgtcgttgctaaagcttccccccaaaatggtttctctaatctaaaactaaatagtaggcatctaactttgttcaacagggttcggttcatcctttcagcaataccattttgctttggggtcttcactatggttctatgcctagtgatcccatactcttaacacaacatttcaaactaagagttaataaaatctaacccattgtccatcctcaggttcataacttttagatcggtttggttttgcgcctgagttttctgaaatctatactattcgaggaactcattacccactataatcatccaactatggaaagaaaatattgcttagcggagtgagtgggcactttgtatgccccccaaagatcatcatacacatattcaagtatcttctttgttgtgtgcctagcaagagtgaacttcagtttatgttattttcctgaaacacaagcttcacaaaattgtaaggcacaagaattaaattttcaattatacattgtttgtgcagttctctgaggccttgttcattgattttcccaagcttgtgatgccacaattgcacatctgattccagccctttcaccatactttcttctccggatggaaaagtttctccttggaaaaatataaaccattgatcctttcacctttaatcactatcaactaccaaacctttagtgatcttcatgcttctgtgcatggacttgtattcgtaaccttcaatttcaagcgtacctagggaataagttgttttgtcttaagtttaaaatgtggcttaaatttttcatcaccttgatgtgggtttttgtgccctaaataaaacccattac

SEQ ID NO: 38059 - DNA, 1466 bp, Cannabis sativa
  modified_base (1257)..(1262): a, c, t, g, unknown or other
tgttcatatattgtatttatatatgtaaaaaaattagaatattatgatgtgtatttcttatataattatcttctttaaattttgaatcaaataaaacccatcaaaaatatcataataaaaaaccagttagtttgcgatgaaggaacataaacaaaaatgaaaataacaatactaccactatattaggagacactcaccactattttggtgaacaaataatggtatcgatttgaacccttacacttctcgttacaaaagtaaagatatccctgtaacaacccgcttcaaacttccattaggccttcctctatgaatttacgcttaaatttggagttctttcgtgataggttactagaaaacaagatgcactttgttgatatatagatggtaccaatcaatctacttacattctcttcaactatgtagtctcatatctacacagtcttagaattattacacttaacatttcacaaacggggtgagattgcacaacttatttaatatttctccttaagaattatagaactactgactgtcactcacaaataccaactccaaatatgaaggtatatgtgttatgtagttaaccaaagttaaattggaagcatcacaatctaactttattattagaagaaagtagagagtagtgtgacacaattcttcttctgtcacaaaaataaagacctaaaaaagaagacaaataaaaaggacactagaaactaataaagaaattaattagagctttttgggccaacaaaagctgttgtcttgtgagtaatgcgtccaacatagaaaattttgagtggcccatcactatatttatatatatacatcaactcttgttttcattgggtctttttctttttcttctttattattgtttgtattttcttcatttggatttttatgtcaatgcatacatacatatccattttatagtcttgaataatatatcttcatgtttttactcacatttcttggaggggtccacatctaacctatatattttgttctcttctttaaacttgtcccaactcctaactttattatatgtatatttcctttgctaattatcattacaaaaatatgttactagtgataatattttagttataatatattttttttttgtaattaaacgtgatttttagtcataataaaatattacttgtaactaaaacataatatttagttacaagttgttactaattaagttttagtcacaacaactattatgactaaaaatatatttagtcnnnnnnaattgtaatttttgtgattaatatttttagcaacggattttttagtcacaacataagaatcataatttataattagtcgcaattttttcacttttagtcataaattttgttgtgactaaaaataaaaaatttctgtagtgattattacacataataaatttaattattttaatacacaaaatatccaaagcaaattaatttata

SEQ ID NO: 38060 - DNA, 2471 bp, Cannabis sativa
gcggaaaacgtatgggtactgacccttgagaagctcttgcttaaagtttttaatacttattatttttattaaaatttccatataaattatcattattggaaatggccagagaatcgagctccattgagctcaagctcctgtacggcgaggatatcagagccttcaatttcttccagaagatctccatcttcgtcctcggttccatcgctagcgacgattcgaccaagaaagtccacaaccaacagccccagaggactcccaccgaccgagaaggggactccaatccggaatggaatcacgagatgaactttttggtcgatgaagaagaggcctctgagtccaatttcgaccatctctttattcacttggacctgcggcacgagggggttttgtttgggatcggggataggacgatcggtgaggttcggattccattgaaggatctcatggaccaaacgtcctgtaatggtgtggtgaggttcgttcggtatcaagtgaagagctccgacgggacgcccaatggtgtgttgaacttgtcttttaggttcaattctatgactgaaaagaaatcgccaagccctggtaaaattcagtaccccactgtggaggaaatccccaatttcgatttacaagttcccaacctgacgttttctcggcattcttacttttccgaacgacaaagaattgagtgctggtcttctccttcttcttctcctgctacggtgtcgtatccccatattcatattcctccagaaggcatccctggttcggggcaccaccaccattatcatggaggagcaatgtggcccagtggaagaaatgaaatgggaaattggaatgggtactgactgcgaggattgctcttcatcaagcttttggggaatggagaacagatgtagtgtgcaagattcttagctacgattctcatatggattgttcttttttcatatcaaaatctctatgaaagtaactgagtaccatatttgatcatggcaaatttgacgtttgaacaggttaaggggaagaagaaataaatatcgaggataatgtatacttggtataatgtggtacataagaaatttaatatttattatacatgttatctctgattctcatgaagaatgaccctttcataaatgagtaaatcgttacctagtttgattattattctggaataccattttgttagttatattaaaataatatataactgaattatctgggaaatttgaaaagcttggacagccgttggatttggctacctgttaaaagatattttggcattgatatggtagtaaggaagaaagggaagaaaagaaaaggaagaaagggaagaaaagaaaagaagaagaatgatatcttttgaagtatctttgagtattttactgaagtattcaataatttttactctaatacgacgcctgttcggtttgttgattggaggaattagtcgatgtcttctctgcattagagataaatttattaatcagagtataggtgtcgtgtattcctgtattattttttagtttaagatttctttttttttttttttaaagattccttttatccttttgtgctcttgtttttttttttttttataagtaagatctttattgaagagaaaaaacgaaaacttaactagcagtcacaaggggtactgcctccctaacaaacaaaagagaacgcacattgttcactctagccaaataggcaagcctatcagcaacagagttatccgccctagacacggacttaaaagaaatacaagaaaagaacttaaacatctccacacactgacgaaagactgggaaggaaccccaagcaaaaggcagttcccgaaccttcaaggcttgtatagcagtagcattgtcagagagaatttggatcttggaaaactttttaaccgaagctgctttcaatgccaaaagaatggcctccaactctgcatgtagcacgctgatcacctgacaatagtcttggccatggaacgattcagcagcattcccaatttgaacgaaagccaaccctgcccattgatccacaactgaagaatctgtcatgaaaatggcatcaaaattcgaaagacactcctcagaaaattgagtatcattgatgctttcacattccttaacatgatagaattcagagaaacgcctcatgatacggtgatgtgaagcattcggatcaggggaagagttgtggaaagtcatgtcatttcggcttaaccatatttcttccatcacacacgctgaatggaatagcagattgtggtcatcaaagctcccaaaccaagtaaacaactgttcaaaattgtcgaactgaagtgcagcagtgtgaaaactccaaggactttgaaaccataaggctcgggcaaaactgcactcccaaaacaagtgaacttccgattctaaagttgtgttgcacagagcacacatcctatcatgagcctgcagaaagccaaggtttgcctt

SEQ ID NO: 38061 - DNA, 2398 bp, Cannabis sativa
acttgaccttccctaggcgatgtgggattgcacaacttacctgatatttccccttacggatcactggactactgactgtcacagtttgattcctaaaactttacctactaagtttgttttgttcaatgcttggattagaaataaaaatattgttatatcttggatcttgaattctgtttctaaaaaaatttcctttagtattttttatgatgaatctccaacaactatatggaacgatctaaaggttccttatcatcaaaggaatgggccatacatatataatttgagaaaattttaatgaacttgaagcaagataatcaaggaataagcatgtatgttactaagctaaagacaatttggaaacaattgtctaattatcgaccttcttgcatttgtaataaggtggtgtcacgaaacttcaagaacaccgtcacatggaatatatcatgtcttttctaatgggactctcagattcttattttcatgtcaaaagtagcatacttcgcatggatcccctacctaaagtgaactgtgtctttcatttagttactcaagagaaaaaccaaagaggaaaatacactgctgctataaaatagaatcctaccatggaattttcctttcaaggggacaagaataactcgaacaaacctgattccaatggacataagtctcagccacaaaagaggaacatgcctttctacacccattgcagtgttcttggccacactttcgagaaatgctacaaaatacatggctacccacctggttacaacaagaactacaaaggaaaagaggttacaaccaaccaaatccagaccaacaatgagggtgggacttcttccaatgacagttcaaccttactgccttaactcattgcaacatagtaccaacaacttgtgaaccttcttgttgtacaacaatctggtatgactagttcagaccctggcacatccacaggtaacacaggtatcatactttctaatatgagttcctttcctataaatggattttggatattggactcaggagcaacaagacatatgtgttatgattttaaactttttcagttcatttgtaatgttactcccataaaactttggctaccaaacaatgataacatgcttgaataaaagtggatctgttgctatctccccctagttagtcctaaatgatgttctatatgttctgacttttaaatataacatcatatcagtaagttttcttactaatcataattctctttatgttaaattcttcactaactatttcaccatacagtacaccatccacaagaggatgactggaaaaggtgaatcttagaactggctctacatactggattcttcaccttcagattctagaatttttttcattattgctgatgtttggcactctagacttggtcacctttctaataaatacttaaatttacttagcaaaaaattgaattgtaatgctacttctttacataaagatactccttgctatatctgtccaatggctaaacaaaaaaaaattaccattttctagcaataataactttgcttgtaatgcttttaatttaataattgtgacatttggggatcctatcatattacttttcattttgggcatagattttttctcattttagctgatgatcattcaagattaacttgaatttatttactaaaacaaaaatctgatgtttttaatattatcccacaatttctttcttatgttcaaaataaatctaactgcatattcaaaaggtttagatcagataatgcccctgaacttgtcttcaaagaattgtttttacaatatggagttctacattattttacttgtgtggaaatcccaaaacaaaatgtagttgctgaaagagagcatcaatatttgctcaatgttgtcagtgcattttattttcaagctaatcttcctatttgtttttagatagaatgtgtgatgatagttgcttttttaatcaatcggactcctactccaaatttaaacaacaaatctccctatgaactattgttcaagaaacaacttggctataacaatttgagaatttttggttttttagtttttgcatctactctcacagctcatacaacaaagtttcctccaagagctagaacttgcattttcatgagatacccacagggtgttaaaggatatatactttatgacattaactcaaaataatttttttatattacgaaatattatttttcatgaaaacatatacccttttcataaactaaatgaagatatcacaaatattgattcttttacaaaacttgtgtttccatcctctgaggtaactaacacaccttgtaatatcccgataagtctaatggtaattaattagggtttatatttatattatgtgttaatcaggtaataagtggga

SEQ ID NO: 38062 - DNA, 3452 bp, Cannabis sativa
tgtcagttgtcagtgtgtgctagagtcatcctgtatgttttattttatgtctgtttatcctcatgtagagttgtttctgtatatttacaggaattggaagaccctctaattctcattcatgagaagaaaatctcaagcattaatgctgtggttaaggtcttggagttggcattgaaggtgaggtgttgcctagtctattatgttgatttcattttggttcatttgttgctcggacgcagggtatgattgattctaagaattttttttttcagagacaaaggccattgctgattatcgctgaagatgtggaaagtgatgccctagcaactcttattttgaataagattcgtgctggaatcaaggttctagaagctatgcagttttatttatttgttgtcgttgagttgtttctatgttttagctattcatttatttactgcatatataatatcgtcatatgtgcaggtctgtgctgtgaaagcccctggttttggtgaaaacaggaagtctggtctgcaagatcttgctgttcttacaggaggagatgtgagcttatctttcttttttcttgttactgtattatcattggctcttacgttttgtatgtttactgattccttttatcacgttttaatgttacttttaggtcattactgaagagcttggtcttaatttggagaaggttgatttggatatgctcggtacttgcaaaaaggtaagctcaagcataaaatgaagttttatcctttgaagtatgattggttatgaaattctatgcatggttctttttaatttaagagccgcctttcacaaaaaattatttttattgatggtttgtgtatttaatttttttttctctaagattccttatctaaaacatggcttttgtctcaggtgacaatttcaaaggatgacactgttattcttgatggtgccggtgacaagaaatctatcgaggaaagatgtgaacaggtttgttttgcttttccgggcatattttcaattttgttttgatctgctgatatgatgattgtttgtcttctccgtatcatcaattgatttatttttcccttgtccataatcaacagattaggtcaggaattgagttgagcacttcagattatgacaaagagaagttgcaggagagattagccaagctctcgggtggtgttgctgtcctgaaggtaggccaacatacaattcttttattcgatgaatcttatttctttctagtatattcacgggattgttcgacatatagcccaatgatataacacaatgggaaattttactcgcagattggaggagctagtgaagctgaagtcggtgagaagaaggatagagtgactgatgctctaaatgccacaaaagcagcagtagaagaaggcattgttccaggtgacttatcatacccctttttcgcagtcattgagttggttataagattattattcttatcttatgaagtttcatttaaacaggtggaggtgttgctctcctctatgcatcgaaagagttggacaaacttccaactgccaacttcgatcagaaaattggtgttcagattattcagaatgctctaagagtaagtaaaactcttcggctttcatgatggtgtgctaccagtttcgattgtatttaatctgatcgtgttattttcagacacctgtgcacacaatcgcatccaatgctggagttgagggagctgttgttgtcggtaagcttttggagcaaaatgaccctgatcttggatatgatgcagccaaaggtcagtacattcatttttacccttttacccttgtatttttcttctacaataacaagttgacaaatggctaatgcttatcttattgatcaaacaggtgaatatgtagatatggttaaagctggaatcatagaccccctaaaagttattaggacagccttggttgatgccgcaaggtaaattattataagttgttgcatttcagtttcattcggctcttgggtttttgcccggatcaactcttattactcgtgtttggtttatttcgatgcagtgtgtcgtctttgatgacaacaacagaagctgttgtggtagaacttcccaatgacaaggatgctcctgcaatgggtggcggtggcatgggtggaatgggcggcatgggcggtatggatttctgaggagtccagtccccaatcgcatgatgctgttatttcaacaaacttaagactcttttgggaattttcatgaaatcttgagaagcaaagattagagttttttttttcttgatattattatgtacccggacggtaccggtttgagaggcatcgatgtaatcataaggcgagaaatgttcatgttctcttaggtagtttcttctgtaactcactaatttgaattggaggaagaatgggcgtgtgtgcttgttattatataacaccattgaaactattctttttcgaaataaacttttttgtattcttctctgcacaaatggcagggcaaagcccatcatcatcatcatctttatcttaagaattttaattatttaacatgtgatctaaatgaagttttgtcatgtgtgtccttggttggtatttaacagtgaaaatatttgtttgtggttgattttaacatttgtaaaagaatcggtagctttctcaattttcacaaatattcctaataaaatatttctgtgtttgggaattttttttcttttttcaatgaaatttggtcttacaagagtcaactcgtattcttctatgctacctttttgactaaacaagaaatatgttggctggaagttcccttctttctcgtatatcttattgtgattttgatcactttgtcaaccaaaaaaaaaggcctaatgcaaagtactttgtggaatataatctataagagtcatattgtattagtacttgttttgacaaaatattatattgtatttattattactactataaattttattataatgtgaattgtgttatttaatacatataaaatgatctatactaacttgtattataatatttacaaacttggatcagaccctgaactccgaccacgattgcatactagacctcggatccccctagactttagaccccaaacctagacgccggagctgaaccctccattttggcctcggaccccaacccagacccaaagtcggacctcgaaccccaaagtcggaccttggaccccggcctagcttcgaacaccggaccttggacctcagaccctagacccaaactcgaagctcaaatcgaaccccagaccctgacccgaaccctggacctgaaccttgaacccaatcccgaacccgaacccagacccaaacttggaccctaaactccaaaatcaaaccccaaactccagactcaggctccagacccaaatcttgggacacaaacagaggtcggaattgggtcgagtttatggtacagaaaatataattttacac

SEQ ID NO: 38063 - DNA, 2301 bp, Cannabis sativa
gagaatgtctccctccatctctcctctccctccttctctccctcttgccaaacaagtgatttagtctctccttccatcactctccctccacccctctccatccactcatctcccactcctaccaaacaattacaaatgtaatctccatccactttgcaaaaaaaaaaaatgtaatctctatccaattttaaaatatgtttaaaaaatcaaaattagcgaataatagtttgactaacaaggttagagccatataaattggtattaatcccccttgtataagtcacaatatttggttagacttgcctaatcatttgtaattgtatctgttgaatgaaggattgtgatttaaaacaaaaagtttactcctgggtccgccattggttgaatattttatgttgggaagttgttgatcatacttatgttgagcctatttttacttaattagttagctgttaaatgcaatatattacatatttaataaatgaatagtgtaaaaatacaaagttaattacattttaaataatattttaatgaaattaatgttatatatttgattgttgaaaatatttatttagatttaatttatctttgtttataaataataattagtatttataacataataaagaaaagaaataaaaagttaagaaaatacattatttttattaaaagttatatttgtagaatttctgtaagtacctagtcgttaaatgtaagtcattatccacatgtcatttttttattagtatatgtaaattaatttttaaataaaaataaaaatttaataacctgaaccaatccgggattgtcacgtggcaatttacttgacacttaacaaccaagtacctaccaaaattttagaattataacttaagtattattacccccaacaattaaacttaaatatttatttacaacgaaagttaaacttacatatgaatgacacaaattactaaaaaaaaacatgacagttatcataatttttatttcgtatttatgagattaatttagggatatataccttctaaacaaaataaatctataaaaagtattttcatttaaagggaaaaaaaaagagttgtaatcaatatttatcaattaatcttacaaaaaaaattatatatttatcaatgaataactttctttaacttttttttttcaaatttaagatttaggttactttggtgatttctccaatgatttctatgtgggttgctatgtagatttttgttacaatttagattgctccgttagttgctatgaagatttttatatagaattccgtaaaaaaaaaaaactattttgaagtataaaaataaaaaattataaatcaatcactcttgtaagtgcaatagtttctgtatggcaaattatgtggttccttatctgttcagttttcagattttcattgtttgttgtcttggttctttacattgaccatctaagttgtcattagttgcttttatatttttttctagtatgagtcagtgccagctggatttagttgtggtagttagttagttggtcgtttctcttacagttggtatataatattcttttgtggctttttttaactaactctctcatctttgatagattcgtctttgattcttgctttgctagggcaaaatatttctttggtgattctgtgttatctgcagataaaaattcaatgaatcttcacgaggttgaagaaagagttcgtgatgtctgagaagagttcagactgaactactgaaggatcttcagcttgatggaagcaaggagagcttgtcttcttggatctaggagtgcttagatttgttgtcttgactgtgttcaagaattaggtaacatcgtgtaaagtcatttcagattatgtagtttggtttgtaaaatcaaaactggtgtatgtaattgaattgattttataatggatgtaattttacctaattcttggagacccaaacactactcggttggaatgtatttccaatgaagagaaaacttataaatctagtattcattgatttaactttctagtcttaatttttttgtaatatgcatttaagttcaattacttagcttttggagatattagaactttcaaatctaatttatttatttatttttttaaaaaaagaaaagaatatttccttccaatcaaaataagtccaacctttgttagaagaagaattcctactttttctttgagcagagtccaaaccactgaaaaaccacacacaaacacacagagccaccgccacagacacgtgtcatcatgcggtggccggcggcgaggcccggaggagggcttggcat

SEQ ID NO: 38064 - DNA, 3457 bp, Cannabis sativa
catgttctataaaattgttttcacctttcaattttttaattgaaaatcaaaattttgaaaacagaaaaaatcactttcatatttttttcaacagttttttttactcaatattttagactctgatgactagacccagaccagacttaaactcaatcctggccctcgcattgaattcgactcctgacccgaactcgacctcgaacctagacccgaattgaataaaatcaaaatataaatatgaaaatgaattttacagaacatatttttgttttctgttttataattgaaaaataaaagtggttataaaacgcatttttaattttcaaatacaattttttttttaaaaaaaatatttttatttttataattaaaaattaaaaaacaaaaatattactaaacgatcccttaattaatcataatgtacaaatagtaacaaactctttagtcagtgaagcttataattaacactttcatatttctcaacattcgtgtgtgtgcataaataactaatagaaaaaaggtttagtactctaagcttatgtaaacaatgaagtaaaaaaggtatttatggtgcatgaatggtatacgtacgcagcttcagatattgagaaaaaatggttttcaattctcaaagaaacatttttggtagaaatgatgacaaaatatagaagagaatagtatagaatcctgtttgggtaattaaaaaagatggaaaaagaaatcagtagtttattaaagcgagggggcccggtctctgaagttttttattaccagaaggttggtgactaccttttccaattaagggcattgattaagctggtaaatggtggaataagagtagtggtcaaatttgtgttcaaaattcaaaaacatattgatgagaaagagagtatatatatatatatagtttgcttgtttattcacttacaatgacaactagtggggaacccacttatgctatacaatgatgatactattcctccaaagaaaattttattaattaaagcattcttcaactttgacatgaatagatcttaattaggaccctcgagcgaattaagaagagtaaaacaatgcttattattattatgggaattaattaataatttcattgaatttataggattacacatatgatcaacctcgatatacaaaaaataaaaatcataacttatgtgattgttacttcattatttttgtagggcaaggatgattgcatattcacactaacattatatgtaatatatatatatatatatatacataaatatactttcaagtacttattttatatatatataaatattcaaagtaataaccacttctctgaaaatactagtctcaaagtcgaaacttgggaggtcaggaccactgacttgtttacattgctaacctaactatacatgcaatacactataatattcttaaaaacatgaactagtttaatccaaccccactgaatttttttttttttaaaaaaaaaaaaacaaaagtgagataataataataataataataataataataataatagtcttctgttttggattgtgcagttcagatgatttcttttctttagtttttacccttttggcatatatagcattatgcatgtcgtggtagtggatgactaaggatgcgcagtatattttatatgtatatatacccatttcccaatcaataaactgttacaggacaatattagaagagggcattacataaaataaagttgctgccagcttaaaataatttattgggtgttgcatgtccttactcttatgcttatatattcaagctgatctttatttgtttttactgttgaccttatcattattttttttttcttttttattaatgagaacttacttgacatcatgttgaatgcagggacggagagactttagcctacatgtaggcttaagtccttactcaaatatatacatcaaatttttcacatgtagatatatacatgtattaattcacttcactcaatttattaaagcctgttgtgaaaacaacaactcaacaagaacatgaaacaatggtaaaaagatcaatgaaaccaattaacaataaacacaccaatacagttacacttaaaccagagaattagaacattaaaacataaagaacacaagagattttaacgaggttcgaacaagataatgattagattaccttgcctacatcctcgactagaaacagccacaatgatggctttgagagtctatattaattgagcttcaaactgagagattacaatagctacaaattacgcaaattgagaagcaaagcttcagtaattgtctcctctaatggcagtgaacacaaaacaaagtgtcactccaattacaacacttcaaggcaacactcttcttttctcaaaagctctcgaaaactctttctctttccgtttctattatctatcaaaatattggctactgcagattgaatgagaggcccttaaataccaaggttgcagctgaattgtaggacccgatcaccaactatcataacagcagttggttaatatagttaagtttagtaggggtactttagggatttgatatttggccaaccactttcacaattatccaccttggacatatatcaaaatgtacagtagcatagtgataaattgtagctgttctggacttgagcaatctcaggcaatgagaatgcttagcaagttcagacaaagtctgaacttagcttggggaacatatttagttaacatgtctgcaggattctctttagttccaatcttcttgatctgaatttccttccttgcaatgacttctctgatgaagtgaagcttgatatctatgtgcttggacctttcatggtacattggattcttcattaagtgtatggcactttgattatcacaatgcactgtgatgtcttctcctttgaatccaagttcttctaagaatcctctcaaccaaattgcttctttaatggcttcagtagcaaccatatattctgcctctgtggtagataaagctaccaccttttgtaggttcgatttccagcttatgcatccaccaaaagcagtaaatgcataccctgtaatcgatcttctggtgtctatgctcccagcatagtcagagtcaacatgccctgcaatttctgtgtcaaaacttgcatggtccttgtacaacaaaccaactcaggatggtccttttagataccttagaatccattttacagcatcccaatgcaccttccctaggtttgaaataaacctgctcaccatgcttaatgcataggccaaatctggcctggtacagaccatacaatacattagactcccaacacaggaagcatagggtacagagtccatgtataacttgtcttcttcattgtctggtgcttgattttgagcaagtttgaagtgtgaggcaagaggagtagtgacagacttggcctcattcatgcaaaacttgtcaattat

SEQ ID NO: 38065 - DNA, 2426 bp, Cannabis sativa
  modified_base (1368)..(1368): a, c, t, g, unknown or other
  modified_base (1680)..(1680): a, c, t, g, unknown or other
tttttgtttttaaaatttagatttttaattaaaaaatttaaatgtaaaaacagttttatagaacatgattatggaaaacacttttttaatttaaaaaaaaatgattgaaaaaatattaccaaacgcactcttagctttatgtaattatttaaattattgatttttagtttaatgttctttcaaaattatatatattttttaaattttaaattatacttgtgacatttatataataaatgtgtagatatttgtgtcattattttgtttgttgtgtataataaaacttgataaaatgaccaatttataacaccataaataatttaaaaacattacaagaaatgtcacttttgccagcacattttttcgtgctggcaaaagttagtattgcgctggtaaaatagaatttacttgtgccgtgttgacaaaaggaggttggcaaatcaatgttgggattagaacttttgtcagcataaaatgaaaagcgctggcaaagataacttttcccagcacataaatgtgctcgtaaaagttagattttagccattgcaaatgtacgctggtaaaactttaacctctttgccagcgcagtttgtgaaatgcgctgtaacttttaccagcacagtaacgaactgtgctgataaaagtgacatttcttgtagtgaaattatttttagcagactaaaaaattcaaagaacacaataaatttgcagagtaaaaatcctaaatgacctttaatacattaatgtattagtaggtactggtgctttaatgtatacaagcttcaactacaaatatatcacacaaaatatataaatagttaaagtaatgagagaattttaaaagttatatattacactacatatatattgtggttattagtaataaaataatgaaatgagagcaatgacaaacatggttgttgaatatatatataaaaatatattttttttttcttttactaggttgttaaataagttgatatatacttggatccaatgctaggaattaatgtgtggttctcttctcttgactcgatcttcctaagaaagaatcaaaaaagatagggccaagctctgtctggccactttaaacagtgacattatgtataataaaaggctaaaaaccggaggaaatatcttagtcctttctaggctgctactatcaaaatatctcagccattcatatatattgtctgcaaatttttgctttcttgtttacttttctctcctaacttttgtcttcaccatttatttaagaaagtagcatataaagctagtattaaaaagcgcatgtaaagtagaatttttctatatcttattcttttcttatttttttgtcccagataaaacatgttgtaatatataaangcttaaataaaaaaaataaaaaatctattcttttcttaatatatttctatttcaatagagataattaaagaattttattagttataactaaaaaaaatattacagaaatatgggttggccaaataaaaatttatataaccaataaaaaaatcataaaactaccttttacaaacacctaatatctcataaatccgattataatttatttattttttttaaaaaaaatagagatcaattttaaaaattattgagacataaatatgaaaagaattggttccataacaaagtaaataaacacaaataataacacanaataactcaaatataatataaaaaaaccagttatatttatcaactagttaaaaatttaagacaaaaaacaggttcagtaaaacaactaagatgaaaacttacacacgaaaaccagttaaataaataacttaaacaaaaacattcattcaacatattccaacctactaaataattacactcataccatatctagcctaaaaatactcatttactatgttatataactaatattctattttagttataactggtttgagttatttcgtgttttgtttttattcattgtaacactattatagaaccagttctattttaattataactggttcgaattattttgtgttatctattttattcattatgttatagaaccggttatatttaaattataatcggtttaagtaattttgtgttattttttttattcattatgttatagaagacaccagcgatttttcggcgaaacttattattcttttacaaatataggatttccatctttttttacaaaaatatggcataaaaaagcccatataaatgtaaaaattaaaaaaaactcataactccatggtattatttatttatggcataaaaaaaataaattcttatgtatataattactaaatctatttaatttaaatgggcttaatagttaaaaatatattggaataattacataagacacaattttttgtaaaatagttacatttttacgttcaaagaatatatatttttttatatatata

SEQ ID NO: 38066 - DNA, 4384 bp, Cannabis sativa
accccccctcaagctatgtttggtattaaccaaattaagcttgttacatagaaattgaaatctaggtgaagacaatggtttggtgaatagatctgcagtctgttcttgtgtaggaatgtaacaaatttcaagtcgtttttctgtgatttgttctctgatatagtgtacatcgagctcgatgtgtttggttcgggtgtgaaacaccggatttaaggcaagagcttgggcactttggttgtcacaccagagaattggtggtgtcttctgaagtttgacaccaagttcactaagcagggaactaatccagatgatctctgtggcagcagaggccagggcgcgatattcggactcagtgctggatcgggcgactgccttctgttttctggagctccagttgattaaattaccaccaagaaataagcagaacccgctggtggattttctgtcatcaagactggatgcccagtcagcatccgaataagcttccaagttgaggagtgtggagggtttgaaatgaagaccaaggtgtgtggttcccttgatataccgaagcattctcttgcaagcattccagtgttgaattgttggatttttaagatattgactcaacttattgaccgaataagcaaggtctggccgtgtcatggtaaggtattgcagagcgcctatggtgcttcgatagagttcaggttggtcgaaaagggaactgtcatccagagacaatttgttggccattatcattggagtgtcacattcttttgagtcttcaaactgagttctagctagtagatcagcagcatactttgattgagttaagtataaaccagaactgttcctgtaagcctcaaatcccaagaaatagttgacagaccctaaggatttgagggcaaatttctgattgagtgcagcaataagagcagaaatggctgcattgttttctccagttatgagcaaatcatcaacatacaccaaaatgagcaagagtgcaccttgatgatttctgtaaaagagagaagaatcagatatagatgatgtgaatccccatgtgagtaaggtgcttttgagagtgtcaaaccaagcccgtggggcttgtttcaagccataaagagacttggttaattgacatacaaaatctggtttagtagggtcttcgtatcccttgggttgttccatgaacaccttttcttgtaattccccattcaagaaggcattattaatgtctatttgttgtatatcccagccaaaggtcacagctaatgcaaatattattctgatggtggaagcctttataaccggactgaaggtgtttttgaaatctaaaccaggtgcttgttcgaacccccttaccactaaacgagctttgaatttgttgagactgccatctttattatatttggttcgaaaaagccatttgttggagagaacattcatatctgaggttcttggaaccatcacccatgttttctttttaatcaaagcatgtttttcatggtccatggcctttttccaatgtggaatgctcatggcttgtttgactgtccgaggctcttcataaacttgttgttgagaagctgtaacaagaaaaactttaggtttatatatccctgattttgacctggtttgcatagggtggccagtaggtaatgggggagggtggttgggtatattaggtgctggtatggtgatgtcttcaggcagtgttggttctctgtttgtggctgtattgctggtgtggggagcagggaattcagtactggtgtgggttatctggtgtgaggggttgtgaacactttgtgactcagttggctcgatattgacagtgccaaattggatgggagtagtgtgactcgaagagggtatgtcaggtataataaaggctggagcaagaaggttttgatgacactctttggtaatttgttgggggaataaggtgctgtaaggatactcattttcattgaaatttacacttcttgctatgtaaattcgacccgatgtatgtaaacatctataccctttgtgaaacggactgtagccaagaaacacacacttggaggttttaaattgaaacttgtgttgattatagggcctaagaaaggggaagcaagcacacccaaacgttttaaggaaggtataatcaggtttatagtgaaagagacactcaaatggagatttgtacttattaactatggtagggagtctattaatcaaatagacagctgaaacaaatgcatcccaccaaaaatgcagtggcattttggcttgtgcaaggagagttaatcccatttcagtgacatgcctatgtttcctttccactctaccattttgtggatgagtgtggggacaaggatgtctaaagagaatgcctaattgttgaagaaagggctgtaattttctatattccccaccccaatccgtttgtagacttttgattttaagatcaaattggttttctaccatagttttgaaggttgtgaagataggataggcatctaatttagttctcatggggtatatccaactatacttggtgaaatcatcaacaaagaggatgtagtacttgtatccttcatgagtgggataaggggagggaccccacacatccgaatggattatttgaagaggcgcattggttttgatgggagaactactaaaatgcatgagatgatttttaccaaattggcaagcatcacaaaaggacaaatctttattagtaattgttgcattgattgagtttaagacctttgcaagaattacatgagagggatgtcctaatctattgtgccaaagactagaattacaagaagtattacacaaagattgcttaacagcagaaagattacaatcagcattgggaaatagggtagtagttgtgctggagtgaggtcttggctgctgggcttgatatcggccttggcagtaggataggttgggaggtcttggcaaaggatgtgagattttgtagaggccttgactaagggtgccttgtagaaggacctgcttcgttttcttatcaatcacaaggcaagtgttagtgtcaaacaaaatggatacattgttatcacaagaaagttgggaaatgctgattaaatttttgtgaataccagggacatataaaactcgattcaaataaagagttttggaacatggaagagctatttgaccagtagctaatatagagagggagtttccattacctacagtcaatttaccctttccgttgtagtcgattgtgttgctaagtgaggcaccatcagatgtaacatggttggacgctccactgtccaagtaccattgagggtcagcaacggtgttggctgtagcaagcatagcctggggcgcctcattggtttgatcagaagtattcgagctgctttctccttgaaagcttaagtcgaatcgatgatagcattttagtgctgtgtggccagatctgccacaaacctggcaaataggtcgattgcctgttctattattagagtttcgtcctcctctgcctctgtttgagccacgtccacggttattgttgttgttgttgtaacctgtggagggtgatggaggagggcctttcttggttgctgcagcataatttgctgttggattatgcagatccaatgtagcaactgtagtttgctgttcgattctcatttcttgagtttgtagcaagaattgaacatcttgcatagtgacagattcttttgaggtgagagtgacgatcgcaggatcatactcacttccaagtcctccaagaatatagatgatgagttcatcatcagtaatgttgtgaccagcggccattaaagcatcaccaagacatctcatcttgagtatgtactcatcaatcggagtagcacctttctttgttgattgaagcaatccacgaagctgcagaactcgcgcacgagaggtgtttgagaaaagttgcagcaggacattccataaatctgcagatgaaccacaacgagcaacgtgtcccaacatgccttcagagatcgagttgaacaaccagctgagtaagaattgatccagacgtaaccagtcagcgaattcttgattgggtagagttcttgatgcatcggagggatctacaatggtggcagggggtctgattctggttccagtgagaaaaccttcaagttgatgtgcacggacagtggagaggacctgagatcgccaatagaagaaattatttcgatcgaggcgtaaggtgagtggcacaatgtgatttggtattacttgcatcgcctgtgttggaggagcatctgtggtggcagaggaggcaccttgaggtctggaaccagcattggtagatgacgccatggaaggaatcttcaagcagagacaacaaagaaaggaaaaaaaaataacctagaaactctgataccaa

SEQ ID NO: 38067 - DNA, 2449 bp, Cannabis sativa
tatgttaaatttaatattaaaatgcataaagagagtagacacaattattgtaggaaattaataatataatagattcaaacgtggaaagctttataggtaagggcaaatgcatttagaggtacgtgaatctaaatcgatacccacattttgtctcaattagaataatacttctaattaagcttaattaagctcatcacactcttcattctacaaaattctagcatctatatataaatatataaagaaggcaaatcttttgttcaaaaaaaagaaaccaaatcttcttatttgaaaataaattcataaataattaaatataaaataacaaatcatttctaaagattctatatacctttttgataattagtttgcttagggcctatgcaaatattaaagagttaaaattctagtattattgtttagttaaaaaaaaaagtagttaatacaatgaatgatggttaaaaaaagttaatacaatgataaatatatttttcttttcgtttaatattgagtatcagtgatatctagcactttttaaacatgtagtcttatgattggataatgcgtgttagacactactagcgctttttagcatttttagattttttttttcaattaaataatatatttactaaataattttgatgttaattacttatctagaaaatgaaaatataatttaaattattgtgtaaaaatatattaagcttttctattataaatgtataattaattatcaataaagtgtttgggtttgtaagatagaaaatattggacacttccaaaatatttggaatcattatcacacagtactgcgtgctctcaatatatatatattttcccaaacaatttggaaattgattaaagtatatatgagagtgatataaattgcattattacaactaataatgactaaacattaaaataaataaataatatagttttgtaccaattctttcaaaaaaaaaaaaaaaaaaaactatatgtgatgttatattggccaatttttatatttatgatgttataaaagaccagctcaataaatcataggtagatttaaatattaatcatctattctgtaaaaaaaatatctatacaatttgtaatttgtataattaatatttaaatcatgtattgcattatttaatagaaaataagtgtagtcaccataatacctatactttttacactttttttttttcttatgtttatttgaggtattgcttatgctttttatatataattattcttcaaaggaagaactcccaagaatcaatctagaattggattcgtacaaagagaaaataaataataataaatttttggtgggcaacatgtaatattttgtgattcgatctcttattttaaatttgtatctagctaggtcaccaataaaaatatttacgatttcaaattacaagtatcaaatgaacattactgaaaacgtattaaatgaatatttatcctttagtaaaacaaaaatgcatgttttacttttcctttatttttgagtatacatgttaaacttgaatcaagatctcttattaaaaagtggtgtctcatactctgttaaataattaaatttgacatgtcaattaatttttttatttataaaaaaattaaacctctaatcaagtcaacaaaagtagttaatatatttaatataaattaaattaattgatgtgtcaaattttgataggtttaacactgtaacaccaaattttaacagaggatcttgattagttaaatctaaacaataaattttgaatattttcacagtaaaatttagcatttttaaatattaaaagattgattatcgaagacaaatatatataattacttttggtgagatttatgctccgctttgagcttggcctaacttataagattattgtttgttttaatggttgaattaatgataattcattttcttattaaaaaaattgataattcatttcccttttttctttgtcataactatttttttatcacttgggtatatgaattacgtaggttaccaaatttgggagcatatggacatattcgaacactaagaaaaatatatggatcactatatatacatcatcatgctaaattcactcttcactatccattttggggtgggagacaacataaggtggaaaacatgctaatatgcattgcatgcatgtatttcaattttggtaggttcttctaaaattttaataatttccactccacattcttggggtacatagtatgaatcgataatacttgtgactaaaaatactatttaattacaaaaatgtatgctctcattaaaaagttcggtaactaatcacaaactaaatgtaaaacaatgttgtcactgaaaaaatactatttttcagcgacaagtaatatatagcatttatttaattgtcaaaatttatcatatagaattatggtgttgcctgccaaatgtcgtgtt

SEQ ID NO: 38068 - DNA, 5583 bp, Cannabis sativa
  modified_base (5500)..(5544): a, c, t, g, unknown or other
ttttctattgttatgaaaactaagattataattttgccttttttttattgaatggatcatgttgactttatttttagccaacaatattgagtcaattaaagtgataagaataatagataataatgaataataattatacgtcattaagaaaataagaacacggagatttatagaagtttgatctcgtgattatgataatagcctactactcttttacttgtattacatatgagaaaacaagcaagacaaatcttgatctctctcgaaagatcacaaataatttgatagcataagaactctcttagaataataatgtgtaaaacccactgaaataaaacaattaagaaataaaagaacttgattactatactattttacaataatagtgtgtgaaaatcccactgaaataagtatttaattgataaatggaaaagaaaagtatctccaaagatttgcttcagcttcatttatcctggtcagtgcatgcgggctcgttgtaagatcgaagctggtcagaccattctattcacactatctagatgtttcataataatcttcaaatagattatttctaaataataagccattctagacgacataccgaggactgtactaaccgtctaggtattagaatattctccacgtgtcactcaaaagaatgttgtttcaccttgtgcagaaatttgaataacatttgctcctaagtccgcgtggaaactgcttcctcacacttgaacttattcagccactaagttggtcggatgtgtgacacacgtttagctctcaacttctattttgacttaaagtgacctacctgtaggatatgaagatactgttgtctcttcaattcttagacatttactactcttggcaactgaacctcgattgacgcactgacagttattgggtaccgcatgcctaatgattgcactctttaatgagtactaattctccttttgggggcaaaatccaaattttgaagttgtaattaccaagttaccccttcaaaatcctataaaagaaggatttaagcctcctttgtactcttttacatattttcaaattcaaaacctagagcagagaatctttttttctctctaaaacttccaagaatttctgttgaagccttgtagaacactaaagagatttttggaatctaggtcaaatcatcacctagaatcctaccaatagtgagtaagttttctaacttttatgcagtttcctacattttgttttactttatgaaatttggtttacgttgaattgttcttcaaaattagagattagggtatctaatttagggtccgaatgcatgtgtgcggctcgagattcttgattcttgataagtctgaactgttttactgaaaaaatatttaaaaatagttgctcagtgtttttggaaattcccgagttcttcccgtgttcttgaacctttgattctgggatttttgtcattaggataaaatttccttccttggatctttagatctgtttgatcatagtatctgtgatgttttttctttgaaaaatgcattccttttgtccagtccttacgtctctctcattctgtttatagatgaactcgggtgatttgtggagaggtaagcactggttagacgaagatatgcttcaactacttcacgaagaccagcccaggctccgtgaaacctcattaacattatgtgagagttcatcaacctcaacttttaatgagtgggaggttatttttggtcccttctttattttttaattcaaattacatcttgctgatcttttaactcaactattatgttttagattaaccttaagctcgggtatttgtactcctgtactaagtctttagctatccagtctcttacgaataaatttgaattagagaaggtcctaggccaagtaaaaggtgaagagaccgcccaaggtgaattcaataagaagttgcacgaggtaaatgaaaaggttgaagagttacagaagcaagtggttgacatgcctcaagttgacaaacttgaggccgatctggacatcgagttcaagcatgctaatagactgctcgaagagaggaacacacttcggatgcttcttcaaaacttcaatcagcaagttaaatacttaactgatgaggtgaacgaagggaaaaacaccatagttgctaaggaggaagctttgaacaaggagattgaggcccgtgctaaagactttgcgacttactcagaggtcagcatggagatcttttatgagttttggaaggctaatcccaaagataactatgattacatgaagccagaggttcgtgatatcttgttcgaaggatgccaatagatgaaatctaaagaagaagctaaagcagctgaaacagaaaagcaatttggtcaatccgttaatggagtttctagtggaaacactgagcaacctataacaattggatcttgatttctccattgctgatcaagatgactcttcagcctcataagatctaaacctggccactccaatagattgacctcttttccatatcaagatcccctttttatctttttttattatttatttatttatgttcaacctttaggccacaaccttaagacatagccatccaagcgatatttaatcaaagttttattttgtttgtcaagataaatggctgattggacaaccttcaagcccagacttttaaccttttatgtctcattttaatgcatatagactatcttttttttgttgcttaagtgttttttatgtcatcttacagatgtaggtgccccccaagtgaccgagcaggctttagacttctggtcacttgcaaattaactagagtatgccatagtaacttttttaaaccttttacccgagcaaacttgtttgtacaagtataggtagctccatgacttaagtctaaatcactaaaattttgcaagtaattatttattgaattaacacaatttgaacgataattgatcgctttatttatttatttattgatatgtgttgttactatattaacaaaatttattcaataattagaatctattacatgatatgtttgaatcttagctagttaaaaaataaaaaacttttggaggagaagctttgcccagaaggcattactgaagagtaatgcttgttaaaatgatctatgctttagaagtggtcattcagaccttggcactagcattttaccaaaccattgaatgatgatcattcaaaaggccatcacttaagagtgatgtttgagcattatgtaattacgtggtcttcggacctttgtatttattggtagtatttttttagatgttcacaattcttataccatggtaatagaactagcttcatgtattcatcatactgacccaattcctatgcttcagttactttgtatggccattcctaatttggtctaagcacacctgccgcactgtctttatcgttaaggaacactcttctgagtaccaagccccccacaaataatttcctttatttcacttgtttgttgaagtactgagctactttttgctgatgaacttgtagctttaggtttgttaggtctcttcgctctttaatttcgtcaagtgactctgctaggagggcatgattggtctcttggttatgcatcaatcttatgtgggatggaggttctaattccatgggaaacattgcttcagagtcgtaggccattacaaaaggtgtttgcctgatggttgtccgtttctgttgttctatacgaccagagtgcctcgggcaattctttaggccaattaccctcggcttcttttagacatttctttagagtgtcctttagtgttttattgactgctttaacctagtcattttcttaaggatgtgcgattatcgagaagcttttcacaatcccgtgtgtcgcgtagaaatcagtgaacatttagctatcaaattattttctattatctaaaacaatttttgaggaagttcgtacctacatatgatatttttcactacaaaattgaaaaatttcttggaagttttagttgccagtggttcagtttccgtccactttataaaataatcaataaccacaattgcatattgcactccaccttttccttttagtagctgtttgatcaagtatattcccatatatcaaaggaccatggactttgcatctggattaattcattgggtggagccttgggagctttagaaaacctttggcacttgtcttatttctcacataagcttttgaatcttttatcatggttggccaaaaatatccttgtcggagacaaactttgtcacccagcattattgccatagagtccctcatgaacttcagtcagtagtcatgtagattcttcatttgtaacacaccttagcaaaggcatggagaaacctcatctatacatcgcaccattcacgattaagtaccgtgcaacttttctcatcatcttttgagcttcatttatgtcgattgtaagtgttccaatattaaaataggctgtaattggggtcattcaattaggtttgtcatcgagcatttcaatctcttccgtgtaggtgatgctagagtttttcaaaaattgaattaggactaagttttccttgtctgtcgcagtgttgcttgccaaccgtgccaaagcatcagcaatttcattttcctttcttaaaattatcatgatggtgtatcccttaaattgtgcgagcaagtcttgaattttacttaaatatggcataattttttctccctgagccatgtattctcccagaatatgattaacaaccaatagagaaccgctataaagttctagatattcagcatgcacctctcgagcaagtttcaatctgacgatgagtgcttcatattctacttcattattagatgtcgtgaagccaaatttgacggcttcatgcaaagctttcccccatgtgtaataagagtaattcatgcacgtgtagcttccatactcgtctatcttcaatgttttcttctggtggggactctttttcttgttccttttcaggctttgtactcttttttggacttgtcgtttttttacctgtgaattcaactataaaattttccaggacttgaccttttattattgctcagggctgataagtaatttcatattgtcctagttcaatcacccatttgagtagccaactagagtcatttgacttttgcaagactttgtgcaaaggttggtcggtatcgacttttaacattaattaacatagtagacttaatattggtattattttcttctttggtcagcaggacacttactgcatattaagtcactgcaaggtatattcccgattcttctctgtctagaggttttgatggggtaggaggttgtgcaagttgcttctttagttcttgaaaagcttgctcacattcctcggtccatttaaacgttttgtttcatcgaaggatgttgaagaaaggaacacgtttatcgataaattttgacacaaatttgcttagtgtggctatttaaccaataaggtgttggaatttattttaccnnnnnnnnnnnnnnnnnnnnnnnnnnnnnnnnnnnnnnnnnnnnnatgaacttctaaaacaataataaacacatataaagttta

SEQ ID NO: 38069 - DNA, 3440 bp, Cannabis sativa
  modified_base (27)..(40): a, c, t, g, unknown or other
aggatgttaatgaaacatacatggtannnnnnnnnnnnnntggtaaaatatttctaacagtttcatcgtaggtcttcttccacatgtcttttgtgtaatacagggagcaaagtgcgtacatgctcgcattctaactaatttttgcggcacatggatggggacaagggattttgagtgattggaatagtctgcaagtgcatgttctctccactaagttcacatcaccacctctctcaccttccaaacccataccaatttaaacgattgtgcaccattacaatggaaactcctacacctatcatctttttgttgtgctattaagtcatctttaaaagtagttgccaaaggggtagtgcacttacttgctttttcgagatgatcaacaaaccaatttagaagtgtgaacctaatgaattcaaccaaaatagttattggatattttctgaattcttctatcactttgttggagcttttggcagttgcttgtcaatatgttgtaccaatcgcctagacaatgaggacaagcccacttttcaaaccctatttgcttgatgtatgtagcagtggtaggatccatctgtttgagcccctcaaaatgtcaatcacattccgtcttgttccatgcgtaagctacaagccatatttgcttgttacatacatcagtcttgaacttgtgatagtaatatgtttgaagcatgcccaatggcatgcttttaggagaacaacctcaaaaacatgttcaatgcttttatgcctatctgatatgaacaaaaggttttcaactactccaatggcttcccttaacttccacaagaaatacttctaagagtcgtgattctcactgtcgacaattgcaaaggctaccagaaacaattggttgactgcatcgtatgcaacatcaactaaaagtgtgcccccatacttcgtcttcaggaattttttgtccatactaatcacaggacgaaaaaacttaaattccctcctacaagtatcgagtgaccagaaatagtactagtaccaatgccagtaatagtacccaaattcttctgttccagcatgtacaagtaaccatataactttgtacaagattctactagtgtacccctcacatacataacttccttctctctgtacctacaagtcttctcataactcatattaatgtcatactcatcaaacatatctctctgtatgtcttttgccttatagtttgttccatctgatgtgtacttgttcttaataatgtgcccaataacccacagtgctacttgatggtgatcaaaatttctagaatccaggttacatgtgtgtttgttgtagaacagattaacctcaaacatgtcacaacatgccttcttttttccccttaatctccatttacaatttttatccttgcaagtaatgtgtaacacatcagtgccaaacttacttaccatccactcaaaattcttttcagtgcataccttcccactacattcttcaattctttcttatttatgtacaacttgccaagatatatctcccctgaaggcgtaccactaagagatgttgtatacgtattattttcctttatgtcttccttatccacataagaggtttgaattttatacaaactttaaattcaaatgcagtagtactaatagaaggacctggccgactgctactagttcctggtgtttggcgattctcactaccggggggtcttctttgtcgctctccttggttgcttggagttagttccatcctcaggggaggtacctttatagccacatcatcatctccatccaaacctagtataagatcattattgtaatagggagcatcaaactcatctgaatgatcaaatgcgatgtcggctctgtggtcatctatattagtagggagtttctcattcaagccaacccctgatcagtttctgagaaaaaggtcccaaccacacttcgaagggttacagttgggggagtagactccaaattcacattcgtcctcaccttagtcaaaaatagcgaccacaagttgtccacactcatttttgccttcatgctcaagaacactcatagctgtttcacttaaaccttaagtggaaacttggtgcctttcatgtacatgtaccaaaattctaattttagttcatagagtaaagggtccacatcaaactcttcatgctaaacttcacgcacatttttcagtgtagtgtcaatgtcaatatcattgtcttacttattggggaatcgaataaccaattgaaaccctctacagcccaaatgccatcatacaatacatgcacaaatacagttgaatctgtccaagaaaaaccacaaataaatacaaaaataaacataaaaaagtagcataatatatcacacaaaaaaaaaaacatatcacataatgtcgcacacaaaaggcaacaagaaaataataaaaaacaaaacaatatcgtgcaacaatcgcacaagaaagagataatattgcataagaaacacaacaaaaaaataataacaaaacaaaacaatatcccacaataattgcacaagcacaaaataatatcgcataatatcgcacaagaaacacaacaagaaaataataacaaaacaaaaaatatatcgcatgatgttgtaaagatatcgcatacaagttgtaaaattatgaaaattgcacaaaatcgcaatgacatcgtttaatgtcgccaaaaagactaaagcttatccctaacctctaatttcagttggaatcgcacaaaaaattacacaatggcgtacaaaattacaaaaattctaaaaccacaacactacaagaaaaatgagtattaatgaggacaaatttcgttggtaaaaacccctgttttcgtcagtattcctcatcaatgaggacattttgtcggtaaaaattcgttgggaatagttcgttggtaaaaacgattattaacaacgactttttaagttgttgggaataaaaattattaacaacgacattgtcgttaggaataatattttatttatttatttattttaaaaccggagtgcatcaacaacgacattgtcgtgattgatatcattatcaatgacgacaatgtcgttgttgaatattaaataattatttttaatttatatttttttaattatattaaaattatttaattaattaattaatatataaaattatttaattaattaagatatgaaatcatttaactaaaactaaatatttagagtcactaatattacaataaaaagttagtcataaacattatagtactgcatacctaaatataaattagtgttcataaaatattaataaacattaagcccatagttcgtaaaattaaaataaatattctaaaagaagtttgtagtagcatcgtcctcatcactagcatctccaggaacatccaacccaggaacatccggcatttgtgggtaatatggcggcatttgcgaact

SEQ ID NO: 38070 - DNA, 6105 bp, Cannabis sativa
gttacgctagaatcacagtccctttgaaacgaagaaggaagcttaggagaactatggaggatgcaggattctaggtagagtttaagtatgaatatgcccttatgttttgctttatttgtggaataattgattactccgaaaggttctatcctaaactctttgataccccaattgagaatattgtcaaaccatatggagtatggatgaggactcatttgaggaggatgaacaatttggtttgatcttaatggttgcgagatggcactgaaactgatgaggtctttgctgattgttggtccgacgatgttaatgcagctgttgtaaagtcaagtcaacgttgcttgattgtggaaaataatggagaggattgtggaaaattgattacgagaaagatggaaaaacaaaataaattgaaagctgttattgagattgagcaaatcgtgggtaataaggaggttgataactctaatcttggtaataattttcacgcggtggatgagttaggagattcaaatgacaacttgattatttgagattctaagcgttatcgtatataggaaagaccttctagtgggtactatgatatggaccaacaacaaattggccaaccaaaagttaatggtccagttattgactcgatggaagatgttagtggtgacatggaggtcaatgaggaagtaagtgatcaagtacaattgggcttaaaaaaaagggctcttggtgggtgctggttcccagcccaccgttcattttgagtatcgtcaattagaattatcgtgggcttgggaacccgtgggtttatcaattcctagtagatcttgtaatctaaaagaaacccatttttcttttacttcgtgaaactctttgtcgtagagataagttggagaggcttcgtatttcactagagtttgaaggattgtattcggttgatgctagagatcattttggtggtgtgcctatgcttcggtgtaatagtgaagaggttcaattacttagtgttgagaataactcgaccgagaacataaaaacaaatacacaatagagtaagctaatcaaagacagaattgaacacaacacaaagtaattaatttggactaatataaccaagcataaaacaatgtaaatggaagagatattacgtggttcgaacaaggaataacaatgtgttatcctgcctactctatggccaaaaatagcccttaggacctttgatatttattgtatgaaaagtcaccagagtttacactgaaagaactgctaagaacagttgacacacgtaaatgatgccatgcttcaattacaaagattctctcatcttctttcctctcaactctggtttctctcattttctcttaattatttctctacaacttggtccgaatcttaatctcgagtgataattacccctttttacaagccttgattgagttaagtggcataactgtcataacagaatgttaggtaattatattatgacattgctcgagctagagaataggtttgtatcaagaactaagtacctcaaaatgtgtagccaaacacaacaatatatccacctttggctttacatttgagttgtagtcatcctgttgagaaagatctattctagacttgaaaaactcagcagtttagtatgtttagtaagttcagataaagtctgaactttgctaaaggaacatacttggttagcatatctgctgggttttctttggttccaatcttcttcacttgaacttccccttttgcaatcacatccctgataaagtgtagcttaatgtcgatatgttttgatctttcataaaacataggattcttcatcaaatgtagtgcactttggttgtcacaacgcactacaatatcttttgcattgaagccaaatttagatgtgaaaccccttagccaaatttcctccttgattgcttttgtagcaaccatatatttagcttctgttgaagataatggcactaccttctgaagattggatttccaactcacacatccacccaaaatagtgaatgcataccctgttataaacctactggtatcaatacttctagcataatctgagtctacaaatcctacaactttagtgtttatcttattgttattgttgtaaactaatctcaaatccattgtaccctttagataccttaagatccatttgacaacagacaaatttttatttctaggatctaaaatgaacctactcaccatgcttagactgtaagcaagattaggtcttatacacagcatgtagtacatcaaacttcccacacaagaggcatatgaaactgtgtcgatttgagcctaatcctcttctgtctttggggccagggattgagaaagtttgaagtaaggggctaaaggtgtggtgactggttttgactcactcatgcaaaacttatctaataccttttgaatataatctctttgagataaggatattctagtaggcctttctcttttgatataaatccctaggattctcttagcctctcccatatccttcatttcaattctgcattgagttgttgcttcagcgtgttaatctcttgtctttcctttccaatgatgagaatatcatgtacacataatagcaaccagattggtatgctattatagtacacacatggatcatagttacttcttgtattgctagtttcagtcataaataaatcttagattccattgtctaggggcttgcttgagcccatataaggacttctttaggaggcatgcttgatttggcttatcactcttgtagccatctggttcagtcatatagatttcttcctcaagctttccatgcaaaaaagttgtttttgcatccatttctagatcaaattttgatactttggccatcatgattctgatagaggtctgttttaccactggagagaatatgttattaaaatctatgccttaatgaaaccttttactactaatcttgctttgtacctgaattcttcacctgccaatccttccttttccttggaaatttgcaaccaattagtttatatcttgttggccttgtaacagtcttacaggttctatttttattgagtgatgtcatttcttcatcaatagcagcaagccatttatccttattattgcaattgataactttatagtaggtgcttagaacagagcactctacttcctctgcagatgcaagagcaaatacagtacagttagcaaagccaaatatatctggaggtttgatcaccctcctttctctgtatctaacaagttggtacccctgtgatctaccttgttctgttccctcattttctacttgttcctgattagtgttatcatatttgtcatcatcttgagtctcttcaagttgaacctattcactctttatggtctttgtcttcatctccttttctgtattaccccctttcataagcatttcactctcattgaaaaccacatctctgcttatgatgcactttttgaatccatcttctaaatgccatagcttgtcttgtaatgtgtgcatatgcagtgcactcaaaaactcttaagtgatcaattcctggtgcattacctgcccgctgttcttgaaatgttttttaaattcaatgctacagagggacacatgttgatgagatagcatgcagtcttcaaggcttctccccaaaaatgttttccgaaaccagcagccgtcagcatgcatctagctctttcaattaaggtcctattctgctgtggtcttgataacagttttgtgctttgttattccaattttttgccaatacatattgaactcatcaaaataaaaatcctagccattgtcagttcttagcatttaattttcttgtttgtttggttttctatcaagattttctagttaataaaagtgttaaatgaatcatttttattattgagtaagaaaactcaaacctttcttgtatagtgatcaactatacttagaaaatagcttgctccacctatagtttttgttctggaggcaccccagagatctgaatgaagataatccagtctccattttgttgtgtgccttgctttagtgaattttaacctacaacttctaccataaacacaagtttcacaaaaatctagtttcttaccaagtttacctttaagtatgccttgtttctcaagctcatagacgcctctctcgctgacatgtcctaaccacatatgctaacgctttgtttgatcaataccttcattttcgattgcagttgcaacccttcctattattgtccaaccagctagatagtaaatcccattattgagatttcctttcatcacaactatagagtcttttagaactctaagagaactgtgaatcttgatgctacaacctttaagtgctagtgtaccaatagataacaaattttttttgaggttggggacatacctcacatctctaatggttctttctgatccatcatgcattttgatcagcactgaaccaattcttgtaatcttgcaggctttgttatctcctaacaagactgagccactgtcttgttccttaaagctgcaaaagaaatgtttgttaggagtcatatgaaaggaacaaacctgaatctaaaatccactcatcactagtggctcaacttgatgcaaccaaggcatcagtagacccatatccatcacgaacatagcctgcatctccagaatccttcttcttttccctgctaaactttgctttgagagccttgcactcatctctgagatgaccctccttcttacaatagtagcattattttcctacctttgactttatgctagaactcaatcttagtctttgaccgttgctaccacccttagaatggttacctttgttatttgatttgtgatttccattcttggtatctctttattctggtctgctccatgcaaacattcccacacaattattgtctagtctttcctatgatttcttttgaattcaaagcagctttaacctctgatattgtgaaggtttctttcccatacaatatggtatccacaaaatgttcataacattttggcagagcagtcaacaataaattctcttgatcctcattcttaatattgagacttatgctgctaagatctaggatgattctgtctcctgagatcttttgtatcatccatcttcaaggtatacaacttcttcttcaaatagagcttgttggacaaagacttcttcaaatagattgaagcaagtttctcccgtaaccctattgttgttcccacatcaaaaacctccctaagtacttcatctcccgacactatgtgccttaattttatctcctttatcttctttttttcttcaccaagttctttcatttcttctctatctatagcttgatgtatgccttgatgaactaagagagccttcattttaatcctccataatctaaaattatatgtgcatgtgaacatgtttacctcaaaacgtgtggaagccactgttggctgaaaatcttgatcttgttaagattcttgaactattcttggtgaactcaaacctagtgttctgatgccaattgttgagaataactcgatcaagaacacaaaaataaatacaaaacagagtaagtcaatcaaagacagaattgaacacaacacaaaataatcaatttgaactaacataaccaagcataaaacaaggtaaatggaagatatattatgtggttcgaacaagaaataacaatatgttatccaacctactccactaccataaacagcccttagggcctttgatctttattgaatgaaaagtcactaaatacaccaaaagtattgttaagaacagtttgacacactcaaatgaagctatgcttcaattacaaagattctctcatcttctttcctctcaactctggtttctctcttgctttctcttaattctttctctgcaacttggtttgaatcttagtatatctagctcgagcgatgatgacctgtttttacaagccttgaactgagttaagtggcataactgtcatcacaaaatgttaggtaattctgtcatgacattgcccaagcttgagaataggtttgtactaagaactaggtacctcaaaatgtgtagccaaacacaacactcagttattcttttaatcatatagtttacat

SEQ ID NO: 38071 - DNA, 2566 bp, Cannabis sativa
tgctaatagggcggctcattgccttgctagagcgtcttgttaccattcaaatcgtattgttagtgagcatactgctcctcttgaactcaagtctattgttgatgttaaatatttatgaatgaataaatcatcttttcctcaaaaaaaaaaaaatgtgaatacttcttactccaagctgcaatatatcccaatttttttccaataaatctgaataaaaaaaacattaaaaaaatattgatgtattaaattttatataaaacaaaaaaataaaaaaaataaaaaactcataattatgtatcacataaatatatataatatttagcaaaatatacttaaaaaaaatactacataacacattttttacacaaatataacatattgtataagatttatattcaaaaaattatataaatttgatatacatctgtagtggttcggtttaaatgttgaagatgatcggcggtggttctaatttcaaacgtcaatggtgtcgtagactggaaatagggaggaggagaatgagagagaaataatgcattagaaaatttttgtgactaaaattactttgtcattgtcttttttaaattctaatcattaatacaattcatatacatacatatattttaaatcaaattaatggaaagaaaaaaaaatctaccctctacccgcctctcttggtggcttaaattaaaatagtcaaaataaaaaaagtgataaaataaaatgtgggataattttctccaccctcaaaacttatttatttattttttttttccaaaatattggtgtagactatactatccaatttcacccacttattccatgcaccaaatatgatctaattgtattttaaatttaacccaattttaataggtgtcaaattagatacaaagaaattaatattttttacaactacatcaaaaatatattattataccatttattttgtagtccattaatttaaagatgctcttatattctttttgggtatataaatatgtaagacactttggataaggtgatcgtagatcattcactcatggtcatcaatagaataattaaaagattaataagacgttttccttttctgctttatttatttattttttttaaaaaaatataatataagagaaacacagtgaaactatggttttcttttatgagatagtcaaaaactatggtttcttattaataagataaaaggagattttggtaatttactagctatagactaaaaaattcatagataccatatctattagatttagaaataattattttagtttccacacaattttttcatccttttttaagtaaaagaaatgaagaacatggcatataaaagatgttggcacgtgaaaagagtatcataccaatattaaactcttgagatgcccatgccccccaagaaaaagacataaagaaaacatatatttatagagttgcatcaaatcaagacaaagcaaagaattagtgtaattgaatatcaatatcatacctatgaaacttgtttgcaagactggcacaaattattaataaaaataattggggagatactgtctgtttgaattttaaagtttagtatgattaacttctgttatactcgaaattaagctggcactttgaaagaggacacgtgttaactttgagaatacgaatcaacgaatataatggtaattatattaaaggatattaaaatagaataactcattaaatgcggagctgatagagtatatttataattcgctgactgtaaaattttaagcgagataaggatgtacaaactgttgactcatgcattggcgataaaccattatgcgtcagaagacacaatcataaggacggcattattaatacaaagcgaggcaccaacctcgctacgtataaaaggtggtgacgagacatattgactgttagaacacttagcgtataatatacattatacaaactaagcataatagttgaacgaatttgaacaacgaatagcgaggcatccatctcgctataggaatgcatactcatggtactttcactaatcagctcagacatctttcaatgagatctactgctccgtcgactcagctatctcagatagaagctgacattcaaatgatgttgactgctgaagttcacctcatcaccaagaacttcgattatcagatggagttatgtcttcgataacagaaacaataggattcaaattatcaacctcataaagtcatggaaaaagctctggcttgctgtcaggattattgttgctattccagcgagatgacccagcgagatacactttgcagcgtatctaaatctacgtcagcattgacccagtaaaaacgaataaatcacagctgtatgatttttaaataataaccacatttattttacgtgagacgtaatcaaatcccataattttaggaaaatattattgtgggatatgaatctgattgtaattaactgtctccctatgtaactataaataggggtagaatgtactgaaaaatggacgaaaaatcttggagagaaccctaatttgtatcagagaaagctaataagatagactcgtaga

SEQ ID NO: 38072 - DNA, 4547 bp, Cannabis sativa
gattggatcggctattttatgaatacccctagtgagaataaaaccaaagatattgtcactttattttattaaggtaataaatagatttccaccaaaatcctctctttttaggcttttatatatactagtagggttacacgtgcttcttcggacgtgagcgaatggcttctaaaaatatttagagggtacaattattttcaagaataattagtatttttatctactaaacttatgacaatacctaagtatacatatcctctaaaatatacatcatgtcgaagaatttcgtgatctcattgatttacaaaaatataatacttttattagcttttattatttttttatcgtaaattagtattttttgcatctttattttttatgtttaactaaagaaatatcagtaagcaaaatgtaaatatgaatttgtaaatataaagaaatttaaatttgatttgcttaagtaaatataaatttttataaaaaataaaaaataaatctttttataatattctaaagtagagtttaaaggtctatttcacacggataaaataaaataataaaaaaaaatagacgtgcaacaatacaataaattgtttgaatcttactttcagcttctgaatttattgaaattttgcaattgttttaaaaaactatgatatagctaataaaaaaataagattaaaactatttggataaaaaataaattaattatagtcttattttattattatctttgattatctatatttagtttctcataattgtttgtgttgtatgtctacttattttttgttaaattcattttttaaatttaattataaatttaacagatagagaatataatatatttttttatccaaataaataattctaattatttacctaaattattataatgaaaaagcaatcatataataaatttattttatttatttttttagaaaaggattttctcataatatatataatgacaggaagacactaattccctttaaataattaaaggggttttttgtaaatcgattgttagaggactaaatttttttacacttttattatagttatagattatagatatagctgtacttgtgaaggtaataattttacatttactattctcttcaacttttttcccttttttttttttttaatgctgaactattcaaagattggaagggaaaaccaaacaaaatatccccaacataatgtgcccatataataggcacacaaaatcccataatgtgcatgatagtaaaagctctcgggcttttccgtacaacaaaacaccacacaaacgttttactcaagtatttcaagagtttgccagttaaattagaataggcataaaaaagttatcaaaccacaatattttggttttgattcagcattaaaatgagagaaaagtttcacaatttgcgtacagtgctacgaagaaaagttaatctaaataccagtgaagaaaccaaagtctaaagttagttaagaaacttaaatgtcataggttaaagcagcttaatcacatgagtacggtgaactatacgaccatctaatctttcacaaaggcaaagacttaagttgttcactttaagataaagaacgaatggtgaataattcatgtgagagaaacacaacacaccaaaatgtcccaatttgaaagcaacttccacatcaaagtaaactcaaaaccacatcttttaataaaaaggcctctttctttcctcaagcaccaatccaaacaagcaaaaaatgcataaaccaaacacagttctcacaactgatgctgggaaaatggctgcctacaatcctgtggagataggcaccagaggaactgttggttcgctagtaatgaaggaaattgattactttggccaacttgaaccgagcagtcacagtaagttggagaagcatcggtcacatgttacaaatacagcttcttctagtagtagtcattcttcgaaaccaacagttggatctgcctcatcaacccaaaagaagaaaaaaaaaggaggcaaaaaactcctacccagcatgtgttctatggtggaagtgtcgggagaaaagccgacagttgggatttcaggtttcagctacacgaacttgaaaacagacgtgaaaaatttgagggcttagataatgctctctgagagctttgagaagcctagcttcctcaacctgcttgttatggggcttttccaagctctatcagtgtttccacactttatgtctacaacttcaacaatgttagatcctttcttttcaggtttccctcttatatgagttctatctataactacattgtcagagttaagcatagggattctatgtgcttttttaggatacccctttgttttcctggaaaattccgggcttttcctgtagttcatgactccactgctggtggcttcatcagaggatttctttggtttaagtcttcttggagtaacagggtcagcttgaggtttgttatcgaaagatgatgaaggttttttagatgctatatccatggattgcaattcccttgtcatcaaggaaatgattgtgccagtggtcccaaccctgatggatcctccaccaccttttatagcttccagtgacttaaccatgtttcttttctccaactaactattttatagcaaggaatgtttctacacacaccaaccacttgttggaaatgaaagttttaaacacctctgttcaagggcctgaaatagcaacatcaccagaaaaaacttttagatggtcatatatgacatatataacaaaggtatatctagcagtacatcaagttacgttcttttttttaaaaacaaaagatgattgagaatagagcttcatagatgaaattctttcaagtataaagctttgtcattacatataaattgataaggggatattttttttctctttcacttaactccaataaccatgaaatgtgaaacagagaaagcaaggttatgttaacttcaattgattattgattcatgctttttattttgttaatatataactgatgtaagcaaataatccattaaaatggacgtaactactgcagataaatttatggtttatatttatacacttgagaactacacaccaaaaacagagtaaataagtattactcctaaatttattcattaattattattatgctttataaaagctaatttcatttagaagtataagtaacgaatcccaaactacactaaaaaactaaatgctgcaatgaaagacacttgacagacgaaacaataatatgaattattgaacttattttaagtgaaatgtctcgtctacaaccatgaaagaacactaatttctgacatatcaaatttaaatatcagtcaaatatatagctctcaactcaagcttcaaatttttgccaaatcttcaaactcataacatgctacccaatatataaaatataagttgataattaaggaatctataaattatatcacaacaataagtttcataaccttcaaatgtcaatccaatttgcctttcatagtattatttatatcacaacaccaacaaaatctcttggcattttgataagcacgtcttagcatacttacacatataaacacaaaaaattaactaaagtcaaacagatagcaagtagtacaaatctacaaaattatctaaagaaatccaaaccaatttaatcatattatacactatgaagtccgaacagtgaaaatataccaaaaaacaaatctaatatgtagaaataaaagactatcctccattccataaactaaatttaaacacaaaaaaacacacattaaaccaacattaacaaggaaaagcactcacccaaatcaatccactaaacttcaacactccaagaaacaatctaagaaagttgtatatttctcatacattcttgtagaaataggtatacaactttctatagttaaaatagttcgtagccagcaagtccaagcactaaccaaagttctggatcaaacaacatctgtgaaattaccccaaaaataacatttcaaaaccaaaacaaatttaaaattgcacttaaacagcaaacatcaaacagcaaaacagagcataacatcaaagtaagcatatttacttttctttaaatttccacattctattgtatacatatagggaaatgtaattatcaaattcatcatcaatggggtccaaagtctgcataatagaccaacatatcaggatatcctttgccaagcgtacaaagaagataaaagctatcattcagcaatctaaaaaaaccatttcaggtctccaatttgaaagtttcgcagcaagttacaaagtccttaatacaaaattaactttaatgcatttatatcttggatgtacatatatttcattaaaaagtcaatcacattattaaggtttagagcaataccacttcaaacaccaccacgacaaacatagaaaacgtacatttccgttcgtatcaacactaataagaaactaacacgacacataccatacaaatctgattatgtcattgtttgaggcattttcccaaacaatgtatgtacactagcagatgcttt

SEQ ID NO: 38073 - DNA, 1622 bp, Cannabis sativa
atgaggtaattttcgcataagattaatacatatatcttttcatgctgtttcctttctgtctctagtaagattcaacctaataattattgtaaataaatttcaaatattaattttttgaacagtttaattcccacatttggaatcgtcaaaatattgaccgaaaaagtgtcgtatacccacgactattgaccatgcatgcgttaagtaaaaaggctttaaactaaagcaaaaggcacacatgacatgagtaagttaaagtatagtatagataatagacgtgaagtacgaccaggccagagaggcactgcactacgtacgtacttattattaattagctgatcacatatattatatttaattcatagctactactactactagtgcttgtgacaaatcacaaacatagggttgcgttttctaagttttcctttctcatgatccaaacacaaataaataagaaaaataaatcaattgggaaaaacttacattgcctttattacattcagagtaacctacccaacacctaaatgttcaaggcaaaaaccccatgcgtgtacaatatatatatattggcactttataattttattagctcattggttggcacttcatatatttatatatagtgacttaatttcttcttgggttcttaaaaaatctcagcagtactactgagtaactgagttaaaaatcagaagggactcaagatgatcttcagtgattcccagtactatctgaactaagattctttcaattggtttggtttatgtaaatgtgataggacaatacactttaattggatatatatatatcactgtcagtggggaaaataaaagctagagctttatgtatatattacccgaagaaaactctcttctctataataacttggtaaaagggtctaatcttttgtaatcaaattaagcttttttatggtaaaaaagaaaagtaatagaactttaacttttcacgtaagaagagataaaatttattatagcaacaatggattctgtttctttaaatagcacatgatcttgagaataaatattcttaactagttcactaataatggtataagggaatcacatggtaatcggtctgttactgtgcttttaatttactaggtgaagcctttattaatgcaagaacatatgatgagtattgtacagtagtactattgtacgtctaggctattgatataatacattcttatgagattttttttggcaaagtagtctacatgatatatatacttagtattttttattaactatatatactgagttattttcctcaaaaatatttatatttatatatatatatatatatatatcttagttattagcaggaaaaggaaaagtttacttaaatgttagagttgtgattatatatagttagtaatatggaatatatgtttacttagagttatatattagaattgttattattttattattaatttaaataataataataaagaaaatttaattctattgtaggtgtaattgagttatatacaaaaatatatttaattaatttattaaacaataaagaaagtaaattagtttagacattttaaataatataattaattaaattacacctgcataagagaggggggg

SEQ ID NO: 38074 - DNA, 2505 bp, Cannabis sativa
tgttattacgacatatcgtttatcgcttattaaaagactcattgtcgttggctaaaagcgaagtcaacaaatacttttagaaacaaatttttagataagactttcgaaggttgactttttaggatcgacttgtctcctctaataatgattaggggcaactttgaatggttttaggggtgacttgtcacctcttataatgattaggggtgacttttgtcgcccctaatactcataaatgttgtagtgagggataaattatatcttagcatctaaaacttagaattttagattacttgcttaaaattaaaactaacgttgatcaacttgaatctgttggccgccatgtctgttaaagaacatatttctgtgatctttaaaggattacctgtcgattatgatacgttcatcatatttgttaatacacaaaatcaactatacacagtagctgaaatcgaatctctcttgctctcacaagagcatcgaatggacaatcatcacaaagaacttgattccattaatcttgcaactaatcgaccatctcgaggttaaggatctagttttgtctttctctaatgcagatcatatgtccaatcatgtgtcttcttctgtctctgctggtaaaggatgaggatcttggaatccttatgttgttccacttcgtgccactggtggtccaacttctaaccccatggataattctcaaggtcgtggagttttagccgccttccctagtcaatcaacttcacacacctactctaatggtgctactggctctagacatgtttgtcagttatgctccaaactagggcacattgcagctcgttgttatcaaaggttcaatattgactttctaggtgtaggagcagctaatgtggaacatttctcagcaaacacagccattgtagacactgttgcaaatgcctcatggtaccttgattttggtgccacgagtcactgcatagccaatgctaccaatttcactcacaaggagccttactttggctcagatcaaatccatatgggagatggtgcaggtctgcagattcaaaatgttggtaagacaatattccatacacctcactcatctcaatctttaggcctaaatcaacttctttatgttctttaaattaccaaaaatctcattagtgtctcacaatttgcatcaaataacaatactttctttgaattctattctaatcattgttttgtcaaggattaggattccaaggctgtgttgatggagggacatcttaaacatgaactctatgtcattcctgcttctcaaatgcaaattcaaggcacttctcctagccagtctctctgtaacattgccaactctaataaaactatcaatgatttttgtgatgcttgttgcaaaggtagaattcacaaatttctattttctagctctcaaatagtttacactaaatcacttgacctcattcactgtgatctttggggtccatccccagaacttttatcatctggctataggtattatgttcattttactgatgcctctaggagacacacttgggtatttttacttaaaataaaatttgatgctctacctactttcattaatttcaagactcaagtagaaaaagagtttgaatgctctataaaatccctgcaattttattggagtggtgagtaccaagccctagaactttactttttaagtcatggtattaaccacaaagtctcttggccaacaacacaccaacaaaatagtgttgctgagagaaaacacagacacttaataaagtctgcccttactcttcttgtctaggcttctatgcctttgtccttttgggatgaggttgttagagcctctaccatatatgtcattaataggctaccatcccctgtgatacaacactccacacctttcaaggttctgtgtaataataaccttgattacaaccagcttaaagtgttttcatgtgcacgctatcctaacacaaggccttacaacaagcataaactggaatttaggtctatctagtgtgtgttcctaggatatagcatcaagcacaaagggtataagtgtttatcacaaacatgtagaatttacatctttagagatgttaattttaatgaatataaatttccatattctatcttatttcccataaccattgcctcttgtcttgctgctacttccactacatctgctacaattcctgtacgtctctccacacctcatcaacacatcttaccttctccatccccacctacttctccatctctttccacctctactcacgatcttcaatccattagctctaattccagtcacataccagacttgagttctacttccacaaccactacccctgttataccaactattaatgaacaacctccacaagcccctgatattcctacaaatcaacaccccatggtaacaagggcaaaggcagaggtgtcaagccaaaagttttactaacttctaaggagccactaaccttagctgcagctctcaaggatcccaagtggctt

SEQ ID NO: 38075 - DNA, 3506 bp, Cannabis sativa
ttcagaagagaatgtgtgggagaaagttaaattctggacagctacatgagtttttaaaaccaaactttttgaatttgtcatttttagatttatgtacggaatggaattcattgttgtagagacactacctcctttgattaacttatattacctcagttgtgtgctaactgttttaggcggttttttttgtaacaaaggctttcctctgccataagtgaggattcttaatacatagggtcctgtctaagacaagaggactctttctcatttcaaaaaaaaaagttgtggtataagctttatctaagatgaagtttaatccttgagcactatttatatctactatccatggatatcgtagacgggaaggccaagtgtttgttatggagagtagttaggaatagcgggaatttttaagaaaaagaagtttatgtaaatagttagttgttgtttgggcatataatgttaaagatttgaaagggttgctcttttctattagcatagtgacaggcattgtattttaatattttatagccatattttatattgggtgttcactgttagtgtacactttatactaataatacaagtagtgttgtcagtgttggagtttcatatactaaaacgccaatttggagttggttgttaccatgtttattgatatctttttaacttaaatttttataacaaccacttggttagatctcaaaatattaggcccataagagagtgtccaattgggttgtaaaccacaaaccaattctataattagtccacgaataattttaaccatacacgtgcctttacaaccattattcatggcatcccattatgagtttttcccaagtccctttggtgctatggtccaactagagggtgttggctatcatttgctacaactacttggatagtgttcacttctcaatgatgctttacaagaggagggtgcctaagtcgttgtaaatcaccaatcaacttcatggaccatacttaatcaatgttaatgtatgatcctcacaactaagaatttaacaatgaaggttatgcttaaggctaggttcatggtttgcaattgttagaattagtaagctaaaagaaagtaaacgtcaggatatactttggaagacggctgtcctagcaacactttgggctatttggctggagagaaataccaggatttttgaagatgtagagaactcagcagtagtggtttgggacaaaataaaattctggaaagcaacatgggttttcagaacaaagcactttgaagacctctcttttctagatttgagcagagagtggagagtcctcttataattttgtttatgaactgtaacttcttttatttttctgcattttgtttttagttttctgctttttaaactctcccttaatttgttttaagcagttttcctccgccataagtgagggccttaatatatagcagagggtggtcagtctaagacaacgacctctcctcttttttcaaaaaaaaaaataaaaataaagatatgtcgtctattaatggatagctcagatgttaatatctaaaaaagaagtgaagtaaggtgctggtaaattttcatttgctggatagaaagcaagtaagaggatccttgtttttttaacacttcatttcataatatttgatgaaaatatgtgtttactttttttcctttcttttttgatatggtcagttgtttagagttatgatttcactttgtatgacgttgaagccagacaacaattttgtaatgttaattgctatatatgcatttattatcatttttagaaacaattaattcattgttatttttctttcaggattttttggaggatttatggggccgaatacaagatttatctagtaatggatggaaacttgatagtggtaaatgcctaataattgttttacactttccttatgctgacttcttgggatggaatataaactttgttgcatttgtcttgtgccctatcctttaaagtgaattttctatccttttttgaacctacccaatatgcatataggaaacataaggctttgcccattatttttttttttaaaaaaatagacagaggtcacttgtcttagattgacctcctcccaaatttattagggagccttgcttatggcggaggaacaccgtggttacaagctaacttaaacatccaaacaaagcacctaatgataagtagatagcaaacatgaatgaaattacagctacctaaggttaatttagtgtaatatgagttgccattccttggttaggtgttgaaaggacaaaccctcaaaccctctcgacttaaataaccaagtagcaacctataatttaatctttccccatacttctttgacctcatttttgacttcaaagatcctcccatttctctccaaccaaacaccccattgaagagccaggattgatgttgtccacagttgggtggttctcctactctcttttagcttacgcatcaccaattgactccatgtttgggcatgcaatttgcatcccaaactcattcaagtgtaacccgtataaaatagctaaaaggacagttgaaaactaatggaaagatatttcctcattcttcttacaacataccatcatggagatagtagatgacaaggtcatctcttttgtgaaacctcatgaacattggccttgtcaatgattagcagccaggtaaacttttaccttggatggggtacaactcttcgacactgttttggcccatctttcttccccgctatgtgattcgtggcaagactattgaaggcagacttgcaagagaaaattccacttgggtctgatttccaaactccagagtccagttttccataagttggagtttgttctaagatgcttagtaaaaacatcaaggtatcaactttcatgtccaacaagtgttttctgaattgaaggtttcacctagaatctgagctagacatctctgcctcacccaccaccacatgcactatacttttattcttagccgtagaaacttgagctaactctgggaacaagagctctaatgccaactcccctgtccaaatatcctcccagattcttattcgattactatttcctaccttgaattgaactagatttagaaagatttcagacactactgctacgcttctctagggtctcctatttgacaacttctcccttttcttgaatcctgctctaacgccaacttccttgtccaactatcatcaaagaaccttattcgattaccatttcctaccttgaattgaaccaggtttagaaagatgtcatacactgttgctacgcttctctagggtcccctatttgacaacttttcctttttcttgaattccaaaaattatcatctaagctgtatccgcttttgattactttgtgccaaaatgactcaccctccaaaggaaacctccacaaccatttcatgaaaaatgctaaattttgtttttccaagttacctatttccaaaccaccttgtagtctaggtgtactgactgtttc

SEQ ID NO: 38076 - DNA, 2929 bp, Cannabis sativa
gagagagagagagagagaggtcacaggcacacatgcaatgcaaactagaaagtaatgaaagtaggaaataataatgttactgttaaggccttaccttctcagttaaatcgagtgctccacttataattgttgtctcgtcatgtgtaagctcaccacccttgccggcctattatgacaaggatatcagagctaatgctagcataaatctgtggtagatgacagcaatatttcctatttgcaacgtgtgaagctattccacaagttaaatagcatattaactatcctcaacatttacctcttggctgtggatggagacaaggacttttaattgagctcgcctaaataacgcttcattatgtcctagtacccaatccaaaatctgcatttgtatatctcaagtcaatatctgcacttgtaatctgatctcattattatgatccatcaatttgcagcaattagattccaaagttttgctttagatttatttttaagcactaatagataggattcataaacgaaatcttctaaatacatttgaagtaaaataaaagatgaccattggctactaatcaaaaaccactaaatttgcaaattccaagctcacgtttaaatgtctaaatttcaactttccatcgaagattgtacctttccaattggataagaaattgggtagcaaattatcatcaaaatccgaacaagccaaacaaagttggcacctactgcaagtccatatctagtgcatatagcttgtgggataacctgactcaaaaaaatgatattggagtttccatcaaaataagccaacaaaaagattgatactttactgtcaaaccaagcatgaaagttagttgaaaaaatataatatacctctccaaaaaatagaacaaaagtcacagagagaattatagccacatactgattgaacattttatccaagtagattggaagggcctgcaaattcacgaattatcatatcaaaacatttatctgaatagagaatactcaataaacataaaatctatgtataaattacatcaacttccaattgccaatcgaaaaagttgaatttgattaaaaaaaaaaagaaaacttacttccatggaggccgcattacacaaaagcaaagtaacaagaagctggtgctgcttctgaaccaccggaagtatacaagctaagaatacatacacacaaaattagatacgattgtgaatcaataatcagatagaaacggtcagaaaaacttaccagcctgtttcttctcggagggagtaccacttctctggagaatctcgagctcgacgagaccaagagacataagccctagggttaaaccggacattattccggcgaagaggaccaaaaagcatgatataccggcgtagacgaaccaccatatcgatccaaacgctatagcctcagctcccattagtgagtcccgagtcagataccgagtcgcaatcatcgcattcatcagatgcatcgtcatctctcttcttcttcttcttcctcaatcgacttcggatcttcgtctctcagtgtctgattatcttcctctgtccaccaaaaattgattattaatttattatatttataatttatatttctctatcaacaaaactgaatcatcttttcttttctttttttctttgtctatatttgaaatttacatttaacgcccttacttattttaacaaaaatttttaatgttttactttcttttttttttaattgtagagtgaaattttgtttttttgtaagttttatattgtgtactaccttaaatttttactgttgttttatagtttttttttaattatttctctattattttaattgtcttattttattgttttagaaaaaaacagtattttcttttataaaaaattagttatgagagtaaaattataaatttttatccaaaattcaatatttttataaaatttccttttactattaaaaaaaataaaatttaaatattatcctccttaaaaattaaatttacatatttatttataattaaaaattaatatacaaataatgaattttttttccttaacaattaaagagttttttttattgataaatttgattaaagtttgactcatattttagtgttgaccgatacattatcagttgattaagacacgtggtggatcagaatcgcttggaccgctgaattggagggccgcgattcgtccgtggtactaacagtgtatttacgtacaggtacggtatagaggggactttttacaagaataatgagtcttgaaaaaaacacaataatgaataaagattaataattatttaattaaatttggagggaattactcatattttcacatgagaattactataaagctctattaatatttagtattatcttcaattatataatttaaaaaaataacttttaaaaaatattattaattaattatgaaaagccacttataaaaaatactagacactactaatatttaataataatattctttatttattataaccaattttgttttggaaaaaaaaaagagagaaagagccaaagatgaaaaagaagaggtatattcatcccaaagcaatattggtggtcccataacaaaatggtatgatatgatatttttaaagataatattttttatttagtattttaaagccttaaaaccatactcataatacattttataattagttagtaattttttttattatttattaaattaaaatagtataggacccacaggtttttgtaacattttttgatggttttgttaccttttacgacttttgtgctatttattatagattgtccttatttatttagagtagttttatggtataatcaattggcaagaaaagtgatcatttttatgttcatgacttctagttcaacaacttttatacttttaagtatttcaagttttttaagttc

SEQ ID NO: 38077 - DNA, 6344 bp, Cannabis sativa
caaaaattggggcgccgccacaaccacgcagatcaaccctgcaactaatagaagaagcacccagtatctctaccgtgaagctcaaccccgacgaatcaccaacttccaagcaaaaaccccaaaatccaacaccaaaaaatatcgatccaccctcaaataactctttccttcaaatgtacaatcaaacacccgccaaccatagccactaccaaacccacaaacaggttggcaagccaaggccagaaaggagaaaagaaatctcaattggtgacaaactctcaatttcagagagaaccctagactttcttaatgattatttttattaaaaacaattcatccatatatattaaacatatatatatttatatatataaaaacatatatttgaatttttggaatgaaaaaaacaaaatgtttctccataattataagaaaaaccagcgacatactataatgtgtatgtatagcaaatctttaaaccaaaaacatgtttctaagacagggaagaaaaaactacattttacgtggacacgaaaattttaaatggtaatatggtattccaacgaatttaacattttctaatttattattgcagctctttgcattattatctcttggttgaaagttaaaactactagaaagaaacaaggtagaattctgaaataattttacaagggcattcaactttgaatcatactttttttttttaagtttaacataaattccaattgtatttaatgttcttaaaagatttcaaatgaactagtacaagactccatcttcttttctttaacaaggagaattttatgtatcgaggtatattgtaactataagaaaaaaaaaactacaaaactcaacagttcaaacgccagtcgtaaggttgatatgtcaccttcagctgagagttagcaagaggctctactagagcttccgacacagccgggtccaagtagttcgaaacaaacttgagtacttctatctcattcttaccgaaatctacactaaacctgagaatcccatgatgaaggagataatattaggcaatatgtaagaaagactgcatgatcaaacaaaatgggaaaaacaaaagaaaagtataaaacacatgttatcattggttacacatagtaacaaacttaccatttcagcatcttgctaagtgatgctactttggcttcaaaatcaatgataactccacccctccttagaaaattacaggctgattccatcaactctttgtcaatgttttcgggcgagtagcatctaagagcaggcccagattggttaccagaaacaagcgcaaagtgaacaagaggttctggatgaggaagagccacctaaaattacaaagacaataaaaaggatgagtgtctatataaataaagtgactgagaatactatttatctttaaagagtttattttgctggccctggtggtctacaagttcaagagttatgacagtgaagaaatggactgggaaaagccatagtgaaaaagctatttaatgaattattgactcaaacgacacaattaataaaagctatacacaacgacatatgcataaaatgacaaaacataagtaaacgacattatatatacttagtaatactactctgcatcagtaaatgatagtatataggatagtataagtatatctatatcaatctgcatcacaggctacataggaagcaatatggacttgcttaatagtaattcctagaaatatacagatgaactcacaaggggccagaataacttttagtttatgacagaagcttgaaaattgatacataattttgctcaagggaaaattgtacataattacgtatctaacaatcttgtcaattagactcgtaccatgataacatatcaatacaaaagacccaaccccattaaaagaagaaaaaagaaaatgactttcatgttacttgactatgaaaaataaaatcgtaccttggaacgtttatcttttgcattaaacggcttcatgagattgtacggtggtcgctggttaccccttaaaattccattttgaatagctgaaagggaaaatgtggatccaccaataacatacctaaagtctccaaacaatcttcttctttctagggctccagttggatgaccccacaacaatatcgcatggatggccatcatattgtatagatttataaagaaagcaagtttctcttctcttgtcatttccagtaattcaactctttgaagctcctccactattctcaaatacctgtgaatcataacaaattacttaagtacagtacaataccacatatgctaacgaaaaataaagctgctattcccacagcctagaccattaaacaaaccttgcaaactcctcactgccataaatactaacataatcaacatgcattccatcttctgatgtgtaggcttcaaaaattgcataagacaaaaacctcaatcttgatgcaatttctgtaataggctttggcttcacatcagttaaaccccttggaatgttgtgacattcagaaacaataggatcatcatctaagaaccggtaaaggtggttaccatcctcaaatagattttcactggaataagcaaaaaccactgatgagaacccatataaaaatacaaagacaaacatactaatggaaaaaaaaaacattttacataatgtgaaacaaagttgtttcatttaattagctacaaatcatgattcctggagaaactgatgcccccttgattatcatcagccatttaaaataaataatttcttttttaaaaaaagaaatacatcataacaaaattgataccttattacataaacttctcctaaaaacctatagtttacatcaagaatatattaattttattttaatcttactctactctaatacttccttgtaaaagcttcttaataatacatataagtcaaccactcattcaaattgatgactcacccaagaacatgttgaaaaaagagttggtctgctagatttctcccaaactcagtagcctggctcacaatacaggagaacaagaaaaaagggaaacagataagaacaaaaataaacctgaaacacatatattagtctgctgaagaaaaacattcaattttcctactaacctcttccctttccagatactgatcttctgaaaagaaatccaccgcttccgaacccagaaaacagctagtgaacctacgcatcttataaaatcggtccttgacggccacagactctttcattttccggacaattaaagcttgttcatcaatagctccactactggacagatcatcttcaccagaaagtggaggcaaaggtgcttcaaatgatggttcttcagtaatcaaataatcaattttctcatcaagctttcctgactcctccagactctttagatcaatcaggcctccgatcaggatttcattaaagaacacctttggaacagcagaagacccagcaatcttctctagctcctgctttctaccggtgtagatatcaatattaatctcaacatatttaagcttcttcctgtgcaaaaatagcctagcctctttgcagtcttggcaccctaaccttgtgtacagtatagctcttcctttcatagctaagtgctgtggtggtccttcattgactgcattcttctcttcagagtttgttggatcaacatcacgagacaaggtaatataagtaaggggattccatgcagacttttctgctgttttctgagaagcttcttcggctccatcaactttagcagactctgaaacattcttatcttgattctcagaaacatcatgtccatcttcatcttttttaccagaaaggcgacgcaaaaaagttgacaccgcaactgcacccttctccttcacaaggttttttaatgccaccgccttatcaactaccttttgggtctcagaatcaagatctaaagatcgggtagatgtgcttctgctagcctccatctcaggaacctctgttccatcaaaaaccggctcttgctcattctcctctccaagagtctcctctgtagtttcatttgtctctttttgagattttgatgcacaatcttcatcagtagattccagagccttgctttcaactatcttctgctccaaattattatttttcccatcattgtcttcttcttgaacttgggtctcaattttcacacagtcattcctctcatcagcatagtcctcttgtttctcatcagcctctatgtccagagatttcatttctgatacaggttcatttttttcaacaacaagtgcttctccctccaacttctcagcagcaagaggacttgtgatttcttccttcattgattcttttgtttccataaagccaactagataaataatcttagttctaactcatgaaaacaaagccctatatgtgttaatacacttgtagtctgtgactcaatagagttatgtagatcctgcaagaaagaagaaagaacaaacaacaacaacagcaatgtcataacttgcgaaattccaaatgcatcagatatttctatcaacacatcaagtgacaaaatttcactttattttttaaaaaaaataaataaatgaatttacatacttaataagctctaaactaacaaaaatctggaaaaaaaaaaaaaaaaaaaaggtaaatcacttaacgaaaagagtgcttaagaaatagctagcataacgtcagccgggtaacaaaaacggatttgtgtgcaacgattaaaccaacgccatacatgaatgcataatccaaattaaaatacaaattaacccattttgattaagcttatttgcaatcattttactttctttaaagataaactgaaatcttgattcaaaattaagatatataatacatgcctaaaacaacaaaagggtattaaataattcaacggtaggttcccaatcagctactaaatacagcatagtatcttgaaataattgttacttctccatcatgaaaataatgtaacttcaacttgaaacagtacccatctttttatgtttaacttctcacccccaatagtccctcatcattgtctaaatcaacagagaccataaaagaagtaacatttattcaaattcttcatccctaaaataaaaccacaactcaaaaccctgttctttactcaaatttttcaacttatgagatattaggtggaaaaataacaaattgatcgggtgtcaatgtccacaaattgtgatgcatgaaatgaaactcaagaacatgaaaagtaaacaatgaaacaaacaaaataactcacccaaaagaaagaaagaaagaaagaaaagacgaaagaaagcttacagatctgaaagaagtgatgatgatttgtggttgaagattggagaatggtcccaatgcagtaacgaatatatatatatattatatataacgcattaattgtctgaaagtttcaatatttgtattaaaattggaaaccacaggagagagagagagagagaagcgggaagtccgtgggctgaaaattaacatgaaattttggtgaataatcttattcttttttgactttgttatcctaatggatttcatacacgtgtcccctcatcttcattttctctatttcacccttcattcttccaaatatttacaaaattacaatttgtttttaagaaaaaggttaattaagatttttactccatgaactttgacatgtaccaaattatgttcttttaattttttttagaagttaaaaattcttcctgaactattaaaattgttgatttaaggatttttgttcaatttcattcaattttactaattcggtgattatccatgtactaaatcatactttccgaattttgttatctaccaaattatgtccctcgaactttgacatgtgccaaatcatgctcctgaactttcatccatgttagacttttcttactaaaattagacaaaaatcctcaaatctaacaatctaaataattcaatgaggaattttaacggtcttcaaagttcacgaggtatgatttggtacatgtcaatgttcaggaggcaaaaaattctaattagcctaaaaaacacaaaaaaaatagaaaattctacaatgcacccctaaaattggtgcaacaatgtatccctatctgtttcagtattcgaaaagaacttgttagttgttagtctaattttttttcatgatcgtgtacgttgtagttatttaagacatctagtaaaatttaagaaattcgaaataatttataatatagaaagtagtgttcaaacttcaaacaatctattttacacatgtataaaataaaagaatcacaagtgcaacaaactgtttgaaccctatattcgatgttttaatttcttttttttttttt

SEQ ID NO: 38078 - DNA, 2367 bp, Cannabis sativa
  modified_base (1142)..(1143): a, c, t, g, unknown or other
aaacaaaaagacaaaaagacaaaagaaacattttgagtttaatctagtttgagtttaagaacaaaacggtgcatgatgttctaaacaaatttgtttagaaaccaataccaaaatgattgaacagccaatgatatgttgataaaatacatgcatatatagctcaagtccacctcactgatccatccctgatcccagaagactaacaaacagagcacagataattgaacagaacccttttccaaataaatatattcaatatgctaaaataggcccccttcaacaggtggggtgctaaaagatattagatgtaatatctgcttacctgttttatatgtgctgtcagctttgatttgtgcgcttaagcaaatccccattgaaaccacccaatgaaaaacaaccaaattacccttttgaactcttcctgcagatcaaaagattagagcctcatccaaaaccaaacaaaggcagcctttgaagagtaaatatagacagatctaatagttgaaaacatttttcatcatttttatggcaaaaatgtttttatttttcttaaataagaagttagatttttgtccaaaactcaaactaattgctagcttttctttctatgagtagaaaattgaatgacaaaaaaacaacaaaaaagtatgaaacttccattcaaaaaacaaacaagaacccattagagagaacataaaagagtgccataaataaaccttactttgtcacaaaaatcaaagtgaagaaagaaaggttacatgtgttatagtttttaatagtcgtctgggaactaagaagtaacaagttcagagaaagctttaccagaagaggcagacagagcaagttacgttgctttatttcgcctttctggtaaggtttggttgttattgaaggctgagaaagccgataaaaaaggaaggtgagatggaaaggattgcattaatggcagcctggtcccgccctttcgctcaacgttttatactctctttggctctttctctcttaagcccttcgattttgattatgaacttgtccattcttcaatgcatcatagatggctcagctcgttatctacagctggcttgtttctttcaaagttttgttgatttttcttaaaaaaaaataataataatactaataannataataataataataaacaaataataatcagaagtttttttttttttttttttctgaaactcatttttttttaaaaagttaataataataaattgctggtaacaattatcaagtcaatatttgactgaatggagcatatcacacgtgctagtctttttaagaaataaaatattagatgtggtttatgaaattttatgagtttttatgaatgaagaaaatgatagggagattatttaatactcataaaccataatactgtatcactgatcatcattggagtgaatattctattgtttttattatagtagttaaataaaggattttttttttttacaaaagaaaattattcaaaaaccgtaaaagtgacacaacaaaaacagcagcaaaagtaatacaatggctggttatgttggataacaggaaaattttcaggggtgataaatttgttatttgctgtgatactgtttatatgctgtaaaaaaatagaaataatagcgtttacaatagtagatggtattaaagatattaaagatatatttaaatacagattgtgtagcttaaaaaataggaggatattatacaagctgaaagaggcatgtatttacgcctaattcagtaggacttttagtgtgagtttgggctggttggttgtggccttggtaaatccttgttttgtctttgattaataaaattttctctctagtaaaaaaaaaaaaacaacagcaaaacacaaactgctcaaactaactaccaaccctcaaatacatttacaatataaaaatcacccctcctcaacttggtattttcgaactccaaaactctcaacttaactatacttttaatcataattacacaatttttcaggtcaaaatgttgactcaagcaccagttctgcaactccgaaaagtttccaggccaaagatggaaactaagccaccttccaatccctgcaaccacctttttagtgaacatacattccataaatagatgagtgtgagactcatcttctttcacacaaggctggaggaatcgacatcactttgctcaaatgatttctagctaatagttgtctgttaataacttgcaagtatataaacctatgtttaggaataattaacttgtgccaaacattggaagcatactccactttattaccagtaagtaaggagatataaaaacttttcactttcaatttacctctccttttggctcgatgcaccttct

SEQ ID NO: 38079 - DNA, 2589 bp, Cannabis sativa
tggaaataattcaatttattttaaaataccattttggaccctgtgttttgcaaaagttatcaattaaaccctctgttttattaaatgacggaccttatatttttataaatgaaacataattggaccctcatctcaattatggtcaaactttttttgaatatgactaaaatgaccccagattttcattttaagttaattttttaaatatataattcattaaaataaatattcataaatcacaataaaaaaaacaaataagtattatggtactacctgtctattcttctctctcttttcttttcatcttccttactgattttccatcttccttcacaaacaatcaacgttgaagacaatgcttatgattagagcaaaaccttgatctcattttgctttaagggagtgaaaagacgattcttactagaaaacccaacagttaattgtttgcaaactcattatatatttttttcctagcatttgctttgttattttactaaaaactatgtatgatgttgttttttttttctttatttgaaaatttcctcccttttgtattgttggtacttttttctctgggtgtggtaaaaatttaattttgaaatattcttagctttttatttcaagtttttttttttttttggaagtttacagcttttgtgttttgcaatctccaagttttgatttttatttgataataatgtattacagattaaactttgtgttgtattggtactttctttagtgggtgtggcaaaaaaattgatttttgaatattatcatcgttgtatttcaagtttttttggatgttgaaactctttgccttgctgtgcactcttcaagttttgatttttatttgattataatgtattggaatctattgttatttggtcattgttattttactagttttgtgtgggtttacatcgaatatttaagaggtttgaataatgtttttgaaattattgatgaacactatatatattgatatatgttttgttttatttttcttctctattaacacaggttaaaaatgagtagccatgctcttgtagtagctgatataagtactcctacccctgtagtagctactctaagtcctagtagaaggaagaagcttgctagaatatcttgttgtcctcctcaaacatggaatctaaatgataaggatgttgaaaataaagaagaaaataaaaatgagtctcttgatgcagcaactgccccaaatattgcagccacaaatatttatgaatctacaacctcatctcaactaattgagtatcatactctaatgttcaatgaccctacaggtaatgtgttttggtgtaatattgtgtgtgcaattagtgattgtatgaattatttagattagcttgatatgttgaatattatatggatggtaccaattatttaggcgtgatcatcataaattattaattaagttgtgaaggtatcaacttttttagtttacggactttactaagaaataactttaagtttcataaatgacaaattgaaatgatacacgactgtagtatatagctaaatatattttatattttcatatacatatatcatatgagaaaaaataatggatggcattttatttttattttttggaatgttgattacaattaattaagaaatttgcatgttcaacttctaacttacagttttctcaaaaaaaaaaaaaaaaaaaaaaccttctaactttacaggcccaggttctagctacatgcatacaatttgttctgcgagtatatcacatgaagaactatcatcacccactaatgatagtgatttagaatggaaacaaggaaaacactatagtgaagaagatgatagtactgagtatgaaatggtatcactgacaaatagtgatgaggatgctcatggagactattatgatagtgatgaaggtagacatatgaacttgaagaggataaaaagagagggagtggatccaaactgtaacattccatttccccattctgatcaaatttatcaagatggtaaaatagtgcttagactattcttgagattccaagactatcgccactttgctgatattctaaaagattatgcgattcaagaaggttttgaattgaaaaaaattaagcatgaaaagagtaggctcacatatggttgtagagcaattggctgcccatggaggatacatgcctctgtcttgcctgatctgagtaactttgttatcaagactcttactgaagaccatacatgtcaatgtgtaactagaaatagaacagctaacagtacttggattggtaagaaattagtgaagacattacaaaggcatccagaaatgaaagtaaagggcatcaaagctcagttgagggatgactatgggatagatgttgataatagaaggctatggagaggtaggagatatgcaagaggttaagttcatggtcggcatgcccaatcttatgggaaacttagaaaatatgcagcaatgattttgcacacaaatcctggaagtgctgcaatcatacaatctgagttagcacatgaaaaaatttacaacgatgaaggtgatttagtgcaatctgttcccccagtaatgaaacctcg

SEQ ID NO: 38080 - DNA, 3334 bp, Cannabis sativa
  modified_base (3217)..(3220): a, c, t, g, unknown or other
attaatatataatcttaattttgttttaatatttttaattatagaattaaaatatttaatattatatttaagttttactattattttaactaatttgatatattgtgttgtactttttagatttgttgtgtgttgtatttttcggggtagtctattcatgcttatgtgtcgtgctttgcgtgctttttatgcattgtcgtgcttaaagccatattttttatgccgtgatgtgctaatttgtagcattatactgtgtgtcatgctaaaattcgtcttttttcgtgcctaatttaaaaaatctaacttgtatttacaacactacattttagcatttcacttttatatcatagcacattcatgagataagacttttcaagatccaatgcatcctttttgactaacgtgcattgttacatctttttccccacttaaattcctttcatttattttacattttagtccttttaaaagacaattctactttggtctcattccatatataaaaacacacaatgtagtcctttactcctttttccaatctaaaagccaagctagctagatatacacatagctcactccaattcgttcaataaattataattaatcacaagaaaatgaagaagggagaattggttttcattcctcttccagctgcaggtcacatagtctcatcattagagatagcaaagcgccttgttactcaagataatcgtctctcaatctcaatcctcatcatcaaaatgccaaacctcaaccctccaactacccaatctctccttacatccatctctggtgtcgaacgcatcaacttcatcgaaatttcagaacaacatactaataacaaactcgattccaatcctactaatactatcaagtccatgacttccttcttagaaagcatcaaaccccaagttcaagaagcaatcaacaatctcgttaactgcttttcaaaccaacccagctcgcctaagctagctgggttagtcatcgacatgttcttcacgaccatgatcgacgtagctgatgagtttggaatcccttcctacgtgttttacacgtcaggagctggaattctcaaactcatggctcacctcgaaaccctaagtactgagcataacaaagatgttaccaaatacaaagatgaacaagatgaagagcttgtcattcaaggcttcgtcaacccaattccggtcaaagtcttcccaaaaatggtgtttgataaggtatcatgccctttgtttcttagtcaatatacaaatatgagaagagctaagggtattttagtaaattcgttcattgaattagagtcaacaataattgatctattccctccaatttactcggtgggacccataataaatcccagccctaatcaaagggagaaagaaaatgaaagcgtgatgacgtggctagataagcaacctcgatcttcggtagtgttcctgtgctttgggagcatgggaagtttcagtgaggagcaagtgaaagagatagccattggattagaacaaagtggggtccgatttctttggtccttaagaaaaaaaggccaatcattgaaatcagaagactacacagatttcaacgaagttcttccaagagagttttttgatcgaacggctgagattggaaaggtcattgggtgggcctcacaagtgaacatattgggtcattcctcaattggtggattcgtgtcacattgtggttggaactcaattctagagagtttgtggttcggtgtaccaattgccacgtggcctttgtatgcggagcaaaaagtcaacgcttttgtggttgtgaaagagttggaattagcggtggagattaagttggattatatgatgagtggtgaagatgggatgatgattgtgaagggtgatgaaattgaggtggggattagaaaattgatggaacctaataataatgttattagggaaagagttaaggaaataagtgagaaagggaagaaagccttattagaaggtgggtcatcttattcttggctgtctcgttttgtaaatgatgtgattgataacatatgaagttaattgtcatcactatccaaaaaaaaaaagagaattgctaaagagtactgttggtgcctagtactatctttagtgtcattctgttattgctgcaattaaatagcgggtcctatataatttaagaaaataagttttaaggaatatcgttaaccaattataaagtgacatttatggaaagtgttgggcaccgctatccaatagcaatgctcacaaaagaaataaaagttgtttgttgggttgattagtgtctagttgtgccctacaggttagtaatatctatatgagacttaatatttaatgagaatgttaattacaattttttatcaatctctacgctcgaaattacatgtcggaatatttttttttaattttttttatagaggtattcattatagttacagtattatccctgtaaatttttgaaaaaatcttaatagtttataatgctgaaaacagagtttttgatattttagtttctacacgtgtttacaaaaacttcaaacgtattttcggtactgtaaattatacaaaaaatttcaaacttttacagagatgatattgtaagcataacgaacaccgtcatgagaaaatattaaaaaaaatatttcaatatatatttttagatacagaaataaactaaaaacttataataaaaaattgataacagcactcctcatatctaattcatatcttttaatatttatcttcttatgcatggttgtagattagattcgtgtatctattattagtcaaaatggattaagaaaatattagtgcaattatgattatttgttttttatcgtttgaaaagtaaagaaacataagtggtggatatatgtagtagtgttatttatttatttatttatttgataatataacatatcattgaaggttttttcttcttgcaaattgcaattgtagaatcggatttaactatataacttttatgaaactttcctttaaaattacatttattactaaaataaccaaaaaaaaaaaaaaacaaatattacaataatttgatgaaaacagcatcgattaaaaatagtttaatcgttatattactaataaaacacaatcaataattatgaaaaatacaaaactacaaaaataaaaacaattgaggagttcgtttggtacgcaatattatatcgtattgtattgtataatannnnattaaattatattttatgtaatattttcatgcaaaagtatatgtggtattaacttttatggatacctaaatatataatagtttacgatataaattaaaatttaacataatatta

SEQ ID NO: 38081 - DNA, 2666 bp, Cannabis sativa
atatcttgacttgtaatataagcaccaatacacctattcacaagcctaacccatgactgatgagtatgagtctcgaacattcttgactataatatgagtgataataatattagcctatactcagtactctcgtcgtactgatgtgatagcatcaatccatagtataagtacaatcaaccataataccagcatatactcagtgctctagtggtactgatgtggtagcatcgattcgtactttactaaattgtcaaacatatatcctatcggtatctaggtgcaactctatgtacacaaataccgctcttactgatatgttatctaattggcaaacataagcatgtacgctaaacctatgcatatgtgcctgtgttataccaatcttacctcaactacataatcaaatgtgtcggtcaacctgagtggaaaatactactcgacgatctgagatcctaagtcacattcatgtaaaatgagtaagtatctagctaaaacactttcaaaaaattaaattcaaaactaaaatttttcttatcgataaataccgtagaaatactctaaatattgagaaaatgtgaaaattgaggtacccaaaaaatcacccctaattagtggattggatcccaaaacggttcactgtttccctgggtcttgcttggggaaacggtacactattttgtagcagaaatctcaaactcaaggtttccttctttaattcaacccaaactttactaaattttataaaacacctgaatgtcaagttctaaacacaatcctataattaaacacatcatcaagcccctgaaaataaaattacaattgctgagctaagcttgagtttaaaagctcaagtttgctcaactctcaccacaactgccaaaaacctctcaaattaaccttaagcactcctaattcaacctctaaaataatctttaaactccccaatctccgacagaatcgaaatccacaaattcatgcttaaaatcaaactttaactaaaaaaatttgaagaaaagagttaagctaggttagctttgatcttccattctaattctacttgattttctaattgatttctttgaaaaggaggattttttggtctgaaaatagttgtttctcatggttatttcttgggccaaaagagagaattacttttctgtttatcttgtttttgctattgattattctagtttaattatgaagcatatatcccataaatcacaatataattcactaaagaattctagaataagtttgggtagaaaattactaaaatgccccttacttcctccttaagtattccccatatttagggtaaaatggtcataacaattaccccacacaatctcaatattctaactgtctataaattttatcccgctaattttaagatactaagctgtatctaagtgacactgtcgacttccactaaactggacgtaaaacataaaaataccaaaatttatatacatcatatatagaattcaataaaatctctgtaattgagaaattatatcattaatgtctaattctaacaatagagcttattttctactaaagcacatattatcataaataataaataaatcaatgaaaatatgttaatttttatgtctaattatgcgatcaatacaattctaatgcaaagaagagaaaaacttaaggccaccttaacaagaggtggcataacactatttgtacaattaatatcgagctttgcgcattttaatttaataaataacataaaactgctaatcactcacaacaagccacatcagtatggttttggacaccttaaagtatctaataacaatagtccttaattaatcacaaaaagtcaagattaaaaaaattaccctaatttgtctgtatctcttcaaaaattgaagaaattagggagaattaggatagcgattctcaacgagtcgacaatgaccaatttcatcaaagatgtggaatcgttcaagaaaggcataacgaaatgcttcgaggcactcgacattgacgatgatagtatgctctcgcaggaggagctttgcaacggattcggctaggctttgccgatcaaaattgtgggaaaggaaatggccaatgatctgttcaatatggttattgggagattcaatgtggaaggaaagggcagcatcggtcgagacgagttcaaatccctctcgaaggagatgttgatggccatagctctagggatttgaggtactccgattcttcttgtgcttcatcaagataacttgcttctcattattgttgatcatgatttgcctaaattgtcaagaaagaaagataaaagatttgatttcttttttctttttcttgtttttacaaatatatataatatatatatatattagttgaatctccctggacgactaactttgatatatttaggtgttatttgattagaaaaataaaaatatagaaatataaataaaaatgagaatgaaaataagaatggaataaaattatatttaaaatgtatataaagaaattaatgaaaaaaatattaattttttatattttgtattggaatgatttttttttctattttaaaataaaatagtcatttcactaaaatgatagaaagattattctattaaaatgatattctaatactataaaatgcaataaaataatagaataaaataaaaatt

SEQ ID NO: 38082 - DNA, 3084 bp, Cannabis sativa
tcaactatcatttttgttagactaatctaagagactagagttttaacacattaagatattagattataaggacttgtcatttttctttattcaaattagcttctggttttgagtactggtgtgcatgtatgatcgagacaacatttcctaacatattgtaatggaatcattattagcttacactttacaaacaaatccacagcaagaatacaaaaaataagaagaatcagtaaaattgctaataaactcatcaaagtgacaaagtcatcatcattacttgagagccaagaagaaaagaaaaaacataccatcctgtcctagctggtaaatggtatccacatatcaacataacccatcaaagaacgaggaagcatcttcttccatgaatcaagatcaggcataggaccagtaagagcaagagaactatcttcatctctattcccaaggctcaaaaccaaaacctttccaccaaaaacatcactcatagcctttaatgtttcctccatcactactttcccatctctaccagaatcctcagcctcaacacagctacctccaacattcaccattactctcccaccttttctcaaacactttctgagcattacccaagtgtttggatcttgaagctcagggattacactacctttcgaaaacaaatcaaccaaaatcccagaaaacccatctctagtactagctttcaatgcatctccaatgtagataaaaagcctatcttgatactcgttctctagctttgaaaccccaaaatactctcttcccactgaaatcacagatgggtcaagctcccaaccacgaatcacaacttctggatacagtttgagaatcaaacttgctgctgatcccgccccgaacccaagaattccaatgggtcccgggggcagaattggcggcaaggtagcgaaaacatcgaaatatgtttgggttagtagcttggaacggaaagagatgctgtgaatgtttccaggggcatctaaaaggaggagccttgaaccggcaaaagggtggtcagcttttcgagaaacttccagaacccgaatgtagttgtacctggacttgaatctaacaatggttttcacgtcatcaatgggaatgccatcgtcttgtgatttggtttgaggattggagtggtggtgttggtgggatttggctattaacaagctgaaatgaattggttttggcattgttttgagtgggagacatggtttggggttgtttggttggtgagaaaatgagagacattgaagtggggagggagccaaagactggatttggtaggagctaaggagtgtcatagctatctgtaaaatcacaagaagatcaaattatgaaccaacaaaaacttttctgcctagaaatgaaatggaagaattctaacatatataatcttctttggttgaagcaaaaacacaaacacatcatatgcattaaaataaacacatcatgaattatatgctctatatcagattattcataaaaagagactgtaacccatttctaacaagagaaatttatatacattttctcatattatgcatgaaaaatctttcaacacaaaatattagctaattaagtatatgatgtttgaagaaattgaacctgtttttgaaattggcaatttagcatcatctcccatgaaagtcaggcgttggcgttcattttcatatattaaagtgtttatttagtaccttattagagtgttgttaaactaagaaattttagaaactaatcatctcattatcacagttgtacgtactcttgtcttgtcccaaacactttctccaattcttatttttctaatgatagctaccttttttgtttcacctatgcattaccctcttaaataagacaccaaatatgattcatttactacaaacaataaatcacctaataaaaaatcttaacagttttttagcaaaattgttgttaaaatttataagtttcaagagctaataagggaaataccagtagaatgatacaatgtattccactatgattaaaaaacttgtcaataatagacactattaaatttacaaaaaatattcaattttgaaaaaattccacgttccaacactaaaaaaagctttttatgataagcacctattatatttttattagtataataaatatcgagttctatataacttaagaaaataatttttagataatattatcaatcaatcgtaaggcgttacttatcaaaagtctactgctgtcaaatagcaatgctttcaatttttggtaaaattaattaaatttctattgtcgcagtgtactatggcaaaaaaaactcatgagtaacatgttatgaaattcgttaaaattttcaatataagaaaaatctttgttcctacactaattaaagtattttcccgatagaaattattaagaaagagattagagttttgtaaattaatttttgacaaaattaattaaagttttaaccactaaagtgtactatttttataaaactttttatgaattgttgaattcgagccgtttttacaaactataaatttttttttttttttgaaacatgaaatatcaacttcattgaaataaagcattcaaattacaaattggcatgaaagtctgccagaacatcaacatcatgaatgctacgatcataatagaaacaagagcgcctagctatgaagtgggcaactttgtttgctaatcatctaacaaaacgaaaactaacattaggtagagaggataagagaactttacaatcatgagtaatcagaccaaagacaaaagacatttgttgaaaactagagactgcttgggtacagtgagtagactatcaatttccacctctaccatattctaacctttatctttgagccaaaagagtgcttccttgaccccaaggcctcaacaacctcagccgagaacgagccatgatagtacttggccacgaagtcaatgaccctgccttctgaatcacaagctacaataccaaacccataggaaatgtctttctcaaagatggccccgtcaacgttgatcttgatcgtattataagcaggtttagtccaatgctcaaagttgtttccatctcct

SEQ ID NO: 38083 - DNA, 1361 bp, Cannabis sativa
aaaaaaaaatcattaaattatcaatttttattatatagtcacattatataagagtaatattctcaagttcaatctctaaaattcaaatttcaaattatacaaaagaatattgcctaaagttgtataaaaaacttttatgtaatttattagtgaaatcaaacatataatcaattaataattgtgatcaatatgaaattatattttcgataatatctttataaaattctaaaatgcacatatacaatttttttttaagttaattattgggaaacataggatgccattggtgtatctaatgaatattgtggcttaataaataaatgtcaggcaaaatcatatttaaaattataaagtaaatagtttatggagcgcacatgaaggagaataatataatgtacgaattcgttacttcataattgtttgtttataattattaattaatacataatattaatataagcatgcatgtatgtttctacttgtttgtcttatataattgtactgccggtttttaccaaacagattagtaaaaagagacacaattgagaaatataattgcagattttatttgggcatgactcttcctaattttttacttaattagagttagatctaattgggtgctttatacacacatttcatcattgcgtcaaacaaaattagtggtcttcctgtaaaagtgcatttatctcatcatatatattttttttatatatacatttatcattttgtttagttttcaccatcttatgttgttggttctgccttataaaattcacttctaatttattgacgagttcgtccattatttggtttcatgacactcttgattgataaaaatgataaggacgaatcaacttttgtcagtagatctttaattattaggtcactcttgattgtaaaattaataattatatatttccaaaagtgggtaattttcctgttaaaggcccaactttgccagatttattcttgcattggatgaacaaacggtttttcttttaattgattaataatgtatgtatttatatggttgttttttatttgtagaaagaaagggaaataaatagttaattaagtaatgaatatgttttgtaatgctggacctagatggtagctaggcctaaataggcctatatttatgcagttaaaagacattgacaccatcatcattatggtctaatcaaattcttatttgtgagcttactattacgtattagtatggtcttgtaagtattcaacaatattttataataattattagattaaattatataagacttagtgctagacaacatattttaatatttttcttattttgagaacataaatctttagtcttatttccctattgtgcacta

SEQ ID NO: 38084 - DNA, 1382 bp, Cannabis sativa
tgtattatttggttgttgttggtggtgcaggtgtaattaccagttttgttatggatgtggttcacaatggactgaaacccatggtagttgtcaaagaaattaaagacatgaccacttaattatcacactattatggtaactaaaaagaggaaggaagaagaatatattattgacttgtttcttttcttaccataagactttcttaccattttgtatttgtatttgtatttgaatttgtatatgtattttggtatttttagtcatattttctatataacttaaaagttgggtctgaatactgatgatggtgctactgctactgccacttagaaaaattcaaacccatgtgagactctgatgtgatctttgttcaaactctcttttacaaaattagtcaattctctgtattgttgttcactctgtaactcacttattcatcatggcattattttccatggaaaatggccaagctacccgggtctttcatttgactctttccttttaaacactcataaacttcttcttctctctatctggaaaaaaatggggattttggaaatcccaaatttcagttttaaaatattcccatggttgttgtttctctgcctcattctagccacctccaccgcagacgaatccgccgtaatgtcaaagcttctctctgtcatatctccagcaccaatgggttggtcgtccattgccgactactgctctgcctgggatggcataaagtgtagctcaggcaaagtcaccgttattaacttaagagatatgtctctcaccggaactcttccttccgatctcggtactctgtctcaactcacaactttgtctcttcaaggcaatcatttcaagggctctttcccatcaatggccaatctttctcttcttcaatcaatttaccttgatggtaacagtttcacttcaattccatctgggtgttttcaaggactgacaaatttgcaaactttgagtattagcactaacataaatcttgctccgtggagttttccggcagagctggtcggatcttctaggttggttactttatatgccaaaagttgtaatatgtttggtactattcctgatatttttggctcattctcaaatttacaagatgtgagactttcttacaataatcttactggggttttacctctgagttttgcttgatctgggattcgaaatctatggcttaataatcaacaaatggggctttctggtaccattaaagtattggccaacatgaccagtttgtatcaggtttggcttcataagaatatgttcactggtccaattccagacctttcgaatttggatacattatttgatcttcagcttggtgataatctgttaaaggggattgttcctgatagtttatc

SEQ ID NO: 38085 - DNA, 2259 bp, Cannabis sativa
caaacatattggattgtcattattcacttttacactattttagtagaatgactattcattttgaaatagaaagaaatttcatttcaatttcaatgcaatataaaaaaaataataataatttttttatcaattttttaatgtattttaaattttattttattcatattctcattctcattcattagtatctttaaagtcttaacctccataaaaattaataataaattaacaattacaaatgttaatacaaaataaaattttcaccatgagtattgttgaaaaatataaataaaataatttgttatttgtcccacacccgctaggagtataatttttttaacctataaattatataaaaacaaaccttaacacacaaaaatataagagctcagtaaaatttaggttttttgaaataaatacaaacaacactacataatatgaaatatcctaaaatcaaatggagaagttattcactcttacatgtccccatgtgttattgtgtagtctttgctttggtccctctttatttggaagttatgtgggccaagatatggcccacatttgagaagtagtttaaccttgttggtgtcttaagttgggcccacatggggcccaaggattgtgtagcccattgacaacccaattaagatggtaaaagccatttctatggtactcaaggccgcaaagcatgcttgtgtgtgggtgggtccaccatatttaaggtgtggtcagtgcccaaaccctaaacgtttcttttggttttaaactttggtgtgggcccattatcttccatttaagagtttcttatttgaaaaaaataaataaataaataaaatagacgtgtataataaaaacaacaaaccaaacaatttgtcatgtattccaaagctgcctattacttggcaattttgacaaaatagatgatttatgaaaaaattaaaaagtaaatactttgttgtatgtattttataaaaattattgattaaattatttgttttattaaataataagttagaccttgtattttttaaaattgtattttgaattgattttttgtcaaaataaaatttaataataacttaatataaatgtgttatgacaaaactgattacattttcaatatttgttagtatgagaaattgtcttcaagttggttgtgttaaaaaaattatcaaaaattgagttcatgtcctatttatactattttgaaaaatacatagtcaattttgttatttaacaaaataaataatctaattagtaatttttgtaaagcataatgtttaaaatagtatttaccaaaaaattattattattattattatattgttataataattattattattcaattactttttactaataacataaatgttcgcacatgacatttaatttttgaagtgaaccctaactttttatcaaaacacaccacacaatcctcaaaacacacgcaaatcttaaatgtcttcatgtgatgttaactcttttttatgttgttgcattatatgaatataggaaatgtattttattcctttattataaaaaatgtaaccattctttgatgtattataaattaacataattattctctaatctactataaattttatttttgacatattttaattaagatagaaggtactctacattcaatttgatataatctgattttcaactattagatcaactcaatcttaattcaataattataaaactattttgttcgtaacagaacaaaattcacaccctatattattttttttataaaagaaaaaaaaaatataacttgaaattgggcatttaaagctctctcattaacaaggtgggaaaacttgtgaattgaaaatagtattgttttttgaatatggaattaaaatagttgaaggttggtggtggtgatggtaactaatcaagtgttgtagttatgtttatttgatacataacgtgtcaattttagggtcatctattcatttgtctaagacaagtaaagagtcttaagtaagaagagtagtattctagtgtagtacacattccaacttcattcaaactacactttcctttcctactcatattttccttcttgccaaacaactcacacacgtttaactagtggacctttttctttcaataaataaacaaactagtggaccttttagctctagttctactcacttgtacttttcttttcattttgtttttttgtaagtgattttcctaactcattttcagcaagaataatgataaatattagaggggaga

SEQ ID NO: 38086 - DNA, 3080 bp, Cannabis sativa
atataaatatatatatatcatctaaattaaaatctgttcattttattgccaaggtaactgcaaattaattactaattttttttttttaacaaaaaaatacaagcctttacgctactcgcttaacagctgactaattaaatggtaaatcactttaacatcaaaaaaataaaaatatttagttcaatcacttaaaattttatactttgctaagtaattgtaatcctattactgtttaaatgcaccaaatgaattcatgtcaaaactcaacattaaccaaataaacctcaaggtttaaaaaagaaatccaaaaccaaaacatctgtcgacttgaatggatacaaaaatttccccacttaactaaaatttctatccaactacaggaaaacaagtccacactcacctaagaatccaattcatatacaaactaccaaaaacaaaaagaatttactttaagacatacgactacaacgaaaaatgcaagcgcataaccaatttcactttcttccacttgctccaactcgaggcttgcccttaacctcgggatcctgcatccaaaaataaaagaggttgcactttgtgatttgtattctagtctttcccattacattctatttgactttaaaacatgttcgcaataacatacctgaggcatgtgcacgtatatggatgtctttgctgttgctggattgtgattttctgcccctttgctccagtcatagcagacctacagagaagttgaagattctttactaaatgatttttcaagacaccaacaagatgttattggaaggtttatgagttggaaatactaggctactgtaatccaatagccatatacaactcttggaaacctggcaacaagtacagcttttcatactggcaagactttaaccagtacattatcatgatacatagcatttagtgcaccaatccaacccacttgatcaaatttttaaattttcacaattttatgttcctcgtctggtttttgaaagatgcactcaatttaatagttaaaagagcatgtaaccatctcaccctatcggggtttcgaccaaattaaaacaagaaaaatatttagctgtttccattctaaagctgcagcaaactgaagcttgaattaaatgttccaacttagtaaaaacactagatctacctgaaatctagtataaagcatctagagaaactctgttattacaacaaaaattacacacattaatcattatgttagaaactaattatttaccccaaccagcatttattgcactttgcactcaaaagtttcagaagtgaataacgatttagtagtgacgaagtatgggaagaagatgatcaaatcaaactaaaagaaaatgaatgtgaaacataccgcgtacgcataaagtgaaccatcattgttaaaagcactgcaaggtattggttgttggcatcttgccattgccttgaaaaaaaaaacatgcattagagttggatagtccaaatgtaagggaagacataatgaactcacttatatgcatatacagttacaagtatttacagaagtgcatgcatatacacagtgtacacacaaaatatatacataaatactaattatacagatagcaaacttttacaaacagattaaaatttaaaacaaatctggaatatctaaactttaagaacagtttttcaattctagtgctcatttgtaaattcctcattacttctaaaataattaatgatacataaatcctaaccaaaaaaaaaaactaatagtacataaagaagttatgtatataaaaggatctgaagatcataattgagtccatgacattttcaattcatgacaacattctatggtcatttaaatatttaaagagaaataactttgaatgcaatgaaaatcatagggaattagatgtcctcctttcccagaaagaatgtctacgtcaataaaggttgtagaaagcaatatttatgccgaccacacctaaactttacttcctgaatattttaggacagtagaaaaactaaaaaataaataaaaatgtaaatgcaaggatatagaagatactaaaaaataccttaagtctctgtttactatctttatcccagaaattaaaggcaccatcagagcctgctgttgcaaatgtgtgatgcacctgaaaaataaaggcaaggaatgtgatcataagaaacatcaatgaactgaagacaacacaggaatttagcctgacaatctgatcacatatcctacatccgagttgattttatttatctcgagcagaatgtcaatacagaatataactgaaaataatgaaccctgataaaaaaatccaaaaataagaaagccccgtccaattaagttgttctactaccaaccactaatggaacaaggactactgatataatgcttcaaggtttagaagggtttagtattatgaaggaaatcaaaatcaacataagactcaaagtaaaagttgatttaaagtacaattaaaatccttgttagaaaggatttctagattatcgatattatgaaccaagattttaggatcttaaaggtttttcagtatccctagttccctaatcttatcactgggtttagataggattttatactatctcttaagataagaccttatttttatttgaaataattcttttaaatctaaatctttctgttttaaacattttgcctctcaataccactctgttgtttagtattttgatttacatttcgaaacgaggtgaattcaattctttctgtatcgatttctatgaatggtatcaaattgaatttcagttaagaagaaaactatagtcaagagataccaattcttgcaagtttaagcaagcaaggttctaaagaatctaactcagcttaaggtggcttcctttgaatgattcctctcaaaaatctacgtagcaagctgagattgtttcatatacataactcagcttaaggaagagtgttagaaaagattcctagaatctcaatggtaatgtacttttttatagtatagtctgggagctaactcaaggcggatgattgatgaaacagcctagttcctaatactataatttagtttagaaataat

SEQ ID NO: 38087 - DNA, 3069 bp, Cannabis sativa
  modified_base (488)..(497): a, c, t, g, unknown or other
agggtccgaatccgggtttggggtcccgattagggttcggggtcagggtctgggtctgtggtccggagttagggtcaagatcctagtcaaggtttcgagtccgaggtccagggtctaggttcaagtccgaggtttgggtctagttactgaatctagggttaggtctagggcaggggtctggggcagggtcctggtacgagtctgcggtctggtccaaggctagttcctagtctgaggtcaagatctaggtcaggtctggggttcaggtttaggcccccatccttaaacccgaaccttttctaaatattataatacaagctaatatgaatcatttgttatatattaaataatacaagttgcattgtattaaaatttatagtcataataattaatacaatataaaaaaaattccaaacatagtgctacttattatttgctacgatcttatacgacttaccaaacgaatccctaataataataataataannnnnnnnnnaataataataataataatagggacagaacatgaacatggcttgtgattttgttcattctcaactgaattaaggttgtttaaggacaacatgctgcaaaagacagatgaccaaggaaggaattatcttaatcaaaacttgttagaatgattagtgtgaatgctaattaataagcaagaagaacatgtcagtttagtaccttgatttgtgtcctattgtatgtgtatgttatgtggatagaatcatcactagcttgaataacagctggatatgagaactccattaacagattctcttccaatgtcaaagcttcgtgccacgagtcgccatcatcatcagatacagcaactttaagaactccccttgagattgtattgtaaacaagtaataattggccatttctcagcttcactccatcaatgcctagatgattcgtcattcatagatgttcatgtaactcgtcttgaatccaaccaaaaaagaagcgacaaagacaaagacagagacttagctgctaacctgagtttggatttgggagatcagttggttgagcgaaactccagttgtatccgccatcatgggattctgagacacacactctaccgatatgatcaaacgatcgcattaaaacacgcaagctccctcttgaagtcttgtaaggaacaggctgaatcacactgagagtttcattttgaatgtaaatagggccatactttctccatgatctacctgcatcggcggtgacctgttcaatgataaaaacaactcaatctccgtttcaaatatcacgaaattcatccagaagtgagctaatctagtttgtttacacaacctccacccatgatccccaagaattccaactttcaacagaggatccacagagcaattgtccattttcgagcaagattggctgatttttaaaagttggcaggcagaaaaacatgtcaaagtgagcttgaaatatgcatcaacatcaatgatagaaaatgtaggtgtaccttgttttttattggtcccaatattccagaaggaagttgctctctttctgaccagcttatacctttatcatatgaccgtttcatgcatccactccatctaaaagagcaacagttagatactaaaagagcaaccctttgttgtgacatgatattgtatcaaagattgctaatttattttaaacattttgcttaggtggtcatgagttacaagtacagttgcagtacaagtattcatttaatgaaggaagacatttagattgctaataggtaaaggccgaaaagtgtttacgaagaaaaccagcagcgaaactatattcttattcaaccaataactcacacacttcgagtttaactaacaagtaacacctgagcctaactaaaatgattgagaagacacaccatctagagctcttctcttccaatgtatcataaaccatcacagccagtaaactacctaccatctcatcacttagcaatcttaaatcaaatctcaaagtacttctcttattgcttatgcaaatctgaaattacaaataaagttccaaactttcgagagttatcaatctctcccaactagagcttctactctcccaaagtctaaacaaaaatctaaatttggacaaattgttaggcctctaggagtgaaagaagtttaccctattaaaaaaagacatttcatggtctaagaaaagtaagattttcgaactgcatcataaggaaagtaaagcataaaataggtaaagctgtaagaaaaataatcaaagctgaaacataaaacaaaaagtcaaaatgtttacttttgaacctcttgtcctactttatagaacaatagcagctcatctgatggaagtttgaatagaacaggattccacattggaacatcatgttcttcatcagctataacaggtggttcccaacagccattctagcaacaaatattttctcaagagttatgaactaacttaaaaactagagtacaatgccagctaaaaaagaaaatcaagtattgtccagctgaactaaaatagtaattagaataaagggtgtgtactcattcgattgtttttaataatgttcatttagtatcctgaattcaaatttgattaacaaaactttatcaatacaatcaaactgtgttcaacaatatgaattctatagtcaaattttagttttaattacatataactaataacagtttgattaaattgataaaattttattaatcaaatttgactttagggtattaaatatgttcagtttcaaaatataagatactagatgctcattattgaaaatacaggacttgtttttcgagacaacacaggataccaaatgagtagaatttagtaaaaaaaaccgaaagctagcatgaaatcaacaattgggttaaatgtttaagcaacatcctccaatggtgtcttgccttaaaatctataacacatattttggttaatgaactaaactagtacctaagaaagcaaggctttacaaagagcatttgtataacaacatgtaaatagttgttttgaaatgtgacatacttaagtgttaaaacttattcattagtgaaatgata

SEQ ID NO: 38088 - DNA, 1882 bp, Cannabis sativa
ataacactcttagctaacacttttaaaataattgaagtggaaaagtattatttttctttaaagggtcatatgatcattatcatcatgtatatatagtggtaatttcctttggtatatatgaattaagttactataagacaaatgagtaatgattgaaaatatgtacacatgtaattatatatacatataatgagtttcttcaatgaaaaagagttaaaaagtgagatgaagacatggagaatctgctgcagaaactaactttaattattaatttgggaaaactcattggagtcttatgtttagattgttgtagttgttacttttaagttaagtaaagaaaatgtatggtgaaagattattagatgagatgagccttcaaatctcagccattggattagaatactaagaaagaaaaacaaaatgaagtgttttgacaattttaatttagtgggtcactaacaactacatgaccctaccaccaagttgtttgaaattttcaagagaagaacattacaatcttccaacaaagaaaagaaaagcaagagcttttgaaattagaaagagagttatttctctttttctcttattattattattgaatttagcccttgaattaggagagttaaccctttttttattttattttttcttggttgttaaattaaatggtaagggacataaaaacatgccctttataatgaatttgattacaatgggaaaggaaacatcattggcttggctttttctttgctttgctttgtgtttttagagataaaaacatgtggtgatggggctaatgaaagcagcctcttaattggttccacttccactatatatatcatattcatcacatatataaatatattatatatgaatttatgaatgaaagccaattcactaacaagaagagtttgtgatttaatttttaacatgaataattggaacactttcgtgtacaagtctttcacgtacattttcttgaggtgggtttggtttcaggcctaaatttctcaagttgatattgagtctttttccttttaatatcgctttgtcattgagaagaaaaacagaaacgtttttcattctaattgaaatcacatctcgagtcacgtgacaatagagattggtcagcatcctcgagatatttaacgatgtttagtgaaaaattaatgatctgaaattcttctttttttcacttatattttagggcaacttgtacaacttttttttcttccaaatatgtaggttttcaacttccatttatgaccacacattattcatcaaatcaatataaaatcaagatatgtgtatccaatatatgcattccatatattagaagatattgatttgaatgctctaatttttctaaccaaatactagttacactctattaacaactacaaacaagtaaaaatggagacccaaacataatttcctttttttttttcaagaagaaaaaaccacaaaacccaaatactatttacacttcataaaaatgaaataaaattattttaagtaaataatattattcataataaatttttgaatatactcatttattacctgtgttttagcaaaaatcttactttcaaatttagttataagtatttagtgactaaacacttaagtgataggtttttcagttagtaattgtccaactcatttattcattagcaatataagtgtggattttttttttttttttgacgtggtgatcaaaatcacacaagattatcaaaacagcaatccacaatcagcgacggcacctccttgaactatgatagctcattgtctaaccgaagggcatgctttgccaaaccatgcgctgcagaattctcatcccgagccacatgggacaaaactgcccctagaaatttagaca

SEQ ID NO: 38089 - DNA, 1835 bp, Cannabis sativa
tgcatatacatgttaagtccaagctaaaaagaaaattggtcaaaagacttgaaactgtctcgagaaaacccagaaaacatatgaggggagggctcctcccctgtactcgttatacttccctacaggcttgcttcttgcaggaaagctataatgtagtatgaataaggattagtctagacaaccctgttaatctccaatgacattagcatccagatcaattaaattctgtttagcaaatctatgttgcctaatcactgaatacacagacctcttagttatttagccatctttataaagctgacatcaacctttatacattctcttcaagcataaccagtgaaacatgccctgaagcatcattcgtttctataatgtataagtaataccaagaaaatgcaaaatcagtacagggagacaaagcgataatctttctcacttcatgacagttacaaaagaaaatataaagcattagctttctaattattaatgggagcaagcgaaaagtttgattttgatataagttagagaattacagctatgaacatgcagtaaatgaatctcaacgtgtaaatacaaaaatgagtgtgattttggatctgcagtgcgctaattcagcaagtatacacaagcaataagggaagcagagccactaaacaagtaaaagcctcagctataaagacgacccataaccaccaaacaacttcaaagaagctcattttccccacactatttgtgaacacaacaaacaaaaatgcaaagctttgtatcaattcgacacctaaaataaaacccactgtattcccaaatcaaaaccaaaacccacaacccaataagacacttcgcttttgtattattcgacaaacttacgatccaaaacagatcacaaccgcccaaaaaccctaatccccaaatcatcaaaacacatcaattggatccaaaacatgaagcactattcaacacaaacaaaatagattataccttcctgaacttcttcaccagcagcacgctctccaaatacctgagagaatttccaatccaacgcttgtggagggcccgacggagctgccacgacctcatcgccaccgttcatttttcacttttcgtcacagaaaatccccctcaaaaaaaaaattacactaacccaaatccgacaatccaatcaccacatcgaagatcgctttctgggttcacaagatcactggtccttcttccaaagacccatatccaatatctaatcaaccaagtaaaaatcggaatgattattgggcttttcctaattcaaccattggaacccagaaatggccgatttttcttttccctctctccaaaacaacaacactctctctctatctagaaggaaaaggagaaaattggcattttaattatgtaaatattaaaatgagtgagtgagcaaaaccgttctatggcttttgagacccaacacaaatacacacacttttctctctgagtttagttctctcccaaaatctctattatgggcttcttaatttttccacttttttttttaatatttattgttttttttttttacttagctttgataaactcaacctaaggtgatggtcggtttagtttaaatgttttgattgggcaatgtggcgatgcggtggacagaaataatattttattggtcggtcatgtaccgctggtgactttaacaaaattgagttcgaggaaagaaaaatatgtatttgtttgtttctttgcaaatatatcctttaacaaagtgtttctagtgagaatatataaattttttatatgaaaagacatgtgtgtcctcttttttcttttcttctctaaaataatttttcttt

SEQ ID NO: 38090 - DNA, 5936 bp, Cannabis sativa
  modified_base (3907)..(3924): a, c, t, g, unknown or other
agagaaatctcactataacacctgttaatgtaagcccttagaggttctcctgtatttgcttcacttctaccaggtcttctaggtatgagggaagctaatgagaggaggaaaattgtgcatggaattcagatgagaaagaaatccatgaattgaactttcttggaggtagcttgaaataccattgttgtgcggcctctgctagtgtggctagaaaaaaatttcaccgtacattacctcttaccccttgcagatccatttgcatctcaaagtatttcaaatgagataaagaatcttcttttcctgtgtacatcttccatactggtattttaaactttttgagttgatcaagagcattgatttcaggtgagaagggtgatcctcttaccaagtcgagttcaagatctgtgagttttgggccggtcgagccttgtacgaggctcttaagttgatttattcgtgcttgcactagtggatgaacttggccaggaagttgactgacctgtgtcacattaagatctctttgaactggatcttgggcatagttatttggctagacagctggtagaatgttttgcccgtccagtccccttctccgattcaaatcattttagaggtcatgtacggtacctaatcgatcgaacactaatgtaccaagaggtctttgggtctggccagtttggttaagaggttgatccgatacctgtatttgaatatgattgtttagctaagtacttgctcccaacgggcaatttggtaggatttgaccgtctaccatttcgcccacagttttaacctgtggccttggattggacggttgtccattataagtttgtgcagtatggtcagctacatactcttctgacccactctaggatcccaaggggatgttggagtgagttattggttattgactggtaatttggtaggctcttctgatcagcacggtggcctgcttggaagggttttgaatggctacctattgcgctctcatgaattccatctcccgatccctccattctataaattgatgtctttgctcatcaaaggcaagattgatagttgttcagagatcctgctgatcatggtgtaacatgttgttgtggccttgcataagtccaagcgcagctcgcaagttttgaagttcagtatcatcttcaactggcctttgagtatttatggtggaagagacctcagtgccaggagcggtttgttcgatcgccgtactagtattcctagtttcctggatgcctagagtgaacccagccagaggggaagtcactccatggcctaccgtcaaaggtcgtgtattaacttgtctagggtttgtccttggtggatctcttgcgtttctaggagtctgtatgcttggatctatcattatcaggttgactggatcagtttgaattcccccacgagttacaaccatcctattaacctgtcaagactttaagacaaaagcttgtgtttttgctcttaatgaaagcaccaaaatattgacctcgcttctagccaacgacagtgagtcaaaataaagcgattaaataagataaataataaaaagaaaaaatagtaagtaaagagtacactgaaatttctagaggtttgatcccgtgagaatggtaatagcctactcccttttttatcgtattgacttgagaaacaaagaacaaagtgtcctctctctctaaagctcttacaatagatctctgagtaattctctcttagatcgctctttctctcttgaatgttctttctgaatcaaattttgtccacctgaattgtgagattaaaccactatttataggggctaattacatgaagaatggtttcccttaacatataataaataaaataagaaactgaattaattccataattacaatgcaaagaatggaaaacctaggcttgtgcctttattctctgacttaatcccatgaatgtaaggattatctttgtttcttggaagcaacgatgtccatctctaaaatttccaactcacatatcctgatcggtacatacgagttgatcacatgatcgagctttggtcgaatgtctctttatggccctactcggacatcctactatgtacggttgatatggttagttcaaccaatctttgggggctgctaggagtgtaaccttccgcccatgtaggaaaacatgagacacgtgtcatccagctaattgtcatgtcatagtgcaaaaaataggataacagtttcctttctttttctattaaggttggtcgacagtcttagacttcttttgctgctttgttgaaggaaccttcttcgaagtttcacctattacctctttccctttatccttgtgaggatttgaggttctaagatcttttggatcaactctttcgaaagcgtcagttgttggagatttttacacattatggattcctttgattagggttgtcatcatggcttccatccttgtcattttctcgagcaatatctcattgaactgatcctctcaagataatctattttaatttaattgaaacttttgggccaagatgaccacaggatctgtctcgtcaagtttgtcttttcctccaacatcgtcagaggtcttgtccttgtgatcctccattggttcatcctgaacatcatcttctgagatgtcttgtgaatcatcttcatcatcatcaaaactattctcttttgattctttatctttgaatataggggtgtctatatctgtgtcttcatcaatttgatccttgtgatggctagtcacttcattctgatcttctttatcccttgccttggcattaggattggtaaaatgaagaccagatttgtttcgggtgagtaccatgattactgagcgtaatctctagatggtatcactgcttccttcagctctcgatgaaagtatcaaatgttatcgagatttttggaaaataaattataaataattagaactaaagaaataaataatttagaagagaaaataagaaaaacacataccgtttttacgtggttggggcgttaacgagcattagtccatgagtcaattttattatgtatcttacaactagaaaagcctgtgagaatacaatgagcatgagttctcttagtttgcccgagcaagtattgcacgaaagattcattggaaatttatagtgttaagagaattacacttagttttcctttttccctctaatggagagattacattgaattacataagttgggctatcttgtgaagtccaacccacaaaggagatgatctgctgacttagcagattagatatggttgaagtagtcaaaattgtgtcctataattgtggacaatcaatcatgaattaattgcttgatctttatttaggtagtttctccttttagctcgatacaatcttctgtcgagatttgaaaggcatttatttcattatttgtgtacttgaataaaaaggaaaattggacttgggctttacccaaattgtcttctttggggcctactggtgggcctttggtgcagacctagattccacatgtccattaccgaaaacacaaagaacaataaatgatggatatttttatctatccatctttgttttattaccattgattctacaatttattttatgtaactctagttcctacactcaagctcatagtaattttctttctttttataaatagaaaagaagaatatccattaataggtaaattagacaatgtccattacatgaaaattaagggtgtacgtcggtcagtttggtcagtttatagtacattttattcaacccaatgtaaaaattgagttacaaaaatctaagtgcaacccggccaattaagaaaaaagaaaatagtaacctgcccaatgaaattggttggtttggtcaggttaacttgtccaattcaaccactaatatttttttttatttttnnnnnnnnnnnnnnnnnntgttatattttagttaattgtaataatgagacaaatatgtatatatagattgaatttaaagttcaaatcaaccacaataaaaaaatatattagtttcaactttatattttttaaatagtcaaataaattatatgatatataaatatatatataaaaaaaaaaaaaaaaaaccttctttattgggttggtcgggttagttcgggttgattggacggattagtattattttcaacccgcccaatataaagattaggtgggttatattttcgtcgggttatctcggcttagttttggcaaattagacggtttataaaattttataaatacccctaatgaaaataatgctgatagagcaaaatcatcaagaataggccaaccaagtcgtttacaataaaaatgaagaaaatcctaacaacaaattggataatatcatgtccaagtctatattattttgcgcctagtcgtgatcatgcctcctatgctcctatcagtttcgtgctatgtcaaaaagttcgattcatacatattattttgaatttctcaaaattttgcaagatgtcttaaataactatatgtacatgaccatgaaaataaattaaactaaaaaatccgtagatgccaaagcagtagaagatgtattagttcacttcttttgggggtgtattgtaaaagtaccctataatatatatatataagcaattaaatagttttggaagcctccatggtgaaccccctaaaaatggtacattgatgcatcccctactgtttcgacatccaagagtagtgcaatttttttatggtcatgtatgtcataattatttaagacatcctgtaaatttttgagaaattaagaataatttacaatataataattaagcagtgttcaaaatatttatttcacacgtgtataaaataaaaaatgtacgagtgcaatagacttttgaaccttattttcagcgcattaatttttaaaaaaaaaaaatctcaaattttggtaaaatattttaaataagtacaacgtacacgatcatgaaaagaaattacacgaaacaagtctcatagatgccgaaatacatagaattttccaataaattttatacacgtcatgacatttcaagtataataattatttaccgagattttttaaaactgattaagaaatagattgagcttaaagaaaatgattgaaaataaacgattcagaatccttacgtggttggggcgttaatgagccttagtccacaagtcaatattatattttacacaagtatttttgccaaatttctaactagagtgtggccgaaattcgtaacctcttgcatgaaaggttcaagccttttatataggctgaagtcgggtttatgggaaaacttagacccattaggatttgcaaaaatgaaataagcctacagatgggataaaatacaatataatattgattttgggccgagtaggtgaggcccaattgaggagtaatcgtcgtccgtacaacacggtgccatttgatggtgatagttgggcgtgcgccgccagtcatgaacacaaatgttagagtagtggacattggacaaaaaggtagttgctttttgtgttgtgggcctttcacaagtctgacatagaggacaaacccttagctcctcaacaccccttggactactcatctgggatacccatggggcatccgtttatgccttcccagatgctcgataatttggttgtgttcaggggcggagccagaattagataatagaggggggcaatattaggtggcttatactaggggtgttcgcggtgcgggtggtacagtttttgactattttttcaaattaacccgcacatgcagtttttctaattttccaaaccgcacccgcaccgcgaaactaaaaacccacgaaaactgcaccacaaaaaatggtgcagtgcggtttggtttttgcggtttttacagtttggactatcaccaataattaaactatcacaaatacaataaaacttgagcaacacttatcaaa

SEQ ID NO: 38091 - DNA, 2777 bp, Cannabis sativa
actattacaaaccatagcagtgggctaacaaacataggccattgactaccttgaagtgttcatcacagaatctttggcactgccttttagcacatagagcccttttttaagtgttcccttgagcagcaccttcctagctagcttatccttgacaaagcaacatattttatgaaattcaagaaacacatcattgtcacgagatagttgagatacactaactaagtttttggtaattgaagggacatgaagcatcgaattcaatttaagaggtaaagaattaacagaaggcaatgtactagaactaacatgagagatgagtaatttcttaccgtcttctattgcaagaccttctgaaccagtttatgttatggatgttttcacgtttttagtacctaaggtgatgtgatttgtggtaccggtactcacaaacaatccaaagtcatctcgaagggcaggggtgaaagaagtggcaaaggcttgtggatcatagtcgaattcatgttctttgatgaaagctcgaggggaagggttcgtggtgttgcatgtttgactgtttgtgcctagtttgggagggatccatttcttgtcaaattgataatggcacacaggggcaatgtgactaaattgaatgcataattggcattgaggttcattgttctgattcactccacaaaatccacctcaaactccaatcttggagccctgtggtggtctataagaatcgattcttgatcccgagaaagccacattagcttgaagcttcatgttgagatctgtgactgagttatggtgttcgaggcaactctcatgagacaatggaagtgcctgaacctcctcaaaggtgagattatcacggcgcgcagttatgcctaatacaacagagttaaactctggtccaagaccatttaacaactgaagtatagcatcttgatcaaggatgggagatctagctacaaccaatgagtctgtgatcaattgcatcttgttgacatagtcaaagattgattgtccacctttcctaagtgtggagaacatgactgttgagttgaagaattagcttggcctttgattgataggagaacctctgttccaaggctcgccaaacagagtatgacgaagtgaaggtggcgaatgaagtaagaactccttcgttcatggaggatcatatccataatagtaatagttgatcttgacgtttctattactgtaagtaggatttgtcgctcctataattaaagtggtgggaggaggtatccccgtgagcaagattccatcaagatcatgttcaattacagttggaagaacctgagatatccaagaaaaaaaattagtacgatcaagcttgatagttagagtagaagaaagagaatgagaaaatggattccagttggagttcagctatttcgtgtgagcgtcggtggcctgagtaaggaccagaggattaattggaactgtggagtttggtacaggaccggttgacatggactccattgaagacgttagtcaagagagactgatacgatgtaattaaacaaagaacaaaaaaaaaagggaagaagaagataatctgagatacgatcttgattcatcaatagcttgactttgttactgatcttagtgatatttatacaagtacacagatcaaaaaaagaactaaaacagaaaaaactaaccaacaaactattagttaatgaacaattttatagcgtaactatcttaaccactttaactaatgaagatcatttacactatttgacaaacatattattttatcaaatttaaatatttgtcacttaataatttaatcttaatattttattatataaataatattcattctctcgctaaattaaattatttaattaaccaaacattatactattgagtaatataatgcataccttctattgtattcaacaagtctttttttatttttttgagcaagaactgtttttataaaaagcaaacacgtggaattactaatttttatcacacctagtcattttaaattgcttgatagtacattacaattacgataattagaacaagaaataaaaatactatgagctcgtttggtacgccgtataaggatcgtattgtattaaataataaataacactatatttggataaagcaatgtatattaattaatacaactaaaatttttaatacaatatatgttgtattatttaatacataacaaatggtccgtattagtttgtattataatatttacaaagggacccggacccagacctcgaccccgaccctagacccaaacccagactcgagacccgaacccagaccccgaccccgatcccgaccccgatcccgaccctgacccatgacccagatccggacccggactcgggacccgagacccggactcagaccttggacccggacctggactcgagacctagactcggaccgagacccgaacccggacccagacttggacccaatccccggacccagacccagaccccgacccgtacccggacctaaaccccgaccccgacctagacccagacccaaattaaataatactaatacaatacaatacaacacaatctattaatacaagccaatagcaaacatagtattgtattaaataatactattatacaatacaatataatacaacacaatctaacacaatacaatacaatacagcgtatcaaacgaccaccataaaaattatagtatttgtataatattagtagtagaatattagtagtagtagaagctggtttggtaagtacgtacataaatgc

SEQ ID NO: 38092 - DNA, 1927 bp, Cannabis sativa
ttttgtaagtcaaatagagtcgccaccattaggttgatcaatattaatatcaaaaaaaaaaaaaatactaaaagcactagaggtatctaacaccttcctacgtgtcaatctcattatttgttcaactaaaaatcaagtccatataatttaatataataacttttaaagagtatcactaactaataataaaataaaacttttaaaaaaatattaaaattgatacataataataaagaaatgttaaaggacatcaatggtgcctaacaccctcttatatgttaatatcgttattggtccaactaaatattgcgtcacatatatttaatataataaatttaaaagaatatcactagccaatcgcaacgcaacatgtcatgaaaatactatgtaccactagtgtctaataacaatgctacgaataaataaaagtggatccatacacaaatttataaatattttgatatagaatttttgaataaataattattaatttttatttaaaaaaggcaagacgtccgtgatggcctaagtattcgatcccccacgccacgcgcctgcgtcaccatcattactcacatacactcacattttctctctcctctgtccccctttatataaacccaattctctctcacctcttttgcctcactaccctttctcaaccctattatttctcatctcaacaaactactctccgtggcattttcgtaatttcactttactccaaaaaaatattattatgagtactaaacgattccgagatgactcggccgagtccgaactcgactcgttcgaggtcaagaaactcagagaagagttccttggttttctcgacgattccgaccctgacccttcgactcaagaccttgcctccgttatgaaaagcttagaggaagagatttctgctccttcttgttccgttaccccaactccggcgccggttgtagatctggcgtcggaatctggcgaatctcaaccggatctaggttatcttttagaagcttctgatgatgagcttggtttaccgccttctaattctggtgaagatgttttgaaggaagaagagactgagttggtccgagttgagtctggttcttctggaatcggtgagtttttggggtttgatgaacaagttccgagttacgattcttttgagtttggaactggtgataactttaatgaaagtaacgatttcttgccctttgatgggttgtttggcttttccgatgtttattatgattccgccgatttctccgatttgtcatggcggtcggaaactatgccggcggcgcaatagtacagtttgaaaaaaaaaagaagaaaaaaactgttctttttttgttggaacggaatgtaaaacgacgtcggtttgtaaatttagcaaaacgtgatatgtaggattagactgatatttaaaaagaaggaaaaatatggcttaacacgtgcgaagttctgttcgttctttattgtggtggaaaattagctttattaaatattattattattaggtagggaatataaaattattttattttatttttatttttactaaattatctttaaaatcttggaatgaacgatataaaatacagtgataatataatagctttaatatttgtaatttttatttatgggtagaaaaaaaagaagaaagaatattaattttttgccgaaaatataatagagaatataatatggtactcaatggataattggctcaatactagagtttattttctttttgggcatatttacttttttttttattttaaaaatagaataaatacataaaacattattttttgtaaaaaaaaaaattatatttttatgtttatagaattttttttatatatttttactgttttttataaaaaaaataagataacaataaaaaaaattatataaaaataatatttaaataatatca

SEQ ID NO: 38093 - DNA, 2078 bp, Cannabis sativa
  modified_base (1861)..(1865): a, c, t, g, unknown or other
tttccttaaattaaactaatatttctgtatttgtatcgaaggttgaccttattgacctttcataggctgaactgaacatttttgtgcttaatagtcttaattgttggcaacacaacaccaacacggagtggcaatctagtaaatataactattttataagggtacattcgtaatctgataaacacttgaagtggatagccgtcaatagcagagttttttagagaaaaaagtgacagaaaatagaaataaatgttgctttttattttttaaaaaacaatataataattatactcaaatataaaaataaaaaaattgtctttattttaacatttttttttgaatgaataacgctgtttatttatagtggtcccgtgaaaaagtgtaagagattagaagttacagctacaggctgtataagatataatatgcatttatatcaaattaattaataattttatttttttgagaaaagtgacgaaatatatataaaaacaaattaattaattattagtttatagtgtttctttttcaaaaaataaataaattagtttttagtgtttttttttaagataaattaatttatagtgttgagtgttgactgttggttggatctttctaatagttgaaaattctgtcgtttttggtattatttacacgtgtcattaatttgaatttcaggttttgagttttcaaacaattaaagagaagaacaaagtgttaagccttcgggagaacagaagtaactacaagctttcgagagaaggtggatataagtcttgactcggaagctcttttcaggcagattaaaggaagttcgaatatttgaaaattttcaacaaaatttatttgttaaggtaaaatacattaaacttgcaatatataatgaaagaaaggaagtctattaaattttactaatgaattttatctttgaacgtgatcccgtaaattagtaacaatttgtaatgatgattgatacacgtataaaaatcttgtttgtttttatttttatatatttttattattttactagttttctagtgtataattatagaatattggtacgtagctacaaaatatttatttcatatcattaattttatcatttcatatttatttaattaattaattaattaaataatatattaataattatatataaaatacaaaatttcaatgtatattataaattgtcattataacgtgttgtaatgtatgttaattaaaagagaaaatgataattttcgtctagtttcaatctttcaaaagattaaaagaatcttgtcaaaaatataaattaccttccacgacccgtttttatgtccatcttataataaaattggaatagatatctactaaaatccagatccttaacaaataagccacggacatatctccatagagaaaccattttatgttgcatggcttgaaaattaatatttcagtccgtgagaaaatatctcaccaaaactatctatcatcaaactcaatcaaatctttttcgtcatacataagaaaactccatccttgtcccttcctagatttatttttacgtattgaagattagggccggccttgagagtaggaaggctaggcgtgcgcctcggacccccgaacgctcactccccgaaattgtgaaaaaaataatattaatatatagataaaattataaataagaagaaaatataataatttttttttggtgtagtggtaaaaggtttaacttctcatataagaggtcatgagatcaattcccaacctctacattttaatttttttaccttgaagctcttaagagtatttaaaagttttaccattaaactaagcactagaactataatttttataatagttaaactatatnnnnnggccccaaaatttgatttcgccttaagtcctatatatcttaggacagaccctgttggagatccatattagagccaaccatgatccaagcttagaaaataaagcttggataaactcaaagaaacaacactgaatgaaaaaaaaaataaagaagaagaagaaaaaggtggagtgaataaagagaagatggagagaaagataaaataaaataattt

SEQ ID NO: 38094 - DNA, 1674 bp, Cannabis sativa
tcgaccgcgatcgcgaccacgaccgcgactttggagtcaaaccactacaaatcctgctatcagtcatttaattttaagtctttcatatatatactcagcagtcagcatcattgactaaatcttcactcaccaataattttgttcaaatttgtccagcattagagtaaaatggaagaagggcttcagatataaaaaaaaaatggaagaagggcaataaaagttaccatgatttttttctcccaaaaaaaagtttccataatattttggtggaaatcctttcctgagtaatagtttgacattttcaaacaccacatgcattcacaatttatgttttcagccaatttagaaacaaaatggcagacaatagtaaagttatcatctttataaattgctttattatttattatatgcattattggagtgagatacaacactgcttgtttattatttttgtaaaaaaacatgtgacaacaatgttttgaatatccataaaaatattcttgagccgcctccctcacatcattatctatttggtagggtcctctcccgcactaaataatgtgacacccaccttatcttatgcctcaaacataaaatttactatataaatacgactattccatttaaaaaacagaagatactatatacgatactttgtagttgctattagttaataataatttgctacattatgatgccaacatttaaaatgtaaaataaaagaaagagtaaactaaatctgttaacaatcatcactacctatatgctagtatgctactatgttttcttagaaactatatgcaactattttatactcattcttactctacatgttaaataattatatgaatgatatgaatggatccataatttagagtattttttttttatcttgacatatatgattattctcggagaaatttaaataacactaattattacgaatattcaaataaaattaaaatatttactagcagttatgctagtattttcttaaaatagtgagtactcaaaatataaattactaggcaaaaaaaaataaaagtaaaaattaaaagaagacaagagaattatagtggttcagttagagtttgatttgcttagtctatttttggtaataatttagcttaatttatttgatttggatcacccttttatataaagagcaagtatcctttaaaattatataactggtaagtttagaccgtttttacaataaatgaatgtattaaatcaaaataaacatttaaagaataaatcaagaaaaatttcgtccgttcttgatttggctgcaacaatgtatgcaacttgataatccgcaactcgtctattcatattccaacacacgagctcgtgagctctatggtgttgtactcacaggatgggcctttgggcctacgttgttgaatgtatgcattcacctttgatcgcatagtcagacattctatgcgttgacaacgtgagacatgcgagtctctgacgagttgtcaaacacattagtcattcgaaccaaacctatgtaaagagatgatctttactcattgcaggaaatatatatttgatcattgcatataatcagtatatgcgcgactagtattaacttctcttggtcctgcttattctttgactatgcggggcatggtatgcgactaggtgttatattattttataata

SEQ ID NO: 38095 - DNA, 2020 bp, Cannabis sativa
tatattatttgttttaaaatttatagtttgagttattgcaacggtttttatatgagttgcaatttaacttgctccttattatatgaatttttatgtaaattttcttaaaaatataaaaaaaaaattacttaaaaatgtaaaaatatatttttttttaattttgagtatttataaaataattcaaaataataataataataataactgaccgggattttttatgaagacatcccaaatgctgggcccacgaccatctttatgggccatgccttcgacttggtaagcagaggtcgccgttccgaacacaaagcccatcggaaactgggctctactaagcccaccattttctgggcccgaaaatgtggacgcttcctcactgagctccactgcaccagcaccgtagctgatcataaactgagctatgctcagtagtaacaaaattaaccatggtggaattttcatcttcaaaatgagagaaagagtagaagaagaaatattatgcaagagaaagaaccctttaataatctgattttatagacaatttttttttatttaattttttgggataaaatctaattttatatataatatttaagtgagtaaagtcgatgaaaaacatgattgattcatggtcccattgtatgatgtgatgtgagctattttggaatttttattagtattttaaattttaatgttataaaaattagaaattttgggagcccattaatttcataaaatctctaaactattttttagagccagccaacaaaatgaaaattacaagaaaataaaaataatttaaaatacaagtatcacatctttaaattatgctatatccaaaagttttgtcaaatcgtgtcatgatagttctttgttagttgaataaagtgggaaattcttgtaatgataaatattacatttttaatttttttttaaataattgtatcttaccaaataatttgatgttaggatgtatatatgagattatatcttagaatttattggtattgaaaagagtaatttatgaatgttatatatagtattaatttttaacacattgtgaatacaagattccctaacatatatctcctcaagataatgctgaggttagaactagaaagtgaaataaaatgatgtataagattttatctcaaaaatttaaatttgttctaaaatgagagatggggttatttaaatattgttgtattaaaattaaaataattatatacattatagatattcttttaatttaaacaaaaataaaaatgacagcttataatttgataagcaaataagaatgataattcatcgagctcatgtgattgtcaatttcattcattaatgtcaaattttggtgacatttaaatatttcattctcattctttttctttttattaaaaaaaattaccattttctattctcattctctttcctaacttatctatggatgcaattaataccactaattcctcatatgaagcaaaaacatttatggcataaggaagtgaaaaacacacacacacaccactaaagttgagacttgaaggagaaagcacacaagaatgaagatacttttgtatgagtttggaagacaaccttttgtgtatataaataaaccaataattgttaaaggataccaataacgctcaacactaccttctacatgttatataatcattatttatgttgatgaagagtatttttaacaagacactaaaatctcaaaattagtattgtttctcaattaaaattaatccatctaagcactaaaagctatcatatatatacatgcccggctctgggtataggcgggctaggcctgtgcctagggcccacctagcccaagggcccaattttttttttttccttttaaaattatacattttttttactgattttgaaaaataccatattttttttaatataatgacccaaaaataaatttttctcctgtgacccactttattttaggaccatatatataaaattatctacaatatcctattattattattattat

SEQ ID NO: 38096 - DNA, 2592 bp, Cannabis sativa
  modified_base (2300)..(2304): a, c, t, g, unknown or other
taaacatgtaatcacatatgatattattatactaatcttaccttgattctgaattaaagtattgccgatcaacctgagtggaaactgttgctcgacggtttacagacccctaagccacaatatacgtaaaaatgataagtaatacgctaaatcaattttcggggacttagactcaaaactaaaagttttctatcaatacatagcatgaaaataaactaaatatatcgagaaaatgctgaaaatgagattctttggaaaataccacaaaaaacagcagaccgtttcctaaaaacggcaagttgttttttgagtctctgactgccaaaatcaatagaccgtttctggaaaatggtttgctgtattttactgcagaaacacaaaaaatctcatatctcaacgaattctaacccaaatttcaccaaatgctctagaacacctaattgagtcataaacaacgtataccaactgaaaaatccatcatcaagcttgtaaataaaaaatcaccattaaaggtccaatcgtgagtttaaaaactcaaatcaagcttaaaccttactacatccaacaaaaatcactccaaacaactttaataaccttaaaatagctacagaaaacaaacccaagcacccctaactcgtacaacaactcaaacctcaaaaatatacacaaaaccctaacctttcttaagaaataaacaaagagagagaacaaggttcatacctctgtttggaacaatcactagctacttgaaatcctcttaaacttggtctgaaatgaggagaaaacccctagttttctaggttcttcttggcccgacaaagagcaagagagggagagagagatgtacacttagttcttgtttttggttttaatgatttgaataagcttgatttagtttcagctctaataacaactaatacaatttaagaagatttataataattcccacttaattaaactaaagccaacataataatagcctcattactttatcaaaaagtaacataattaactaatggtaaaatggtcataactataatctcgaaaattcttaacattctaaatatctaactatattacaccgctaaaatcaggatattatacttatctaagtaactctataggtcaaatatcacattctattattaccggacataaaaatatgaaaaatataaaattttacatttatcataattaatacacttaaaatttaaatatatctccataatcataaaaacaataattaaaggtctacttctgacaataagccctaacaatttgttaattctaaaaataaagctaagcaatcattacaattaatgtctaattttaatttaaattaagatttttataaaaataattatctaattaagttgatacttctaaataattgtctaagttatagttcaaaaaataaattatatttatatatttaaaaaaagataattaattgattgattaacaatgttagttttaactattaattttaatagaaaaataataaaaaaaatcgttaaactaataattttcgttagatagcctcatttaatataagagagatatatggagatcctagggtggtacaacgataatcaccaatacttctgctatgtacctgatttagtaccacaaaattaacatattctccatctaaataaggaacgaggatctttttttctccatgaatgaaacgacacagggagaaagataacacttcccacactaacaggaagtgtacccatttaatatttaattattttttttaattatgttttatatgtttttgatgttttttttcttttttgatgaataagagaactttaattgcccaaatagtataatttataaccaccaagcgaagactcaaagaaaaaaactaagagtgtcaaaccactctctatccttcttacttgttttctctcttttaaattgagaaaacctataataaattctcttttaatatttttgactatatgtacaatataaactttttgatcccacaaataaatattcctagcctcccaaatatagtacactaaagcatttacacttaccacaaacacttctcgacacaatttagacaacctgcaatttttacaccatttcatccaccctccaagaattatttgctgagcagtaattcccagccaacataaacattaactaaaaaaaatgtgattatgtgtctcaaccacttggctacaaaacagacagaggttatctgtaataacatcaaaacgggctaatccatctctattatataatatttggatgcatgctgttatagtgagatttctctnnnnnagaaactcgagaccagactcctgtgtagaggacacgtgtactcagatttccaaggaaaactgagtcgtccatgggagactcctcgaagttttaaacctcgctcaagatagaatcagcgagatacagcaagcatgaccaaactctgatcacatgattatgactcgtattatgtgggacaagagaataacttgcatatgtcgaactatgtgcgagtatcctctccatgttcttgtataaacgtggagaccgactttctataaatgcgagttggtcccaagaaccccgcag

SEQ ID NO: 38097 - DNA, 3290 bp, Cannabis sativa
aaaaaataatgtcgttttttaattggtgtcgtttaagatcgattttttccaaatttgttgtcgtatttctatattcatgtcgttttataaaattaatgtcgtttaatatcgtattttccaaatctgttgtcgtttttcaagtgattatcatcatccactgatttcatcatttccattatcaaactctgaacttaagaaagcttccatccatggccgccttacacagcaccaattgaagaagaagaaagaagaagaaagcttttctcttttcccgccgaaaaccaaatccaatggcgaattcatcactcaaacaatccttcttacttaattcctccttaatttcaatcttcttttccactcactgaaaaccctaactcccccgactttctctttcctcgaacaaagataaagatcgtgcttttatcaaaaatggcagcagctgagtttctatcaatgcgaaaattgtttggattattcggatttagtaccgcaaggaggttggcagcgttgttcatagcttcttcttcttcgtcattgtcttttcctccattactggtaaatgtaagaagagggaatatctcaaaacgagaatccttctccttccctattctacggtgctcgaattatggaaccatttctagtacggaatcaagtgacaatggtggtgatactaaaacaggaaagagattccttgaattgagtgatcaagagcttttgggtcagtgtgagatgagcactttcaagtcttctgggccaggaggtcagcataggaacaagagagaatcagctgttaggcttaagcaccttcctactggtatcattgctcaggtatatttttatttcaatctccattgattattcatctatttggtgtagaagttaagttagaatagagtgaggtgtatagtaagatatatatatatggagttgttgaatctgatatgatataatgttgatggaagtgggctgtgtatagtaagatatatatggagttgttgcattttcaattcaatagaatactcgttaaagttttgttttttaatcggatatgctggagaaagtagaataaggtgaggtgtatagtaagatatactagactctctaacaagaggtttccagtttcaaattttaatctttgttgattgcttaccaggctgttgaggatcgatcgcaacacatgaatcgagcatctgctgtgacacgccttcgtactcttttggctctcaaaggtatgccattttcggttggaatatttgcagtataagtacctattggtttttttgcgtcgtaagtaattaatgtttgtaaaactctaattttcattcagttgcagtattagtatcttaaatatgtaaccagattttgttttagaatttggctaaagaagatttagaagtaattaatattacacatttccagaatctagaccgaattggaagaaaattataattctactaatatcattagtatcttaaaattttgaatacttataaataatcttttgtcatttttcttattcaacactattgttttgttaagctagtgaggaatactgtggatcttgaagcatattcacctcctcgagaactgcttcaaattcttccagcaaaatccaccattagaggatcagattgtggttcccaaattggacccaaaaatcccaaatttgttcttgtatgggattcattgattatatctcttttctgtttcttccttttatgtctagtatgtcactatgtcttatgaaggactcatacaattctttcttgtttcgtttttcttttcgcttacagggaatgcaagcgctgttggatctaatttttgcagttaatggttcggtagctgatgctgcaaagtatttggggtatgcaattctgtacttgtatttgacatactataccgatgaaaatatggttaaaggcctagatagataacaatgaaacattattgtcattgcagtttaagcacaggggcgctatctcggttgatactatcggatgactctcttcgattgacagtgaatgaattaaggacatccaaggttagaatgcttatgtattcatgtcaccatctatctacagtctgttatttgcagtgtgattttccctatttagtgaaactagcctttcctctaagccctctacctaaaagattacaactctgtgaattgcctaaaaacatattttaagaactgaaaattactatttaaaaatctaaagcagtaacagaaaacttttctgtaatttttgcagggtatgaagcctctgaagtgatttaacggtaccaacaagccaaccgatccttataatgctaaattcggtttgattgagcttattctttcatttgttaatgtatcattcatagctcaacatgttatcatctactcaggtaagatcatcggtttgttgactgagcgaaattcgccttcctttttcagctagaatgtgactagtctagttcttgtaatcctaatattgaaatgaccaaagttgatatagaataaaatttccattgttcaatgatttatcctgactttttttcgttgccttgatgaacaattcttgtttagcctctttggttttcattttctatattttttcttctagatttctgagaggtgtgaaattactaggctatgtctacgactacagttttatttttacattagcttattaggtaaccgacatttgacaccataccataatttttttttttcattttaagcaaaatgaagaatatttgtgtacatagtccaacaaccaacctagttaagatctttactaggcctagttttctatatactaatttatgtcttattatgtctcatagaccacttcttcactaactctctaaattgggtattgttttttgttctcttcaataccaagtctaagtctcctcataattcatataattatatatattactttgatcatcatcttatataatgacaattctgtcaacattacatttgcccatgttttttactttgtgcatagagatttacaatcagtttatttgactttagatcataaacataaaaaaaaaatcactgacattgaattagactcttttaagttttaaatttctttaacacatgaatcctagtgaattttctcagtatgaaaattattagattcattgtaaaactattgtcattagcattgtcactgtgatgtatgtatataatacatttatatgcattgatagttggattggttgaaggtttgttaattattgggtaaatattaccttcaacactaacactgttttttttagtatagcttaat

SEQ ID NO: 38098 - DNA, 2016 bp, Cannabis sativa
acccacttgggacacgacctttccggcactttcttcgaaggtggcctcctctgaatcgtcatcaaagggcattcgcggtgccttgtagtgtcgtagctgttgagccaaggccacgaggctctgagaacctccaaacgagtttgctgctgaatccattagtttggcgggggttgcggttagaatagatatatacggaaatgatgttgtaattggtaatcgtcgtctaagaattgaaatcatcgcgtggaaattcggcgcattgattattcgatataaattcaattaaatttttgatgaagtatatacagaaattggaataaataggaaaattaaatatattaagctaataatatgtattttgttaaccaatactaatttcgctttagatgttttatccttatatttgtacgagtttgactggatatgattgaagttgacctggttgttcgtgtcatggctagttgatcttccctttcgcagcaattttttttttttttttttttgaattaaagcagaattataattagacacaatgtgacgttcctgaggtaagtagaattatttgttttacattcattctttgtcttgactttttgtttttttttttacttctatcccaatgagtagttggaattgaaagagtttgtttaagtatttttggcctgtgttttaattccctcattgatagagttatcaaacttgcgttacttgccatgactagttattggctggttgaatgaatggtggtgcccgattataatgaaagcaaataagtactatttaagacttcacctattgtatatttatatttataggaggctcctatatttatataaaattatcttatctgtgttcttattcttccataaaataatatagtacaatctcgtgacagccttgactgtagaatcccagagctgtgaaaccaattcaaacagttcatctaattgatatctatatttcttttcaataaataatattacttgaaagtttattggatttcggcctcttaaattattgttttcttaattaaaaaaaaaaaaaatcccttgaacaatcaaaataattacaaattttttcctcttcaaaaaaaaaaaaaaaaattacaaatttcctcctttgattgcattccgttaattttgcaaacaatttcttaacataagactgatccaggactaactgaagatattgaaaattgaccaatttggtaaaggagtgcatagataataagatagaaaagaaagtaaaatagacgctacaatttctagtagttcaatccccgtattgtaatgtagagctacgtctacttcaagtttctattatttataagatcataaattgtgtatcagaaatttagctaagcaaagttctcactcacaagttgtagagagagaaataaagttagttttagagagagaatctctcactttgtgaagagatatttgtattgatttttagggttcatatcagagtcacaaccccatatctcaacactaatacataacttaaaacaaactattagtttaaagatttttacctcttgttgcctatcagggtttctattgacctcaaatttggccaatcgacagcagagtcatattcaatgttgatgcttgccacgtgttacacaataagaacaataaagtaaaagaacacaagattttatagatgttcggctccttcagttagcgggtaatgacatactccccttttaattatattgagactaagaggtaataatactcaaatcactatagatgggatctgaagtagctctcttaaatttacaatgtaggaattagagttggcaaatctcaattaagagaaaaacaatggtgggcgtgtgagagagagatcaaaacttagagcttagggttttcaacttatgacttcacgcttttgacctagggttttagggttttaatcatttattatttaaattaaaagtactaactttttaaaaaaaattaataccactttattacattttaaattatatcttacattctttaattt

SEQ ID NO: 38099 - DNA, 1658 bp, Cannabis sativa
aacttcaaagtttgctgagtatcgaacaattacataaaactattttacgtttgcagatagaaagaaagatcagaactggttcaggagacaattcagtaagcaaatgaatcaagataatgattctaacgatattgaccgtgcaactgctgtggcagctgctgcatatgccattagctcactcaaagacttaggtctcccatatcaaagagaacaacctgaaacatctaagatatcaagcaaaggcaagaaagagtcaacactttcgatccaggaacctggtagagcttcaaaaagtttctctggtgaaatatacagaacatatttctggctattaaaaattctatattgtaatatattctttcatgaactagtactaagatatccatgttcttcccaataggtaaaggtacaatgaaaagttcagaaaacccagacagcatggtgccagcaactgctgctacccatacaaaaaaaccagaaaaaaccttgctcccggccccttcatttagaaagactggatcaacgcttgagatggaacttagcggcagttctaaagttggaaggacagcatcaaaaacagaggtagctgccaaaccactacatgataagcagccgagccacagatatgacactggaacttcaacatcaaaatctgatttgcccaccacagtgaaaccaccgcctcaaccaaagagacaaagctcaacagggcctggaatgaggaaagctcaagcagatgcttgggaagaagctgagatggcgagagtccaagaaaggtatttatctacagatgctacattgttttaacatcaaactcttgaggcatcaacagacaccttgaaacacaagccttgagttaaattgacaactaaaaattgagatactaattcaagatttgccagggaaacaaaatgtaattgtagaattttattaacagacacattttcaggtatgataagcaaatggcgactatacttgactgggagcagaaaaggaaggagaaagccaaacgccacgcagtaaaatcagaggtatcaacatattcttttcaaattttggttgcaccaatgataagatactaatgctagacttacttgagttgcagggaaaattggaggaaaaaagagcaaaagctttaaaaaagtaccgcacggagatggaatatatagatcaagttgcagggggagcaagggcaaaggcagaagaaaaaaagaggaaggaccaattaaaggtgaaggaaaaagctgatacaatcagaagaactggagcacttccaaaaacatgtttctgcttttgaatgacacatattatgtaacctggaatactttcaagcatcaaaactaaacaatgtagatatttccttacaacactttactcgaaatgaaacaatagtgagatgacaaacttgttgtgtgatttatctttctgtaacaaaagtttgtggctgtaaacaatttcttacacaaaaaacaatggtaaccaccatagaagtgacgaaaatttctgtgcctgtgaactaacttcaaaaaagtttgaaagaaaaaataaaactatcaacaataaccaaaaaagttttccaactcattcatttttcctttgtagaccataccaacaattacaagcagaaacatagaatagaacatgatccatagatacaa

SEQ ID NO: 38100 - DNA, 4472 bp, Cannabis sativa
tttaaatcctactggagccatctagtgtgatgacttagtaattgactccactctcggtatcaaaataataatgatagactagaaaatttctttaggaaacgcatcccagaattcttttactatgctgatgttattaaactttgctatttgggtctactagagctcatcacaactgttaagaatcctatccatctatcttgaaaaaggtttctagctttccaatactgaactaattgggattcgagaaaccccaaactgatcccataaaaacataaaagttattcaccctctggctgaaaattcaccacttttcttttacaatcaatattggctgcaactcaaacaataatccaatatgtgttcaaaatgatattcaccataactaacttcacaagaccggcattgaacacctgattcactactctgatcaacataaacttaatccacctttttgaagatatctaaccgcgttaggcaatggggttcaaaaccttgacccatcactataacctaatttatccagcttaacaatttcttaacaccatcgatgagctagctttaacatcgacccaagcaatagcaaggactcgagcttaaatgaatttcacttccttctttggctcatctttcatcaactaggggaaatcactcttatagtgtcccaccacattgtactagagccaagcttgcttctatattcgcccagatgatacttcatataactggatataccgactaaatttatctgtcttcaaaactatatgaatgaccattttaacattgtttcccccaggtctcttactctgacttgaaccaccaaatgctgatggagcttctccactctaactagttgatgagtcatcaccactcctaccaaaactaagggtaggataccttatgggctcttaaaagcactctactgcacccttggcttaaaaaacctactctactatttgagcatagatagtaataacatcagtcgtgatcatcaatttggtttgatctcagcattaaattcttacaagtattcaacttccttactgaaagtggaatgtcccattcttgaagccaacttgaataacctatctcacttgttactatacatataattgaggaatgccatttccccaccaacccaggacacctgcctagaattggaatgtttactaattacctaaccttggtaacttctttaaactaagaatgccattagggcttaactactaacctagatttatctaggtttctcttaaaacatgagatttcttcctatctaatcttttacatatgcttctaatcaccctatttgagatattaaaccctagggagtatactgtcttgaaccaacccaagcaattagaataaaaaacttaagaggtcacctaaacatctcaggagttaacatgttcccaagtcaataatggttgcttaggtttacatcttgggtactgatttacatcagtttcggctaggtcagcatccatgtgcaattagctaagccattgcactcaagcacatgagagacatgccacaactaagtttcagactccgaaaccaattctggatcaagccaaacctggaggcaccaagtaggaaagggcgcccatgttatttgacatatgaccgagatctaacagatcaacatgcaattccgtgccaggttatttgacatattaaatagtggcgctgtgcaaacataatttaacttagtgaagtgttaggctagttttaggctactttttgagtatttcaatatttgtgtttcttcttgtgaatacatattttttggaacgaaattatactcatttttcttattccaggtttaaatggtaaaattcataatatgaattgaaaatgagaagaaacatattaaatgggatgaatatgatgaatttattatggaattcgacattctaagatataatgggtgaagaactttaagttttggatgctcaacactcgtttgtgattgaaaatcaagtatgaagattcaatccaatttttttgctatgattcgttcattttcaaggaaaatattgggaataaatttctagatctttcttttatattttaaaacaatttgaatcgtccaattatgagcaatatcgagagagttatgaccaaaataccatcagtcatcgtattaggattttaagataaaaaaatattgtacactgttggaattagcactgctgtgctccactgcataggagattgatgttttccaatggtagcaggtgccatgacactggtattgacaccaaggtgtcgcctacacagtgaattgtgaatttttttttagctttttaagggaatttttggaatttaaaaaaatagaatgagggcttcgttttttaaagagaaaattgcaaattcagaaagggagagaccttttagaactaaaaaaaacatgaaaaaggagattggagatcaagctttagagcaatcgtgacaaccccaaatctagttcttctcttttttttttctttctagttttattatgttttctatagatttaattatgaatgttttaatggagattgttagttaaactctactttagggattttagtgaagatttttgaatctttccttggaataatgctattttgatttctttctactattgatgtatgatttatttatatttgtgtttagtatatgtgtttgattgaccatctaatgcatgatctacgatctcaatataaaatctaaaaagagaatattgagaatgctctaattaaataaacataagtttcgattcaaaacgatagtatttgtatggcttgcgtaacttttgaattattacttaatggagattgcttgtttacttgtcttaaagatacaataattatccttgcaatttagtaccttaatgtatgaaaaggattttagtgaatttataatccgatatcatactagatagaagaagaaaattgagttgcattattgaaataagaagtagatgcaggtgaattaagttaatttccttatatttcatttgttgattaaatcttgtttattgttgtgttatttaatctttgcttagattatttagttccgaaattcgtttatttgattcctaaatagaaacagaaattcaattgattggtacttagcaacattcattgtgggaataatctcacttacttgagtattacttgttaaaacaatacgtatacttgagtgttgaatttatcacaacatgaaacaactgctcagagcactccaataaacttctttacattatctttcaaaatatatcactaaaaccccacatcccaattttacctcaaactcttacattacaccatacattagcttctttaaaatacatcacaatttttttttttttttttaaagttttagtatattttattcatttcaaatatgtaatattaatatttatacatatcccaatataaaaaaaaaaaattaaaaacccaaataattaataaaatatgtttagagcaatgaataatattatataaatgtagagcttgaatacgaaattttaaaaaaaatttaaaacataggagtttagaacatctgagagcatctctaatgggaatgccttaaagaatgtttgatcatatagatctattttttgatatattttaataaatacttactagggatgcacacggggcgaggaattgacaatagtgctctcccctgtccccatctcctttaaggattttaatcctcatcccagccccatccccgcttattctctattagggacgaggtgaggaattccttaatatataaaaaaaatttgtttcaaatatttaaatgtataaaaatattaaattacataaaaatgaaaatattacacattatttatattcaatatactaattattatacaaaacataacttaaaaaattataaaaatgatactaatatattaaaaaaagtatataaatacatactataaatataaaatactaataaaaagataactaatatattaaatgggtctctgttggggcgagagtgtcatcttcgttcccgccccttttatatttggagacaaaaataattcctgtctctgcttcgttccttatttaaatgaaaaatttctgctctatgagggatgggttccccatgaatcttatcttatagggaaaatgttcatctctaatgtttgtcattttagtaaaaaagaatgtcaagaaagaatgcttaataatgataccctttttttttttatttatttatattattttattttaaagtaacaaaaataattatttaatataaattaaatagtaatataatattattttaatatgtttagtattggaatatttataatcaaaagtaaaaaataatatagaaataagaaataaaatagtaaggtatttgttggggatgtgagcttctaatcaagggactgccatataaaattggacataattttacggtgaattgtgcttcagacccatggatacctggacatcacaatt

SEQ ID NO: 38101 - DNA, 2149 bp, Cannabis sativa
gtggactaggagtgttcaaaaaaatactgataccacgtacaaatttcttgtgtcaagtgatttaattttctgcaattatttttatattctgcatgttctgttttgtctctacgaaattagttttgcagtctgcaaacgtatacagttttatatacaatatatttctgtaataattattggcatttgtaaaaactcagtttttcacttcttaactcatcttctgattcaagcatccaagactaaacaatttcgtttccatcacatgtgcaagcaccttggcattgtgaatatttgttcgctgataatctaatcatctttagcgaagataataaggattcagttttggcaattcaagaagccttatctatttttagtgcctgtactgatcttcgtgctaacctcgaaaaatcgcacattaactttagaggtatttatgacaatgagaaaagaggaattcttgggactgtgaacttctgtgaaggtagcttttccctaaaatacccaggggttcccatgtgtccaactaagtggcaagatgttgattgagctatatttattcaaaaaatccatctcaagcttcatgcttgggtaactaggcacctgtcatatgatggtcgggctcaactagtggggatgttgtgttatttgatgagtattactccccaaaaaggatgtgaaagaggtggacaagttgtatagggatgttgtttggggtactcgaggtaactctggtaaacttcatcttacttcttgggagcttgtctgtaagccgaaaacctttttggcttgagttttagaaagggtactaaatgaaacaaagcttccatcgtgagatacatttgggctctaacaacaaagcaagatgtgttctatttaaaagatgtagattgttgggactatgatcgatctaaaagtgaatgtgagttggtatttaggaaactaatgcatgcaagatattgttttactaattagatcttggctggaggctcattgggtaagtttggtaccaacacaatctataataaatttctcattaatagtgagagaatggagaataattcagtggtttggaattaattttctaccccaaaacatcagtttgttctctggcaggctcttcacaaccacctgcttactcgggacaatttgatatctaggggaattggaattgtctcttccccttgcctggtctatcacgaaggtgtagattctcatgctcatgtctttttttattgtgtttactccaagcttgttctgaaatgagttcggacatggcttagcactacaatgtgaccaatcaattacgtggattggatcacttggacaaaagtaaaacgaaccaaaaacatgttgtcagctgttatctatgctaccttggttaccactgtttacagtatttggtggaatcaaaacctttgtatctttgagcataagcctttgttgatttctcatgttgataaattgattaaaaactccttaaatgctagagttttgttctttaaaaggaggattcttgcctgtagggatagagttatagtacatttcattagaaaaatgtaaattgagtcttttgttttcttggtgaatgtaagcttgtaagttcttttcttaataataataataatatgattaaaccctttaactaaaactttaagtcaagttgttcccaaaatcaaaaaaaaaaaggaaaaaggaaaaaaggactttaggtcaagttgattccacttgaggatctacctttcgatattttgcttgaattgtggctttttaacgtttacttatatctcccattcacacccgttttgacatatttcagcgaattaagacaaaaaaaaaatgattcctttaaaaaataaatacaaagtaaatgatagaaaaaaagaaaagaaaaaatctaataatttaaacttgttttatcttttaaacaatcataggattcttaataggccatgagacgttaggaattacacatatatcgaatcagaataaaagctttaaaaagagatagtaattgacctcatcagttaaagaacttcattcctttctttcaattatttcttccattttattaatttccaaagttaagataggtctttctaagggttatttgcggcaaaacctcctaaagtggataggtttttgcaactaa

SEQ ID NO: 38102 - DNA, 4646 bp, Cannabis sativa
aatataaagatatggtaggatcttcagcgataaagtcaatacagcagaagattggtgggagaaggtcaaattttggtttgcaacttgggtctataaggctaagggatttgaggagaccttaggttagagtagggaagcattctgcactaagttttattattttctttcagtatattctgcctttgttttgttttctgttctgagaaaaagagtttttttagcttaattcatatttgttctttccgttttgctgtatttctctaatttactttatgttaccacggtttcccccataagtgaggctccctaataaattcacgagaaggttagtcatggacatatgaccttcttcccttttagaaggaaagaaaatggttgcgaaacaccattaccactatgtctaataaacatttctacatgttactcaaataacataaattgttctctattccctccttgtaataattttgtaccgaacaaggtgattttttgtctatactttttcatctctaaaggaattcagtaagtgaaaactcatctcctttcccttccactcaaatttccttcccaaggttatgtacctctcctttcatggtctgattgcaatataaatgactttatcaaataaataaataaataaaattgtgttcatcacttgccatatgactgcttctacccattatgatattactcttccaacattaatgtccaaagattgacattcaaaatcagcattataaagtttctaacatgagaaagataacatgcttacacatcctacttaccatgtttcccttctcaatgcaatactttgaaatgttaactaattcggtcgtctcttttttagtagaaaagtaaaaaagacataaagaaacatatatagcataacctgacaaaatgttctagtcaaaattaggccacatcagataggtttgagcatcatgttctaggtctacatatctccccatgcacaaatccatgcttacactaaatttaatagtataacgacatgataaccaacaaacacatcagcgtcgtacctcttcccatttttaagctggtgacagatagactgcgacaacaaggctgttaaggttttcatacaacacaaatttctgtctaaaatctgaaattagatacccacaaacaccaatatgtggtccaatgaagtcatatccatcttcatcagactagtaaattttgtcacaaatgtaaagtattctgacaattatactattgaatttaaaaggttgtgaattgtagagttttttaacggttcctaagtcctatcaatgagcaaatcatttttttcattgaataaatccatttagtatcatttataatgggataaaaacatgtacgaatctagataaagattgataggaattcaaacagcattcatgccgtaaacctctgataaacccagaaaaaagatgaaaaaactatttctgctctcattccaactccaacctaaaacagtttactcaagcaattcataagggtattcactatatttggtatcccctattttgtaaagaaattcactcccctatctccttaattcgctttctctcagcatccaaacagaaattaattacgaagtatctatgaatacctgaactgtatgagactggatactgagaactcgaccagtctccgaagggagagctaatgaaagaatcggaggtgccattcccgaaattcttgcacttgtcgatttccatatagaaattaaaacaacaagtagaagcgaagtcaaaatcaaaataattttaaaaatatgtaatgaaagggaggatgaacagaatctctaccgaaaaatgtgggatgccgggaaaccccggagatgaatattgcgtaagggctgacgcagaacaccgcagaaagatcgaaagtgaaacggcatagaataatttattatgagtttgtttcacggagttgttttagatttgactggaaaattaccaatctgaatatgtttgagtcaaatgtttgtgtttggtgagttggaggcaaaaggatagtctggtaaaatcgttgcatgagccgagcctccacaactgatgactgtgtcaaagccgccaaattaaaaataatgcattatcaccaattttgtgagtttctttcctttttcattttttttttttaaaaaaaaaaaaaaaaatctttttgcttcgtagtaagaaatattaggggtatgttattaaaaaaaaaacatatctttatatattaaaaacggcatttcttgatttaacaattttttgtaacgttctttttaaaaaaaaaaaaaatataaaggacttaaacggaagcttaactccgttacttatgatataacattaataacaatccaaccagccccatcatttcttcgcttgatcttcccacgagttcccttcttcgtatctttctcagtaacagctcgccgataaccaaaacctcaaccgcacagacgtcgtcgccctctcaggcggccacaccatcggaattgcccactgcggatccttcgacaaccgtctctaaccccaagatctccgaacacctaacatattcgacacagtcagggacttttcaccaccgatccagctcttcaaatttctgctattgaacttcaaatcgaaccaatcggaccaagccgagtttcgaattgtatcaactttgcataatttttaataattttaattttgctaagaaaaattcgatcaggttagtgctaagaaatttgaattttgtcatggaaaattctggaataatagccaagcattccaatcattgatggcgacttgcactattcgagttcttcctaaggtatttcttcgttactgtgatctttattgaagagttattgatttttcatataatggtgattagtccgattttccatatataatttttgttaaaataaaaaatactgagttgatacaattttatatttgggttgtagattggttcgattgatccgatttttaattttgaacccatttgagaatcttcaagctgaaaatgactttttttcttctctttttggaacttgattaacacgctcttgtgattacttagttttaataatctattttggaattttccttttgctttttcaaagaacctgaaatgagtctaattccaaacttttctacctttcaagttcagttagtcttaactataatgtaattttaatattgttgtataactttaaggtaacactttcagattctaaaaacaaccgtgtgaacaaagcacttatgctgatattgaagcagcttaccggtgccttgtggagaagtatggggtcaaggaggaagatgttatcttatatgggcagtcggttggtagtggacccactctacccggttgccaagtttgagagatgttattctacatagtcccatcttgtctggtctccgagtcatgtattctatcaaacgaacctactggtttgacatttacaagaatttatacacgcttcgcacaaaatgcttggataaaatataaagttggtaatgattcttccatgtattttctacagaaattatagtagaacataaacaaaataccccttgttaattgtccagttctggtaattcatgtaagtatcccaatccgactctttaaagtgaatgttttctatatttttcttttaaggaatctttctatgttatctgtcttacattttcttttttttttggattatttattacaaaaggaaattatgttagaccatgtttaatggttaattgcaccaaatttaactcacttatgtttgatatttgactggacatttgtggatggtattgaagtgcttgctatttttgatgtctgagtaacacaagatttaaagatgataattttattttagaatattaagtggatgtggccctgaacccgattgactttgcacataatgatcattatgaacaacattgctggacctctattacaattggtgattgttaagaaagttatttatttatttatttatttttttgcttttttggaatttctgtttcatgtacactctagaggtaatagaatgattcaagtgtaaatagccatatctgtaatgtagttggcattcgcatttagtaattggtaaatggaattccttcaaaaattgaatgtcatatcaacttttattaatgatttgtgtaataactgagtaactattaggaagaaaatattccatgcaactttttaattgtctccgccattagacagggaattgttgatgatgtagtggattgctcccacggtaagtgactggcggaactttgtaaggagaaatatgagccattgtgggtgaaaggagggaatcagtgtgattttagaactttactcggagaacataaaacatctcaagagttcggaaaatttacagtgcaattagaaagtgctcgaaagagcacatattttcgagaaagatctagatcaagcacagattggagagagaattctaaaccgagtgttgaccagagagaaaagcctagatttagtacaggccgcagtgagaagtcaagtgtcagcactaataagagagagagagatcaagaaaaagcattgatcgatctgagaaagcaaatagcttggatcaaccagagaagacaaggaacatcattgaccggttagcaacttatactgattaatacttc

SEQ ID NO: 38103 - DNA, 1888 bp, Cannabis sativa
ttatggatggagatttcaatacgtctgtcttccctcatgcggcattaaatgcgaagtgactgttcaagagatctccatacttcccggaactgccttagcatgcctctggcctcccggagagtaaagatactttttatgctctcttttgggagacacctttcctgagatactcctttgtcgtctaagacttagtcgatttctataagcgttggtttttacagatccacgtgtcagccttatccatgtccatgtattttgaaaaaatcaagggcaataatgttgaatggcgttttgtcatctttaacagaaggcattgtaaaaaaaaaatagacaagttaggttttcattaaaatatatatgactctttttattactataaaaaaaaaaaaaaacatttttaagatatttatgcatgtataaaaaaatcatatttgagattttttatattattttattcataaaaaatatgtagattttgtgttaagtgggtcatgctatatttgatctatttttatttcaaaccaattatgtggatgaacttttgacccacttaatttcccaaccctaacctacaaaaatttgtgtcatgttcaagttgtgttatgtatcatttttgctacctctacatttgtaattagtctcatttaccattatttgaatatacagatctttgcaagacattatgatattttcattttatttataaaaaaacaaaacaaactcaagtcaaacatctcttgagaaccacatatagctgattgttagtaataacaaaattatttggatagaaaaataaatttgaaacgataatatgattcgaaattcacactaaataaataagcttagattttcttaaatgaattttagttattttcgaattaacatacctaacatatttattaaacaggtcattttggaatttacatacctaacttaaaaatgagagaacaattaaaattcaatttatcaaatatatataaatatcaacctacttaagagtatacacactcatgtttagtacacttaaaatatatcaaattagttaagtagatcaaaatcatgctaaataactaataaatgtgtcataaaatagttttaacctactgatgatgttttaattttaattttaatttttggtacgattactaaattaattaggttaatttgacatttatttataatacataaatctcgacccgtaaacacaaattgcaagcactaaattcacctattatcattaccaattgcaataaattaataaatgaatttggtcaaaataataaataaaagacaagaaaattatatatttctttaaaaacaatactaaggtacacaattatttgagtaactaataaaggtagtagacaatattgactatgaatacttctctggtcattatagcaaacactgcaattacttctcagtgttaactgttactgaaaaatgttcattaatatgagtctctgactcactctctctctctatctctctctatatataaatataaatatatagatgcacaaacaaagtagaatccatatcagaaaaatgggttctcaatctgattataatagaagtttggttttcacatatgccattggattttcattactattgtttacatttcactatgataataatattaatagtgttgaggcttatgatgagaaacacaaggattcaaagatggtttctcagaaagtaaatgtgggagtttactatgaagctttgaacccatcttgttcttctttcatagttaaaaatcttgctcaaatttttgacaatggtcttcacaccattataaatctcaggctggtcccttggggcaatgcttattttctcaacaattctaccaacaccacagtttgccaggttccattttctctct

SEQ ID NO: 38104 - DNA, 1477 bp, Cannabis sativa
tatttttgagggtttcgtctttggcccatatattttcagggccggctctgtttatcttagttactatctaacagaagttaacaagcacaaactaacttatttacagtttagtaacttttagccggttttccattataaaaaaattattaatatgtttacacttactacaagtgataaaatattagtttttatcacaaaataattttttgttgtgatttatgaagataatattaattagttaaaaattgatctactaatagcatgtagaaattaagaccaaaattaatgtaggtgaggctatttttaccgatcactcgagttctcttattaaagccttctaagcttgcaaagagttgtcaatcctgaaatctgctcatggatggtcgaatgttgttgttgaaaaggattgtgtcgtgcatgctctcaaaaataatatctgaatgctttctcttatcggttctttaattaacgtgatattgaatatcattcatttgtttagtaaatgagaagctagtaggtcatacttaaggaaaaaagaaagagaaattaaattttttcccaaaattataattatattaatttatgtaaataaaattctatgcaaactatttttttccaccactaatcaatccgcaacttatctttatcaaattatttaattaataaatctaataaattaacttgtttaagttatttggaagtgtgaggatgaaatcattttataacaggggagaaagagaatttttttctttgtaaataatatgggacaattaaaattaagattctttagagagacatttatgtccttcaaaagggtcatgacacatgtattatatcacatctcccttagaacgacttaaaatgtatgtttgattaaaatgaaattctctccattttaaaaatatacattttatattttaaaattatgtacagtatattcttacattttatgtcccacaatatattccatgcttttaattgggttgttacacaaaaaaaatttacactattttggtcaaataacatctaattcaagcagaacttcaagctattcaacttgggttgcgaattggtatacagaggcgttttaaccggtttagtgttgagtccgattgtcgggaggctatccagctaatccataataaggaggaggcctgtagggacatcgatagaatagtaaacaatattagggctttgatgttagatacttcaattgttgggatttcttttgtatatcgagaggcaaatgaggttacaaatgtatcagccaattacgctttggttaacaaagtgagagctatgtggattggggttgatcccccttgtgcaaggcttgctgtgttgcaagacttgccaaatcctttgtaatgttgctactatgaatgaagttaattttcaaaaaaaaaacatctaattcgagcaaaatttatatttggatccaatccaatccacataatattttaaatctaatccaatc

SEQ ID NO: 38105 - DNA, 2628 bp, Cannabis sativa
  modified_base (54)..(62): a, c, t, g, unknown or other
ccggcttctgacttgaacccgaatccaactccggacctagacccgacttaaatnnnnnnnnnaaataaaaataaaaatgaactttacagaacacactattgttttctattttaaaaattgaaaaacaaaagtggttacagaacacatttttattttttaaaaacaaaaattttacttgtattttgtgattaaaaaattaaaaaacaaaaatattaccaaacggtaccatataattagtgtcttaatttttgaaaattatcgctaatgaaagggactacaattgttaatgctctttctttagtataactatatatatagagctatggtatccatatatatatagtgcaaattttcatgggcaaattaaagggccaatcctaaaagagtgctctatacattggactctgccacgtacactggaactaataaagactgcaatcagtcacatgagaataatatatataatattccctaaactgcttcaatcaacagtaacaaataaacgacaaaaataataatgtataaattataatcctatttatagattagcatccatatataatgacatttaacaacagagtttatataataatgatatatagccacaggatataataggaaattagaacccaacatatgaaacataatgcgtctcatctgaaaattggaaaaaagaagaactaaaactattaaagatttagcaattcaactttttgccttattattcaaatcttgatggttctgcttttccgcgtaaaccttcaccagtctttttaaaaaagaacttattctcttccctaaaattattaaacgtcacacacatatatataattaattataataattatattctattaccatgatttggactgctatatatactcctaactagtttccattcttctcatgcattactaactctcacacaatatattgttacttataataatttgcattaatctttaagagcttgtgaggaaatggtcagaagcacagtcacaaaagcaaggatgttgttgcttaggtaaattaacatataacacaataatgtcatatatataatgtttagtatttatggctcaactaatttatgtgtacgttacaaaatatttgtcacttttaataataattttttttatttttaattacaataaaacttgtgattaaatgtacatttgttgtgactaaaaataaattaatgacaacttgtgtctaaatattatgttttagtaacaagtaacattttgttgtgattaaaattttcatttaatcacaaaaaatttatattgtgattaaaaaattagcactaaaaatactcgtttttactatgaatttgatcagttcatacatgaaagcgaaacaagtgggagtggataatcataacgggcgggcgcaatttagcaagctgataagaggaggagtagcagtgatgaaagactcatcatcatctcatgaaaacaaagatggtagaatattaggtaataataataagatcatgaattataattataagagagatgatgaatgtgaacatgatgatgatgaagaggaggtgggttcatcatcgtggtcgaaaacgaggtcgtattggagtcctcatccgtacagtgggatatatgtaccaaaaggacatgaatgggtggtggatgatgtgcccaaaaatgctgcctcttttggtgatcagacttattggctaaggaatgttgatggtgttgataagccagaccccgatcttcccaactctcctcatcaatattactacagtaccttataataataatatacatatatattatatatgatatgatgatgatgatcgtaaactaattgatcacacttcaccactctctagctaattaattacttataataaaatagctgcatgtattaataataataatcatttgattttcgagtggtatatatatatattggtgttgtgtataacatatatatctagtaataaactttatttagctttacgtacgtatacgcgagcgtattgtatggcataattattattattaatgaataattttaattagcattattattatgtgttataacgaagaatgtttagcttacattaaagccgatctagtctttgaaaaatcagtcatatgcccacttttaaaatttattttttgacgggaaaattccttaaactcaaattctattagcaagcaagtaactgagtatgtccatgtgtattaatggcccacctaaaaaatatttaaaaataaaaataaattataaattaaattaatttaataataaaaataaatcaaaaaaataaaaacaattaattttttttcttttttcctccatatattttttttccaccagattgttttcatcattcttcatcaaaaatatcactatcacctccaccaccacctcaacttctttttcagatccaaaacaaccacaactatcgcacctccactacagttaaacacaaccccacacgtcagatccaaacacaatatcaaagaaacctaaacagtaaaaacttcccacaatattcaagaacttatttactgaagagttcacaccataatttttcaagccagtctcaacactcaagaatagagtggctattagattctataagataagtatattttt

SEQ ID NO: 38106 - DNA, 2672 bp, Cannabis sativa
atccaatccaattgtaattgaatatccaactttttgtaattggattggattggatcggttcggttcaattggattggattgaatgatgcccacagctatctgtctcgtatatgtgtttctcattagccatgctcttatctcttgcccatttactgactcttgttggcgaaagtttggagctatttttgtttttgatcctggtggttcttttagaaggtggctggaaatcatttttaaatcttttgtagctaatatggtttgtagtattgttatgacttactaggttgattggaaagctgaaaacaatatcatttggaagaaagtttttacccattttaaatttcaaatacttagagcaaaaagaaagtttttcttctttttcactttttttattaattttttataattagattggattagattggttcagtgtaattaaatcataaaaatgtttgattacaattaaactaaatctatcattatatatatatttaaaaaacataatatttaaattataatttaactaaagggagaaaataaccaataaattttaaaacacatacataaaatttatatttattttattatattattacatatatatgcgaaaatcttatggtgcaaacatggtgtttagattagatcatctagaccatccaaatatcaatcataatttgaatttaaaatgaaaataattaaatacataaatctattctatattttaagtgaaaaatataattccatatggagaaattattatttatttatataatttattaaattagaaacaccttacttgtattaaaaaaaaaagttgttgacctatggctatcttacatttaaaaaaagaaaagtaaacatcaattattaacaaaagaaaaaaaatgaacataattttaatgttcaaacgatttaaaattgcccaacattatgtgaaaaagaaaagaataaataacaaagtttatattataaataaaatgttaaaaatggaattgttttaaagtcaatatttaaaactttattactttctacgttaacaaaatttaaaatgcgtttgaaaatttacctcgtaattgaaattgagtataattcaaagtaataacgagatttgacatatttgttcaactaaataattatacagtatttatattattagaggtaattgagggggaaataaaaattcatatgcaattactatataacatccaaacaaatattatattttaaataaaatattattattctcttgtatgattattcaattatttcaaacacacccttattataaacacttttttttattgataaatatttcaatacaagtatcataaacttgaagtaggttttttttagtcttttaaatcacaacaaaatccgttttaaaaaaaaaaaaaagtcacaacaaaatcaacatatgccctttttctattgatgttttttagtataaaagtatgagtaattactactcggtgagtgggttgttaaataactccaaatttataaagagttttgttgttgttgttgttgttattaaaccctatttcaatagaatatgtaaatagaatgtggtcatctatatataaaaataaaaacaagtaaaaataaatttgatgaattcaaatgttgattatatttcaaggcaaaagtttattcaaaatgttttattttgtatacttcttacaaaaaggataccttgtctttctccaaacacctaagaaagcacaacccattttctttctttctttattattcattatatgaaaaaaaaaatgttatgaataataaataataaaatttttggacgattctacggtgcacccactaaaaaaagtgtataagttttttagtcaattttttttatagttgtatatgctatatagttatttaagatattcggtaaaattttaaaaatttaaaataatttacaatatagaaagcaatgtttaaataatttattttacacgcatataaaataaaagagtcacgtgtaatatattgtttaaaacttatttattttcgacatattaaattttttaaaattttaaatcatgtataaagaatcacattaacaaaattcccttatgtgcccaaacatataaaagtatattgtacaatagaattttttaaaagtttttttctttaaaaaataaaagttgtagagaagcccatttatgaaggtctttactctcataagtcaagtcaacacatccaacggtggtgaatgcaccaactcatcagccttagataagtaaattacggatataccctcaacatcgcttgcttgttccaatttcatccctctttttatattcttctccacctgaacaaaatatacctctcatagcctcgcctgcaaacgctttatcatttctcttcttcattttttttcttcaacaattacaaattcatcaataatatatatatattttatatgtatatgtatatgtattggctcttcatctagctcacgaccactcccgctctcgaaatttctggttccaaataggtaaatttcacctaaagaatcaagcaatcttgcaatttcatcgctcttcccagtttgatttcaaatactcagtttttattggggtttcactctttttatttttgaatatatgtgcttcaaacttcaatagatttgaatctgtgatattattgacattcttattggg

SEQ ID NO: 38107 - DNA, 3554 bp, Cannabis sativa
accccgcttctttgagtcgtttcttcatggtatctttcaatgtcttattgattgcttcaacttttccattttattgggggtgtgcaactgccaaaacctctttatgattccatgtgttgtgcagaagtctgtgaacatttagctgtcaaattattttccattatctgaaataattatttttggaagtccatatcggcatttaatattctttaccacaaaatccaaaattttcttggatgtgattgttgttaatggttcccttccgtccatttggtgaaataatcaacagccacgactgtgtattgtactccattgtttcctttgggtaattttctgatcaggtctattttccatatagcaaagggccatgggcttttcctcagatttcccattgacatgactaggtgtcatttcgcatccccatacttcacacactttcttgaggtgcataatacgcactggtaagggtgttcattggatcacatctaatgtttttaggcctatccagatttgatctgattatatattggatgatagattttaccatatgattcgatccaactaattttagtcatccaattgatccaacatccaatggatattggattagatcagttctatccattggatgtatttcatgtatacctattggtttaatttgggtttatccaatattttagacctaatatttattggatcagatcgaatccatctaatattttagatccaatatctactggattgaattggacctatccaatctaaagaaaaaaagagtaaaattttaatgttaattttgatatatacatgtatttttcttacgtataacaacataaaatttaatttttcattcaaactaaatgaaaatattcattagtttgattagatattggatgtattggatttttggacactctatccaacatccgatccgatcctattggatattcaaaattaatatccaatctgattcgatcacaattagatatccaatatttggcggtcgattgttattagattggattgctttatgcatacccctaagcacgggtcaaaggattcataacacatgtgctacaaaaataggtattttatcccggtttttaggggcattttattttagtttttgctaaaataaaaatcgaaacatatgctagtgggataaaaatgaatttttaatcctgatttttatataaaaacccaagataaaagagattttctatcccgatttttatgtaaaaaccaggattaaatgttaaaaaatacaataaaaaattaaacaaaaaaaaaagttataccagttccatgaaagtcactatcacttttacaatcagagaccaaaattttataatcaatcaatacaaaaactatattaactttaccaacccaaaaactaaaactttattatcaattcagaattttacaattttctcaaaatatacaaatgaaatcagtacaagacaagctatactttacaccaaaaaaatcagtacaatcaaagccaccactgccttcgacaaccacaaactgacacgaacaacgactaaccattaaccttcctcaaccaccaatcgtgaagctccgtccaccacgaaaccccacgaacctacaagcaccatggtcaatgaattgccacagacctctgtccacctgagaaaagaaagaaggagagagatccaaacctctgtccaccaagaatcaaagtttcgtcaaaaaaatgtagaacaagatcaaacaatacctagaggtttccataagaaagatcagcgtcgcgaagcctgagagaaagaggcaacatcgcagaggctgaccggagaagatcagtccagcctagaagatggcagcatagagaacatggagatagagatagcagcggatgagaaagaaagtgtgggagaaagagaggaaaccctaaaccaaaatgtctttttatatgcttatataaaaaaaaattaatgaaaataagttcaagaaaccgtgtgatagaatgctttattgaaaagctagagacatgtttggcaaaataccaaataaccatagtggaaatattattttttgaggtccaaccaaatggggcccttgttccaacttttatcccgattcttagctaaaaattggaattaaaagtctcacttaaaatgttaaggttgtgtttggtaaatgcataaaaatagcccttccaacattgttttttgtgtgtttgtcaaacaagacccttgttcgaaacttttttctttaagaatccaactataaaagtgagatcaaaagtaacaaaataacttttgtcccacttttttttttcaaatttaaaaagtgggctaaaaagttccttttgttgtagtgctagccgtcatttcacatcctcatacgtcacgcactttctcgaggtgcataataagcacgagtcaaaggattcatgacatgtgtactctacataaggaaaacaaaaaggtttgcgagctttcgcaaccttctactttggaattccaaagggccatacccatttgcagttttgcattttacgatgaatccaaattggagctgcaagccttcgcgactcttgagcctcaaaggcttaggagataaattttatacgtgcttccgaataagtgacacatgtactttcaaggcctaaggttagtggatcaactcaccacggagtcaaattatgacttcgaattcaaagacgaatccaacctacagacatgataaagtaggacctcatggtcccaaaagagctacatgcttagaaggcaaaaggtctagcagagcgaatttggataccctcatagggtaattcagaatgggcaactgaaaaagacatctgaaggcatccaaaaatcatcctacgatgcatcctccacacacataatccttaaattcagaggtttatcccctacatcatacctaggggtgcacacaccaccaaaaggaacatacctttttgaccaacgacatattctctaacagttactgtacataatgggttgcacatgacacttctcaccatcaaatggtctccactcgtacggaagatcattatctcttaagttggatctcacctagcagacccaaagttaatataaattgtattttaccccattagtgagcctagttgacacatataaatcctagcatttctgggtttactcataaacccgactctatcttataaatagaatattaccccttcaagcaggcgcgaagccaggattaggtcaagggggccaatatactcttcgagattaaattatttagtccccatataaaataggattaatactattttagactttgtattttacaaaagttaccgaatgaattctctgttttgtaaaatgacaaattggaccctgtatttttcaaaatggtacaaaatactagtactctaagctcaattttcaataattttttttttgataaaactaacttgaagataatttatagcacgaactaatgcagaaaatgtacacagttttatcagctacctctgccgacccaaaatggaaaaagatctggaactccaaggttcatccgagattgaagctcatttg

SEQ ID NO: 38108 - DNA, 1928 bp, Cannabis sativa
ctctaaatgtaaggagctccttacttttttgttaaacttttttaatagtattttaattaaaacactattactttttcattatttcataaaattaatttatatttgacaaattcaaattataaaagttagagcaacaacaataaagctctctattccaactttttaactattttagttaagaaaaatagagtatcattaaagatactctaagcatctccaaccatactctctaaacactctttaactaaaataagaagtggaacttaaaaaaatgagttccaaccataccaaaaaaaaaaaaatctctataatagaaaatagatagagagcttctcacttttttgttaaatttttttaatagtattttaataaaaagtactattatatttttataaaattaaattatatttggcaaattcaacttataaaatattattaaaataattaatactaattaaggtagagagtatgattggagcaaatggttttctatttagctgaaaaaaataaagagtagtattctctatttttttttagctaaaatagttaaatggttaaaaagttaaaatggaacctctcgtctctttaccagcgtctcaagcgttatccaccaaaaatttgtgtagaactaattaaaatagtaccactctaagataagataatgaaaacattagtgaaaggatcttcagatcaatgagtacgagaaactcgattttgtaattgggaagtgaacttcaactggtgcttccaccattaataaacacaactgaactgatttcttataataaaatagtcaaaacaaaaattgttttaatgttacaataactcaactaactatgctagaccagtaaattaatactatatttccagaggaaaattgattaactaattatatgttcacatttagaaaaatcatctcttacttgccttcttatttgcttggtaaccaggatagttctggttcatttggccttccattttcctagcagtgcgttgaatagcagctagtttctgacgatggttgtgacttttccgtttgcttcataggaaaaaaacaaatctgagtatataacaatggtactaatttttaagtcaacaatcagatgaaatctaatgatgtttgcacattacaaaggaaaattagaaaactgtcgatatttgataatgatgaaagaatatgcagagaaatagttggttatgatgaagggaaaacaaatatgcttaaagattgaaaactgaaagtttttatcatttgaaatttgaagggagacagtaggaaagtgtcgaacctcaaaaacagtaatccagctgtaagaaccatccctccaacagcccacgaaactctatcggcaaatgtcatttccagcacccactgatggaaatcatctaacatgcctgctgccccagttttctgaggcatcgcagatgaccgtgaagctttccatgaatcagaaattaagtctagactggctttgccgccataacaagattcaccaaccagatcatctttaacagcaaatcctgcagcatgacacagttctgtgccattatgaacccactgtgaagccctgccacaaacaaaatcgtttactccacatggtgctagaacctggaaaacaaactcgaatcagacactggtttttgtcaaggcgtcacaaagaaaatagtataacagcttgattatgccataaagagacatgaaatcattgcttcaacaataggaaaaagttagttgataaattatgcatgggtagctgtcaaagcatagcagagatgtagatttgagacatcctcaaattgatcggataaatacccgatcaagtcaattcccataaaccctccaactcctacataaagtgtaaccttttcggatttcataaatatatctatgtattcatctaatggttttggaatccaacagttgaggg

SEQ ID NO: 38109 - DNA, 2749 bp, Cannabis sativa
  modified_base (1052)..(1055): a, c, t, g, unknown or other
tctaagtctttcagttacttgtgcatcttggccacaaaactcgacatagagatggcttagggcatttgcgacagatgggagttgtaaaaaagtcatctatttgtattcacctaagcttgtccaccaatcttgcaaagttctggtgaatcttgagacaaaattcaagaggattgtccctgtctgtgcgtgcgatttttgtgtttccaagctaagccaagcttaaaattcttggaatctttctcgccatttagatgggggagtgtcatcaagagtaaaagtttaaaatatagaatatttaatcttttgatgattattggattctgttttcattgtagttgcttcttcctcttcacttcatcctcacttttgacaataggctcagtttgagagtatccttcttctacaggttgaacataaaatgtgggggtacatcgtcttcggaagtatatgaatcttggtatggatatcaattgaattatttgtaatttttttcattttaatataaattattttttgcgattttttatgggaaattttcaaaaccctttttatattttatttactactttacgacctaagtttttatttaccaaaatacactctcaaaattttaaaattataaaaatacactttgttcagtaaaaagtaagaaaacaactaaaaaacaaccagaaatcaatcccacgacaattataaatgaactataaataaactataaaacctctaaaaaactaacctcatgacaactttaatacaactttaaataaattattgtttttattaaaaatttatttttgtaaataaaaatgttcaaagggtaaaaataaaattttttctctgttaaaatatttttgtaattttttttcaaatttttggcctattttttttttttattatttgtgaattttatttattgtaaagaatattatttgtggactttatatcaagtatattaatattttaattttttagacatagaaattaatttattttaatcaaaggatgtaatgtaaatgggatgtgattcatgaagattattattattattattnnnnttattattattattattaaaataagatgtgataattacatagataatatttagaataaataaaccaaataataatttttaaaaaattataagaaaaaactctctaaaatatttgataattaaattttagaatcattcttgggttagaaagaaagcaaggaatcaattattaaaaccaaatatatatttaaataaaaattactatccatacaacaagtcaccaacaagttatttatttattttgtatttttaaaaaaataaataatttattgtatttaatgtttttgtacataatattaactattagattaagatttaaaggctataaataaattactacaagtagatcactattatacaaggactctttatttatatatatgtatatttaaattcgtttaaacaagtgtaagcttgaattaaatttgcatattgattgattaatgcagaagaacacaagtacttgaacagatatgcagatggaataaaatctttgatttattgcgaagtaaattattatgttttaaaagattctaaagttatatatagagagagattaggaatatcattaatgtagccgactgatatgtggaaaattcaattattattattagttataaagttattgagctggagaaaataattgaagccgtaaattaaattatagacttaattggtcacatacataagacaaaagaaggggtccgacaatccaagttatgtttcaagaaagctatatcattttatgattgtgatcttttatcatgaaataagtagcgatttgcatttaaattttttttcattattagattatgttcttttattaataatatcccttcaaatataacttttatatatgtaaattaattggtcattgcatcacactatattatttttataatgagtaatataaaagaggttgtagttgataaataaatgtaaattatataatttttactcttttcacaataataaatattagaatagtagactttttttttttttttataaaattaatatttttatttttattttttcaactattaaggtataaaattaaaaagtggaaagtatatctatttatcaattatcatctattgtgtcacttatttcacacaaaaaaaaaaaaaaatcaataaaataggatggaaagactatattaatataaaagttatattctgagggatattattaacaagttgtataacttaaaagacacaagttaatagtgtaaaaaattataagagtataatatactaactatttttatcattaaattatcatttataaccaaataaatatatatcaattggtgattctacaatgcacctacattgacgcattctatttgtttcatattaaggcaaaacttttaatctatttttttttatagttgtgtatgttataattatttaaaatattctcctaaattttgaacaattgataataatttataatatagaaatacttttcagacaatcactactacaaaaagtacaatttccgtcagtttttaagtatcattcaaagaatttgcgccagtttaaaaaagcgacgtatatatcatagtcgcaaataattttttattagctttattttttaaatgacacaaaaaaaattctcttcatttaaaaactgacacaaaatatacactgttctttttcatcttttgcgtcggtttaaaaatgacacaaa

SEQ ID NO: 38110 - DNA, 2818 bp, Cannabis sativa
aacttgatttatctttttgaactattacattactttttcatgaaatttgttgttacaattttattttctttttttctttttgagttagtgataattaaaatgatcgttttcttctggaagcacccaatcctagtagaattgaagcatctccttcccctactttgtttctagattcagcacgggaggggtcactagaggcttgggcagtccaagcccttcagtgctcccccctttagaacccctggatggggcagttgtagattgagactttgaactcttcttggccggtggtattgagttaataactgtcacctcgggaacctccgtggaagggacagtcgagctcttctcaatagtcagttggggagtcttgatggtcggaacaatgcttttaggcagcatatcttgcaccttggaatgcttcactggggacttctggccgaaaatatcacctgaccttttctttagtgcgcgcagtattctctgagacataacagcacatgaataatacagagatgtcacaacaagcgtaaatcaaataagcgcaggcagagttaagaataaaataaagtaccctgcacgtggacaggagcatcttccagaataagcaaggaagaagcatcctcatcagaagcgtattcttcttcttactcgaccacaatggcctttccctttccttccatctggacggaaggacaagcagtttcttcgagaccatctctgatcttgatggcctgctcggcaggtacttggtcaccttggggaccttcttttgtttcttcttcttcaaagccttttgtttgggagtcacttcctcttcttggccaggcatagcttctcctaccacttgctcggccccttgatcgccattagatggatagagtttatacttgacaaaattggcttcaatagtcaagagagaaatgttccgagcatctgagtgaagtttaagtatttcttgagcctttttcctaagttccagtgtgaagggaggccagcactacagaggaatatgctgaaagcttgtgtaggtagttcccatgtccttaacaaagtagtaatcctcccccaacccaccaatcttggacatgtcaatatccgtggtgccaatcaaccatttctctttgatatgggaaaagtagaaatacctagacctgttttgcttggggctggatttcaagtcgaacagccagttggtgttgtgggcagatggttagccccatccttgaaaggcgtacaacataaataaggcagacatgtatttaatgcctttgggagtaaactgggtcagactaagcagataataattggctatctccttgaagtataaatgcaatggcaacattgcaccctatttagtatgaggacctaaccacacacaataatcctctctaggatctgttgccagttgccctggagagggaaagaagctttcaacccacccaaggaggcgttcctcaaagagattggataatctcttgaaagtcagaacgaatggtgaaaaaaccattgagctcccctcagacccctcctgtatatagagtgagccttagtatactcctcctctacgtagccctggccaacttctaagacttctcccatctcaaagtcaagttctcccttttcattgaagccaccaaagggtggcacctatacaacccttctttctcttctccttcttctcccttggccttgaaaggagtagcaggacggacctcgccatggtcctcaacatcctagactccaatgtccccatcaatagtatcttcttcttggaccgtaggtcaggcctgctcccctctagtcgcgacgaccaatcgagcaatatgggggttagaggatgaaggctttctagtagtcttcttggtttgcgccatcattttatgtctagacagaactctttcagaagtgtgcctcacaacggtcacaacaaactcggcaatagagtatcccttagtagtgtgagttggatgaccttcgggcaaggtatcagctatatcagattggactctgtacgtccagttagtaggaagataatacctccaacctttcttcagttcctagatgaaatgcatgtatccctcaccatgtatctggtcgggatactagtgatgatacacctcaggcttcggggaaggtgtgtgctcactgctcactcccttgtcttcaaaattagagtttgacagatcatcactagatgaagataaatttgcaaggagatgagggtgatcttcatataaaatttgaagcaagtcctggtcaatatgatgcttgcctctccaaaaatcaccaaggttcatctacaaaaggtgggagacaagagaataagagttggtcgggaaaacgaatgaaaaataaattttatatgccgaccatgcaagattaaggatgaaaagatggggttcattcagggttggaattttaaatctcagaagttcaaaacttcagttggtacatggtatcttttagaatctcatgaacaagtggaaatgaacaatttcatgctagaattaatattcaattaaagaattagacgtcacagttaaacgttgggtaaagttccaaaaccctagaagtatttattctacaattagttaaagaagagttcaagaacaggcagagtttatggcaagaaacccagaattaatgcatatatttactttcattcatctaaaagcaaggaaaaattgacttactcactgattcaaagctttcttgatctgctcggatggtaacgtcagaggtcttccaacaagttcctcaaagatttgagagaaaacttagatagaaaattttgctctgattctttaaaagtgaa

SEQ ID NO: 38111 - DNA, 2689 bp, Cannabis sativa
aaaaaaaaaaaaaagtgtacaaaattaaaatatataaaaatttcaccactaattatttttattattattatttggtttcgaaattactaatttgtaaaacaacactctataagtagattataataacaattgacaatctttgatgactaaattactctttcttaattattaatgtgattgaacaaatacaaaatttgtttaaggtaaactttggttttttttttttctttttatatatatatatttatatatatatatatttatagattcatttgtattgagtggttgcctctctttacccgaaaccaagttcttgtgctgccaattttcatcaaatgggaaatatttagccactgcaggacattcaaagaaggtacctattaattattaattaccttataattaactttcttgattatccttaattagtttccaataactcttttaccttaattaattcaaagcatgatcgtatataataaattaatattttatttgcagattttcgtgtgggatgttggaacttcatgctcgtattctactttaactggccatttatctttaatcaccgatattcaatttcaacagaattcgagtatttttgcatcttcttcctttgatggaacaataaaattatgggatgcagctagtgtaagtacttaaatctttgaaatttttaaatagtagaacaaaaattaaaaaaaaaattacaaaaatacgataagataattttttatttttttttttatttttaagctttgaacttttttatttacaaaaatacgtactccagtaaaaatagtaaaaataataaggtaaattggttttttttttgttgttatattatagttgtcatgagattacttttctgactgtttttagttgttttataatttacttatagttgatttatagttgttgattttttattgtttcttacattttattaaaaaaaaatatatttttgtaatttcaactggaaaaacatatttttgtattaaaaactttgcgtcctaatattataaataaaacataatttttttttttttttgaaatttctcccaaatcttttctcattattattaattccaaatataactatctgtttatcatgtttcgaaattgaaaatcctaataataatgatgatgatattaattaatgtttttcttgttatagccaaatcaacttctgtctaacctatttgttgggcactcaaaggcagttcattcactagatttcaaatccaacaatacccttttctcatgtgacaatactaatcaaattacacagtgggatctcactcaatctacatcttatgtttcaaatgttatggtaagtatttcaattttgttattataattatgttatgttataataacataattatgttataggatctcacttataatatgttatgttatatgttctaaaataaaataaacaaaattttcaagctcatttattattatatatataacatatataatactcttaatatgtcatgttatgttctaaaataaaataaacaaagttttcatcaagttaatttgttattataaatataacactcttaatatgttatattatgttctaaaataaaattaataaagttttcaagtttgttattacatataataacactcttaatatgttatgttctaaaataaaaaaaaataaaaaaaaactatattcttttaaattatatttaatttgaactgtagagaactgcaagccatattcgaatccaacccaaccatggaaagcttctagcttttgcatcaggaaatgaagttggttttttcaacactgaaactagagaagtcttgttcactgggaaggtacacatatataatattatatattaataaattttacttaattatatagagagttttaatataattatgtatatatgtttattaaatttcaggtgcatgagaaaattgtttgcttggtatgttgggattatgatggtgatcatattgtttctgtaagtgaagatagagtacaagtttggtcattatctaaaggacaatgcatgtatcaacttgattcaaatggagaccattaccaatcttgtactattcatcctttttatagacacacttggataattggtggtaataaggtaattataataataaaaacaaaacactcatttaattatatatatgtacatattatgttacaactaatcatatatactttgtttgagcagaacctgaaactatggaatcaaaaagcaggcccaaaggtattgaaagttgtagctcatggtggagatgttacagctttagctgaatcattggaaactaatatgattgcttcagctagtgatgatcaatgtgtcaagttgtggcaagaaaaagacattaattattaactaaaaataaaatgtgtaagtatgtgagatgatgggattggggtgatcaaagattatcattcctgaggagtgctaattacaacctcttattacaactttttagtcaatcttcacgttcgaaatcacatgtcgaaatatttttttttaattttttcatagcggtattcgttatagttacaatatcatcctgtaaattttcgaaaaattcggaatagtttacagtgccgaaaatagagtttctgatattctagtttacctcgcgcgttcaaaaacttcaaacgtatttttcgacactgtaaactatt

SEQ ID NO: 38112 - DNA, 3001 bp, Cannabis sativa
gcctcaagctccagattttttgaacgatccattaaaatgcttttcgattccaaatttgtgttttatttctttgttttccacgagtgaggttgaatgtaatatcactctggtcattctgcttgttagtgtctcgtaggctatcagggctgctaatataatttgaaattatttgtaagagcctggtaaagataatttgaaattttttgtaatttatgaatgcaagggataaattttaatttaaaccacgaggcatggttttgttgggaattcttgattttcttttaagttggagttgactttggatatcaaatcctaattgtaacacaggtatgcacacagcatatgtatatctcctcttttctgtatagcctttattccatttggaaagtgatagtccctctaccatttgttagaccgttagatctacataatactttagtgctgcagtgaaagtattttgtttaatattattgggctttgttatttctgactattaatgctgctatggaaagaaagtttatgttttaagatatattaccttgtttgagttaccaatttctttctactctatgaaacaattacctctatttgatgagcattttatttccggctgaagattctaattgaattgtcaatgacgtcagtttatgatatattttatatttattgaaattagggaaatattttattcctataacataaatggatttgattacttataaagatgtgagcatttataaaactataattaaagctttgcatcttggtttgtaaaaacatgtgctcctttctaagttatgaatttgattgggatatatatcattttgtttcttttatattttggattcttgaaaacatccccaaaagcaatggtgtatctacttcatgccattgaactattaaaattttagaatccacttttaatatttcgaacgttgcgcatcaaattttaaagagctttgtaaagggattggacatcacggtggtggtctggcatgcaggactgtgtaccttgtgctactgtgtttcttatttgattttttatcgatcataataaattagcataatctgctggtcatgtggatcagcatctttccaataggtatgtggtgtggctcaaatcagtcctttttgtatgggtaataattgtgttcactatcacagcaccatcttaaaaatatgtttaagaagacacaagcagcacagacaggcacttatttagggaactaatatgacttttttaaatagctgtgatagtagaacgtacctgcccaacttgcaaaaatttgagaagaattaagacaaatgttgttttgatctcatatcttactttccatgaatcttgtaccaataacaggttgacatggttataattccagcaactactggtcagatgggtgttcttcccggtcatgtatcaactattgcagagctgaaaccgggactcctatcagttcacgaaggaaatgatgtgacaaaatatttcgtcagcagtggttttgcattcatccatgcaaattcctacgctgatataattgcagtagaggctgttccactcgataaaatagatcttagcctagtccaaaaaggacttgcagaattcaaccagaagttgagctctgcttcaaccgacttggagaaagccgaagctcaaattggagtggaggtgcatagtgccatgaatgctgccctcacaggctagtgttacttactactggtcccttggtcaatttgctcttgttaatttagtcataatatctcacttcatgcaaagttgcatccttttttttaaaattctgcctcattttgtcttctggagccaaatttgtctctgaacattttatttgtttttgtggtgaatgtggaattcatattaataatcttgattgagtatcaggctttcacaaatagctgagcaaacacttgaagaaattgtacttgtatttaccggactcgtttatttttataagttttatacagctttatgggggttttcattatattgttggtcactgcaactgtggagctgtataactcagattcgcacaaactttataccgttggaaagattttaaaccttattaccttaatgacttgtcaatttcctctccaaaaaggggtaacaatgaggtttttgatgtgataaattcagatggtaaacactattagcgtaagctaattgtgattgtgtcactttacacatttagtagaagaaaaaaaaaacaaaaagtagtgactattaaacaaagataatccttttaatggttccacatacatacacgtaattagcagtcaaatatttagacggttttattgtttttgagatttttattcaagttattttataggacaatttttcctgtaaaatacatgtttttaagcttataatctataaaatttataatttccttttagatggagctttagttgattgggataatttgagaattactttttttattatgcattaactaaatataaatgcaaaataattttaattgataaatgtgctattttataatcaaaatattaaatataattttacataatatatcaaaattagagtctctaacacagtataacttataaaattgggtataaattaaaaaataataataaaaaaattaaaatagaaaatgaaagtgagtttagagtgtaattaggtatgcccactatactcgattgggctaaactcatttggagttcaaaataattttctcaactttgcttaagaaatcttagcccgttgtgaagcttgtcaattttttttttttaatctttagtaatgaaataagtatcttttaactttatattgtataaaagttatttattagattttttgatttattaaatgataaattagattttatattttctaaaatagtaccttaattttttattaaaataaaatttaataataacctgatcaattggtattattacaagattagttacattctctacatctgttcatgttaaaaattatcttcaagttgattat

SEQ ID NO: 38113 - DNA, 1727 bp, Cannabis sativa
gaattgttagacattgtaatagttgattcttaatttgttttaataaaatttcatattcccattcaaaaaaaaaaatacaacttatatctattaaatgaaactaaaattaacattgaacacaatttcaacaatcacaataataagagagaatagaataatatagacatttcataggtacaaaaacttgtaaaatgaaaattatattgtttacacgtttgaacataaaatgaataaagttatgtcatttcataacctataaaataatatgattatttttctatagtaaaatgaaagttataagttgtcacaagttaaatttacactctaatattttcactttttcaccaaattcacatatgtctgttcatcaggattatttttgttagtagagtttttggaacttttggatagcattcgcactgctcacacttacaaacgtagtatacacaatctttcttcattgttagtcaaaagtattcttactgaatgatcttcttgaataaactttatctggatgtatgatctctacagaaacttttatgtattacaagatttattttagtttcggctatacacctcagaaatgagatatggcacactttctttttttttttttaatatatgtattgtttgaagaaggtgtcatttaagatattttgtggaaaaatctctttttgaaatgaattagtattttgcaatgggctgggctttttgtccaagttttaatgggctcgtgctaaacgatcccatctatttacgtggaaattgcattgtatgtccattttattttatttgttttaacttttacttttattttcatattctttaagacatacccacttttatagaaattgttcttattatacccattagattaatgtaaatcatatgctatacttaagtggagggcaagggtatattagacaatctactcataaaagtagtagattttaatgaaatataatataagactatttttgattaatgaatacaaaaaaaaaggtattcttcaacttattcctttatttattactactacgcccggtgagccctttccaatttccgtgattcttatcaataactaataattcttttaattatatagttaaattacgcgtaacaactaaaattgccttattactgtttattacatcaaaatctaatattttaaaattaatatttctaaaattgatatttcatataattatttttatatatatactacacatctaatgagaaactaattcgaaatacatataaataaattaaaaataaacattaatatatatacatataatttttttaaaaaataaaattaaaaacataaacaaactaaatccaaaatgcatatttaattttttttcttcaatagaatcaaatcaaatcatatacttacacatatacatatattttaagaaaatcataactaattaaaaatagaaaccaaacataaatgcatataaacattcacaaatagaaccaaatccaagtatatataatatactttaaaaaacataagcgaaaaaaaaaaaaaactaaatatatacaaattcacatatacataaatacatccttaatttttagaaactaaatccaaatataaatatatatacatactttaaaaagtataattaaaaacaaaacaattccaaatatatatatatatacttaaaatataaatatacaataatactatattttctcaaataatcccaaactaaatccaa

SEQ ID NO: 38114 - DNA, 2266 bp, Cannabis sativa
tagtggagtgatcgtcattgctgccactaataggcctgaaattctcgactctgctttgcttaggccgggtaggttcgacagacaggtaagttaactaactaactaactgcatgcattgctttatatgttattttctttattggatttgagatggaacgcatgcactttagagtaggcacatcaaatgttttaaaatatttacagaattaaactaaaagcatattatatttaaatttattactctaaatatattttattacctgtttgagattttagttttaattttatatgtggatatgtgtaattgtaaatattaatattatatgtttgaaatgaataaaatatattaaaattaaaaaaaaaaaaacagaattttgtgatgtattttaagagaattgctaaaatgcactattacattctgttcggtgacatactgctattggtgtaattaagtattgggtcttatataacttaagaaaataacttttaaaaaatattgctaaccaatcgtgaggtgtcacctatagaaaatgctggacactaacaaagtctgtattttaaaaaatgtgatgtatggtgtgatgtaaaagtttgaggtaaaattttaataatgtatttcgaaaaataaagtaaaaaaactgatgacatgatgagagtactgttaccatacactcaccgactcttactttcatcctaaaaacgttcaaattctaacaaagatggaaactttggttcatttatgtcttatgactaaaaaaaatatggcatattgtaggtaagtgtgggtttacctgatataaaaggaagagaagagattttgaaagtgcatagcaacaacaagaggcttgataaggatgtttctcttagtgtaatagccatgagaacaccaggcttcagtggagctgacttggcaaacctcatgaacgaatcagccattcttgctggtaggagaggcaaacccaagattacaatgacagaaatcgacgactcaattgataggatagtcgccggaatggaaggaacaaaaatgactgatggcaagaacaaaactcttgtggcttatcatgaagttggccatgcagtgtgcgcgtaagttgaacatttttatatacataaaaaccaatcatttgaacttgttcttcttcttaacactaaaaggtctctatggttaatgtaatttttcaggacattgactcctggtcatgacccagttcagaaagtaacacttattcctagaggacaagcacgaggtcttacttggttcatgccaggagaagatcccactcttgtctctaaacaacaactgttcgcaagaatagttggtggtcttggaggtcgagctgctgaggaaattatctttggagaaccagagataaccactggtgctgctggtgatttacaacaaatcacccacatagctagacaggtatatatatacatataatgtatgtttcggttggagagtagagagtgtattacacccatttaggataatcattatgataaaaatgtgttgtttttgtgtgtaaaaacagatggtgacaatgtttggaatgtcggagattgggccgtgggcattgacagatccagcagcgcaaagtgacgacgtggtgctgagaatgatggccagaaactccatgtctgaaaagcttgcggaggatattgattcctccgtgcgacgtataatcgaaagtggttatgaggttgctaaaactcatgtgaggaataacagagatgcaatagacaaagtagttgaggttttactagaaaaggagactctaagtggagatgagttcagagcaatcctctctgaatttactcaaactcccatcaaggttaacaaaatccctgtttgtcaaatgattgaggcttaagttatgtacagttaattagactatataacatgtaaaatttaggaaccgagtgtcttgtaaaaataatttttactgcaaaataacttcaatttttctttttaatttttatcaagaaatatattttcattaatcaaatcggcggattgcatactagaatgatattttaatggaatggtctttcacattttaaagtttcttattcttatttccattcttatatttttattcattccaacaaaagccacgttagtatctactaaattttatggttactattaacagaaacacagttagttgagagtattattcttacatatggttcctcttccaacccaaatctcaaatggctttttccctctaaacaaaacctcaaatggcgattcaagttttct

SEQ ID NO: 38115 - DNA, 1094 bp, Cannabis sativa
atatatagatataagggataagggatcatttattaattatgatgacgagatgggttcaaattacaagataagtaactacactgaaatcatggtatagtattttggcaatttttttcctacacgatgatagatctcatgggcttctgtaaagaaaagagtaagatacgatatcgactaataacccatgttggccgccgtatattattgcacgttcagttcatactatgcaacacatatatatattatttaataatattacgcatgtgtttaatattaacattacacgtcgactcttaaaaatatagacattatcataatgcacacacaccctcactctctcgtctctctcatctagttccctataaataccatccatatatctctctcaataatcacctcatcaacacaaacaacaagtcatttttgttgagatattattattatttgcatattggtccctcaacagttgataaattatatggagagtgggaagaaaatcaagggggtggtgatattgacgaagaagaatgtgttgcccaggggcaccaacgccacctctgattctgttgttgaacccgccgccgcagacatctcaggccaggaagtttctcttcagctcgttagtgctgttcatggtaataattaatatttttgctttgcttatataattcattatattgtttttattaataacaatgtctggtttgagtttcaagttttagctataagacccttatagttatatatgcgaccaacgtttttcttttatgaaaaataaatgaaattaagataaatttttaaaagttattctgcgtacgaaaacaaaataataatgaataatttagtattcatacttttgttatttttggatatttttgagaatatcttttcttcttttgttagataatataaaataggcttataataatggtgtacacatgttttaattaatagaattattataataaaagaccgtttcctgaaaaattaaaaattactgtatattcattaaaaaaaacaatatttgattattcattaaaataaacttacttattttgtccaaatttctgttaaattttgttgcaggcaatgga

SEQ ID NO: 38116 - DNA, 4265 bp, Cannabis sativa
ggtttgaaaaaatggttaaaaaccgcaccacccgcaccgcgaacacccctagtgcatatagtcgcaatttataataaaatcatggtaagaccatgtatcgtcccacaaaaattgattatcaattaccaatcaattatttattttgtttatttttatttgatcaaataatgttttagaatttttagcaaagaaaataacaacaaaataacaataaaaaaaaatcaaaggaaacaaaaatgagaaaataattaggactatattagtatcatcaactatcatttcttttacttcttaatatagtttacctaactcatcttcttcttattcaattgacaagttgaaaatagtagtgcataatctgattataacttacaaactcagtctaagtgatctctttatatttctatgaaaaggttaaataaaaaagaaagcattgaacatagtaactcataaaaatcatacaatcaatctagataatttcgttctaaattaaatggcatcaaaagcaaccacaacattatcaaatcttacattttcagaattttgattcgaatttttaaatagaaattataaacgaccaatatataattacaaaactaaatcatattgcatggaattgaaataatacaagaataagaaattgaaaatctacattaattcatataaaaaaaattcaagtaattcacataacaagtctaagaaaaatagttcataatcgtcatcttaaacataaaataatctaagataaacattgagaatgataaagagaacaaaagaacttttcaaaacaattagagaagtccaatggtggctttatttacccccaaagtcctctctcttcaagtttggcacgaaaataggtttttaaacctattttttctaacctaacaaaggcgggccataactcgtattttttcatgtcgcagccgtgtgaaaattgaaaaagagaaactgaagtcatactacaacttcctccaaaatgtgttgcgatccatgtcgaaattgataaacatgtactcaaagcaagccatgatgtcactaggccatgttgcggctcctacaactttagctggagtaaaataaagagcaagtcgcggctcaccaacgccatgtcacgacttaataaaatttcttcaaattttggagttttcgatccctaaagttcactacaacatcaaaatcgtcttaggatttatcctatatttacatttgacaccaaaacttaactttttcttctgttattgactcaaattctcccaaaagttcagccttctcttttcatttactaaaattgcaaaacgaacaaacacaagcataaaaccaaacaataacaaataaaaactacttaaaataccctcaaaacttgattctaaaactcataaaaataatcctaacaacaaacatagaaattaaacgaaataggaaataaacttgttgagatcgaattaggatgctccacgacgtgttgttggcctccaaaaaattgtccccctccaatgtcctttctccattttcgaaattaaggttaaaacctaaatttttttctactttcagcaaggaggcagcccacggagtgcctaaaattctgggcttgaagatttcaatgtggtggcattgtaaaaccatgtcgcaacatcataaccaccaagaaaaaattctttcttgtaaatggtctagctacgacactacaaagtcgtgttgtggcctaaataaaaaatgtaaaatttattatttcgagcctttttttttcgttaccaacatcctaaaagtctttcaagatttctcaaaaatcgaaaactcttcaattaagcatgtttgagctcattttgatggcatttcaccacaaccactccattcaaagttaaaacaacttaaatgattagaaacactacctaaaatacactctaaaatagtatagaaatagacttaacaaaaccccgagagcctatgtccgagaatctctatcgaattaatttgttgatttttccccttgttattattaagaaatactaatctatccttcttttacaaaaatgacatgtttcttgtttagaaaaataatcatttgactaattttattcattaaaggaaacttatttttggtctctttgagacttttgtaaaaccaattcacaactaaaattccttttgagcctttttaacaaaattcttatttttgtgtcatttttaaaaaagtttgcattggacccaaaactaagttttccactcgtcaaaatattattttcaacatcaattatgctttcaaatcttttattctaatcacccttttatttatacaaaaagttgttctcttgtatttccaattttcttatttcaaaatttggtaaactttgattttcttgtaacttgtagatcctgtcatttattttacatagagccaaaacttgagaaaatcttaaacttacttatatatactaaagctacacgcaaacgaaagcacatgtaaaaattcattttaggttaagagatataacattgcaaaaattcatactcaaaattgccagattttttagtttccagaaaattaaggcaatttgtaagaatcacaactccaatataagagtgtacttttctcgaaaattttaccaggatttttgtacatttgtaaaaagccatcacaaaagtttcagaaattttgggcaagtaaaacataattaaaataattttaaatttggacagtgaaaactaccaaacttttctagatttactccccattgccaaaatgctcatatcttgagctttacaaaacctgtttaagaaattccaaagcctaacatcaattacttttctagtactatcaaactatataattctttcacaaaagcagaaggttaaaggtacgatctgacccattggaattgaaatgtgttagagagtcccacattgttaatgtatggaaagattatagaatatataagaggaatgagctactcctcccatagctaattagttttgagacgaaacctcattcaccttattgcaaattctaacacaagacatcatgcatatttaccacttcaacaatatttaaagcaaaacctaaaccccgtacatgcattcattaaagcccaatcacaggctcaaccaagaaaatggactcaagccattagcaaaatcaagccttcgagatgatggacaaattatttgtccaccgagataaaccttcatcacagtagggctccggatagcatcaagataatgcttctggaaaggtaataaacgagcctttggatattcatatctgtattacaataatctattgttaaatctcacaatatcagggctttatttctaggatcatgtttagaatttgtattttttatataaggaaataaagtaattatcaatcaagcatttatgtgtctttattaaccacaaaagtaagacacgatttgataactattaacgtgatgtggcatttacgtcagctaaagatcaatacctcatagttggacttcacaaaatgagcccaaagtcaacatattatctgtattgaccccatcaccaagtaatgtgtacatactagaaatctaacactataaatataagaaactcccttcatctaattccataagtgtttaggcaaattctagggtttagacacttgagaaaacacttttgcaaattcataaagcttttccagccttatcataatagaggtcattaatccttgaaccatataaaactatggtcttattctttgtctacaatatattttttataagatttattatattttatcggtttctaaaaatctcgataaatatttttgtgctttcgttaagtactgaagaaataagtgatactaacaaagttgtatactgcaaccatgatagccacccaaaccaccatcgacaaatttagtattcgtgattgggatactcccatggatgatgttaattcgactactcaggcgaaagtaggagtcgatggagacctgtcagaagcgaccaattgtccttccaagaagactcaacatactaaaaacatatgttgataaaaatcctatctacaaagacaatccaaaagatcccgataacaatcttgaggactagagaagacaaagaagaggaataatattatgagccagatcctgttgtcactaaaacggctgaagaactccttgaaactaagagggagttggttgaacaaggagaaatgtccgatcgaatgcaagaaactttaatcagaatggaggctagaattgagccaaaaaatgtgaccctagatgaaaatactcatga

SEQ ID NO: 38117 - DNA, 3488 bp, Cannabis sativa
  modified_base (538)..(550): a, c, t, g, unknown or other
  modified_base (3420)..(3440): a, c, t, g, unknown or other
tgtcacgtatacatttctgttggtcacattgtcatttaattgaccaaaatgtacgaaatactaaaaataaaaatggaactaaagtttgaagagttttactctaaaaaatgaaggggatagttgtaccaaactcaaaaatgtagatataactttataactttttgtggtgaaaaaaaaaataatttttttttatgcaaaattggttgagtggtttgtaaaaataaagtttatgaaaattttgatttgtaaaataactttataaaaaaatttattagcgaaataattatttatggtcagagaatgtgatcatcatggtcgcaaagtgtaaaataagtgagattattttacaagtatttaaaatggttagtttgattttttttttaatttggttattttttaaaacataagaaataatataaaaatttaatgcccaaatatgattgcttaagtggcccaaaatagtaggagccttatctcacaaatacacaaaaacaataaaaaaattataaaaatcagttttataaaattttaaatattnnnnnnnnnnnnntgattttatttacagaaaataaggtgtttttatgtttactcgttaatttgttgttgattttttgttatttatatattattttttattattgttttgatgttatttgatattatttttcatgtaatttttatgtagtttttttattattttcaaaaaaatttaaataaacctataaacatgtttcaaaaaataaataaataaacccagaaagtgaaacttcttcaattaaaaaaaaaaagcttcttcttgttctctttctacggtctcgattgttcacaccgtctccgacctcgattaatcaatgggctcatgtatcgaatagcttcaaaattggcctcatccattaactataagaacctggtaaacacttgctccaaccaattttgtttttccttattcaagttacaccgtcgagttttcgggtttatacacttgccatattttttttatcagaatgaattaaataaaaaaaagcttcactaaggtcctaaacctctattatgaggaaaattttggctttttctagttcttacattcgttttacttaccgagccatttcggcattttacaaagattgctaaattcggtaccttgatgggactttaggagccatttgattttgggcatatatatatttatataattgatatgggcaaatcagaactcagaaagtggcaacggctagattttcaaattcatcaccttcatgctaaaatcctctgctcaacgtttcttgtcgacctctttatcttttactcagtcccatttccgtttcctatcaatttttactcgttcgttctctgttgcccaccataatattcaaagctcactccaactacaaccatcttataatggcactcataatgaacttattgacttctttgattaccttctcggacaatgcgttacaacccaacaatgcaaacaagttcatggtcaagtgtttctcactggtgggaactcgtctgggttcttggctgctcgacttgtctcggtctattcccgttttggactcgttgaggattcccagaaggtttttgacaacttcccggttgagaccagtagcaaaaacatgcttttgtggaattcaattgtgagagctaatgttagtaatgggttttatatcgaagcagttgaactgtatgacaaaatgctcaagtttggagtttgggctgatggttttacttttccgttggtaattagggcttgcacgtttattggtgatttgtttttgtgcaagagaattcattgtcgtgtgttgcaaatgggttttaaaaataatctccatgtggtgaatgaaatgttgggaatgtacggaaagcttggccaaatgaaagatgcatctcatgtgtttgatggcatgtctattagaagctatgtttcttggaacactatgatttcgggttatgcctttaaccatgactatggtggtgctactaagatgtttcacaagatggagttggaaggtttcgagccgaattctgttacgtggacgtcattgttgtcgagtcatgctcgatgtgggaaacatgaagaaaccatggagttgtttggtctgatgaggttgagaggacttggggcaactgctgaagctcttgctgtagtgttatctgtatgtgctgacttggctgaggttaacaaggggaagatgatccatgcttatgtcataaaaggtggttttgaacattacttgtttgccaaaaatgctttaatttgtatgtatggaaaatgcagagatgttgaacatgcacagaagtcatttttggagatgaaaaccaagaatatagtgagttggaatgctttgatatcgtcttatgctgaatctggtttatgtgatgaggcttatgaaatttttattcagttggagaaatcaaatggttatccacaagtgaggcctaatatcataagttggagtgctgtaattggtggttttgcttccaaggggcgaggagaggagtctcttgaactctttaggagaatgcagctaacgacagtaagggccaatagtgtgacaatctgtagcattttatctgtctgtgccgagttagctgctctaaatcttggaagggaaattcatggcaacgttattagggctatgatggatgataacattctggttggaaacggattgatcaacatgtacacgaaatgtggaagttttaaagaagggcagctaatatttgagaatttagatacaaaggacttgatttcatggaattccatgatcaccggttatggaattcaaggaatcggtcagaatgctctgagagtttttgatcagatgattaactctggattcaagccagataatgtcacctttgtggctatcctttctgcatgtagtcatgcagggcttatcgatgagggtcgttctcttttcaatcagatgagtaaagtttatggaatagaaccccagatggagcactattcttgcatggtggatcttcttggtcgtgctgggctacttcaagaagcaaacaacatcattaaaaacatgccaatgaaaccaaatgcttgcgtttggagtgctcttttgaactcgtgtagaatgtacaagaacatatgtgtcatagaggaaactacagagcacatttttcaccagatcaacttggaatcgaccgggagctacatgctgctgtcaaatatttatgctgcaagtgggaagtgggaggaatctgctaaagtgaggatctcagcgaagacaaagggtttgaagaaaattcctgggcaaagctggattgaggtgaataagaaggtgtatatgttctcagcagggaatgcagggcaagcaaatttggagttggtatatggagttcttcatgtcttggcgcttcatatggaatgtgactgatatatatatatatatatannnnnnnnnnnnnnnnnnnnnactaggtgattgttacgtgtcaagccacgtagtgttagttttatttaa

SEQ ID NO: 38118 - DNA, 2037 bp, Cannabis sativa
  modified_base (1148)..(1148): a, c, t, g, unknown or other
ggtcagacaaacatgccaaattgtgtaattacctccaattacacacaaagccaattacattgtggctttccaaacgcaccctaaatattaccatgaaattttaagtcaaacttttgaaaaaggaaagttgatttagttagggtagttccaaactctccaaccaatgagacccttaaatctccagctataaaatatgtggataatagtaatgttatttatacaattacaatgtgtagttgcaaactttacaaagatgttgggcccctataaaaaattattgtgtaattaaaattgagtataattcagagtaattataaagtttgacgtacttgttcaatcaaagaattacatggtaattatgtaattaaagagttttaattatattctccaattcttgtgatcctataaaaattaactataattacagtatattactatttttagattaatgttatgaaactatgtaattattaactcgcttgctaaatatgaaaatgagaattcatatggaaatactacttgacatttaaatagatctatattttaaaatggaatataattactctattgtgtaattactactcacagttatttttaacacacattattcttctcacataagtgtactaggagcaggaccggctcaagcggtttagaaaccttagacaaaaaattaaaattgagttttttatttaaaaaaaaataaaattatcaatcaatactttataaattcaatatcaataattaaaaaaaattaaaataggtaagaattttaaaatcgcgtgtattagaatcacaaagttttatcaattttttttttttttttgtaagtatggatttatttttatgaatatttattatttattatgtatactatatattataaaaaaatatttattatataacatataaagagatgataaaaataaaacattttaatatattgtcatatgcttaaatcggcctagctaggagaacatattgagttggggtatatatcaaattaaggattgttaacatttttgtgttaaaaattgtactgaatccttataacatatattgaagtaaaaaaaatagtgggtccaaaagtacaatataataatgaatgattatttatttaaagagtagaaatatatatatatatatanggatatgattttgtctcgtgatgtactttcacggaatgtattctgtggtacattagattggtctcacggtacattaaatgagtgtcagggtacgtttctaagtacaataacgggacaaaatcatatccctatatatatatatagagagagagggggagggtaattttgtaccctatatagtacttgtgtaaagggggaacatatattgccctacaacttacaagtagggctcaccacagagtataaatgcctcatgctcccctttccctttgttattcacaattcacatgtgccctaaattccatttcttttctataaaaaaaaaatgtaacactttactttatttttaattttatgttttttttttaaaaaacaaattatttacacctccaaaaacttatagaatatatatttttaatttgtactagtttgttttttttataaaaataaaaataaattctccttctcatgcatattcttaaaaaatacatacattaaataatatatatttaaatattaagatttaagacaaacaaataaataaaataaaaagtatattttattagaaaaaataaaaaatatatatgaaaaaattagaataagtattgaaagaagtatgaagagtgatttttaaaattaattcaattcttttactattaaaatttacttataattttatagggtacaaataaaattctctttattttttcttcataataaacaaattttgtttacagataagctgcatgatgaagaaaatttagaatgcataatcataaattttatatctcatataagaaatcacacaaatgggatatatatttatataaattttaattaaagttttcagggtatagttaatttgggtaatcttttttttttttttttt

SEQ ID NO: 38119 - DNA, 2323 bp, Cannabis sativa
  modified_base (1242)..(1242): a, c, t, g, unknown or other
atagtcccacttttcttacagcatctctcttagtttctaattgccacatggcttagaggtgattaatttcaattggaatgcagcacatttctgattgaaaaacttaggagaaatatgtaatgactcatgagtagtattagttactacttttgtctaatttttccaatattaatttattatctcttacttatctaatttttatattataacttttattaaagaagtataacaaggacattatactgtcttcaatcattttcacgttccatttattaataaaaaagagtcgaaattagaggaaaaatgaattaattagaaagaaaaataaaagaagagaaaaataagccatcttgatagctaagatagccctttcaagacaaagacaaagttgattttatctctcatttgttaactcataacttgcctgcttaagaactcattacctacaaatagtcaatgaattaaaaagggtgtgttgttaattaatcaatttgtagaaacttgtacaataatgcaaaaaagcatgattaattttgagataactatatatatatatatgatgcaatttgcattgggtcccctattatatatattattaggcttattacttttcatacttcaactccaacttgagaaaaatggcaattatatgcctaaaatataatatgtaggctagctagctaggcctagaggaaagacacaagtttttagttatggaaactttccaaaatgaattaccaggtgccataaccagatttgattatacagatatatgtatatatagcagcataaattaatcagtatattaaattgtacgtaggaatgcttaagttaattaaattattttagaaagaatcctcttatttatccatataataataataatagagaagttagaagtagtgcagtggatgaaataaacatatagttaaaaagacaaatggtatgttaaaatagagttgtgtacgtgtgaagttatagttgcatatgttaatgtttgactagctactagctatgttaaaaaaaatatatatatatattaacatttttaaatcttaaaacctgcttgccacggtttccataattccaccaaaaaaaaagaaataaacaataaaaatataaacaattgacaatcccttttggcttgtgtgtgcgtgtgaaatgaacaacattcatgagcttatttgcacctaccagtttctttgattataaataggtttttatatatacatatatttatanatatatatataaatatatttatccctatcagcttatgtataagttttaggtggaagctagataaggtaatgtttaaaaaaatacaaaaatatactataaatatatatatgtatatatatttatagcttaagctaagggtgtaacttttaatctaattagagaactaaccaaaaataataatcttaatatacatatataattgatgcacacataatacacagtgtcatgaacttgtaagaaccaagttgatctcaaaatgaatcaagctaaatttaattatccctcaatattttcttttaaaatcattagttaatattatgtgaattcatttacttttaaaatatgtatctatattatagatcataattatatagttttatctctgaatttttttatgtaacaaaattttttcctaaaaacccttaaattatagaaattattacaaacatgtctatttagttgcattcgtttattttgtaaaacagttacaacatgattccagacagaatatatattatattatataatatcttatgatatataatgatgagtttaatttaattttatattttgtaaatcgatttttttaagcctagcgagctttaaactttatgttttttttaattatttaagtgcaatatgaataattgttttaaatactttgtagtgtatattttaatgaaagaaaaccatatttatgtttaatcacacattcacactatcctgcttcgttatgatgattatacattttgagtttgtttaataaataacaaataaataatgccaaaaccattagtttttgtcttattagttatagagggacgaaaacacatccaaaaccaaaaacattaaaacaatgttggagtgcatattaattaaaaacaaaacacagatattattagaagaaaaaataaataaatgttagaaaagaaatagaaaattgatcaaatcctattcctattgctatgatgtttctaggttttgttttgtactgttttagggttattataataataatggccttaattactgtttggaagcttgaaaaaagattaaaataaataagaaaaacaagtggtgt

SEQ ID NO: 38120 - DNA, 1847 bp, Cannabis sativa
taaggagatatcaacttcctgttgatcaagattatttatcgctttcacaactgtactgatgaatctatgtgactcgacttgtcttgaagactttacacatctatacaacaaacaattaaaagcaggtagtaaatgtaccaacatcactcaataatgaacatcacatacaaatacatataaatataaataaatatgaaaaaaatgttaaatagtgattaaacgtaatcattatatgttagaaagtcttacattcgtaatgaatataattcaatatcattttttcggttactccatttattgtgaattatttttatacgcaactctatacttcttacattatacatcaccttattatactttcttgaccatacttttacattctaacatagtgaactaaattaaagttaaacgagtatatgctccaaatttaaaaaccaatcttaaaagaagatttaaaagagctacgagtggtctaaaattaatgagcaaaaatactcaccatcttgagtgtgctaattgataatatgaagaaactttatatcatttatatcatatatatatatgagtgtatacacatttggtaccatatgttttatataaatacaggtttcgtatcatgtatttttaataatacttatttggtaccctgtattttaaaagtatacatatttggtatcttaaatttaaaattttttgataaaattttatcaatacaattaaactgtcttcaattttataaattctggattcaaatttaattatttaattacgtataattgagaaccgtttggtgaaattaataaaattatattgattaaattttatttagagtaccaaatatatataattttaaaatataatgtatcaaataagtattattgaaaacataagttaccaatgtgttttcagaaaaaagatagagtactaaatgagcaaatttttatgttcctaaagcttggaaattgtggggtccacatggttttttaattggttgttcatttccagaaactcgattcaatattgatttaaaatattgacgggttaattacaatcttctattataatttctagtaaattattgcattcaaatcacatgatggaatatttttttcatagcgatatttgttatagttataataataggcgtgctactggcaacctcatattgaagagtgctactttatatcatattgtaattagatgttcgaaaaactttaaatttatttttgacactgtaaactattcaaaattttctaaaattttcacaaagatgatattgtaattatgacaaacaccgttatgaaaaaaaaaaattgaaaaagacatattttggcatgtgttttttggcacatagattgactaagaggttgtaatatgaagttaacagtaacacttctcttacaatattttcctaaagaatagaaagtttcaatttcatgttttcagctttttatataaaaaagcttaggaacgctagcattttattttattttaaatcaacacaaaacttaacactcaaattttactcgatgtacttaaatatttatttttatttttattgaagcgtatatatatagatgtacttaagttgtttatcttaggaataaatgatcgagagtatttattgggaatcttgtctggatgaaaggaatttgtttaaaataaaaaaaaaataatcaaaaattatattttattaggttgtttactaaattatttgaaaaaaaaaatagaatcatattattttatttatataaataggaaaggtattaaaatgctttaatttgataaaattatcattgttagaacatgaaattattttttgttgctttcaaaaaaaaaaaaaatta

SEQ ID NO: 38121 - DNA, 1999 bp, Cannabis sativa
agttttcctttatatatattgatatagatattgataataatataataataataataatagtgtaagttataataatagagactacataatagtgtaagttatagaaataaaaagacacattaattatgtgataatatataaaaaattataaataaattaaaaaaaattaaaaaattgagaaatcaaagaagaggatgaaaaactcatacaaattgccacctcaactccttaatgctttattgatttgtatgcaagtgaaaaacacatagagcaagcatgaaaggtgcaaggaagaatttgaagaaggataaaatgcaagtgttgtccctcaaaggttctaatctcattgaggtaatacttgtaaataacttctactatgtcctttactctcttagtttccattttgtaaatacttgcatttcacatatttaaggttaaatgctagttatttccatttcacaaactatttgaagttaaattatttctattttgttgtttttattttacatatatgaggttaaatgctagtcgttttgtattttgaagtttgttttcatttttaatgtgagttgtttctattttttatgatattcgttttcatttcatatatatgagctactagctactatttttttgtaaagtagattgtcgataacttaattgatttatcttttgtatatgtatacagtgatagcaatatatatatatatatatgttatttgcttggtacttttctaaaaaacaaggacataccaattaattttgatgttggcgttcatagaattacgctgtcttttttgctttattctcatgcaaaagcgaaacaagttttaggatatgagagtgaatctgtgtacatatgttgggctcctgcaccttgcatggctttggaggaaaaggaaaaggcaactagaaagagaaagggaaagggctataaataatgtagtttgttgttagttttaaacatgtaatgtgaagaaccaatttttgatgcaaccttatcagaaacacaaaaaaaaaaaaaaaaaaaaaaactgattgtaaaaaaagattgcaaattttttatttatataatgtaatatttatttaatagtatccattttaagtatattaattcctatggaaaggctattttttaagaaaaaaaaatcctatggaaaggcttgtacttaatggtttccatttgataagtttatagtttccattccaatgcaaatttaattgacctaagtataagcttaaatcttgtaaaaaaatattattacctttcaaatctttgaatccatacatatgatttttttacttgcagcattcttcagattgcaaaacatatgaaatagtatcaccttatactggagtatcattttttgaatgagacattttagatattcattttaattaagagacggtgtcattttgtctcatgaaattattttattaattaatgatgcaatatcatgatacttggaggtacaattaatattaaatgcatatataagaaaccacccataagaatttctattaagaataaataatgtgaaacaagaaactatcattttttatgatttttatttctattttttatgatatttgttttcatttcacatatagttattctcatttaataaactataattttcatttaaagattagattatttctatttttgaggtgttatacccgaaatttggctggaggtcacgtgtcaaggtaaaggaaatgtgaatcggtgtcatatttttttatggaataactcattaatttcataagtatcagagtatgtttgtaacccgctgactgtaaggttataggcaaagaatcaatgtacgaactggtacttagtgtattaacgagaaatcatatactgctaaaggagaatagcgaggcaccagggaagagtaatacataccttagcttataataagcaaaccaagtgtaaatgtcagatcgactcgaagaacaagaatgcgagatgaccatcttgttggaaatattttac

SEQ ID NO: 38122 - DNA, 2690 bp, Cannabis sativa
  modified_base (2641)..(2665): a, c, t, g, unknown or other
ttttcttcttccagcagctatcattttcataaatgacaagagcacagaaacaatcaaccaagcaatagtttaagcaccaatcctcagaaacaggtgaagttgcctcgaaatcaccataacgggaatatgtgttttccattgtgtacatcacaaagttattgacatctttagagtcttcatcacaattttgagctttgaagttgggtctgcatcctttcatcttatcatctggatcgacgaaggtgtaaccaatagggcattggcaattgggtgtgccatcaatttccacactgcagtagctattgtatccacaagctcctggtccataaggccccttaatacttaaacatatgtttttgggtatggatggtgaagtttggctccattttccactaggccatcctctagaatttcgatcatcatctttcgggtaaacataatgcctgaaaacaccatggtaatcaagaaccaccctttggtaaaaacctttcgaaaaaatagagttggatgatgtcaaccattcaattatggtaccattttgtgcttgcagatacacaaaaccagattggttgaacataacttgcatgccattgccttgtgacaacatatttagctcataaacaacattgtaactatcactgccaactgggaaacccctggcagagaactctatagccccattatctccaactcgaaaatgaaaccttccactcgagtaatctgactcggagtacctagatacaagttccttaccttgaccaagatattgtgtaggtaacaatgtgtcagttggttcatgaaagctctcccaaagatagaaatttttctggttggtgagcacaaaattcccggtgtctagcatggctgcatgagaaactccagagccagaggcagcagcagaccatacatctcttcctgttgagtctctcaattctaatgagccaaagttggttagttgaactgttgagccttgttgcactagattatctctgttggctgaccaaacaatggttctttgaggtattttgttgaaccatatagaaagaatgaagccatcttttcggatttgttgaaaaccaaatgcaaaatcttcatttggtgatatccatgactcattttgatttggttgtgcagttagtgacgaacccaatgtgatgttgttcctttgagtagtttgatcagcactactagcagaacaaaatagtatcaataataaaaataagctaagaaatattttacaactcattcttttgatttgtgttctaattaaatgggattataataagaactacatttacatgaataaagactattatatataatattcgttttggtaatttcctacttaataatggacaaagactactaaattttaaagtcttttacaactagagtccatgtaaattttaaagactttatatataatggcattaaaaccttattagctgcaagacttttcttcaaaccatttataggatgtcagctcgtcgtagtgttgggtgcacgttaatgaattcatgcataaatatgtaaataaactttgttcataagtcaatttcaagaacatttatgaacatagaatttgtcaaaaagaaaaattacagtaataacatttattgcatatagataaacaaggtattttattcggggtctagggtcgggtttgggtctaggtctggggtttgaggtccgagtcaggggtttgagtttagagtaaaatgggttcatgtaatgatattagaactatacagttaagtgtgttttgggtaaaaataatactaaaatagttgacttcctgaaaagtccttgttgtgtgctgctcatgagttgacaaaaatgagctttaaacaatgtgatcaccaagatcctttcttttgtttaataaatttgaggttattcaacaatatatagatattatatattatacaataatgagtctctcgttttcaactgctcaaataaaataagaactaacatttataaatatttgaacaaattctgattatttagtacagatgatggtatcagaatttaaagatggaggagctgaaaccataacacttgaactagaccttttttctgtgagaataaatgtattcttttacatgtttaacatataaatataacaaaaaagggtgcacaatattccttccccattctttcggtagctcagagtctcctacaatctcttagatcatgttccaattgtaagtcttctctcaacggttctcatttcattaagatgaataacaccgcaacatcaaactagcctcgtaaaaagatattaaagactgccgtgaaattcgaactcttaaccaaccaaaaaccgttaagacacctttatcactacagcacaccatccaaccacaaatcaaacattgtaattagttactattattcctattccattatattactattacatttctattacaccaaattaaacatcacctaacatgaatagcaccataacatcaaactagcctcgtaaaaaatattaaagaatgtcatgaaattcgaactcttaaactaaaaaccgttacttgtaaagacacccttatcactacccgtatcactacaacacaccgtccaaccacaaagtatacattgtgattaattactacagtagaacctctatttnnnnnnnnnnnnnnnnnnnnnnnnntctaatttgttataaaaaaatcaag

SEQ ID NO: 38123 - DNA, 1483 bp, Cannabis sativa
tttaaattccatatttataaaaaaaagcccaaaatgccaaatacattgcccaataagcccatgtgagcttcaacagggccccaataaccatttgagcttcaacagggcttgcttgcttctgcgcgccaggcaagcagccacaggatttgcgtcctccttgccagactagggtttatatacaaacatcccccgtatcggtcatccttcgcaaccacaacactttccagttctcttccacacaaaccaaaattgactaaatggatttctccaagaagcgcaaaaccgaagaaaatggcaatggtaccactccaaccgccaccactgcccctaccactcttctcaatctcaccccagaagacgctcgcacactccttcagccactcactcaagaccaactccttgatattctccaaggcgctgtacttcgtcaccctgacgttctggactccgtacgctctctcgctaaccgcgataccactctccgaaagctcttcgtccgtggcctcggcgctgaaactacgtccgagtccttgcgttccctcttcgccacgtacggcgaactcgacgaggccatagttatctttgacaagaacactgggaaatccaaaggttacggctttgtcaccttcaaaaacgccgatggcgccttactcgctctaaaagagcccagcaagaagatcgacggcagaatcactgtgacccagttcgccgctgctggagtttctggacctaatagctcatcctctgcctccggtgacgtttcggccagaaagatatacgttgggaatgtacccttcgatatttcctcggagaggcttttgggtcacttcatgatgtacggggaaattgaagaagggccattagggttcgataaggctacaggtaagtcgaaaggattcgctttctttgtgtacaagaccgaggagggtgcgagggctgcgcttgttgacccgatcaagaacattgacgggcaccaagttgcctgtaaattggctgtagataataagaaaactaagactggtgctcaggcttctactggatataccggtgacaacgtggtaccacctcatccgtcgatgcccggctcttttcagggggcacattatggtccaccacagccaggcaatatgtatcaaggatatcccggtggagggcatcatgggcagggccctcctcaaccactgcctgctagtaattatgggccgccgtctatgggtaatcaggtgccaccttcaaatattggatataatagtaactttccaggttcgtatagcggtacaatggccggagattttagtggtcggatgcctcccagttctgcaggaccaggctacctagaccattcacagtatgggttaacttcatcttctttaccaactcagcatagccaacctccgcctgtgcccaggggtccgcctggtggaatgtatcagagcttaccgcattattattgaggtaagttttgcttctttttttttttttt

SEQ ID NO: 38124 - DNA, 3249 bp, Cannabis sativa
cttctttctcatgtttgttacataatgtggatcagttacttgatttgtttgtatcgttatcatctcatctggttttggtaggtttttttaagggttaaaactgttcatactaggattaaggcagtacgtaggttgttttaagatctccaactcattactcggtggtgagctcagtacaccaccggcaccaccctcatttctcggtgccaatcaatcgacatttgttttctagaactggtttgtcgattctctcttttaattgattaaaatgtattatttattagacattgtttttataaatatagatatacagtattgttcggtaaccattaaaaaatctatgtttggataaattaatcaaaaaccatgaagaacttgcaagattttgttaagtaaaatttaaaaaagcaaaaaacaaaatggttcccgaacaggccatataatgtatacatttattgtttgattttgttttcaaaatcctttatatatacatataaatgtagctagattaggttttaatagtgtttcctaaattaacattgttcttgtgaaatctattacacttttgagtctcttgatctcatactattttcttacaagttatattatatctgaataataaaatgtaataaagaagaaactaataaggtgaggacgttataatggaatgttggggtgtagtcggtgcaatatcattaacaaattattctatgcaagttattttataaatttttaatatagagaaaactgtaacaattattatgcaagaattacaagaaatgggagcaaacttagctattctcgttatttgagctactcttctcttctttgaataagcaaatattatataacaaatgagttagtctacttgaatatcccaaattcatatcttaaaaaaaaaaacataggcctcgtggagggttagcttttggtgttggtggactctttatatggctagagaatgatcaacatcagctttgcatttaattagaactccccttcagctgctgcttctaggagattatagtttctattagtagacactactaatgagtttgacattattgtttgcttcccacctgccattgccaagacatatcaatgttatttgaattgattcattagttgtgtaaatataaaaatataatgttttaaagttttattgacatttttagtcgttgttaaacttatatatttatgtaattttgtattttggtaattttttttatatatgatatgataatagttataaagattaaaattttatccacttttattttaatttgatgaatttataaatttaagcttttaatttaatatttgaaatattttataggtttcggattttttgtgttgattggaaattggacaattgtagctgtttttattggagagaggtataatctctcgaactttaaaaaaatttatttagtggagtttgaatatgttagatattcatctatagtgaagtaggttctgcgattaattttactgtggtcggatgggtggaatatgtatgttagaagagtttgaatatcttaaatattcatctgtagtgaagtaggttctgcgaatacatgtactgcggtcggatgagtggataattttgtattattaatgttattttgttattattgtattgtttaatgtgtttattaattattctttccatgttttaaattttcgagaatgtccaattacagttgttatgttgccgaaatttcgctaaatcgaattaggataaattttaataaaatgcataaaatttactaaaatacatatgtgtgtggtacttaatttaactaattaattactacacatatttaaacaaataatagaataaagttactttttttagaagtttcgaaatggatagaaattggatgagtgcgaataaattatcagcggagtatagtgaaggcgttgaaaatttcttggacttttgtaagaagtatgccaaaattcctaaattggttctttgtccttgtcttaaatgtggtaacatggagcgtatgaacactactagacaaatgagcattaatataggaacggaatagacaagagttataaggtttgggtttattacgagaaaaaaaatagagttctaggcgagggattgtctaagtctaacaaggttaacacataaaaatgataatttataattagtcataatttttttactttaagttacaaattttgttgtgactgaatgtaagattttttgtagtgtgttgtgatttcgagaaattataaaaattacatttatggtttaattcaataaaatacccaaaattcacaccaccgacaccgtgaacattcaactaaattatgaacgcatattaaaaaaaagttaatacattaaattaatatatatatatatatcatacatgtacgtttacaaaattgtttaaaaaatttgagaaatgtaattttagaggaaacataaatatttttgtgagttgaatattttataagcatatttatatatatatatatatttatatatatattatataaaatttgagcattaaaaaaaattgataaattattatgtaaaatattttttctcaacatattcatatatttatacatcttttaaataaattatttttaataaataaaatataaaaataactaagttatataacaaattatatatacaagttcaatattctaaatgtatttttctctaaaaaatatttttattaatttttttagttgataggatattatgagtcttgggtataaaaaatgattatatatatacactacttgaaaattgagttttagtgacactctatacatgttactgaaactttttagtgacacttcaacgcgtgtcattaatgaggctgactggaaatgcagtttttagtgacactccacacgtgtcactgaaacctattgcactcgttttttgcgcgttactatagggatatagtggttttgccagactaaaaaggtaacaaccacacacaaggagtgtcactatatcctattttttttttcttttttattaatatttttagagttatagtgacacaccaaaagtgccactatattaaatattttttaaaaataaataaaataattaattattttaattcaaattttatatattataaataataatttatattaactatacacaaatacaattaaatataacaataataattttaattgactaaatttaaaatttataaattagaccattataataattcacatcaacaaaattaataaata

SEQ ID NO: 38125 - DNA, 1209 bp, Cannabis sativa
taaataaagatttagaactaaaaaagaaaaaatatatgaagattataatttttaggtgattgaagcgttaatgaattttagttcatgagttactcttattggaggtgttaataacctttagtaaattctctctcactttttaatggatttttgctttaagtatagaaagtaaatttttttacaatgaaggtgttgctctatttataagcatggacacccttaggccttgattagctaggaccatttaattaagaagcttggtttgaaatattttgccctctcatgaggttaatacaatggtaaataagataagccctatagttgggctcaagtaaggagtctcaattgggtggtaggtagaaaataatgtggcttgatatgaccggtgcatatataagttgttactttttgtatgagaaaaaagaatatcaaaagggagagtgggtgtgcagtaccttttagatacacgcgcaaaatgtctttttcaagtagtatggtttttttggtaagaatcatttttgtaataaagtgaccttttccaccagaatatcgctcttatcttctcgcggatgcttaggcttctgttcaggagaatgtccgggacgagacatgctcacttttctcgatcaaggtttgtcccacgttcaagaaaattctccttcctcagtctatgcccctattgaacatgacatgtttggccacactactgtctaagtctcgagatgacctttcctagagttcatccagacttctaactgcttggaaattgtgcaaatgtataatttgagatgtactagggaaggcatgctccatttaggttctcaatttttatctgaatatggggtctgaatctgcgtcaacacttagtaaatgtcattacttggaatttcttttgggccaaagatgggtttagttcgatacttattggaccttccttatttgagatcatataagttgttcgagataatttgtgcctccttaattagggtcatactagttgtccaggaccatttatggcatcctatttgggaccatataggttgatgttctacacttgcacccaaaccgcaacgcttggatcaaaacaaaccctaaatcgttcataggcccttttttcaaggatgatacatgtctttatttaataaaaattgagataataatataaaattcaaattttaattacactaataacaatatagtccttcgtaa

SEQ ID NO: 38126 - DNA, 3897 bp, Cannabis sativa
aaaaaaagatggaaattccatatgcgtaaacaataataagttttgtcgaaaaagttaccagaaaagttatatatgccgaaaaagtcatcggaaaagtcaccgaaaaagtcatcgtcaccggaaatgtaaccgtcgcaaaaaaaagttactgaaaaagtcaccagaagtagatgtcttaaatataaataaaaataaaaccgattataattgaaatataactagttctgtaacacaaagaataaaaacaaaataactcaaactaattataattaaattagaacatattataatttaccatcttgttatacccaatatctttttaagccattcacatattatactaaccatttataaaatccaaaagtttccttatttgtccattcttcattacatttacaccaagtttatttggaagtacatgcatacaatgccatttttacttcgaatttccttaccatgtcttttctttttttttttttgatagcaaaattcctaccatgtcttaaataatatatttttaatggaaaaatgttatttcatacatatttatgataggaaatgggggagtcaatggttcgttgatttatttaatgtgataattgattggaaagagagaaagggtcatacatagtattactttttagtatgtatcaaacaaaagaaatcaaatcaaaaccacacaacacaacaactcatcatcactcgctctaataaatctactccaacctttgtctctgtttcttctctaatctttgatctcattctcaaattcaacctcaggtatgttaatgttatcatcgtattattatgttttcttcctatgatcttttatattacttaattaaattcatcgccttaatatatatttgttcagatctcgtaatcgaatcctattactacatctatgttcacagtctaatcatcaccattttcagtttccctctcccatcaattattcatataaattaattattttataattccaaactcttgtttgtatatatataaaataggagttattatggcttcatctggtgaagataagccagcagcagaagcagcagaggtatctgatagaggaattcttcatcatcataatgataaagacaacgaagacaaacaagagtccggtaatggcggtggtggattcatcgagaaagtgaaagacttcattcacgatattggtgagaaaatcgaggaagccatcggattcggtaaacccaccgccgatgtaaccgcaattcacatcccttgcatcaatctggagaaggccgacatcgtggtggacgtcctcatcaaaaaccctaacccagtccccatccctctcgtcgacatcaactacctcatcgacagcgataacaggaagctcgtctcaggtctgattccggacgcagggaccatccacgcccacggagaggagaccgtcaagatccctctaaccctaatctacgacgacatcaagagcacctacgacgacattcagcccggaagcatcattccctacaggatcaaggtcgatctcatcgtcgatgttcccgtcttcggaaggctgactctcccgcttgagaagaccggagaaatccccattccttacaagcccgatgtcgatgttgagaagatccgattccagagattctccttcgaggagactgttgcagtactccacctcaaattggagaacaagaatgacttcgatctgtgcctcaacaaactggattacgaggtctggctgtctgatgtgagcattgggggtgcccagctctccaagtctgccaagatggagaagactgggatcactaccattgatgtccccatcacattcaggcccaaggactttggatctgctatgtgggacatgattcgtggaaaggggactggttacaccatcaaagggcatatcgatgtggacacaccctttggagcaatgaagttgcccattgtcaaggagggtggtactacccgtcttaagaagaacaaggaagatcgtggtgaagagacgacgatgacgatgatgaggttagcacttagttaaacacattccttttactttgattgattatagaaatatacaagattagattactcatttgtttgtaatgttaaatgcgtgtgtgtgtgtgtgtgtgtgtgcaggagtagaagaggagaggaatgaatggaaggtgtttgtgtcatcgtgtgtgtgagtcaacaaataatggattataattaactattgagagacaaggttggttggttggttcaatgtatgatgatgcagcagcagcagcagcagcagcaggggaggaccagtctgatctgaggccacaattattattttatttcttctttttcgtatttgagtgactcgtacccaatttacagtttgttacttatgtggcttatgcttctttcgtttggtgttgaatctttctcattctgatctattctatgttatagtattgttacaaattaacaacctcagtttgtattgaattaagactgattcccctaaactaacatttaaaattggaaagcaaattgtatcattaaatttcccattaagctacaaaattataaaccataaactttaccattatgtcctttctgtctcaatttcaacaatccaaagtcctttctgttcttaaggttgctgcttggatagcgtatggtagtattaccccctgttgcaccattgactctcttgttgttgccaaaagaatgtttcaacaatacaaacaatgctaatctcagtttcaagattgaattacgtagaaccaaatttatataattgccaaatactattacaagtatataaacattagcaagtttaaccctcgacacaatcactaatttaagaactaaggcctcgtttggtacgtcgtatcgtattgtattaaataataaataatattatgtttgaattaaaggtattaattattactacaaaattttttaatacaaagtatgttgtattatttaatacataataaatgatattagcttatattataatatttacaaaggatttggggttaacaccaatctccgacccggacgcggaccgggacccgagactcagacttggacccagaccccagacttggaacccgacccggacttcgaacccgggagccggtcccagtcccggaccccagacccggatctgggacgtggacccaggactcagacccgtagttagtgttgggatcgaatgtattaaaaatatattataattttacacaatcaattaatacaagtcaataccaaacattgtattgtattaaataatactaatacaataaaacacaatacaacacaatacattacaatacggcttaccaaacaagccctaagtgcacagtataatacaatatgtggttgagacaaaacacccatttcatatacaaaataagtataaaatgttacttgcatattttttcttctgcaaccatgaagaaattgtgaatagtagtctcctgcgaccgtccattatttaatggctacaaatgtctcatatttcctgtcctactgccactatatatgtacatatataatgaagaaatcgattcagaatatataaaaactaaataggaaaggagaacaattgaagaatttccttcaatcgtttttctatacgattttttttttcatttttagtagtgctttgatacgataaagccttatcgatttcaggatgatagtttgaattttttttctttcttggaaatggttaatggttaacgtcaaacgtcaatattagcattttgagaaaaaaacattaaaaagaaattgttaaaataaagattctgttacataatcacacttggattaattaagatttttgcccctaaactttaacatgtaacaaatcatggctctaaatttttttaatcgttaaaaattcccctgaactat

SEQ ID NO: 38127 - DNA, 2264 bp, Cannabis sativa
  modified_base (1731)..(1734): a, c, t, g, unknown or other
caaaccaaaccaagctaagcctaaccattaaacaacaaacaataagatcctaagtttcattctttttaaatgaacaatgtcaaaaatggtaagacaaaagtgaaaagacttacatagcaaaaaaggcattgattaatgaaaacaaacagcaagcaatcaagcatcgtccatggatcgttgttggtcatcatttttgagatttccgcagacattacactccataacattagatttaggagttggtaaaggtgctagtgtgccccaacagttgtttcgatcacacatgtatcttacgaagaaatatgcatgtgggaaatcagattcaggctcaggctctgcagaagaagccatggtttgatcaacatcttcatccatgagctcttccccttcttcttcttcttcttcctcttccccgtgaccctgctcttcctctccctcatggtcggaccactgggcttcgaccctgcagcggtcacagtcacaaccaaagccatagtcctccctcagccttttctgcctgctgggaaaattctcgttaacggggaaataactcaagcaaacttcccgtccctgtggaacatcatggatcattctaacgatgatatcagtattgttgctgttgttatcaaagggagaagcggaatcgacatagtcaaacctacacgcattgggaaggcaatcgtgattgaatagtgaggcttttgggtagatcccataagctcttacggatctctgggcactctcggagaaaggctccatcaacccaaacccgttgagtttgtctttggccagtaacgccgccgagagttccaacgagaaccaacccgacgacggaggagggcagactgatgaaatcagagagagaatgaattgggcagcggcagcagattcaggatcatcggactgaccctgaagagagagcagagtttggaagtggggggaagagaggttagcaaggttgtgagcggctaataggaaacgagcttggagttggtgctctagggagagtgaggaagagtgatggtggtggcggagacggagcagtgattggcagagccaaggggtgtgagtggaggtggaggctgcggagagacagttgtggttgcagaaccgttctgagttgcagttggggcacgatggcattggctgcggcggcaatggcaaggttctgaagcagagaccgcagtaggaagaagaagcagggatgagaggtagagcagagtaaagaatgattggagagtctttgagcactatttggccacccttgagcggctgagatgccaccagtgatcttcccctgccgggaatctccactactttcaaagcttcttctctttctcccatagtcgtcgtcgtctgctgctgctgcctgctaatgccaattccaaaaacccttctacgctgtgttactgtgctaatcagaaaaacaaaaacccttcgttttttcgaaaaggaccctttcctttccctttgtgcccccttcaaaatatttcaacgaaaaatacgacatgggctattttcttgggcttttggtatttttcaagataagtgatacgttgtggtatttgtagaaacaagcattatgcaatggtaattttaaagggattatttcacaaatacacaaaaaattacaaaaataatgttgtacagaattttaaatagttttatgattttgataatttatttacagaaatacggtcttttgatgtatgttgtactcttgttaatttnnnnttgattttttgttatttgtatattgttttttattattattttcttattatttttatgtaattttcgtgttacttttataaaatactgttaaaaaaaaaaaaaaaaaactttcagcgtaaaattttttaaaatttacaaaaaataatacattatgtaattatcccaatttcaaattggagaattcttattttgatggtttttttttttttttttgtaaagtttacaaaatatggtttttcttttaaaaaaattgttttatagaaaaaatatcattaaaaaatataggaaaaataaccaccttactttttttctatatttttattttttatttttattcttttaataaataaactttgaaaaaagaaaaacacatatattttaacatattgtataaaaactcatatagaaaaatttacatctcaagccttaaaatacatctaatttgtaaaaagactaattaggatttttttttccctccaaactttgacatgtatcaaatcatgctccctgaattttttttgtcgttaaaa

SEQ ID NO: 38128 - DNA, 2776 bp, Cannabis sativa
  modified_base (85)..(85): a, c, t, g, unknown or other
  modified_base (2744)..(2745): a, c, t, g, unknown or other
aaatcatgtgaaccatgcaacatggaatgcgatttctgatctttattaattagtaaatctgattaaattgaaatgggttttattnagggcacaaaacccaacagtaccatcttgacatatacaatcatcctcgagctttggactcactactgctcagccttagcctttcctttacctacacatgcaaacaatatttttgaatcgacaacttagtaagaaaatcatattacatataatatatcactgacttgtatgtaggtgcccatacacctgtccacaaggcttaacaaatgattcagaacattcttaatgaaggtacaacctttgtaccacaagcactacatactgctactgtactagcattgttacggctgaactgtaccttgagtaccactgagtattttatcacatgtactatgtacctaattgtaatagtgttggtaacactagattgtacccttaaacatcatatgttgtaccaatgcactcagtaccgctaccgtactagtgttggtagcatatgaatcaaatatataacatgcatataatacagatatacatatacatatatatatatcacacatataacatgcatataatacagatatacacatgcatatatattctataatagtcttacctcgtttctaaattcaagtgtgctggtcgacttaattgaaaattatgcgctgcacggaggccctatgtcataatcacgtaaaacaggtaaacaactttctaagacctttccgaggatctaaactcaaaactagaagtttccctatccataaatagcatggcaaaaccctaaatatcaaggaaacacgagaaaaatgactaaacaggaaaactgcctgaaaattgttaggccgtttctataaaaatgatgagccatttttctggttctgcactaataaaaatggtaggccatttttttagaaattgcttgcaatttttcactgaaaaacaacaaaaatcctccaaacatgctcaaaacaatcccaaactctaatctaagttccaaaagacctaatagtatcaaaatgaataagttccaagcaataaaacctcagaacatacagaaatttgaaaattacaattgttgagctatgtttgagttcttgaactcaaacttgctcaactccaaaatcaaacaacaaaaaaacaacttaaactcgcataaaacaacattaataatctgtagaaaacattcttaatcaaaaccctcactaaatagaacctaactccaacaaaagcataacaaaccaacaaagaagcttccaaacttaaagagatgatggactagagttatacatttgatttacttctagaattctactagaataattggaacaagatgaagatgtctaggttctcccatggtttctggttgagccaaagcatgagagagaaagagaacaagaattagggttttttttctttctaattttgtcttttctttgtttattccttcatttttcttatttaaagataattactaattatcttttactctttaatggcaagctagcaaaactggagtaagccacttggctcatcaagcaaaataccaaaattatccttctatcttaagcttaaataattaaatgggttaggtgtaaaatagtccaatactaaaactccacgtatccatgataatctaaatatcatcatatgaataccttgttaaatgaaagattctaaatttacccatgtgactctattagccatccctcatattcctatcattaccgagaaaaaaagcataaatattatagatttcacatatgacataaataatacacttagagtttaataaaatctccgcaattgagaaattataactttaatgcccaatttctgaaaataagacccacagtatatatgaccatgcataaacataaaatatcaataattattgctaattaccctattaatccataaattaaacatacagtcattacaaaattcatcccatgagttaaatcttcttgaggccaccttgtaataccactgttgggctattttagacacggttgctggaaagatctggcatcgcacatctctagttacttttttgagatttgtttggatcttaaagtattttatgtgcactaagggatcttcttttcacgtgtacatctttcgagttggcatcttgaactttagaagaggaagttcattaatgtatgatgtaaagggtgatccccttgacatgtccaggtctaggtcggtcagctttgagtcagacaagcctttgatcatgtcttttatttgttctaactgtacttgcatagatggatttgttctggtagggctcttgcccgtgcaacctttcctggttggagagctatccttggtcgggcaactggccttggctggctagcctctggctaagcaatgggccttgcccagccaacctttggctgagccatgagccttggtcggtcagactttgggtggttgcacttccatggccaaccaaaccggcaagattcccctagctggcctagctagtctataagttaatgggaggttgatcgtaccaatttcttgagtttggttgatccacctgcctgaaattattattctatggtggaacaagtcattccaagtttcactcctcgagttattgttgtcccgtgtgttatcggttatcgtaggtcccagcctgtcaagagcaaggtccctgagccttggaacaacttattctcggatactctaggagagagagagagagaganngagagagaaagagagagagggagagagagag

SEQ ID NO: 38129 - DNA, 2749 bp, Cannabis sativa
tttaggaatcttttaaaattagaggaataaatttgtacaaattataaaagggtataaattttgatataggttatattattaagggcaaataatgaaatttcccttatattagaattagatgggaaaaaaaaaacaagcatagaagaaagaatgagttttgttttaccattgaattgggatgcatgtaaatggagattaaattgaatacaaaaatcccaagttatcatatactaggaattatttagaatatttgattaattttttcaatattttatcttcaatgtcataacaaagccaccttataaaaattattcaatccaactcaatgttccaaacacgacctaattgttaaaatttagaaactcgaaccattttcacatcacatccaacacaaacaacatagtttttcttctttctaagttgaaggcattatacaacaacaacaataagaaaaaggttctgacacaaacaaaacggctaaaattagttgaataacattataatgaactaaggattatgtccatatcaatttatgtgaattcaagaacttttaacaaatgattttccttgtaaacacaacaccaaccataagttagaaacaatcttctgattcagcattctaattcatccaaactacgactttttatcaccatttttacaagaaaataccaaacagattgtgtctttcatgacagctaagagaatccaaattgttatcaatttaatttcaacctttgcaggaactgaatacagataaaggaagaactagtacctgaaagacatctaagcagcagcctccagcaattccctctctgttctctcgagctccgacctaaaatacctaataagaccttgcacaggccaagcagcagcatcacacaaagcacagattgtgcgcccttcaatctgcttggtcagctcctgaaggaataaaacattggcatggccagtaattctactttcacaattacttattttggataaagcttttgatagaagagcatgttttcagaatatatttaaaatatacatatttagacagagtattgaggaggaagaggaggaggcgcacacccagcttgaggagagtatggataagctctagctggtgggtatctcctaggagccgggtacccgtgactgggtccagcagcatgaccaggtgggtaagccatgacaggttctccagccgcagccttataagccggctgaactggagcttgagccgtaaatttttccccaaatttgtaggcgaagttgagattacctttggcttttccgtttggtaagcggacgctgtaactcatgcgcttctcgccactaccgtccttgtaattatccagaagctccttgatcgggacctggacctcgccgatctctttatcgccgaagctacgatcggagacgagcttgattttgagggttaacatgttctgttgtacggcgctctcgtagacggtgaatttgacggtgtaattccacttaggattggaaccggagtctttgtcgacgggagtcttttgcttcttggcgttgtcaccggagatcgaaacaacggcgtagacgtccatcttagacaggagattgacatctttcaagtcggaagcggagattagggttatttctaaaggtctacactccattgttaatggtgaaaaatcttctaatcgtttttttttatcagagaagaaaaaagagtgtttaggatggaaagaaattggatttgttttattttttttctgagaaaatgaaagtgaatttgatagaagaaaaatcaaagagtgtggatgtatatataggggacttaaaaaggaaggaaatatcggtatgactcgtatgatgacagagtggaaaccgacttggaaagtcattattatcatttattattatattatttttatttttattctaggtttgcctagaatagttttttaataacgcgtaatttcgttaagcggttaagcaaaacggccatgcgcgtaaccttaacaaagcctaatagcctaatagcctaattgcctaagaaaaataaaatttgtattttaaaattataaatattgatattaaatattttgaatttaaatttgatgaataaaattttattaatattataaattattaggttattctacaatatactctttaaggatgtacttattcaccatctatttatttcgatatctagaaaaaaaattaagttaaattttttttttatatattcatgtacattatatctatttaagatatcctacaaaataatgttcaaatagtttacaagtgtataaaataaaatagtcacgtgtggaaaacgcaatttttggcgtgttaaaattttttgagtttgttaaaattttacaggatgtcttaaataactataatttacataaccataagaaaaaatttgactaaaaaattacttcggatactaaaacagatagagatgtatccatacattccttttaaagttgtgtatttacataatataagtttggaaaattctacaatacaaccccttaaaatgggtgtattaatgcacctttatctatttcggtatctaaaaaattacttagtctaattttttttatggtcgtatacattataaatatttcagacatctaacagaattttgagaaattaaaaaaaaattaacacgtagaaaatattattcaaagagtctgttgcatgcgtaacttttttattttatatgtgtgtgaattagacggtttaaacattaatttttatattgtaa

SEQ ID NO: 38130 - DNA, 2018 bp, Cannabis sativa
attaaagaaattaaaaaaaaaaaagattatggactgtatttggtatttatttatacttttctcttctatatatattattatcattctttgctaaacattttttttctcttctctatatctataaatattttattagttttgtatgattccatataaatattggtgtatactatgtacatctcacgtagtttgttaaattcaatcaaaattatagttactacttactagtcatgtactttttcttcgtaacttaatactcaagagcaattagaatataaatatggaagatcgaatattaaccgaccaaatccctgaccctttgatataaccactaagttataatatatgtatatgcatggaaaagaaagaaggagacttttttaagtttttaactaaatttgcttaatacaataaatacttactatcactataacaaaaaattattaagagtgatttttggccgctaattactgtttgcaagttgcaacaacttttttgaagacttcagggatgacttctgtcacactctttaaaaaaaataattcttcttcttttttataatgtattttacactaataaaaagaacacaacaatagatggatgcatgggcatatgacacaatgtcatttgaggttcccgcaaagttttccccatatctattttcttatccagaataataaacacatattatatatcaaatttaataatttgaactaatggagttcattaaggtcttaaaatttaaaggcagattttttgggtttatatccctaaggaatttaaaatgtctatatgtgcataattaaaaataattaaaagaaaagttaagtgtaatcaatttttttgttattttacatcgagtttgggaatatttattcaaaaatgtgatatatgtatatattaggttgatttatgtgtaatatgcaagtatagttttttttttttttaaaataaaatcatcatttttattaattgcaattcatagtgattacatgattaaaatctgaagtaacatcactactcctgataacacgaccaacaactaaataggatgctcgagctaagaagtgagcaacactatttgcagaacgtctaataaaattgacattaacatctctcaaatcatttatcatcatcttacaatcagaaataacacttccaaagtatgaaaccataggaagagaactacgtaacacttgcaccactgtaagactatcactttcaatgacaacttccttccaatcctttgccttaatcatactcagcgcctcctgcacacccaagtcttctaccattttgggctgcagcactcctaaacgacagcaactaaacgcctccaccaacggaccaatttcgtctctaattacccccgcgaagctataagttctaatctctgaaaaaatggcaacttcgacattaatcttcaaggtgttaacagctgctttgatccatgtttcagctccatctacaactgtaaggaaagcagcagtaggaatcatagttgtatcttgagcccgagtccaatctgtgaggagggctttagctaaatgaacaacgcccttaaccgtggggattttctcagaccaaattaattcattacgacgcctccatattgcccaacatgtcattgcagttagccttcgtttttcctcatctacctgctgttgtacagaagcaagccagttggcaaaagaaccaactgctgtcagattaacaccagtagccaaccgttgccaacacgccttggcaaaagagcaatccactaagctatggtagattgtttcatccgtttctttgcacacagggcatatggcatcaaccgacacatgtctagagcggagctttttttgtaggcaaacaattagtagcagcccgccataacaagtctttcacttttgggggaagacttagctttcaaagagtattccaaaacatggaattatcatcccgtgcccccaattctttgctcacttgcaagaacttataaactgatttgactgaaaaatagcccgagcttt

SEQ ID NO: 38131 - DNA, 1914 bp, Cannabis sativa
ttattttgttgaagatgaaaatttgaaagatacatttatcattatttttattagtttttacttaatatttattcaagccctcactcaactaaatttatagcttcttcactgcatatcaattactaaattaacttaaattgcaacaaaaatttacataacaatcacataaaaaattcaaaacaacttaaatcgtagattttaaaaaaataaaaaaataatatataaataattctcttcctattaataaaaaaataagtgagaaaataaatataaaatataaaaataggtaagaactagtgaggcggctggtaagaacgcaaagatatcccaatacctattttatttatttatttattaataataattacaataatattctgttaataaaattttgacttctcttgcataatttttttgtcattttaatatataaaaaaatatataaataattacaataatatctgttatttttgttcaccaaccaccaaacttttcttcttcatcgtcaaacttggcctatttcttcttcttcttcaattcaattcaaacccatctctttcactcctcaaattctctctctctctctctgtctctgtgttaatttgtcttttagttttgagttctgagaattctgcaatctggtaaagattcttcattcttcactccaatcataaactgttaatcctgtgtttttagttcttctgatcattttcatgtgtgtttgatttgtataaacttgttcttgattggttcttcgttttttattttattttttaataacctatttttgttgtttaaatgatatgaatttgaattatcatgcttttgtttgataattgttattgattttgaatatttgattgaagaaatgagtgaatatcagattggtttatcgattgatttttttttttttgcagagattagaaaatgggatcaggacagtggcatattgagaaaagaagcagttttaaaaacgattccgagtctatagaggccgagaattttcctgaaaacgggtctctttcgattattgtcctcggagcttctggtgatcttgccaagaagaagacatttccggcactttttaaccttttcaaacaggtttaatggcttcttctttgctattttgtagattttttgagattcgatactaagtgctgttattaactttatttgaggtgtgtttctttattagggacttcttccatccaatgaagttcacatttttggttatgcaagaaccaagatcacggatgatgagctaagagaccgcttgcgtgggtaagtatttaatctttgctttgttcttgtttgttacagatgataatatttagtgcactctctcatctcatgactagttaggtggaagagaactatgcctaatccaattttggtttgtccaaatggttcatttcatttcaaaagaatcatcaactatgcctaatctaattttggtttgtccaaatggttcatttcttttcaaaagaatcatttgttgttgaaatattaatttagcatttgttattgaaatatttaattgcagatatcttatccctaagaaaggtggctcatccaaggacttggaaactgtttcacagtttttgcaactggttagcaccgtttagtcctaaaaccattattgatgaatttatggttatatttaattgctagtaattctttcttatagatcaagtacgtttgtggagcttatgatgctgaggaagggtttcggctattggataaggaaatttcaaagcatgaagtctcaaaacatagtgaaaacggattatctaggagactattttatcttgcacttcctccatcagtatatccgtccgtctgcaagatgatcaggcattactgtatgaataaaagtaagattgccttaaccttgagtttttttttttttttttt

SEQ ID NO: 38132 - DNA, 2103 bp, Cannabis sativa
  modified_base (26)..(43): a, c, t, g, unknown or other
  modified_base (2051)..(2068): a, c, t, g, unknown or other
aagttcttatttaggatgttaataannnnnnnnnnnnnnnnnnctaagatcctggtaaaataattaacaacaatgcttccgtaatcccggacaaactttcagtaatagccagtgagcactaagaatccccgcaattccttgagcgtttggggaaccggccactgcaccatggcttcaattttactgggatcggcaaccactctgtcttccgaaatcacatgcccgagatactccacttgtggttgggaaaatatacatttctttcggttggcgtatagcttgtggtctcgtaggcgctgtaaataagaatgtcataaaaaaaaccagcacgcaatctcgtgaaaaatctttgaatacttcattcataagagcttgaaaagtggctagtgcatttgtgagtccgaacggcatcaccaagaattcgtaatgtccttcatgagttcggaatgctattttttcaacatctcgggctaacattcgaatctgatggtatcccaactttaaatccaacttggaaaagtacttagcaccatggagttcatctaacagttcctcgatcacaggaatgggaaacttatccgccaatgtttcttgattaagggctcgataatcgacaaagaaatgccaactgccatctttcttcttgaccagcaatacagggctcgaaaaggacctgtactagtctgaatgatacccactcgatacatgtcacggatcatctgttcaatcgcatccttctaaatgtgtgcatacttatatgggcgaaccgagatgggtcccgtccctagtttcaaagtgatcgaatgttccccgagtgcggacggggggaagtccggggggcatctcgaagacatcttcgtattgttcgagcaactaagaaaccagtgtaggaatgggttgcgtattgctggcttcattagtattcattgctcccaattggaaccaatatccttcagcacccttttccactgctaacaccatggctttcaacaaaatcggtgacttacataggctgggatctccctgtaacgtcatccaatagccagccacttcaaatttcataaccatcgtgtgctagttgacttgcatattaccgagggtctcaagccatttgattcccaaaatcacatccgctccgccaagttctaaggagagaaaatcaatcaccgctcaaatggctcacaagtcaagttccacctgagtacagacccctttcgttctcaccttcccacccattcccaacaacactccataacaagtggttgctgtgattggaagaccagcagtattcactacttccatagacacaaatttgtgggttgctccactgtcaattaaaactgttaccagtcgctgcccaatctaccctgccaacttcatggtgtgagctgaggtgattccgatgagcgagtttagagaaagagtggctaacgtttcttcggaggcaatggtttcacccgaatcgggtgaaggaggtgggttctcctccgttggctctgtgtcgtcgtcaggaatgaggacgatttggagaagtttttgctcacattcatgcccggggtggaatttcttgtcgcacttcaagcaaattcctctagtttgtttatccttgtattccgcttgcgataatcagcggtaagaggtggtggcgggtggtcggctactgtcgattttggaagccctggatgagatggaacaagaggagaagctatgcaacttggttttggttgtagtagtaaattgtcaaattggaaaagagttgaagctagatcgtgatggaatgatagggctcaaatttggtttagagctattgggccttgttgttgggtcggttttaatcaattgatatccttcttctactctctgggctgtttccatgatttgggccagcccattgggttgtaaaatgtgaagaagctcccttcgagtatgtggtctggtacatccactacgcgtgaagtaagtatctcccacctgacctgatattctttgacggttcccgtttgcactagcgatagtaattcttctgagagttgttgggttttgtgccctannnnnnnnnnnnnnnnnnataatcaaatttactaataaagatcagaaataaca

SEQ ID NO: 38133 - DNA, 2198 bp, Cannabis sativa
ttggatcttatatgatttcttctttagctacagatagggcatatgcaatgaaatcatcatatcccaatctgttgggggttctagttactcttctaatcttgtctctagcaagctagctaataattgtcaaggtcaacttgagtttcatctagcgtgtcttgaacatcagttgtaggtggttggagttgttgagtctcattaatattttccacctcaacatgtgttctatttgaaacttgagttgagctcagatcctttgcttttctcattcgcatttcatcttccttgaagatgacatctctactaattatgtatcttctgaaacttggttcgaggcaccacattttatgtcctttaacaccattaggatatccaataaacatgcatgttatagctctagatggcaacgtgtcttgccttatgtgagtatagacaatacaactagacacctttaaatgttcatagatagttttgttcccaatcttcttgaggtgttttaaatttcaaaggcacgtagggatacctgttgattaaataggcaattgtattgacagcctcaccctaatttttttttcttctaaaccagcacctacaagcgagcatcttaccttctaaagcagacatttattcattctctctgcaattccattctgattaggtgtgtccctaactgtattgtgcctagctattcctttttcttgcactatctagcaaagtcattagaatagtactccaatccattttctgttattaactttttcaccttcttttcaagctgattttccattatttttctctatgtgatgaaggtttccaaagcttgatcttttgacttcagcagtatgaaaattcatcaatagctcatgaaatagattgctccacccaaagttggtattctagatggccccaataaataagaatgcacatatgcaagatgcttagtagtagtgtgcttaccaataccaaatttaactttacagctttttccaagagcacattcttcacagaagttgagatttccattcaatttgtctatgagtaggccttgtttcatgagctcactaattcatctctcactgatgtgttctagcctttggtgtcaaagatttgtagcatctgattctttggcacttgaggctacttctacaacacttgtgatggactccccaactaaaaaatagagtccaccgttatattcacctttcattaccatcatggcaaccttaagtaccttcattgagtctttcaaaaattttaccacacaaccatttttagcaagaattctaatgtaaattgaatttcttctcaattcaggatcatacctggcattttggatttctttagcgatcccatcatgcatcttgattgaaatttatctgatttctcaagccttgcatgccttattgttccgaaaagcactgaaccccttaagatatattttaaattgtaagccaattgcttattgggacacatgttgaaggccatcttgaatttaacacccaattctaaccagaaacttcttttcccacaaccagaacatctctatactcatagccattgctaaatatccttgcttcatcattttttgacttgttatccctactgttcttattcttgagcacgtaacacttagacttgtaatgcccttctttcttgcaataattgtagaattttcctagtttgaattacgtctgattaccatggtcgttttaactagtaggccctttgtcttgtttatgtttctcacttatatcatatttctctctaaccacaatgagtccttctcctccacagtcagttcttctaatttttacaaatttatatagtcacaataattaaactaacgctaatattatctaaatatatttagaaatttatatagtaataataattaaactaacgctaatatcatctaaatatatttaaaaatttatagagtaataataatattaaattaatgctaataatcatttaaatatatttataaatttatctagtaacaataaattgagatatatatacactaatcaacaaggcaaccattgttgctctgcttctgctttcacgtatagaatccaccgatcacacataatatttatcttgttatttgtgtccagagtggagaacttaccctgtaaaacaaatgtatatattaattagtaaagatctattatgatatgttatttaataaaaaataa

SEQ ID NO: 38134 - DNA, 2304 bp, Cannabis sativa
actagtaaaacacaaagcagaataactcaaaacaacagtagaacaccggtagaacattagtgaaaacttaacacagtatatttcagtataaaacttatagaaaaagacagtaaaaaagtaaagaaatactgtctgacagtatttttataaaaaaaatgacaaaaattagtatactatgtaaatttttcctatcatttgacttgttaagtggcaattaagagagaatagagcattgattttgggctttggttgttattattgggaaaccttcaacatcatgagatgaaagtcaacacactaaaataatcaaaaagaaaaaaacttccaagggtaataatgtcttagttttcttcttcaacatctcttcttttgtttgtgatcaattgaatatgttatgttggcatgtgaataacttattttagttattataattcttattagtcacctttttgaattgaaattgaatattacttattttgatgtcttttttaattgagttttggtgttagtggagtacctaaatgtccaagtccatcaaaaagtgtgagtcatcttttttcctttttgagcaaaagtagaaaagacatgttattgttagcctttggcccttagacacctaaatgttcatctctttcccacacaaacttatcaagtgatgaggttgttaaactcaccaaaaaaaagcaatttttttactagccaattgagttaatatatggaaaaacagaatatatttagtgacattgtttgttttatgtattttgattaagtggaaatgtattctaagctcagtttgatatactttaatttttaactgttagatcaattcaatcttgattcaataattatagagatcacatcattttatactcaattttaaggttttttatatctattggcttgttaattaattgttatgtatagtgcctaagcctaaaatcagcttccaaattagtgagaaattaggagaattggcttggagttctaatggcttattctcaaggtaggcactaagatttatagatataaataggttcaaaacaatactatgatgtaattcatgaatgattggtcctccctatattaatattccctttattattagtctaattaagaaagacagagaaagacaaaaagagtggtcaactcaacatattcttccaaacatgatgtattataaaattctctacttaatgatataagggaagaaacccatcatgaatacaaaaaaatagaaagaaaaaaaaaaaggaaaaaacaatctacaaatgtaattgaataagaaaagttttatagtgaccttttttgtactcaaaaactaatgttggaatatatttttttttccgtgcagttacaatattatctttgtacaattttgaaaatttttaaataatttagagtgacaaaaataggttaaaattttttgaacatacataataaatttaattatcataaattctattttcgatactttaaataattcaaacttaaaaaattatatttgatttcgaatataaaaattaactaaaaaattataattaacatttgtgatagaataaagtgagacctctatctcccaaaaatataggacaactacccaagcaataatatcaaaaagacaaaaacaataaataaaattctcgtattttaattttttctttttcttcaaagtagttatggagttgaccaacatgatatatgtcatatgattacattttataatttatacataaataaaaacaaaagaaaattcaattaacttcttgtggttgttttgttttagaaagttgtaaaaaaaaataacaataagaaagaaaaaaaattaaaagagctagactcgtttgtgttaatcctatatatgcaaaattaatgactcccaaaaatcattcctaatttcctttcttatattaggctaagcaaacaaaaaataaaaaaggtcaaaataataaaagagatcaaaaaaacaatagcacactactaaataatatacataatacaacactaacactactactcactactaataatactattcaatattcatcatcatcatcatcatctcctagaacgtttcttaagcctcccaccaaccccaacatcagcctcactattatctctccctcttttattattggtagtgaccgttgtcttggccgcggccaccatcgtcaccttctccttctccggtttcttcggtggcctcccaaccgttctccttgtcttcctactacccccatcattactacgtgtcgaatttcgggttaccctctcttgtactactctctcatccaatttaacattacc

SEQ ID NO: 38135 - DNA, 3036 bp, Cannabis sativa
cgtatcaagacctaattgtgaaattccatacacacttcacaatatgtgtaaggttagcaaaagttgatacatatatgatgaatacatcaagggtcagatgaaccgcttgagaggttcataaatagatttagtggagagtatgtaagcatctcaaagtgtatttattttattgaaacgaaagttgtaatgcagagattagttcacggatcaaaacttaagaaggttataatagtagagttgagattatcactgacaagagctctaacaatggctcgagggtatgtagcacttaaagttgaggaaaagcaacacacaaaagaaatattaagggaaacttctgccatggaagactcattactctacgaaactaaggaaagattgtcgacattgcgcccccgaaggaggaatgaaacacgataattcaatgataggggaacgataagggtatccacaacaggaaacacgacagaggctaggaagatagacatacaatgtaacaaagaagagcttccctggatgaccataactttgatagggttaatgggatgcctaagggggatgaaggatacaacgtggccaccaaaaattagcactaacccagttaaaaagagataagggttgtgtaacgtcctacttaaagaatgccacgtgtcatgattatattatgctaatattgttaatcagaatcaaaaagccaagtgaataaaacaaaaaataacctaacgcataaaacaacttgtaacaatataatttatctttaacctaaaacaaaataatataaatacatattcaagatccggtaagatattattgtaaaattatttcaagtctttacatacaagtcgacttaagcgacaaaatagaatttctatacaatcctcctgttggacccaaccctcgtggtctagtttggccgaaacatgacaatccatcatcaaatccttgaactcatggctgatcagaaactgttttacctgagcacctgtgagccaaggcccagaaaaaaaaagcaaaacataaatgatatgagtatatagtattcacataacataaaatacgcccctgtgtagattgtcatgccactgcactgcactgtacattacaatatttaatgtatattgacgcctttgcatctattgtctatatggtatagacaccacgtgttacgttcacacgtctactttacttatgtaaggctttaataggatttatctcggtcttagtcatcaagtctaaccttgttatgccttaatcgcaatgatcttaccccttattcatatatatcattaatacatgcttaatcataggaaacttagggtattgataccctaactcacacattttcatataactaactatacaacatacaaatgcgctagtgtctatatgctatgtgcttagttcgttgtcttacatgagttccaatgaaagagaagaatttctagtccacaactgattcagagcaagtgccggtattcctagttacatctcgagtttatacaaaattgggttaatctgaaaatcgcatataatagatattcacttgtaggactcaaactctagactaagtaatatagatctcaataagttttctaacgatataataaagaacatccaaaacggagtttagagtcaaacgttatggccaaaataagttttacaaaaatctaggttcaaaagtgaattgtcgtcgcgaggtcatcgcgacgaacccttatagagagcatcccctgttttggggcttaaggtcattgcggtgaccgcatacatggtcacgacgactgtgtttaaacccaaaaaacccaattttttacaacttcgaagatataccaattcaactcaaatttgacatatgatatgcaattggtttctaagcccaaaacagagtgaatgcaaacttaaatcacaatgaaatatcacatgcctaatacacacacattgaagctcaaaaatgtcataattacacaatcaaatcttgaagaaaatctaactccaattcaaactcaaagttcactcttttcacagcaaatacacaaatagaaaagacctaaaacttagattccaagtctagctcaacatacctaaacataacctcatttcatccatgaattcgtcaacctaaaacccaatcaagaacatcatgcaaactttaaaatttaagagatgaaataaaaaattaacagtcataatgaacaattccactaccttaaatgctttgaccaagccttaaacaccataacctcaagaactagcttcaatccttcctcaaagataaaagtttgcaaatattttaagggagaaagagaaggaggtcggtgggaacttcaagaagcaaaaaaatggatttttgattctaattttcaaaaatagcaaatgtaactgaatttacatattttggttaaaatgaccactttggccctagggccaaaaatgaacatatttaatcatcaagtgcaatttagtcatttacaatcacacatattctcatataatcatatatatattatatatatattttatattatttccataatcacacaattcataaattatggaccccgaacccggttcgtgctaaaataatcgattgtgacttcctcaatatcttgtcgaaacttacttgtaaaataaccaagaaaacatactatataataatgtagtccattagtaaaatatataataacaattaccatttcacccttatcgggtcaaaattacaaaaatacccctatctcataaatggggtcttaaattcaaatattctcatataatactacataattgattatataataacattatttcacatttattcttaattaagttagttagggttgctaatctatttctaaattttaggatattaaaattatcccctccttatagaaattttacctcaaaatttacctgaacaactcaggatatttctgcctcatggcagattctaactcccaggtcgcttcttcgaccttgtagtttctccataacactttcactactgttagtttcttgcttctcaagactttctctcttcta

SEQ ID NO: 38136 - DNA, 3075 bp, Cannabis sativa
gtttgctcttgcaatttgtggccaacttttctattattttttagaaatgcagagcggaaccacaagtccacaacaagagttgaatattattattggtgaaatttaatatggggttctacacaatttgatttaataataggaacatgagctcaccagttacttataatgcttcatatcagtatggtgttcgataccttaaagtgtttaataataataatagtttgaaaaaaactactcttcattcgtgttatattgtgatctttccttaacacatgcatcatttggtttgggtaattgtttgacaaaattgatcatcaaatcttaataagcaatttattaattaatgaaatgaaattcaaagtactcttaattaagattcacttaattcatatttgcaattttttttctttctgaatttaatgatttttcactacaatttataactccatttttattttataatgcaacatatattctgagaaaaaacataataattaattaaaaaagaatgagcaatattcacaattatatttgatataacaattttcttaagctgtcttattaaaaacacaactaatctaacccaatattctacaacccactgaaacaaaaaatatgatgacaataaatttaagaagaaaaaaaatgatatatatataagtatttttttcatattaataacatatttttattgatattgtaggaggaaattcctttagaaatttacaaggactctgaagatcgattcaagaaatggtactttactagtcatgatttcacccttatgattatatggtcaaaatttctaatagaggcagatgagataatggtgaatggaacaagttcaggcacatacaatcttcatcttgacaaggtagataatagttgggctaatattctaccaaagttaaactatgccataatctcaactggacattggttctttagaattatgtatcttcacaaaaacaacaacttgataggttgtgtttattgcaacaacaaaccaaacacaacacaacacaagagcaactttgcgattcgaatggcatttcgaaccacattcgatttcatcaactcttgtaagaattgtagtcttgtaactcttatgaggacatattccccatctcatttcgaaaatgggttatggaacactgggggtagttgtaacagaacaagtctgtcgagtgaagtgaagatcgatttggacaggtttgagtgggaaataaggaaatcccaattggaagagatggaaagagcaagagaaattggagttaagaaaggaaataaatgtaagtttggagttgtggatgtgactagagctatgaagatgaggagagatgggcatcctgggtctcattgggataacaaatggatgaaaggttataatgattgtacacattggtgcatgcctgggcctgtggattattggaaccattttttgatggcagctatgagaaagatgtctctagtttagtaactagttttattataaacaagagtatagttagtagtgtataatctttgcaattgaatgaaaccctaattttcctgtatctcttttattctttatttgtaattcttctctttacaaataattatcactcccgactcattttttatttttcacaaacaattgttttgaaaaacttggtttgtcatagattttaaaactagaaggtcttggcatccaaggattttcaatgatgcgaacactaaattttgcaaaacaaaggaactatgagaaccacattttgccccaatgatatatatcaccattaggtaagtatcttgctttcaaaatcttattgcaaagtgcattgggattacaaatactccgtcatgtttgttttgtcaataaaacttgattgaacaacttcaagttacggaattccaaccccccattttcttttggtttgtagagatatagccatttacattagtgagttttttcttcttcaaagaccaacacgcaagtataattaccatccgtactttttcttattacttatgttgtctcattacgcggccatacattatttttgctaaattgtcttttacaaaaaattactaaaattttggattacattaaagtaaaaaaaataaaaaatttatttatagattttataaataacatttaatatatttttaatttaaacaatgtgaaatttttctttaagttagtaaaaattaatataattttttttgaggttttttatttttacactttaaaatagattttttttttttttttacatttctatagaattctacccaaaaactcctataacaactaatagagcaacctaaattataaccaaaatttgtataacaacccacatagaaactaacgtaaaaattcaaactaccagaacaatccacactgtaaatttgaagacaaaaaaagtcaaaaaaatagtatataaggaattttattttttttactaaaaacttaaaattttaaataagataattgtaaaaatatattaaaaaaatataaaatacataaattttcatttatatacatagattattatttaggttatacttgggtaaggcatatcaattttaaactgataaataatttgaaccacttcttctacttctagtataaaagtacatgtgccagtctcttcaacggctctgattttatgctcatctgatcgtttattatagtaaccgtttgatttgattggattttctctactatgccttattaaaagttgaaaaaggtgtcgactgatttgcaagtgtcttattttggacttaaccatattctactttgtctcaatagtcatagctcatggcttagtggcaattttcatttggaaaagtatgaatatgggaagagcctttatttgtaagattcatacacacaacaaacacacaatacacatcactatttcaatatattatgccgtgaaataaggctaatctttcagaatagtaatgacccacccaagcatcaatggtaacattttgctaaaaattccaaccttatttattatctttgaaagccacgtgtcacactctcaccaatgacgttactttccacaatgactttacacctttttt

SEQ ID NO: 38137 - DNA, 2638 bp, Cannabis sativa
ttgacccacttccaccaacttattcaaattctcttctgtagctacatcaaccgaagctacatccccttttagtgtgtcatcctatatataaattatatacacgttaaaatcgcttaattaccaacttaaacttctttctcaatattattctgttctatacagcatttatatataccttagcttccggtgtatgccttcttatattatcattgacttaatgatgcttgcatttaattattattttttcatttccaatataaatatatagcgacatgattttgtacgtgatgtactttcaaacggaatgtattccgtgatgtacagcaactattagatggaggagttatttgatttgaggggctgaaaaaatgataacgtaccctgagaaccatttaatgtatcttaaaactcatctaatgtatcacggaatacattccataaaaatacatcactcctaaatatatatgttatagcaaattaactagagaaaaatttgcaacacaagttttattttgatgtgacatagattattaataattgtgttgttagagtactaattaagtcaatattaataatgataatatgtcgtacaagttgttattaataaaactcatcagacaatactatataaaatggttgccaccacgtacactgaaaatatattattataaaaataaggaccaaaaataaaagaaagaaattaacttacatcaatacgtaggtagctatgttgagattgaaaagcttgaaaaaccacagaattatggtagtgaaccatatcagcactggcttcactataacaatctattataggagttgatccattgttaaatatccatgatattatgccccatttagaagccattttagcagtgtatttttgttcattcctttttgaacccgttcctattgaaatcactagaaaacggttgtaatccacaggcttctccgtactaaactctggatttttccttattatttgtctagtcacttcactcattgccaccaaagcctatattatatgtataaatatatatttatatatatgaaaaaattattcaccacaaattaatattaacatgcaccacccacataaacataattaattaattaattaccggattattagcggctatgcccccatctatgaggttaaattcttgagtaattccagactcatcatctttgtttgtaaaaaagtgagcaggtaagaaggttggggcagctgaagtacctatacaaatgtccgaaagtgaagcatccaacactcttgatgtttctatctatatacatatattaatagatatatatacaacgtgttaattagaccccaacaacaacaacttagaatatataattaatgtttatgtatattaattaatattaattgtatacttaattacgtacgtacctggtaagaagaaaaaataacaggttggagtttgttgatgtcaaaagtaggaataactacattggtcaaggtttgatgcaacttcactccacttaaattcttcgatatgaggttgtgaaggtactttccatcgtactttggtcctcctaatgctttcaccgtgtttatagtatcggcaaatattcccctacatttatataaatgatattatattatatttcacaaaagccaaaataacaaaaaaaaaaaaaaatcataatatatatatacaatttttttactgtagatatctattttgtcttaacggttagtattactttagagaaattataactcaaaattcatatagttataatatagtcttatgtcctaattaagtcctatgtatatgtattaatgaaataattataattagagtagtaccgagtttgagggaagattttagaactgtgttgaaggtaaaatggaacaacatctttagcagcaaacaaaggcctattgttggggtctggtgctgttaacattcctgtaataagcccacctgtgctagttcccgctattacatcgaagtaatcacctactcttgcatctttattatcatccacctcctaattaattaattataattaatatatagtatattaacatatatcattattattgtgacaaaacaataattaataattataattattgtaaatgtatatacacacctggagatgagattcaagtttcgaaagaataactccagggatgattcctctaatgcctcctccatctatgctcagaattgttatgatatttccatattttggaggtaaattatttttaaattttgtactggtgatgcctgccatgataatatgtatatataataataatttcttcaagtaattataattataaggtcaatattagggagagctaaaagggtatgtatatatagggcttgaagaaaagttctctagctagctttattaattaattaataaataacggtaccttaatttggaatgattatttgatgatatatatgatcatgatgatgatgatatgaccatatataaacaaattttttgaagctgtatagactgcatttattataataaattaatgacatatataatatttaaatggacgcacgcatacgtacatatatatacataaatattatgatatatatgcgtgtttccaacttgttagaaaaacaaagacccaataaaataa

SEQ ID NO: 38138 - DNA, 1797 bp, Cannabis sativa
gctgaacaataaaccacaaacaaagatataaggacagcaacgaagtgagactgaataccagtagaaatctccttggcggtcatgaaagtggattttgaaatccccagtcaattcggttagaccaggctctccaggcagggcaaagaccatcactcccttctttggagcactaaaccaataatcttctggctgtgaatataacacacaagcgccaaaacttaacgggaaacttaagaaccactaaaagcagtaaatggaatattgagaagacttgtttaaaatcaaataattgctttacataatcatgacctaccgaaagatctttggttcgtggatgcttttttgaggagaagagaacacctacacaattaagcggggttcattataaaaaaaattatggaactggtttagatgagataagattagatttcaacaagacagcttaaagacattttgggaggtgttgccaacagcaatgccatcacacaccattatgatcagaaatagtaatagagggcctgatccaataagggcatctatgaagtcggaaacccctaagcatgcacctgcacaaaatttaccagcatgtgatgttactacatatgaacatgtataacaaacttcaatgaagccaagaaaataaacagtcaaaagtatacctgcgtccaggtggaatttctccattgaagtatgttaaaacacgttcaaagtatttgacatacctctacatgaccataagaaaaacatttgttaatcagataggtgatagtaagggaagttcaagtttattaagaatatgcaattcaactgtcatatgaaatatatactgacaatctgacttggaagaaccagtccttttccatcaaaacatcttttctggttatagtagtccatagactcctcagcagtcgggtaaaactgaagagatatgaaacataagaataagaaatgaaaatttctactattttgcaaaaagaaattggcagaccacatcattaaacatctttaccttcaaatacaaaagaagactagaaatcatcaaccctgtcctagccattcctgccttacaatgcactaccactacattctcaatatcctctttcagccaagaataagcactttgacaaaataatgttatcaggtgaatcggggggcaattatgatcatcaaatgggaaactagccacctgaaattgaggaaaaagaaacagcactagtaatttaaatcaagttcccaaacacaaattatattatcacacagaattggttttagtttttataatttttatataaaatttggttgactacctattccttaattgctactgacttaggaaagaccttaataatcgagttccaaaatgccaaaaaatattaatttgtttatacatacagtactattacactaaatgcaacatgatataattaaaaacacaacaagaaaaactttccagtccacctcctgttattttttctaatagttgaaattaaggtacggtgaagaacattgagcagttctataacttaattacataacactataacgggatgaaatacatcaaagttatgtctgacatgttctgacataatcaatagtgcagtttagatatctaatatcaagtaacaaaacctatcattggccacctattactaaatgacacaacacaactcacctttccttcaaacaatgatgcatcatataacctctcagaacataggttgtatactttgtacttgtcctgcacataccacaagaaacataatagcaaaagttgcattagaaattttaataaaaaaa

SEQ ID NO: 38139 - DNA, 1903 bp, Cannabis sativa
atagtaaagccggtgacggagaatccgtttatacttagagacagattggagaaagagaaagaagggaaacaagcccagatcgagaaaatcttagccattaaacgagacccactgaacgagttcccggagaagtgtccgccgggaggttcagaatcggtggtgatatatacgacgtcgttgcaaggagtgagaaggacttacgaggattgtaatagggtaagggcaatattggaattacacagggttgcttacgacgagcgtgacgtggcattacacggtggattcttgggtgagcttaaggagttgttattaggtgatgatgaggttggagtgcctagggttttcgttaagggaaggtatgtgggtggggcccacgagattgaggagcttaatgattcgggtcggttgggtcggattattagtcgggtcgggttggagagaggtgttgggagactcgggtgctccggatgtggtggggcccggttcgtgccgtgttgggagtgtggagggagttgtaaggtggtggcgggtgtaggtggggataaggtgaggtgctctaagtgtaatgagaatggtttggttcattgtccaacttgtctttgagtttttttgtttttgggtataaatcaaattggaagttgtaaaaatggtatgtgacacgtgtcagaaatgttgggaaagagaagattttggattttgatgtttgtatttgtggtgggttttttttctatttaaaaaaaaaaaaaagatatagaaaccacatgtagtgtcgagtttgattgtaaaaaaatatagtttgcataataaacactgcaaaaaacttttgttttgcattttgaataattgattttggtatgtgtaagtgaatagaatgtaataaataaaagagactgagcttatttattatttattattatacatgcaaacttctataaatcaaaatagttttaaagatgtttttaaaaaaaatagttttaaataaatcttaaaaattaaatgtaattataaaagggcccaaccgggttcgaaccggtgacctcttgatctgcagtcaaatgctctaccactgagctatggacccatgtgtgatccaagtaacataataaaatttaaattttaattaattcattaggcctttgatttgggtttccaaaacttacataataattgtttttcctattttagaataatgttgaaatttaattaagatcttttaattggatttggaaatccatacaatacctacaagttacttttttgataatttaaaagtttttaacataaaatgtgtatttgataaaactttcctaaatataacatttttttataaaataaatataattcaggatctcaaaatctacctacaaaatatttataacacaatatacataaatatgtcgtctaacaacataactaataagatatcaatggcgtctcaaagattgttaccctcaataccgaatatgtacaatttttatcaaactcactgttattcaatcttgattttgcctttacctacacatagtaacataattgtgtgtgagtcgacaaactcaataataaaacataatcatgaatatagcatacatttttttaaagcatatagcatacatacttaatttgaaattaagtgtttatacactaaattatcatgagtctaataactgcatctaacacgaacattgagattccaatgtccgtagttataatataagtttttatttataaaatgctataatttttatgctatttaatgatataagttttgatttgtttgatataagggtacataccattttagactctgtgttttgtaaaagttatcaattggaccctatgttttattaaatgacaaaatgaaccttatattttctaaaaaggtaaaaataggacactgagctta

SEQ ID NO: 38140 - DNA, 2019 bp, Cannabis sativa
  modified_base (1945)..(1954): a, c, t, g, unknown or other
aaaaaaaaaaaaaagttacatcaattcataataaaaaaaaataataaatcttgttaagatcccaagtctatttttcacacatttccagatttaataataccatctaataaattaattgatttgggcaagtaatcttttttgtaattaaataataataataatgattaattaattacctccattgagccaaagaacgagaggtttttgatgagaattttgttgagcatggaagaaccaatagaacaaagccttgtgattgttgtgaggagtgagtttaacgtagccagcatagtgtgcaaaactcactcctttgggttctcccggcaagttcttcactctgtccgcctccgcctccgccgtgaattttgatctctccgccgccgcggtggttgtacagacttgtagtgcagaccatagtgaaaagtagcaaataataactgttttccaaacaactgccattataggagagagagagagaaaagtagagtttttaagtagtagaggtgagacttgagagagtgggtattattatgtgtagtgatttattttatatataaacaagaatggtgtggtgtgggtgtgggtgtggggacaagtacaaagagacgttaaaacgacactactatctctctttggtctttgtcgttgtcccactctctccctctctctctccttttatacaattatttatttgtttttataaggtgtttcttccttttccaattattgattttcgtaaatttcacactacaaattgataatgttataactttagttacaaaaaatattgtgatttaaaatgcattcagttacgataaattgtgatttttgtaattaatacatttatagttacgagtcatttagtcacaacataagaatgattattcataattatcaaaactttttttattaatgacaaattttgttgtgattaaaaataattttttttgtaataattttacatgtcttaaataaaatagtactcattttgttgtttttcagaataatttaaatatttcacataaaaaatattataattataatttataacagatctacgtatcaagttgagggatgagaaaaagaaaagttatggattccaactcaagatgtctccgatgtactaaaaaaggattatttcacaaatactcaaaaacaataaaaaaaaaattacaaaaatgtgatttcacgtaattttaaatatttttacgatttttttgattttatttatggaaaatacgatccttttatttaaagagctacacgatttttttgattgttatcttattctttgttgttgttttgatgttattttagatattattttcatattacttttatatagtttttttgttatttttattaaaaaccgtaaaaaatatataaaaaaaaatctttaaatataaaaatataatttttttttataaaaaataatgtcttatataattattttcaaaaaaaatcttcatgtcaaaagcatatttttaattaaaatccttcctagaattttcggagaataactttttttgtgtacggattatttgacaactttgttgttgttatttatattatttcttttcgtaatggttaataatattttttttagtaatgttgaatttttaattaattttactgataattgttttgattattattacatcaaggaataatatacaggtgacgattattagttttgaatatagatataacacgacaggaaataagtcattttcactaatatgaaaagaattagtaaattactaatacatgtacatgatataagtaattttaaattttaaattttaagagtagaccaaaatactagtcaacaaaaatatatagtagactgaaacgtattaatatgtacacaacaacccaattttatgattttggcagtctttttatttttattattattattataaaaatattattattattattnnnnnnnnnnttattattattattatatgttatcattattattattattattagtaacttaactgttacacgata

SEQ ID NO: 38141 - DNA, 3745 bp, Cannabis sativa
caaggacaaccatctaaaggccctttatcttcaaaagaagactcattaaagctttcctcaattacaaaagccttgcctttgcctttgtttgttggcacaggccgagcaagtctcactgacttctgtccattaggcctaataaaaaatgaggtgtgaccaaccatgccaccccgtacaagatgcttctgtcaagctagatccctactagtctctctataggaaatataagctagaggaacctcatcgtcgaacatacttttctcctttttaactgcaagcgtcttcttcttggcattttccttctcaataggagcactgcctggatcctcaagaggattgcctgaagcctcaacatccttaccggaagggtacatgtcatacttcctaatgttctctttacaatccaacctacaaatgttgcgccactcagcagaaagagatagtatgatgttagccctgtcccttatctctagcgaggaaatcggctaaatataagtggggactttatggaagaaccgacaaacaccttttatgtcataatccattagaaaacccttgacataacccctgatttttcacatagctgcgtcatttgtgccgtccaaccactcgtagccttgctggcaaaaataaaagtatctagtcatgttctagtgtggactgattttagtttaaagtatagcttactttaaaaggtgaaggctgcgaccagcctagttcagcatacacgacagagagtgtaaaaaggtattttatacccttcggtgtaatttgagttggacagagcttgaagaagtttgctatatccttaaagtataggtgtaaaagaagaaccatcctttactcaggatggggaccaaactatgttatccagttcagttaaggatggtgagcaagatggcttggtgtcggcctaatacatcagacttcaccaacaagtccacttttgataatgtcagacagtttggcggcagatggcgtggttgaaagggatactcatctctctccatccccgtgttgtagaatccaaggcacgacgacctcatcctcaatgtggtcaaccccaacctcagagggttgacccatgctagaggttgtccagcctcgccttaagaacccaaggggttaccctagatcacatcacagtccctagcacaccttcaggcagccctgggcttggctgctagattctggatcctcttcctaaccggccataagctctttagcctgcccgacctcaggacatttagcttgctcagcatagtaggctcttcctctttccatgagttcagaaatatgaggatcagttggagttgcctagcagtatgtctgcttagtcctaactaggattggatatttcttagagtactgagcaatggtcacaaaagcctctgctacagaaagttctctaagtaaagaatacgtatgtccaataggcaaggtgtcaagcacaccctgctggacaatgtaggtccaagactttgagaggaatcgtctccacccctggttcagttaccaaatgaaccttctataaatttcaccacttatttgctcagaatagtggtgatgctagatttcaggtttcggagaaccactactcacttcaaagtcactcgaagagctacacagtgagctcttataggaggaactagctgtctagactgggcgctaatcttcgtatataaggctaagtaagtcctcatcgatcttgttgtcacctccccaatagtcacgtaggttcatctatgcataaatgaagactgaggtgaacaactggagatcataaaaagacttggacaaaaaatgggttgaccggccaactttaacctaaggttactaaccggacaacctggtaatgaaaagccattaaccagccaaattaaattaagttcaacaagaatcggatagggtttctaaacatattcaaataatcgaataggatctctaacaaacccaaagtactgggtagggtccctaaacagatcaaacagtcctatttatatgttcaaagctaagttctttgtgttcttcatgttcttcaaaactcgaagttcaaatgtcaaaatatagtgcaagattcaatcttttttatcaaaaagtcatgcattatacatcctaaagctattaaacagattacaatgagtaaaactactctaaaacatgaaaatcaaaaagttcataagcttagaaactcatcaatggcaaaaacttaagaaaaaaaagggttcgaaacttatccatagaagaacggcgcaaggtatcctaaactttctctgcgagactgattctccaacaaatgacgatcaaagttttgagaaaattaaaggtccaaagagggtccaagagtcaaaacctttgaagagtgacaagttctagagaagtttgagagagtttttaagtttaaagaagttgaagagtaaagaaaatgagaaaagagaggaatgtgtccttatataggttctgaaaaatttgtaatttgaatgggtcagagtgacaacaagactttgtgagtaagctggtggtgcctggaattgtatactgagaatctcgttggtttgggtagctgcaggatgcgatcctctgagatattgtatctcggacgtatatctaggccctttggttagataatatctaccaaaagttgtgatttgggcctattccaatttaatgtatttttgagcccttttttgaaaatcttgcatgctggctgcaccttcttgttggaactaattctagagaggagttttagtttggatctcggtctgtaatgattctaatcattgcccatcgtcaaccttatttgtttcggaagcttcttccttaaatctcttgataaaattatttagggtctcgatggacagttgtttgattttagttaaggcactgacttcaaggttcatcttccttcctgtgacaaattatcttcagaaacagcaagtatgtaatttattccagcaacttgtggacccatgttctagtttcttaaaccactcttccacagatcctcccaaagtcaatgggaagcacaaacacttggcgtcattgctaaccctcaatactgtcatgaccgtattaaaccgtgacagatgattgcttgggttagtgtctcccgtatattataccatttttggcattttgaagttttttgggagttcaccttcaagtgcgttcctagcacagggctgctagtcctcacaattggattccgaatcatcacctttttgcctgtgagacactcttgctatatcttttccatggcaagcatgttcaacaaagattcctttgtttaggatatctttcaaggctagagcattttccctatggctgaggcaggccttgaggtctccatgctttgtattaagcttttctcgtaagtcaatcggaggatcctaactcacagacactcctctttccctaagcttttggtgcacagaaatacttcagcgatccccacagtcttgggggccagtcctccctttaggaaacctgtcccctaacagatattttccttttgggtgatcagaacgtactctccgtggatcacgggttgctttgttcccctctggtattgtcgttgggtttgccttaggagatgatggtcctttagaagagtacctgatagggctaggctctcttcctttctggttttggttcattgtgggttgtgtgggtcattctcttgccttctcatgcagagatggcacaatagttgggtgttggataaattttaccaggatctagattt

SEQ ID NO: 38142 - DNA, 4658 bp, Cannabis sativa
ttagcaatggctataatttcttggattcctagtaggaatgtaaatggtgtgggtcagtttatcttatgtcccgtttgtatcttctgtgctttcttttttggtaaccatgggtttccagtagcaatgtaaatggtgcgggtcagcccacccctcaaggtaacaccttctccccgtgattcacctgctgttggggcaggtgacccgcccaaacgaagtgggtgagtaagacccaacctgtaaatataggaactctgatttcccatacactttaatcatgataaagataacaaacaaacataggaacttgtattcatgtttctgaggatatgttggctctgttattaggtaatgaataattatgatttgatttgcaacaaatgaaatttcagtagtaaaacagattgagtgaagatgatattaactgtatactgtgattttgatgttggtagtttttcaaatttttgatcagcaacagtcacaacttgattgttacaaactttgtttatttaaaatttctaaagcagctttgactctatggattgtacgtggtgtgcaacaattaacaaacatcatttctagtttttgttttttgtttgcaaattcaaaatgaggtttgggcagtattgtttatgggaatttttttttaaaggaattcattcaattcgaaacattacaaaccgaagggcttgatgaacacacggggagaaactccaatccacatagcgctagctttggataacaaagcttgattggcttccctaaaaataaaaaacaaaccagtcactttaagaaaaatttaatgtgttaatcagcttgattttaaagaatattaatggtaagatattttaaggtaaggattgattttgatatccatcattgttaccaatttataactggtttttctttctgcttgtctcattttctcaccagtactgtagtctgtaaatatagcaatgtggcttataatataattataatagtattaaacttaataaagaaaattgctaatttgcataataattagcaattgctataattgcttggttccaaatattgtagctatggtaggaagaaaaaaagaaaaaacaggattacataattttttttttgatagaatgcataataattaatttgagggaattaattttgaacttgttttccaatgacaaatgcaattacaataataaactgattctgttgctgttatggatatcatcaaataaacacccacaacaacaataactttgtaatacatattattattgctattatctccagaaacaaagatgaaaattgaaatatatttcctttaagattcatattattgctgttattgttgttatttccagaaacaaggatttaaaattaaaatacatttcattcaagcattggtcttagtgagttcgttttgtgcaataaaggctatggcttttagggcatcaagagagaccaaggagacattgtcagcagactcatccttaacttcatattcaatggtggacttcacaatggaggaagcttggtccttgtcgatgatctcaaatcgaactcggtaaagcgtgaagccaaagtccaggtatcctccttcaatcacctcggcttccttcacccgattctcatcgtctaccttggtaagcttctccttgtaactcttgaatcttgtaacacctaaagaatggtaatccccattaatgacattgataaaataagcacaactattaggtattagtagttcttaacattaccataagtcatactttacgaatgattagcaatttttcataataattataggtactgatattaaaaatatatagacgtacgtacctggaacaaaaattaaatggacaattgtgccaacgccaccatctccttcaagaatatcaattttttcgaatacatttgggagttgttttgcaatgaggtttagttggcgaatggtgccgtaaaactcccaaacttgggtagccggcgccttgatttccatctcatgggagagttgtccgctaaccatggcaggtttctttgttttaatttgttagatagatagataaatagatagatattattagaacattcacttcttatttataagaagaatagaatagaagcagagagagttgtggttcattgcaattccttgctaactcaatggaccaaactctacttttccatggtcaaaccaattctgctcaatcaagtataatacaaagaccttttcaatgatgaatactagtctagtagaaaaataatttgttttagaaattaggacactctctttgtcaaactaaataaattaagacactcgtgttcagacgtttgactactagacatttgtaaagtatatttaccttttcactcaacaaatcaatccacttattttactcaatttatcaaaactgccattataaattcataggtagctaatatcttagtcaacaattcaggttatattttattttagaaaaaaaaaaattcaacaattaagtatttaagttcaactagatgaatttggaagtctaaataatgttaaaaaataaaccatagactgtagatgacacagttattatattatctatctatatatataataagcacactagtctatgactatactaggattgaattttacgtttttggtttgattttgttggtactctgtatgttatgttgactcagagtatgtgattgttaaatgtttattattataattgtatgaatactgaaactcaaaacaaaggctaaaacttataattggctttattttcaaaatactaataaaaaaatcaatatcatatatattttgagaccctttcttatataataattgattgtaatatcgatattggtgtaatttaatatcgagttctgcatattttattttaacaaaaattatagagaattacccaccaattataaagggcatagaggatatccctcttcactcttgtggggaggttgttaattgaatttttaatcaattggattctcatattgctggttctaatctctaaacacaaaatcttgctggttctaatctctaaacacaaaatcgtgagattttacaaggcaaaattgctggttctaatcttgataacaagaagtatgttctatttgctgctatcctttaccacaaactatgaaagttcaggaatgacaattatcataaggggggaatatgacctttacttgagatggagaagaagatttttccagaagtaaattgccacaaaaaactctttctggttagaaactctacccaataggaggcacatcgtgtttacgagattctatggggctctctagacctggaagatttagggctaatgtggactatgcaaacaaagatggtcttggtgcaatgggtgtagtggtgaaccagttaactgtttcactgggcaggaccctagaaattggttatccgtttgggaaatctggtttacctgtttgggcgatttttagaatcttagttttgatgttcctcgatatttagggtattgccatgctatttatcgataaagaaacttttagttttgaatgtgggtcgccagaaaggattttagcaagttgtttactcatttgtataaatctgatacatagggcatccatttagcacgtgatttctattcaggtcaaccgacacgtttgaattcggaaatgagataagactagcataaaatgtatttatataatgaatatgtgtatgtgtaatatatgcatactaattgtgattcgtatgctaccaacactagtaggtagcagtactgagtgtattggtataatgtatgatattcaacgagtacaatacggtgttgccaacactagtacggttatgtacgtagtgtatgtggtacaacacttagtggtactcgaggtacgatgcaaactctaccaacactagtacagtagcgatacgtagtgcatgtggtatggtggtcgtaccttagttaagaacgttcttactcatctaataagccttgtggatagatgtatgaacgcctagatacaagtcggtattatatgcttttcatactaagtctgttgactcatagatattgctttcgtgtgtaggtaaagtaaaagctaaagataaacaacagcaagttcagagctcttggaacgattgtacatgtcgagacggtgcgacctggagagtttggtctcagaacgacttggacttcattttgtagtcgttgtgcgacatgtttattaatgttattttgaatgtaaagttacaaaacggaatcccatttattcaaaaaaaaaaaaaaacggatgtccaattttatgtaaatatatgtaaatgtttatataagttttaagttaaatcaaaattttaatttattacaatttttgaaaaaagcactctcaataacaaagttgtgcactgtatttagaaagttattgtagaatgcttaatcattagggagttaaatagaagaattgggattaagtatcattacatttttttcaattgcatgtaaatcttttgacaacttactaattttatcattttctgaaattattttttttttcaaattttttgtttaactcaaaaagttgtttgatttcaaaatacaatttttttattttttttaaccaatgatcgatttttagaacaaattttcaaccacgaatcatatgttgggttttatgcc

SEQ ID NO: 38143 - DNA, 2399 bp, Cannabis sativa
ctctgattgcaatggtggtaagcagatgcttcctaggggacgtggttatcaccgtttcccacctggtcgcaacatgcctgatctatccatcggcggtgctcctggtggcatgctaccagttccttacaatatgggcggtgttccttttagggattcttcatttaaccaacccatgtccactggtgctttggctactgccctagccaattctacacccgaacagcagaggacagtaagtctgcttcttcacagaatatgctgaatgtttgcttgattaccctactatttccttgtttcattctatgtttttgactatgttaattgatcaacatcatagagaaggaactattctgacattggattttcgtttcttgtatagttgctgggagagaacttgtacccacttgtggaccagttggagcatgaaaatgctgctaaagtcactggcatgcttctagaaatggaccagactgaggttttgcacttgctcgaatctcctgatgccttgaaagccaaagttgctgaagctatggatgttttgaggaatgtcactcaacagacacagcagcctcaggtcagcagtccaactgatcggttggctgcattgtcactgactgacaaccttgtctcttgagttttcgcagcagagcaaggtacctaggattagcagcatgctaattgaagatctcaattttgaaattttgttcctagtttttagttgctgctttaagaagagcttttctagaatgtagcattcaattattgacattggattttatttgtgttaattaagaatttatcgcacacctgttgctgaaattatgagttttttattggtatgagtttccattgaatattatttattttatgatttgcactgaaaatacaatcaaccaattattccaactgcatgagtagtgacatatgattattaatgaattaattggtagccatgactattatcaccatggcttcttcttttgtcttgaatttgttataggcattaaaatttaggaaaatatatgtttatatgtatacatatatttttttttaaatatttggatttaaacttgccagttgttggaaatattttttctgttgagaggacaagataatagtccattgtcttcaactacaatatcatttcttgtttttgttttcgtgtttggaaattgattttggaaataagagtatctccaataaacaagtgatgtaaatctttaatatagcttatttagtaaaaaattatgtacattgttaaatttagcacaatatttgttattaaagtcactagttttatttttattttgttgtaagattaaattaactatttatattattttttattgttttacataataaaattaaaagttattattattttattatatattttaataaaaacattaatcaaacatcaaattttatataaattttacgattgtgcttggaggctaaaagtaaaaattgatacaatttttttcttaaaaccaaatataaaggtgcaagataaccggctagccactttttgagcataatagatgccgccctataacagatattgactggatcaaaaataccaaaagttgaagccaacacagcctctagtctacccaaccactgaggctctcttagggctagcaacacgagcccacaacagctaatcaagtgctaaagccaccatagctgcatctgatttaaaaaccacttttgacaaccaaagttggagaggagaactcgcggagaaacaaagaggggcgatgacaccgacaagctccttgtagaggatgctcttggcaactaaggtttttcttttgtgacctaatggttaagactcgagcatgtgcctcttcatgagcttccgagacatcgatggatccttcttgttcctctcactcttgtgagcatgcttacgacattaggagacggtgagcaggactgggcgttcccatgactagatgctccgtgctcgtgatggtcaatctcgatgttgtacttgaaggatttgctttgttataggtattatgagtctattacaatatccattataacaaattaaacatgctctaagttcttatttgcctagtatatactatggggcttttggtatgaaaaattgttttataaaacgatagtatttttgtaaaaaatttcgtgtaaaagtaaaattataaatttttacctaaaatttaatatttttataaaaacaccttattattattatttattttttatttaggcctctaatgttggattctagatccatctcaggtatgtttgggccaaaattaacctactgtgtattgctaagtctagtaattgagcctataatatacctaatgaccgtagtctaatttattttgggattatttcacaaataaaataataataaataaata

SEQ ID NO: 38144 - DNA, 2570 bp, Cannabis sativa
  modified_base (669)..(669): a, c, t, g, unknown or other
  modified_base (744)..(745): a, c, t, g, unknown or other
ggttgtttacgtccttgttggatcttctgttacaaaatcagggggtctcctcttgatgcccttgcttccaccaagcatcttttggttaaggtatcacgcaggtctctttgtctcccaatctgatcatggactaaggttgacttgggccttgtagttgtttcctaaccacaaggtcgtgaaggcaatagtactggtgtgtctccataatgaatcccatttctttaacaaatcaaaatagatttttttgaacatcaaatccctacccttgatagtgttttaaggtggtgattcagggatcatggacctataattttaagcttcaataaactagattatttattgaatctcatcaaccaaattatcttatttattaattccatgattattccacaataaatatagatgatctcttaataattatagaattatatctacaaagttttactacagtgtccattgatataatcaattctagtgattatccctcattgtgtcacttcgtaattagttttggtcaaattaatgttttacccttataattactttttatatcctttagtactgttatttcactagtgaaagtataatttcgatccaatttaaatttgtgcacaacttttcaattccagaattaacacttaaatggaaccaacatttgatccattaggnaagttaggattccatattgtaaatcatgtttacaaaacagaaattgtaagtatcatcttctctgagaaactttanngagtgaatcaaagaaactaatagcatgagcaggagttcatgaatttggtcattatagtaaacgacatgtttgatgaagacaacttacttacatatcggttcatgtcatatataatctctattatatacaacaccttcacttagaggtcatacaatatcatgcaatcgaatcgagattgcttgcaccgaataacgggcatcagtgaaccatacaagcaaccattgattaaagattctataactataacatgttgctgactgttttattcatgactaagtaatcttaattttccgtacaatacaagggacaacctcatgtataaataagaatttttttattatttatatataaattattcaatattaaatattaataacttaaaatttaaacatatatgaaaatactcgactcttatttataaacagaattgtctttagaggttatttttaacgacataaaactaacacacggttcaaggacaaatattttcttttatttttagttatattttattatattctatttttatagacatagtgaggtaaatattcttggcacaaactaatttggtatttactcctatgtaaatggacataaatttcaacttattcttgttcctaaatttgtggtgaagaagtcaaatgtaaattatttaaagataaaatacaatatttgatgaaacagtcataagtgtaagaaaaaatatcttgacaccattaacatttagcgttgttcaaaagaatcgaaccaaaatggttgcacatcatgttgttgagaatccaaaacagctgcaaatacattactctaccttggtaaagggtttatatgagtgtccatctttagagtcattccaatgagagaatcatttgtgagaaggtcatccttcggagcaatctctagtgccaaacattccttcaattcaactacaacttgattcattgttggccttttagtggattttaaacacacacaacttgtggccatttctatagctttccatacagaattaagctcaaagtgtccttccatcctaggatccacaatactcttaatctctccattttggtaaagcatgttctctacccattgagatatgtggatggtctcattactattgattttcgcaattactggtcgaccagtgattatctcaaatagaacaactccaaaagcgtatacgtcactcttctcattcaacaagtttgaatggtaatacctgataacataaagtagattatgtgaaaaaagttattctgttatgtattccaaagtttgggttaattagacaagtgaacgtatatatgtatatttcctctgggtcaagatatccaggggtgccagccacaactgttgtcggtacttgactaccgccatccgaagagaaagctcttgaaagaccaaaatcagcaagtttggcctgaaaattttcattcaacaagatatttgtagtcttcacatctctatgaactattgctggcttacaaccaaagtgcagatactccaaacctaagattgatcaaagtttaatcagcacaaaccaaccgacttatagcaaaaaaacagattttttaatcactttttacgtttaataaaaatgaaaaaatggctgaaaagatatattgagacattttcccctatttttagatttggcaccacaaatatgcaattaatctttttagacaattggaccctgtttagtagattgttaaaaaaatatcaaaagtaaaaaataagttcaagactcaattttatgcattagacaaatgggccttagggttttcagtgaaacccttttatcccaatttttagcaaaaaatcgagataa

SEQ ID NO: 38145 - DNA, 2761 bp, Cannabis sativa
gtcgggcccggagaagaccttattaaaagagggaggtgtaggctattcaacctcgggtaggcccctcgacttactgagagtggattcgggatagaaaaaaggtttgaaccttccttcgttgaccgtctctctttatttctgagaccgctctttgttttctttttcctcttttgtttttataagggaaaccaaattaagcaacattaattactataatctaagagtatatttgggctgcaaagtggaccaagcttatacgtacaagtccaaatctaagagtatcttctttctcttattggtaagaataagacaagtgtgaaaatatactttttttttttcttttgaaaatcgtataataaaacatatatcattgttcacacattgtttgaccgagttatagtattttatttataaagctatttttatagctaacataacagatattgcaagagacactagaattttatttaatgatatgtaggtgcttaagggtgctgctttgacacaacccaaggcaaaacctatccatgctatatataataggagaaagaaacatcaaaatgtgaactaaacaatttgtttataaatattttcgaaaaataacaaattactttccctaatattctattttatatgctcttcttttcatgattcaatattttaatatatcaccagaaaagtaaatacaacaattgtgattctcaaggacaaattgcgtctttgtaaaaagccattttgcaaccaaatgtaaaaactaataaactctttatgaaattgtgtctcagtgtcattgttgtactttgaaaacaatagattttgatgtttggctactttaaaaaaaaaaaggcaaaagaaaaaataagtacagcctttctctaccacaaccaaaattttgtacatgatattattacagatgatattattacatatagaaagaaaaaaaaaaaaacccaaacaaacataaggaataaaagacaacaaagtgaaaatgtatataaaatgaagaatgaataatctggtttatatatttttcctatccagatatggttgagttctattaaaggctgcaaagcgtttatcctgtgctatcttggcatgaacttcatctctttcactgaaatacctttcaaaggccctgggcagaaatcttggaattagaaagacaaacagatttatggcaaagtaccccaaattcaccactgctaagcttctcccaaaccagaaccagcccacatcctgacccaccaaaatcacatatatcaattcaacatcttttatctattgtattcatgcatgttaccatggtaaaacctaaggtaacggattataaaatatctccatgtacaatatttttcatatcaaaaaaggcatatgtgataagcctgacaattttaattataatgtataacagaacctttaagttgttagaagggtacatcatgaggtgaggtaacatttttgtgcggattgagtataaaacccaattcacttattataatttgttgtagtgcgtcagactactccaacaacactttagcaaaatactgtttgagctttttgataattaggaaaacaaagaactcttaatttgatctaataagattattagtcttgggtattattattaataggagctaaatatattaatagcagctaataataacaactgatctatagtactatttcttttattgaaagcaagtaacattatagtactattaatttactcgacttcattataaacacaaaagggcacaaggagatggatattatgagtgttcatacaaagttttcacaaaatgttaatttgagaacatcttaaagtagaacattgatattcacataatattgttagttatgataataactttttattcacttatatattatgaacatattagaagtaataaaattattgaaaaaaaatgaataattattgttaaaaaaaattagtttggtttagttttgaatgttcaaaaaaccttaatactaatttaatttgaaaaaaataaaaattcaaccaaaccaagaaggaccctaataaatattggatacaatgtactgaagcattgcaaacaaactaaaataagtaagtcatgttgctcgatccctttctataattggtacctaccgtacctattaaatcaaaaaataattttttaatgagatattcatattccaaaattaatgaaaaagatatatttatttggttcatgaagaaaataaatcttttcattaaaggattttaaaagaatgatttatttttatggaaacaattaatcaatataaattgatctaatatgattctaaaggaagaataaatagttccaataaaattttaatgaaatttcattttcattttttgatttaatttatctactacatcaccggaataaagggtacaaatttaccacaactttaaattagaagacaaatttcaaaaaaaaaaaaaaatgatatatttatgtatattagaccctttaaaattccctaatttgatgatagtttttaaaatgataatagcagttcaaactaaactaaactaatctatctaattattttatatataattaatatatattttttaagacaaaatatatatatatatatatatttatatatatttgaaaactatctttaaggaaaatatatgattatatttttttttattgttatttatgtattataaatttattaaaaataaaaaaatattataaaaaaaataaacatttattataaaaaaattagaattaagacacac

SEQ ID NO: 38146 - DNA, 1599 bp, Cannabis sativa
cggtagccgagccacgccttccgcgtacaggtagtcgtctaagccggtcagcaagccgattaaggctgagctgaagaacaagaatggcttcatctggatgggcttagcggttcttgtgcagcggcggcggcgttggtagtaagcggcggctaaggggagtagaatgatgggccagccaccggtctcgagccagctggagagccagactcgtttgccgccgtggatgaagtagagccgcatgactagtggccccccgcagttgccgagggttagtaagatgcagcttagtattaaaaggcttcttttttgtttgattttggtgttttgatcttcttccatttccatggtaataatatggattatggatttcggactaccatatccctttttatttcttgaagtttttcttttaatattattatttatcttttgataatgataaaggatattttcaagacatcaaattatcagtaagaaaatgttttagacttttttttttttggaacattgaaaatgttttaaattgatgtatctattacaaaaaatgttataaatttatatttatatttatctatataaatggacactttttaatgggtattagctatgaatgatcagtaaataaatttaactataaatattaattttaaaaatattaaatcatcaaattttaatctaataacaactaatgaaagagaaatttaaatgtctatacttagtttaactacttaattaaaaaaatatctctttttataatatatcaaaaatatattcatataaaaatattgttgtaaattcagcaacaataacatcaagaattcaatctaaaacctgcattaaatcaacaacttgaatagcaataacacacacaaataaaccagttaacaacataaagtaacaaaactgaattgaactagaaggagacaacaagatttatcctggttccggtcctagagatcaattcggtccctggccatactccagctgagaaaacatcaccaattctttcattaacatagagaacaagagagtagagatacaagcaccaatacaagagcaatcacaactctgcaacactcgagaaacacaccagagaaacaatctcagtttctcatctcctacccgagtacaccctctgttcttgaccccttcaaaaacatggtttcacagcttagaaaactaagcactcactcgctaaactctctctcaattctctccttacaaaagtgaaaagagtagtctatttataggtataactcacaactagaaaataggtgtataacagtaccaactaactaactaacataacaaaaagttagttaagttagttagtgtaggtgagttagtttttaggctggtttagaggatcaacttccacaaatttccaccttgattctctaaagcaaactaccagcaatcttttcacagaagccttaatgatgttgatatctcaaatttgttcagcaagaaccaatgttcagcaaactgagacaatgcatcagtttactgaaagtgagaaccttagttcccatgtctgtaggttgtcacttgtgtgtgttggggattattttaccaggatatagatttactaccatgtat

SEQ ID NO: 38147 - DNA, 2899 bp, Cannabis sativa
gtggaacctatgagaatttggattttgtgagtgattgattctcaccattatttttctcaatatcattatatcaataatgactactaaaaaaagtaaaaaaaaaaattaaaatttttacttttaaactttaacgtgtactaaattatatttattaaatttttaaaccgttgatattctttttattaaactatttagattgttcgatttaaattttttgtcaaatttcgtttatttttactaatacaattattgttattattatatcaaatgatatctttaaattttaatatgtaccatattatattttgaattttgacatatgctaaatcgtacctactgaatttttatctacattagactctcgttatgcttaaattggataaatatttttaaattcaacaatcttaatataatttgaggaaatttttaataatataaaaattttaaaaacataatttcatacatgttaaagttgaagttgtggaaaaaataaaaaaaaaaaaaatatattaatataactgtaagtttggaattttgttgctgattaacatgtagctataattcacttataataaccagtttaataatatatatttactttaactttaaccatgaataaaccaattagataccaacaattgtaataattaaataaaaaattaaactctcgtttataattagaatcacaattattgtggggtcctaattcttttatttacctttttagttatagtcctcttcccttatcaactaagctaattatttaattaaaacaacatataaatattaaaaataaaagaaaaacttttctaactctaagcatgcactttccttttctatcaaacaaaattgtattcgaaagtgataatagagaggaatcctaagttaaaaaaaaaaaaaataattccaaaagccaattttttttttctctcataggaaaagttgaaggtttttggacttagaataaagggagttaaataaagagaacagattctatataccataagctgctatagtagtataaatatatatatatatatatttactaaatagtgtgtcttttttttttttttgatatttagtagaagaattttttacaaaactttatgtgggcaagtgacaaatttagaggaccctgaaaattaagctttcgaaatatgattgtaaagagaaacccatatgctcgtggggttaccctgaaaagtttatatagcctatatatatatatttatatatactacttataataaaggtttcaaaagctaaaatgataaatatggttcatttttcagatacgatttttgattttatgctgaatgcaagacagcatatcaactctctctggtccttcttctactcattgttcaaatttgttaatgagaaagatatatatatttatgtaatatttttttttctcttatatattaaaaatcatatattaattttaaacatatgtcatataaatatatatagtaataatgtaacttcaattctacattctcatctcatcttgtaaatcttttaacttttgtaatacgcatattattattttagttattatcaaatcaatgtgatcacaacattagtttatatatatatatattctttttaatcattttatttacacataacaaatttagattcaccatatatgactcctagtttccaaccaccaatgtggtcaaatatttaggattgtttatataatttgtaatgtgtgattctacaccccaactaatttgagtctggaccaaataaattcagagtgaatggtttcatcaagctgatactgtttacaattctctaattcattcacgattttaaaattcttagcagtggttagaaccaagcgaatttgtataattctcttattatacttaatgttatatagtgattttacaaaaatagcaaagacaataataaaaaatcaaatgcatgataagcacctaagtggtgataccaactctaataacctagacaccaaggtggtgatacaatctctaatcacctaagtacctaggtggtgataccatcacggcacgtagtgatgataccatctcaatcacctaggcacctaggtgatgactccatgtctaatcatctcccccatggccgaggtcctcatgaatgaagcatcacctcagctcaaggattatcactttggcccacattgaagtccaccatctcagaccaagattgaaaaacacactaaggccctaagtgaagtcatcatctcggttcacactagaattccaccatctcagctctattctccaagaccatcacttcgacccaagcaccatgctgatatcaacatctcatcctcctaacaaatgcatcatctcggcttccgcaccaatatcatcaccttggcatggtcacaccaccacctcagcccattccaaactcaccatctcggctagcacatccttacgaggcaccacttaggcatcctcaaaaggcatcactttagcatcctcatcatcaacacctcaccacctctcataagggcatcatcttagtccatcccaagatgcacttcacaaggcaccatctcggctcatggcaaggtgctcttcaccttagaacctcatcaacctcctaacaaagcaccacctcagctccaagcctccatcattcatcatctcggctcaagactaactctctcacctcggctcaatgctgagatcatcacttcgacccatgctgagatgctccaacacgtgaccaacatgacatgcaaggcattgagctaacacacgttgttagaaagatatctccaagaaattattattttttattttagaatataattttgtcatcattttgtattttaaatttaacctgattatggttacgatgaggtgttgttgcgaaaactatactatgcaacgtatcg

SEQ ID NO: 38148 - DNA, 1816 bp, Cannabis sativa
atgcaaaatatgctagcatatttttagtggataaattaatttttagcatataatatcaaatttctctttcatattttagcaaatattttaaataacaataaatagaaattacattgtttttatttatttattttgataattaattattttatttcccatctcaatacataggttctttgaatctataaaagaatatgtatatatataaatatatttatatacatataaaagtatatagtaactaccatgatagcgatattgatctctatattatattatttcaattcttggaagataccaataatatagcgacttgagcttttctagtgcaatcttttcttttaatttattttttagtttttattattagttattataatgcaaagggtatctttctacacacttagttattataataataataataataataattaatttcaaggaataatattgaataatatagaatcaattagccgacattactaagattgagacataaattatgagcattgttattggatattattagtgctcaatattttctataagtaacgttttatgattagttaatgatattttaaaagttattttcttaagttatatatatagaactcgataatatttaattatagcaataatcgtatgaccgaagaaagtgctaagaaccaataatactttttagcatgtctcataaattaaatggaatataaatcaaaattaaaaatagctcatttttccaaagtagatgacaaaaggtattttgttttggagaatttctaagagcattattattaagctttcagtgatgcctagcaactcttgacatgtcgcatttcgattggctagcaatactctctaaaagttattatattaaactctatgagacccgatacttaattagactagctaatagctattgatatatagaagagtactaagcactactggtgctttttagcattttttcatttctaaagctattcgttagcgatattcattaaaagttatttaataactttatttaggactcaatacttaattgcattaatattactaacaaatcaagctttgttaagcaaattatataattagttaattagttaccaatgatacttagcactatttagaggtactattattctcaaaaccctaatttcaaagcttaaacatattgatattgggactaccatatatgagtgtgcatacatgtaatctttgttcaaattaagacatgtttggccttatgggaaatgtacactattattctcgaaaccctaattccaaagcttaaaacatatagatatagtggcaactagattttttcaacatatatattattgtttattctttcaaaactgtttgttgttcttgttgttgttaatatataaatatatttatattagatttttaacattattattatttttggaattataatcaaagatttgatgatttgagactaccgaagtcaaaaagcagtccatactatactttgtatattatttatttatcaaatgatataataatatagtttaaaatattatgaaacaaaataattatttgtaacatttgagttaaagtggggagttacttatatttagtaattttacatttttactaatttagtgtgtaaagaaagattacataagtagtttaattttttgaaaagctctaatgaaaaatagttgtttgagatttatttttattatttacacaatagagtaatttacggtataaatatttaagtttaactcccatttataaataaatacctaaatttaatttttagcgttaataatacttaaattatatt

SEQ ID NO: 38149 - DNA, 2009 bp, Cannabis sativa
aaaagttttcataactaggtttttaggatattatattgtaccctatctggaagttcctgcttaatgtccaaataaacaatttatgaggaataacttactttagacgacatgctgagcgtggtgccacccatccaggttttaaaatgttcacgtatcactcggatggatgccacgtcacgttgtgtgatataataatttgcataatttggtcaagcaagaattttttcacctaattgagatgaagctaagacttgattaataatatgtttataaggtttgactttggttgatcaagaaaataatataaggatcaagaactctcctaattagtaacctattaagtttaagagtcaaacctttaaaaaggctttgataacaattaattctatacaatgggagttatagggttcgatgtcacaactgctacaaggacattgaaagttgatgttattgtaatcaaggcaacattaggctacaatgcaataatcgggagaggataattacatcaaatgcagggataagcatccactctccattagatattaagatgcccaacccctaatgtagctcaagtattcgacattaaaggtcaaaagaaacaaaatgttgtattttgatgaggaaagttaacgacgtaaaacaagaaattgttgcagaatagaagaaatagcaatcagagggctctttactagcatacctcaagcacctagaaggagaagagtgtaagggatataacagtagacaaacttaaagaaatcccacttgatctttcagaaccaaaaaagacgatgttggtaggagcctgaatgcatgaaaaagaaagagaagaaataatgtgctttcgtaggtggaggagtaagtcctttgcttgggaaccagaagacatgccagggatcagtcaataggtgatgatacaccaattgaatatagcaaccaaggggtttccagttgtaaaattggagaaccaaagcttcggtctagaatttaatcaacgtcataaatagataagtagagaggatgataaaggttgattttgttaaaaaaaaaagtcttcatctgaactggatattaaatccaatagtagtatgaaaggaaaacaagaagaagcaagtatgcatagattttaaaaaatctagataaagcttgcccaaaagataactttcgactaccaaagattgattaattgattgatgttactactgacatgacaggatgagcttcctatgtgcttgctcaggttacaatccgatcccgatggaaaaggaagatagaattcatacaatcttcatcacagcataacgattgtatggctacaaggttatggccatttggctgaacaatgcaggggcaccaaatgaaagggcaatgaacaaagtgtttgccaaatagctcagtacaattatggaaatcaacatagatgatatggtggtaaaatcatggatgaaagaggatcacaagctgcacctgaaagaatgcttttatgtgctagatctttaccagatgaagttgaatcttatcaaattcacttttggtgtaacttggggacaatgttttgggtacattgtgagaaaaagaggtatttaagctaatttgactaaattgaggtttttctttctgaaatgaacaaacgtacaaatgtgtaggatgtacaaagggtgacaggaaagatagccactctccgaaggttcatctcaagaatgtgaaaaatgtgaaaacctttatttgactgcatcaaaaagaactcaaatgaactacagagagtaaaacaggtggaggcctttgaacaactcaagaattattggagctctctacaagttctatcagcacccatgccaaatgaagggctcctcatgtatctgctagttagtgaagtagttgttagctgttagcaaaatgctgttagaaacagagcaatttataccaccatggaaaatctagcccttcctttgatcactgcaaaaaagaaactcaaacaatacttcgagatgttgggtttgatgccctaaata

SEQ ID NO: 38150 - DNA, 2621 bp, Cannabis sativa
gacagatcttgattatccttggttatttgagtgcttctctgaacttgccttcaacaattggagacatcagatcccttttgagattaagagaagcaacttgcctcctcaaagtttctaatggttgcactttttcttcggtctccaccctcacattcttattggcccctccatctgcagttccgtatcacttcttgagaactaggacttgcccatcacaatcaaaattatccttctcaacatgccccacaagcactcttcgtagtggcacgacatcaagaactatttccgccaggtcaatgacggatgtggattagtcttctagagctggagccttcagagcaacctcctcgctcaaggtcggaggtgttggctttggagatccactcctagagacttgcccctttttgcctttattcttgccttctttagctactttgtggacctctttggacctagaactgatgtagtccaaaaaatcattgaggatacccattttgaaggtggcaggtggttctagaaaaaataaaaaaaaatacatagcatatcaaatcacaatagatatgattagaaaaacaagttactggatgatatgacagaaagatacaaattgtttatcttattataattgactttccctcttacaaaaagggaaatatcctctcgaatctatattatctatgtaatctccactagggtatttattctggtctaagtttaataaatatgagacaaatcccccttggtcgacactacttaaatctactaagtatggagccctaattatacaaaagggtgtctcaccacttccagaagtactatctcccagagcaccctcatttgggactacgtccctgaaagggataatgagctctttagcttcactcaactcttattggaactttctcttccaatcaactagacactattcattgaccttcacatcttttacggtctcttcagtagttatggctgcaatggccttcttcaccttgtcgagatccccccagagtgattcctaaatagactccttcactaacattgggcaaattttttgatgaggagcgatgaggccaaccctttgaaggttcgtggtggtcgccagctgagccacctgaaattccttagacgataaggaattgtagaaaataattatctcttccaatttcaaaattagtggcaattagagaaggcaatctagaagacacagaatgtacataagaatatatatataagggaagaaaacgagaagtgaaacccaggaaaagaaaaaatacttacttattgtattaaagtccaagtttagtgtaggaactctcttcattgaaaagccaaaagtttagaaccagaagtcccaaaagtcatgtgtgtacttcattgaactaatgaggcaggatatactcttggaacggtggtctagcctatagaagccccctttttccttgtggcccctcatgggcttagatttaatcttgtagatgtacaagatctcctccggtgttggtgaaaatttgttatgttaggcacaaatgatacaccaccttgataaaaggaggtatacagaggaataaattggaacggtgccactatgtccacggtgcaaaagttggcaaagtaacaccttaatagaaggtgtatgcccatttccacatgggcccagtgctagatgttgaagccccaatctccatacttacttggcttctccccatgaatgaagagccttttctagtacaatctcagaacatttttgagccctcactgagtcacgtacttccttaaattattatatatgcaaaatttattgaggtgttggtccatctcccatggactataattaagaaccagtctcggagcatcctcttgctctagaacttgttcagcgtcttggccgaccagagtcacgtcggcatctctttgagcgagattttgagcatgggatccgggctgaacgactggcgcgacatgctgctcgtgtagccctctccttctatttagatcatctctgagatcatgaactgttcccaatctattaaatatagatacactaggttgtctcagtgactggttggtttggttgatcagttggccggaaccattaactttggcagagttattgggtgtgacttcttttgacgaattactaaaaaaggtctacccgcctaccgcttggcccataggcggaacctgttaatggggattggacggctaaccatttagggtttgagaagcattcacggatggatcttcgtctaactcgcccagggggattctgttgtacgttgttgattggtagcctgataggctcttcgtatcagcacggtggcttatcttattcggttgtcaatgattgcttgttgagccctccatgtttccatctctttatccctccattcagatacatgcctttgctcttcaaatccgagattcaccgcagcacgaagttcctactgatcatgatgcagggtgttggtatgaccttgcatgattctaagagcagaacggaggttttggatgttggtgtcatctctaatggttgttcaagcatttattgggggcagatcttcagtgttgggaatgcgctgattggctgctgaactggtatttccagtctcttgcacaccaag

SEQ ID NO: 38151 - DNA, 4987 bp, Cannabis sativa
  modified_base (4948)..(4960): a, c, t, g, unknown or other
gctgttcgggattggccaacacaacaccaaaatcggctactgaagttaaaagctttttgggtttagctggttaatcgttggttcgatgagggtttctcaaaaattgcaacacccctaacggaactgacccgaatctttcgttgcattttcactgttacctatcaattcaatctcaatggtcatgtcaccggtttggtgtgcctgtctagaggaataagacaagaggaccccttatccccttacctttttcttttatgctctgaaggcttttcttctctcatttgccatcaggagcatttaggccttttgtacggtataaaaatatccagatatgctcttgctatcttgcttcttttctttgatgacgacaatattcttttctgtcctggtaacatttagtcttgtaatgtgatcaaagaaatccttcatcattatgagctcgccacaagtgaatgtgttaatcttcaaaaatcttctctttatctctctcctaataaggtcttcatggatcttatcctcatctcgattacatgagcattcctatttgtactgagtttgaaaactatcttggccttccttaatgtttcagccggtcaaagaaataggctttcaactatatcaaggagagagcctagagccacatctcaaattggaatcacaagttcttctcaaaaagggggaaaaagaattgttgattaaagcagttctttaatcgattccctcttatgctatgtcttgtttcaggctccttgttagtatttgcaagtctcttgagtccatggtgatagatttttggtggggaacaaacgctcaaaatcactcaaagacccattggattaaatggcccaccctttgcaaatctaggcgggatgggggtttgggggtttagatctctccctcacttcaaccaagctatgcttgctaagcaagcttggagactgttgaaacatccaaactctcttgtggctaaagttcttgcaactagatatcgtcctcactcttctttccttgatagtattgttacgcgcgccccttctctagtgtagcgtagcattaattggggaaaggatttattgaaacatggtcttatataaaagattggaaatgacaaaaaattgaccctgtgcatgattactggatcccaaatactaggtttgtgaccacccattgtgatcctccaaaccaggttgcacacttcataaataataacatgacctacaatcttccctgcatctcccactatttcccaaaggaagtggttaatgtcatcctcaccattcctctccctttgtcttcgtatgaagactttctcatttggcagcatactccctcagggtctgatagtgtcaagtctatgtatcatcttagttatgctttagattctcctagtctcaatccatcaccctctcaaccccctacttggtcccatctaagattaaacactttgcttatagagcgtctcagaatacacttcccacatttgttaacctccataacaagaaaatcgtctcatctcttatttgttcgcgttgcaattttgagttggaaaacacttgtcatgcctcattcttttgtaattatgtcaggaaaatctaaaaaggtatgcccttttacccttttattaaagtttctactcagataaattattttgatataattgcttctcatattgccaatatgttatctaaggaagatctggagttgtttgtttgtttatcttgggtaatttggcatgacatgaatactttcagtcataaaggtattcctactcaacatccaaacctgttggagtcaggtctttctttgattcatgaatataaaagaagactcggaaaagcttggagctaggcacggtgtagacaactagattccccctcctcctggcctttcaaaattgaccacagatgctgcaattgatgctcacacaaatagatcaggatttgaagggatttttcaaaatagcaacagagaaataattgcagttattgcaattctttttcaatagattgcgaaaccataactaatgctttgagggatgaccaagtgtgttatagtgtgtttcgagatctcttgtctcagctgagggatcttctttcttcccttccaaacgtctctcttcgccatatctgtcggacaatgaacactattgctcatgacatggcaaagaaggctcttaagttcggtgatgaagcttgttctatcagctcctccttatagtctcagctgcctcctaacccctaaaaagaaaagattacattacacaacaattcaaccaagactctttttctcactatatggacgaaactcactctccttcttctctctagaattttcatcacaaagtattgagaagaattagccataccaacttaagtggttcaaaggccaatttggaagattatgaaaacaacaacttggattctttgctaacatcaaaagacaaaatgttaagcaatccaaagagtggagtcaatatataatttcgttgcatgattataaataatctttaaactctgtttaatgttaaatctattaaaatcatatattctaggctaatttatataattccatgttgtaatctagagaacaaataaacatgaaaataaaaagatcctatactataattcccagagtactattatgccacacacaagtaaaatgaaagtatatatcctgccacacacgcaaattttactcttatgttttgatattttttttcttttaaaaattatttatttgagactagtcataaattacggtcctccaccaaaaataaaaataaaaaatagtcaaaagtgaaaggttagaatcgatgaaccaaaaaagaaaacaagaaagaaatagatgtatttttttttttttacacaattacctccttattgctgctctttcttactaatattttttaatcatttatggccaaacccaattcatcatcaaagtttgtttcttctctttgatttttaaattttgatgatgatcatttcttgaggatttcttagtaaccaatacctcttaatgaatttaataccttttttttttgtgatgaacgtaatattgaatttcattaagaggttctgaggttgtttatgtggtttgcctagctagagctgttcatatattaaatttttgtaaggattttattatttgtcttatacaccttagtatatacctcacccaatccgattttcttaaacagactttctaacataattattaatatttatatattctctttatcactcttcttctagattaatgggatcttgttggacaaaggtaaatataactcaaagaatagaaaatgaaaatataatgatgattcaaatcagatttttattattatattttgttgttgttgaaggaggttgattatgatgatgatcatcatcacgaggccgaacttgctagtggaaatgtgcatcttataactacgatggaagattgggatgttatgttatcagaagctagcaaagatggcaaaattgtaagttattttgtaaatcataataataataatcttcatggttaatgataaatttaatgttatccctaatatataaaaaacaaaacatacttgaatagtgatcttattcaatactatatatatatatcattcccttattgtactccactcaatcaaatttaatgttttcttttagcaaaataaatgttatataaatatgaatctgataaccaataatacaatgaaataataactatgattataggtatagtttagtggttcatacttctattcacatacagggagagggagtacctaagtttgaatctccctcccttaatgtttagtacacatctaatatgctatattttgttgttgaaactgtgacaggttttggcgaatttcagtgcaccatggtgtaatccatgtagatcaatagcaccaacctacattgaaatggcagataaatatccctcttttctatttctaactgtcaatgtagacgagctcacagtaagcctataccaattctttatttctcagatcagtatatataatatattcataaatattctattaattttattatttatgtaatatataatttgcaggaactgagtagttcatggggaataagtgccactccaacattctttttccttaaagagaaaaaaaccatagacaaacttgtgggtgctaacaaagaggaactccacaagaaattagctttggtgactactcatcatgattctcaaacaactcccaattaatagctagaaattatatatatttatacaagggcgaagctgtataaagcctagatagcatagcgcatcacactcgccttacctgaaattaaaatcgatttgtaaattatttgggcttatgcatgttgaaaaaaaaaattattccttctatatttttcacagtttatgatggtctaattctataatttaaaattttgaagttttttaagcactacaaaatttgtgctttttttaacggtgcaaagcaaaaatagccttttgtgccgacaaggccatatacttttgtgttggctcgtctcagtcgtattggcaaaatttatatagtatgttagtgcacaaatcaaataaataatacagtggtcaagtaattgaaacaattaattataccaaataataaaatctaattttatctgaccaactaatttaattttgaatgattcaatgaagaaacaataaaagatgaaaacaacaaaagcaaaatagaaaaaaatcaagattaaaacaaatgttagagtatccattcgctctaatataattctaattttatttattaatgtgcttaatttattttaatatttttaaaaacttatagcaatattgtattctgtgtctgactgtaggttatcaatacttatatctttattactagcaaaaaattacgtgagaggcacgtatactaattttatgctaatttttttttatattatttgaaagnnnnnnnnnnnnnaattaaagaaaaaatattattaattat

SEQ ID NO: 38152 - DNA, 1608 bp, Cannabis sativa
taaaataaactgcttccagcgtgtcgttttcaaaactatatcgtcgtttgtaggataactacaagctcattgatgatggagatgttttgcgaaggtcggaaaccaagttcgtcaacgacaaataatataaaatataatttgattttcttcgttgctaagcaaattttcccaattattattatagttgatcctctcatctcccttctcgttcatcacaagcttacacccacgtaataccattgccaaaaaccatggatgaacctctgctatcaggtaatatatagttctgtaatggtggaattcagtttgttccattgtgtaaacaacttttctttgatgggttttttttctttgttgatgaaatgtgatcgattgtcgaagatcgaaggagtgaattgggagagaaagagagtgataaatggagctcgtaccaatacgtcggtagagctggttctgtgattcccacagcttctttgcccggaactgaagtaagtgtcgaggaaattcgctccgccgcggctgtttccgatgcttacccgccttccattcatgcccctttggttggttcgccaccaccgtatcatcatggtatggtgtttttgagttttttctgatttgggttttcaattttagttgttgagtgtctctattgcatgatggtgtcttatagttaaatgggataagaacttatttgggttctgttaaatcttttggttttccaccaatttataatggaatggagcttttttcttacctgggttttcaaattcagctgctgatgtgtctgtgtgtttgatatatatggtgttttgtgatgataaagtgagaaacttacatatacatttatgatagttcagtgggatatttgtttattttggttctgttaatcctctatctatgtccatattcgtgtactttttgaaatttgttgttatagagataacttttccaatttgattctgtataagttccaacagggacatgttcataacttctgaattattgatccttatgttttatgttacatttaaatcaatattaaattaagagtcacttgttgcagaccaagctattgtctatcaaggtggatatgggggaaattatggtggtacgacaaatgaactccacaggtaatccgaccaatcaaataaacaaaataaaattgtgagaaaaaataatttaatcaaaaataattatgtgattatgtgtcaatacacaaagtacttcttttataaaaagagcacctttatttggacctgatctggtttggagctgcttcctttcttagtgagctatttgctttaatatctagattctatcttagctctaaagcctctaatggttctctagtattcctttggaagaatttaggtacattctccccatttattttactctttttctccttttggtttcatttgccaaggccagtcagcaagattagaagaaatacaaatttagctataaactaatataattatggagattagataaagttagaaaagtgtatgttccattaatcattatgatggagcaagacctcaagaaagttttttttttttttttttgaaggaaagatgcaatttccattaatcaaagatccttcaa

SEQ ID NO: 38153 - DNA, 1797 bp, Cannabis sativa
ttgacttgaaaggaactcgaatactccatcacttgcaacaataaagaagagatgatttggtgttagctgaacctttgacacctctggatcagctacaacaccaattctctctgccgtactatctcccacactccttgtaaatgcagtcccgggatacattccattctgaacccaaagcctaggaggatcaccaccttcgctctcttcattgccccaactctgaatatcaggatccttaagcccttccacttggtcaacactcagaaccctcgctccacagagcttcactctttcatactcgtctctcctaaatggagtctgatcacgagacaggtcctcggcaacaatttgattcccgtctttaacagcaataacagctctcgaatcacccacattggcgacgaaaagggtgtcacctacgacgagcacggtgatcgccgtggtaccactcattgaatcgtctatatcgctgttgttgtgtaactcgtagttggtcgtttcaaaagccaaattaaaagctttttcaggatcatcaagcaatgctgggtcgtctgatagtaattcgactaccttgtccttaacgaaattggagcactgagcaccaaattgaccgtgcccatcaaatacaccaaggaaatggacatttgggtcaccttgaagctgcgttttaatggagtaacagtcttgattttctttatcgagtgagtctgggtaatagcctcgttgagtgagagcagagtactctaaatggaagttacgagaaggaacaagaacagtctccaatgatctctctgcaagcatatgttttctctgaacactgtaaggatcagcttccgtgaagtctctaggatcgtcgttagaagatgaagggtagcgactgcaacacttgccatggatacaacccatgttcaggttcaaggagtaagacgaagaaagtgatgaacgtttctttaacaggagcaatttaagtgcagccaaagtgtttgagcaaatgcctaggagacacaaagcataattggctaaaaaaggtgagatgggtattcctgaaattcaacactggagctaaatttggaagcgaaacccatgtgttacacaacagaaattaaggtcagggtaagtagcaatcaaaaccctaaaaagaaaatcaaccaaacgatattagatactaaagaacacttatttatactcacaaagagaaaagctttccgggaaaattttctcaaaggcaagaacaaattcctgaagaagaaatgttacttttcaagaaaacccatcagcatcaagaaggaaaaggaaaaccctaaagcaaaaccagtattttattacaaagtttgagaccttttctttgataaaaaaacagagttagaaaaggaacacaatacttgagaaaaagggttgtaaagataataaaaaaaagaaataataataataataaagaaaaggaaaggatacaagtttggtacacatgagcagagagagatttcagaagtgaagaacagagcaataagaggaaaagaatgaagaacacgaaacccaaaggaactgtccaaaaccaaaacaagagagaggtgtttgtctctctgtctctgcctgtgactcactctgaaaatggtgacgatgatagattaattattattatcagaaaaaaaaaggtaaaaataaaatagctaatagttaaaaaaaaattaactaaaaagtgaaaaacagtgaaaagtctattaaatgagttaatagtttaactatcactatttattcatctataaatattatagaaaaatttgataatgcatttaaata

SEQ ID NO: 38154 - DNA, 4329 bp, Cannabis sativa
  modified_base (2854)..(2854): a, c, t, g, unknown or other
  modified_base (3062)..(3062): a, c, t, g, unknown or other
  modified_base (3271)..(3281): a, c, t, g, unknown or other
  modified_base (4283)..(4298): a, c, t, g, unknown or other
aaaaaaaaaaatatatattcattttcttttgtagcaatattcaaaataaaatctaacaaaagatgcttcctgtaacaattttttaataaatttattttattaaaatactagaaatacttttaaaaaaattatgttgttaaaactgtttttattttttaatttaaatttgtgaatcactttttattttgttttttttaaaaaaaaaaaaaaatctctttccaaaaaatttttaaacacgttttggttaattataatctatttgtttatctttcaaccccaaccctaactcgggacttgaccctagcccaagacttgagccccagtactgaaccccaaacctggacttagtcgcggaccccgacctcaacccagacccgggactacagacttagacttggcctcgaacccagcctcagaacccgaccccgatcctggacccaaacccagccctgaaccctggaccccgaacctcggaccttgacctcgaccctggacccaaatcccaaaccctagatccagaccgcgaccttacacccgaacctggaacccaaaccccgaccccaaaccacaaacctagacctcggacctgaccccgaacccaaacccgaacccagcacggacccagactttggacccgaacccaaacccagacctcgaatcctaaacccaaactcggccccagatcccataccttggacccggaccgcgaccctcgacctaaacctagaccccaaatcctagactcaaaccacggaccccaaaccctagacccgacctcgaacccaaacctgaactcggcacggacccccactctagacctgaacctgaaccaaaacccagaccttggacctagaccttgactctaaactcagaccccgcaccccacacctcgaaccccagacctggacccaaaacctcagaccccgaagcccggactccaaaccccaaacctaaacctgaccccgaacccaaccctagaccccgaccttgaacccaaacccggccccaaacctaggaccccgaccttagacccaaactcgaacctgaatcatagacccgaaccctacaccccaaaacataaaccttggacccaaacccggaccccccgctccaaatcctgacctagacctcagccccaatgccgaacctgacccgatctcgaactcctgaccccatccccagccccaaacccgaacccgaactcggccccagacccagacccagaacctaaacctttactcggaccccgaacttcgaaccccaaaccccagaaaccgaacccaaacccaaacccgcatatttgtatttgaaagattttaaatttttctatacaaacaaaaataatatttcaaaataaattatgttattttattttttattttttttaaccataatattatttatttaaaaattacaaaaagtatgtatatttatctatatcttattatttttagttagtgtttttttaacttaaatgatattttaattatttgaaataaactttatcctatatttatttcatttgctctagttatttaacctaaatttatttcaagttgctcctatataaaataatattggaaaaagttatagctagtacacccttttagactatcttcaatttttacactaatttggtgtcaaatattttacttttgttgcaatgactctaataataatatttcacaccaaatattctaccaaataagtatatttttcttaaaagatttcgcattttatattattaacattaataacttatcaaaatagttaatttatgatataattataccataactactagtaagaatttacaattttaaaataatttagtaatataaaatatttattatataaataaattaaacattacacattttttttttaaaaaaaaaaatcttattgaaattcaaatgagcaaacaaggagtatgaaaagagaagtgctcactaacaatgtcatgcctctcaagaatatcaagattctcaaaatacttcaagtccatataaccaatatattttgatattctttaaggctaatattctcaagtaatcaatttgactattaaattattattttacttaatatttattttcatttatatatattgttcattttagttttataacttaattttatgttatttttattttatttaatattatcatttttgttattgttattttgtattttaaatatgtgagtgttttaaataattatttttgtgataagtttttatttgaggactaaaatataagattattttttaaaataaaataaaataagggttagaatgtaaaaaaaaaatatattttacactaaattgatgtaaattcaaaattaacaccattaatgatgtagaatccgataaatcatttggtgtcattggaatgaaatagtgtaaattttacaccaatttggaaaatagtacaccattggagatgctcttaaagagttattttggtaaactcctatatggttttacatttaatagagttttttagtttttttttttttttttttcatgattgcataagttttaattatttaggatcatatataaataatggtagagttggcccataaattaaaagggagaccaataaatgtaaaaaaagtatttattttttattttttaattaattttacagtggcccctaattctgtcattacatataaatttttaaattttttttttgaataatctatagtatcagataaaaagttcaaatagttgtaaattatgtgtacaacaaaaaatagttacatatgtgtacgtaacaaataggggtgttcatcaaaccgctcaaaccgcccgcactgcaaaaaaatacggtttgaaattctttgcggngcggtcgcggtttgaatttttcctaaaccgcacggtgcggtgcggtttgtggttttgaattattaatattcggttcaaactgcaccgcaccgcaccgcacattataaaaatactaatttttatatttattaaggtccaatatgtgaatgtccaattcaaagcccattaattattgtattattgaaacttaatttttttttcatatttnttttcaagtcttatggtatttttaacaagcgttgttcaagttttgttgtatttgtgatagtttatttattggtgatagtccaaactgcagaaaccgcactattttttggggtgcagtttctgcaattttttttagttttgcggtgcaggtgcggtttgggaaattaaaaaaactgcatgtacgagttggtttgaaaaaatagtcaaaannnnnnnnnnncgcaccgcgaacacccctagtaacaaaatatttgaaattttattttcgacactataaattattcaaacatttttaaaaatttacaggtaccgctaaatacaacttacattatcatgaaaaaaaattaaattaaaaaaacttttttgtatgtcgaactagatagatgatctaacgaaagactcttttagaaggtgtatacttctcaataaagataaatactattttagaccctgtgttttacaaaatttataaatttgaccctgtatttttttttaaaaaatagtacaaatatgaacctgagttcaattttcgatattttttttttaatataaccaatttaaagataattcttaacacgaacagatgtaacaaatttaacaagttttgtcattacacctctatgtcatattattattaagttttattttgataaaaaattagttcaagattctatttgtactattttagaaaatacatggtctatttagtcatttaacaaaacaaagagtataatctataattttttttaaatacatgatctaaaatagtatttaccctcccaataatatttatgtaacattaaatatgaatgttaaacgaaacatgttataactaaaagtaaaaataattgataataatagtacttttggttgtattacttattgtaattaaaattaaattaataacaatttgtatctaaatactttattttagtcacaaattttttgttcggtaaaagttaccaattactcaaaaaggagcatcatataacttgtaaagaggtcataaaattttgactttaatcataattagtctttaaaaagtagtctttaaaagaaaaagggaaacttaaaattttccaactaagttcaaatatcaagttgataaaaggttcgatgtcgtttggaattaatagaattatatattttttattttatttttttagaaagaagaagataatagaatcgattttttagataattatggtgtcgtttggtaacnnnnnnnnnnnnnnnnttttgtttttaaaattgaaaaagtgaaaata

SEQ ID NO: 38155 - DNA, 1568 bp, Cannabis sativa
  modified_base (1412)..(1414): a, c, t, g, unknown or other
ttaaagaataaatatttgctatttattttagtatgaattattataattataagatttttttttaataaaataaaatatcaatttttttttttggtgaatcagtcatgaaatttattactccaaacaacttttacaatctaagaccacctgaatagcaggcctcaaattctctatgtacagtatatgtgaactattttctttggctttacacaagagattcttgttttaactactgcctagacttgttacactactctttcagcttttactgtttcagcattccaaattttcctattcctgcactgccatatcatgtacaccagacctgcagtagcagctgcataaacatcctttttaaacctgctttttgctctttctatccatcttgctatattctggaaagaggaggtgacatcattccatcccagccaatcctttatctgttgtaaacactgctgtgagaagttgcaagtgaaaaataggtgctgagatgtttcagtccctatattacacttacacaagtattatcagtcactatgttgaacatgtggagcctctcccttttttccagcctatctaacatggcaatccacatcacaaagctatgtttagggacatttagccttccccatacttctttgctccaatagcatgtttgttcatcttgtttcagcatcatttcataaccttctgctatagtgtacgtatccagagaaaattgtactggattagttaaagccttgactcacactttgacccataaatcgtctttctttgaagcaattacctatacatgtttgataagagtagctatattccaatctaaaacttttagaaagcctaaaccctcagctttagagttagatttttgtcactttatttgaactaataaaactaaagtgtatttttctattttagcacttatctcatctagttatctaaataccaccaatttcattttaataattgtagataattatcaaataaaatataatttaaatatatttatctcatctatttttctcttttcttttcaaaattgcctaagcttggtgaaaattctcaaataaaatatagcctacttttgaattctaatttatttacaaaatcaattaattgagtctcactacaaaaaactgctacttttagaacaatattttagtcacaacataatttttttgtgactaaatgtggcttttagggctgagcatttaacccgctgggccgactaacccggccaacccagaccgaaaatgggccgatcagcccatataattatgggccgaagtttatttggtttgaaaaaattacaacccgtgagtaatgggtcggaaacggcctgggcaaattacaacccaataaacctaacccgggccggccttataacataaaatctatatatatatatatannnatatatatatatatatcaatatgggctttaaatattgggctgctactttcactcttacctttaccctaaccctagcaaacatatacaccgaacacaatgcagtacacacacatacaaatttgtatgagaacgacaactctctctctctctctct

SEQ ID NO: 38156 - DNA, 1197 bp, Cannabis sativa
  modified_base (967)..(981): a, c, t, g, unknown or other
ttattaatttggtcttgtaaaccttaaaatgcttaataataatactctgaaataaaagccctgatcatggatagcttgtgaacatacacgcggaaatttatacactattgccacaacttcaaaacaaatcttggaataattattttttaaaagattttcattttgacttgaaaaatcaattatgaggagacttagtttatggttatatacttgactagtaactgtttgttttttaataataattaaaaatttgtaaaccaagaattggtgagagagaagattaggggaaatattatttttatattattaaataataataataatggagagccgacctagctagattgctaattggaatagtgaaaataattgatggtaaaaataatttggcccaccactaaaacagcatggtgctgcccgtacatacaaaggtctgcactaaaagacaatattagattaatatggtctatggttgtccacaactcaagtgatgccctacataatcttttataggaaactctaaagaaattgagaacacatttaatgaaacttatcattttttaactaataatatttatagcagagtagtctaaattaaatggtaagaagagtatatttgtatgtggcatgctcccaatctatatatatatgggtatactcttaatgggtattacccattcatgggtagtattatgaaaatttgagtttaatacttaatttttctatcaaattataaaaaatctttcatttttacattataagagttgagattgttccattagctgaaaaaaaaaattaagaaaaaaaaagttaaatttgacttaagtattttgtatataaacatatttttatatagtgtaaaaagtaaaattttttgatatttttttaattaagtagttaaattaaccatagaaatttaaatttctctttttattattcgttgttggatcaaaatctaatagtttannnnnnnnnnnnnnnatatttatagttaaattatttagtaatcattaataggtaatactcattaagaagtgttccatatatatatatatatgtgagttttcatagttatagtataaaaatataattatgattgttatatttatttatcatctattataacatgtcactaatgagtagaatttttatttttatatttaaattaattatgtaattaaaataaattattttttt

SEQ ID NO: 38157 - DNA, 1661 bp, Cannabis sativa
atttaccaaataattataaaggcattgtgactatctacctgaaatgttgctccattgtgaactatgtcatgagcaataggatcatgaatgtactcttgcaatggcatagcgatccgcgacatgtcatatggatcaccgctcatgatgttgtttaagcccttgtgcttcctagtatctctctgttcatttatacacacatacatacatcggtatatccaagctgagggtaagaatgctgaatctcaagaaatataatagcgaaaaaaatctaagaaagatatgacatccactggtagttgcacaacaagaattcgttttcatagtactaaactaaccccaaaagctaagtaaagcaagtacgaaggaaaaacaaagagaacatacacgagcaaaaaggtcttccctcatccacggaaccagatatttccagggccagatatccagtgtgcttacaccagttgttttagcacgcaatcgtttagccatttgtgttgcagaagttaaattaggatgcaccaagaacctagctgctacttctattgaaaattcataagtactaaagacacggtcaactggatccctgagtattgtcactaccgacgtgctctgctttggaagtttagatatcatgctgtagtcatcatgagtaaccaacaacctacatttacgctttctgcaaatgaagaaaattactatgaagtacaattccaaatagaaagttaagcaacatagtcgagtaaagatagctatataaaagccaaaatcgtcattttgggatcaacaagataaacaatgctgacaatactctatcaatgtttagcattaatgcagagagaacgagcgagctgttaccttggatcaaatcgcagcttatcataagatcgggggcattccaaagagttaggatacaactttctcaaaaaactgcatcaaaatattatagtcagctgcatattttagtacatgtatcagcgcggattgtgctaattgtataacgaaaatatggaaaataccagtgaaaatatgtccgtcctcctgttctggggatgtgcaggaagaacagcaaatcctttaatgtgtgtttgtcttcttcaacttcttcttcaagagaagaagaagcccatttctgaacaactctttcacaatgcccgaaatcatctttaagagaagaggcacttgctaatgcacaaactaaggaaagagaaagtgttgagaaaacaaaaacacatgaataagaaaaatgatcataataaacagtacaaaaagttaaaagaaacaacaacaaaaataaatgaatcatgtcagcttgatgttcatctcaaacagttcagctagtttatttgaaaatggttgaaatgctagcataaatcagaagagcaacaaaagggtgtaaaaaatgcatctttattacaaagtttcttcacataaaaccagagttgttcttcacacatatcataggaagtagaaacataaaaaaagcaataaaaatgggaaatttaataaaaaaaataaaagcattacccaatccaacaaagaacaacagcaaggagaatttgtgagcaggatccatagactttattcctcactgacataatagaatatggatgttgttaagactacaaaccaaaatgtatatatactataatatttatatatatatg

SEQ ID NO: 38158 - DNA, 2406 bp, Cannabis sativa
  modified_base (1852)..(1855): a, c, t, g, unknown or other
gtatagtttagtaagaaaaaaaaagcataactactaaacaatacctaatactaaaaaaaccttgatgaagctatgacttattattattatacctcgaattttataaattcagtttcattttttctattcacacataaattatccaaaaatgaattttcatattataaccaaaacattaaaaatcaagaaaagaagaaaaagaagtagtctaaagaaccaaatgagaccttcttggatctgtaatattgatcctccaatgcccattaaccaatcctttcttcctcgcaactcttctctcccactccaactctgttctcctcctcttcgtcaacctacaaaacctctgcaacttctcatccatggcgtcatgaaccttccaccatctctgatgtgctacatcgcttgcgtaaacaaagctctcttccacgtcccaattacaatcataatccctataacaaagccacggtttccaccctaagtaatggattgcataaaccttaggcggatctgctttaaacaactcgttcttgaaactgatctcgttctctgaagaatttgaccaaaaattcttcaagaaattgactcgtctaggcaatcgatgccaccatacgaataactcgttcagaaacccttgatctcctccgttgtaggaaacgatgtcgtttcgactttccatgaagacctggaatgtgcagttcgaaggttctagaaccattatccctgagttgaagagagagaaatcgtttccgacggcggtcatctgagggaattggaatagtacatcgaggtttcggagtacgattatgtcggcgtcgatgaagatgagcttgtcgtaatcggtgagctgccatagacggaacttgctgtagttgtattcattgtaggatccgttttcggctctcgggtttcggattcgggttatggttcgaatcttccaaccagatctggcgagtgcggcgcgtttgggttgggagattgagttgtcgatgaggatgagtaggtcgcgcgtggtgccactcgcgcggaggctttgggcgagtgttatggcgccgcaaacgtaggattctgaggagtggaggactgtggcgtaggcttctctctttgcttttttctttgttgttttttgggttttcatcggatcgtacacgtcatcaattcctacacgtgcaacgttaaaaaaaataatttattaattaattaacaaaatttaataataatgaagtaccataacaagtgaaatatttaaaaatcgctaaccaattataaggtatgaaaattaaaaatgcttttaagattaatgatatatgaatccaatgtaatgaaatatatgctaaaattttatactaaggtcatctccaatcaaacattaacatgctatatatgttctaaccgagcaataaaagctaacttatttttatggaagtcattatattaataaaataataaagaatatattttttaataatgtgattggaattaaaacaaaaatagtgctgaaatagtattattttaatattaacttaatactaaatttaagttttaccattagagttgttgcctgaagagtatctacaatactaagaccccacttttcattttttaattttaaaaccttaaaaccaactatgattttaaaagatttattactatagaatttgaacataatttaatctaaacataaaatatgaaataaaatactaacatgaatcacatcaaattaagacgagaactaacttatcatatcactgaatatagtattttaaccacttggggctagctcaagtggctatatgtgggtgtgtgagtgttggaggtcttgggttcgagtccaagtaaaacatgttgtaatatnnnnacgcttaaataaaaaaaaaaagaaaaaagaatatagtattttaatacatattttatgcttacatagctcgaaatataactaaatttgtaaattttaagaataatgaagattaaattgaattatatttcactgaatgcttaaattttgaatgatattttaatttctattttgtttttttttttttttgatagtgttatgctaaaaagatttagtttaaattttctatattattagttgataatttggacatgagactatgaatcatgaatatacatacacatgttgagaagatatgacacgaatttttcacaacaattttcttgtaaattctgaaaataaaaattttagacatctcaccatattctcgacattatttttagatcatgtttttgttactataaattattttgattttttaaaataatattgttgattgtaagagataagtaacttgtttataggaataattacataaatattaatttttataaaaaatttacatttttatatttaaagttacttttttacgttttacaatattttacaaaaaa

SEQ ID NO: 38159 - DNA, 1666 bp, Cannabis sativa
ggtataaatgcccatatttttgtaacttttttacaaaatctcatatttgatgtaattttcactcttttatatttggcgggctcaggtgcaaaagagaaggcccattaagcccattgtcgttgttaaaggaaaacgaaagtaaaaggaatcagaaattaggggtgtgagagtttgttttagggtttagtaacagagagagagagatggctaagttcaatgtgatccagaagaagaagagagctcaaactgcagagaggaagagagcgattcatggagatccatctagtcggaagctgaaggtgaaacctcagaaccaaagtgtctccggcaagcgcaaacgcaagctcttgaaaaaatggcgccgagaccagaaggaagccgccgaaaaaggccttttgactatgcaagatgttgaaatggctgctgctgatggtaaatcatatattatatatgtatatttacgtttcttaatctttttgtttgaattcaaatcatgtatttgctgttgttgtaggagaagaatcatcgaaaagtggtgataaaagttcaaccaagtttccgatgaagagggctttgaaacttaaacaacagctcaagcacaaaggcaaaggcaagtttgtttaaaatatcacaaattacatttcatgaatacaaatttataagtttaattaacattatttgaatgaatgaatgaacaggtaagaacaacaagaaatcagggaaagcagcttctgaagctcctcaagcatcagcagatgccatggttgaatagttgatcaaaattcccattacagtttaacttctttatgtaaaatcattttccctttactggatttttttttttcttactttgttttttccaaagtagaaaagtgaggaagttaatgaaaaatcaagtcagtataatttttcagtgagctctttggttacctcttatataaaagcattgcagttaataattatcgagtttttagctgttaaatccgagcattgctatggagacttagcagtgcttagcatctagacatttcacttttctctcaacaaattattacattaaattatatagatatttagttggaccaatagcaatatcgatacacatcattgttactttttaacatatttatgttaaattctcctatcctaattattattttatttacattctaagttttaattttagttactaaattattggaacagttagtcaatttaaagtgttatctatttagcacagtcacctaatataatatggctaaaaagtattattagtatttagtatttttgttgttgttatattgctattggtataattaaaaatcaacttctatataacttaagaatataatttttagagaatattgctaaccaattgtgaggacttataaaaagtgttagacactattagtgtccaataataatattgtttttctaataacaattgtaaaaaattattccaaaaattattttaaaattaaaaaataaaataaagttaaaaaagtaatagaactaccaggggcggagctaggaggactgaaacattggggggccaactattaaaattttttattttaaataatttttttttacatattatacatcacaaaagttatttataaaggcttactatgatataaaatacattattacataatctattata

SEQ ID NO: 38160 - DNA, 2922 bp, Cannabis sativa
ccctagattgaactttagataattttaacaaaattttggtagatttgcaaaatttaaatgttaatattagtgatgaagataaagttttgttattgctaaattcattacttgaaagctatgaacatttaactacaactctataattactatctcgtgacaaataaaaattcgaagtggacgcaagttcattattattgtgatataaaaaatgaactactataaatttattttgtttctcttataattacttaattactttttttttaagtaactgttataggtgagaaaaaaaatgtcaaacatatgaaaatgaagaaattccttctataattttatttttctatttatcctaagggcttactaatattgctactcacataagaaaaaaatactcccaataaacaataaaactttaatatcaagagagaaatccatgtgttcctatccggttgggggagttacctttacgtgcatatgtgctactgtaattgcagatttgccagcccctttgtagtccttttcgtgtaataaaaaggttcattaaaataaaaaagtatttattatggttttacaattggaggctaaaatacaaatagatcatgcattgcatatgaagttagtttattattttgttatgttacatctttatctccacttgtattagaaagaatcctgtactgtaattaacaagggatatctgagtgtatgagtgaatatctccacttgcactaaacgcgcttgtattatacccaagcaggaagcacgtaattgaattcacgcgggaacaggtatggagtcctaatcatctcttctctctcctcaactcaactcaactcatctcactctattaattgaatttccacaacaaataacagctcagcctaaatgcccccaccacaacacacccatgaaccgactctcactcattcttttacacgtgtctacatcctattccttaacccactcccaagttacctgttttcttgcagaggtagtttattgaattgatgctgctctaactgaatcttttaatatacgtaatgcacttaatcactacctaccttttataatatttattttccttattttaaatgccaaaacaaatttccttcagaaaaagtttttttttttttttctttcacaaaatttaaattttaaaaaaaaaatcaatttgaattcaaagaattttagcataaaacgcttgttaaatttttcatttaatttttttaaggaaggcttgtgaatttattaaattattacataaatatttcttttttttttctttcttgaaatagcgcgttttttaaaccgcgttttcagccttcaaacgctccctataaatgtttagaaccacactagagacatctctcacacttaaaaagacctagagaaatcggcgattgaaagctctcgaaatctgagattcattcaagcttcttcacccatggctaaaaaagcaccgatttcgaatcgatcttgctcgcttggaccaacggaagaggttcagaagatattcaacaagttcgataagaatggcgatggaaaaatttcctgcgatgagcttaagcatgtcctccaggcactgggctccggtacctcccccgacgaggtgaagcgcataatgtcagagatcgacaaggacggggacaactacattgatctccaggagttcgtcgagtttcactgcggtaccggatcggacggcgattcttgcgttgccgacgctaaagccggaaacaaggaactcaaggacgctttcgacctctacgacctggataagaatggagtcatctccgcaagtgagctacactccgtgcttaagcgtctgggagagaagtgtacgctgagtgattgtaagcggatgatcagatcggtcgatgccgatggtgatggaagcgtcaattttgaggagttcaagaagatgatgactcgctcctgaagtcaatggcaggtatttgatcatctgaaaacatattgaattgaaggatttagattagaggttcccttaggctaacgtagtccgtatttgtagatatggtaataatatatctgaacttcatgtggattgaaattgatcatggtagtttcgtgttccagcactgttggattaattaattaattaggttggagtagagtagatttactaatatgtcacaaagtggttgaagaagcaaagattaacattgtggatacgacttatttcttcttctctttgaggatgatctgttctccttctctttgtttttttttttttcaacagttctctgttgattttatgtgttaaatttagggattttaattttttttctaccactttttccaaaattaaaatttccaactccactcattgaaagagaagtagcaattgtgtattgttgttatcagaggtgagaaaaccatttgggaaattgtggttagcgtgtggacttttgtggtccactgcacgaggtttgattgtgtgcattattttcaaataaattagctacatttttttatttaaaaaaagaaaagcttatttgaaatcttgttaattgatttttttttttttattaaaaaggcaattatggccattggcgaaatgtacgtatatatttttgtttttgatattttttcttttaaatggacgaaatctatatttaaaaatggatcattggttcaataaattgttagcattttattgtagtgactaataaaaatgctccaactcaaccgtaataaatgtctcactaacgtcgtccaagaatatgacttttagctgacctcaacacgggaaagaacctccttgtgggccacagaaattatatgcaatggagcagagagaatttaattttatcattatagagactgttttaaatttatcaaaaaatatatttagaagtaattaatataatatgtttctctctggattaatgatctattttt

SEQ ID NO: 38161 - DNA, 2103 bp, Cannabis sativa
cacctgccattttggcataaaaattcctgccattttctccgctgcctccattcgttgataactactcgacgccatggacagccgaacaaactcagaaccaagaatcagtaactaacgccaaaaccaataaaacaaaactaattaaagaaaactatagaaccatgtcaaaagacaagacatttatactagtataatactaatactagttaaaaatactaattctagtataaaacttaaattaaaaattaatcattataatattaatactagtataatcctaatactaatactaatcaggaccgaaacgatcgcaggggagaaccaacactttccaaatcaaaaactctaatactccaagtttccaatattacaaaggcaagaaccaaacacttttgaaaacaatttgtcagcacattcaaggattttctttttcctgaaaccaagcagattgcaaaagttcatagaccaagagtatccgccagtcgtcgacagctcgcagaggaaaaaccaacgaccatgaaccctacagagacgattgagtcataatccctgtaatcgccaacctgcaaaagagagaacaccgtactccttcgtatatgcgagagagaaacccagcctttgaatctgttgaaatcgccaccgtcgcaccctcatcgtcgtcgcaccactgtcgtccccctcaccgtcgttgcgagagaagaagacaatagccccttcgggaatcgtcaagatacgctgtaccgtagctttttaaattatataagttttgataaattggtaattaaattttatttttttagtaaattggcccttaaattatataaatttaagcaagttgattcctaaattttattttttttgataaattagtctctaaacttttattttttattttataagtggatgtaaaaatttttaaactaaaatctctctcaaacctttttggagaagtatggtctttgtgtaggggagttgtggtacgttccaagttgatgcgtctgtcgtggatggttttgcaggtttcgttgcaattcttaagggtccccctcccatagatgatgcacactcaacagttgacttttccttcgcttgtaatgttctgaaactgaactttgtgccatccttcttgctttgcagttggctaagactcttgagttacaacaagtggtcatcgaatcagactcagaagtggcatttaaatgccttcatctgagttccttgccgtatggtttgtgtaaggattttatgttgtttacatttctcgttccgtgaatgtcgcagctgatttactcgcctattgggctagagatactaagggtttctccaataggactgtaaaatcccaaatataatggagttttaaaacaaaattacttcaaccaaacactaaaaatgaccctatatttgtaggagtctacagtgtcccactaataataatgtcagtggcacactaataatttaataactactttatatacaataaaataaataattaaataatatattttttagtgtaatttttagtgctgtggttaagatgtaaaaaaaaaattaatgttaaaatagtaaacttttagtgttgatttaacaccaaatataacttttactattggagttgctttaagatcaagtctggtggcagttgggaaatggccccctctgtggccactatttggtttagttcttaataaatttccttaattatcaaaaaagaacaactttgtagtgtaaaaaggtgaagggagacggtgttggacttggaggttgggttacttgtttcattttagctaagtgctgcacttgtcacgagtgtgagttggactgttcctaccaaagacgatggatctctcaactagctcctccaccgccgacgaaagaacccctctgctaaacgacactgtagacggcgtcgttgaccacaaaggcactcccgttctcagatttacttcaggcggttggaggtcggccggttttatcataggtagtatagacctaaaattccatcactattattacccattcaaattcgagattttgcttaaattttgaaaaatgagagttttaaaattttgcttcttcaggtgtggaggtagctgagagatt

SEQ ID NO: 38162 - DNA, 1783 bp, Cannabis sativa
ggaactgaacaaaatatctgaaagaaagccaataaaaatatttgtaaggacatagataaattaacctaagctaatttagagctccacaactccaaacattatccgttccacatagctaattactagagcattgcaatactgctagattataaccaaaagagcagacccaatagttatagttctttcattcatagaatcttgaaacaactattcttgaaattaatgtgctaaactaaacatattatcattatttttttaataaaagaagatactcgttctgagtgtgttcatttccttgagaagtaggctcagtcaaaattgcatcagaagattctgaacatacccacagtacagtagacaattggttaggaaaactgaatccgagttattgattttttttttttcatgcaggtaaaagtagcaaactattgggaagccattggtgttgtagcagctcacaaggctggagtaaatccccattctcttcgaagagacgggatcaaaaatcttcagggcagttctcttaaacctgctaatggttatgcagtttcaactgccaaagttattctttgattcatggaaaaagcccagtgctattttatattagtacattcattaaaattgtagggccatttttgcgataaaatattcagtatggttgttcatgattccttgaaagaaaagaaagtgtatatattcacatgccctcctactaaattggtggattttaccaactgctatgccattaaattgggggttaaacatgctgagttttgcagccacttttaattggctgatcaggggaatctgagttggcattgccatgatgaaatattatatattattacagcttcaaaataaattaaaattcaggtaagtttattattatcattattatttcacttttttataagtaaaagatgatggaacataaaccaacaagtcatatcttgtttttcagtgactaatattcatctttttcatcagattgaaaaggtcagcttcttttgaagaggatacaacttggataattgaataggattcttcttagtataaagtttttgcatgtgcgagtgatgtaacagttactttaagaatgcttgcttgcttattcgttcctgtccttaaaattatctctacttgaaggagcaagtatgaggaaaagaaaatcttaactactgtgattcttatttcttcttctttaaaataacaactcttagatgacctttgattaaaggtaatgaaatggaatggaaaaaaaaggaaataatttccattctattcctttgtttggttgtatattaaagtgttagaatgtcattctaatggaatggcttttctaccattttggtagaatgacaattctattttgaaatagaagtaaaggccattctaatgcacgatgagaaaaaatttaataatttttttatcaattttttttatgcattttaaattttatttcattcttattctcattctcatttttatgttttcattctttccaaccaaatgctatcatagtattgaggaattacttagaatgatcttttttatggatggacctacctgttaaacaataatttttatttatttatttattttgaaaggggctgtcaaacagcatttaagaattattattattattactgatattgttattgttattattattttgttttgatggaatagtcaggagttgttttctttttgataaatttcacaccaaaataacatttattaagggtaattgtgtgtaattatttaatcatgtacttgcgcaaac

SEQ ID NO: 38163 - DNA, 3137 bp, Cannabis sativa
tttggacaacgggtgtgtttcaaatcctttccatattccttaataattaaggtccacagctggtctagctgatctagtcttcattattgtatttatgcattatcttaaaaagttgagtgcagtgattgaaatgtgtttttctttaggttttttttttttttcttccaataaaaaaatcttggaatcttgtcatcgcaataaatagggtttcatgaatatttatttgtgtccatgagtcttcattatctgactgaagcatgagcaaattttcttgggagttttgtgaacgatgaagtttcgtcatataattccttcattcagaaaaatgtactaaaattctctctcctgataggctatgaaggtggaaaatatgctgaaactgaaggaggaatttgattacaaaagtttatccagaaggctagatatacaattagataaacttattgccgaacatgaaaggcagcagaaagcatttaaggatgaaattgagagaataaccattgaggcacaaaatcagatttctgagactgaaaggaattatgcagatgccttggaggtaaatatttgtgtagatattatccagaagcatcattttccttggaaagctaattggacttagtagcttttcatttcattattattactattactttttcccataagcaatagaagtagctcgtctcttttattttttaagctcatagaacttccgatttcattagtgcctgtatttgatttaattttgtcgtactcatttttcgtattatgtagaaagaaagattgaaatatcagaaagattacatggaatccataaagaagcttgaagagcaattgatgatgaatcagcgaaactatggcagtgacaaaatcactaatggacagaaagataatagcactgatgtgacatctaacaaagaggtaattatatcagatgaaaaaaaaatgcttcctataaataatatcatcatcatcacaaaagcaggaaaaaataaggcatcaaactacacatttacttgttctgcactatgattcaccataagcatttgtctgcactgatgtctataaggatgtaattgtgaattatgatgtcttatacaactagaataaaaataagcattaactatattgcatcccatcatctaaatatgccagtcattaaactgaaaaatatgcttataaaatgatgaaatatgctgctttgttataatgccttaactttaatgtatgaaataatacaactttatcagaactatatagaaatcatgttaggcttctaattttcataccatatctggtctcttatttcattctccattttaactaacatttaaaattatcttgtaatgagttcccggaaatgtatttcacagaatttgtctgctctagaggaagttgttgagctcaaaaaaatgctacagaaagaaactctgctaaggaagaatgctgaagaggaaatcaataatctaaaaaatcaactttctcaatggaaaaggtcagaggtatgtttctttctctcttcttaaaactctatttcgctcttttgttactccccaatcttccatgccccaaatatttttctttcagcttcatgtttttcatacttactttattgtaagtgccaggcggtggggaattctgagatcttgaagctacgcaagatgttggaagatgagacgcatcgaaaagaaaaactagaagaagaaatagctatgctacaaagtcaattgatgcaaataagttttgaagctgatgaggtatgatactaatttgcaacattgtatatatctataattatttatgtgtgtatattctaagctccacttgtgtagccaaggtcacaaaagtacaagtgttcatggtgatcatattcagagtatctgatatgtgttttttaactggttaaattttcctttgtagacaagaaaacaactagacctgagtgagcctgggaagattcttggaggtctagattctcttatggagcaagtgaggcaatcacagctaaaagaatcaggaaatgaagagaaatcctcaatagcacaactctttgaacaaggtagtatagcttgttcttatactgctgggcaatgttttctttccataataatgtaaactccaaggatctaattcccttgttcataaataataaaatgcaatttactgcagtgggattacaaaagatcttatctctgctagaagcagaagatcctgatgtgcgaatacacgctgttaaagtcgtagcaaatcttgcagccgaaggtgactatgaaacttatccctttcatcacaagcatgttcttagttttttcaaaatattgcccatgccatcaaagatctatttgtacacaaaacgaaatgtgtcaagctttgtacatggtcaaattttcaacatggcagaagtattttacatactaatatgaattatatctaatgtttagaatccaatcaagagaagattgtacaagctgggggtctgacatccttactgatgctattgaaaagcactgaggatgaaacaatacatagagttgcagcgggtgcaattgctaatcttgccatgaacggtaaagtttccatatctggttacttattatggtttataaattgtgtggtcttggcttgagagaataaactcatgtttcagctctgatttgtcttgaactttcttatcagaaaccaatcaggagctaataatggcgcagggaggaattagtttactatcaatgacagcagcgaatgctgaagatgcacaaactctcagaatggttgctggagccattgcaaacctatgcggaaatggtaaagtctcaagatgttttgacactagttttgaagcttattctaccatgcatgaatcaagttttagtatattaacaaaattaattatcattcagataaattacaaaccaaattgagaggtgaaggtggaatcaaagcgttgctaggaatggtcagaagtggtcatcctgatgttcttgcacaagttgcccgtggaatagcaaactttgctaagtgcgagtcaagagcatctacacaaggtaaaataagccaaagagttaaaggtgacgtttggttgagaggaatgaaaacataggaatggaaatgggaatggcaataggaataggaatggaatggaa

SEQ ID NO: 38164 - DNA, 5780 bp, Cannabis sativa
atagtttttttattttgaaaagttttggtttaataataaaaaattttaattttttaagtatataaaatcaaatttcccttgtagaacacatatttgttttaaaaatacaaattttatttttatttttgtaattaaaaaattaaaaaacaaaagtagggatatgattttgtcccttgatgtactttcacggaatgtattacgtggtacattagatgggtctcactcagggtacgtttctactttttaaccctaattacccctagatcaatctcagctgtcagatcaaataactccctcatctgacgactgccgtacatcacgaattacaatacgtgaaagtacaataacgagacaaaatcatatcccaacaaaagtattactaaactatccctacaaaattcttattgctttttaaaagcgggtcctctctctttttttttttttttttttgtaatgaaaatgacacaagaatgacatagaaatgataatggattgttggttaaagctaacaaatcaatcgctgtaactacatgatgttgactagcaaaatctcttgagcctttatactgattcaaacatgcaatttttttcattggaatattcatttaatgtatcatgagaataactgtagtcccttcctctacacatttttacagcttctttttttattttagtttttccttacaaaacacaagattgttttgtaatgagataaatgaacaactttctatttattaggaagagtactattcaaagaagttcaaagcataatgaatctttgccaaaaatctgagctaaatgcaagttgagacatggaaaaaaaaaatagtgaagttgctaattactatggtacaagtgtctcatgacaatgagacaagaacaactcttacttccctctctcacatttttttctccatacgaaattgagatacagcagtatgctactagaaaacacccatgaaaagaattaagagaaaagaagctagcaccactagaatgctacagtatgagtcacttaaccggcttgcataagaaccaggagaaggaggaggacttcgagttgtaccagaatcagttgcattttccattgagcaagtgtacttacaacggctaggacgaacaactcggtaaacaccattgctggctagaatgaagacatccttgttgttatcttccccaaatgagaaaacgtatcccaaattcgggagtgtgcttcctgggacagttccacattgtataggactgtctgctgcacaactgaaaggaattttgctagtgttaaaggtcccactgttatctggcttttcctcagctgcccatatggcgcctgcatacaaatctccatacaagtacctgaaaattggatttcatatattgccatagatcaaaacatattgcaaagaaggttgtttaacattagttttgagaagaaaaaagatatcactgttctaaggccacttgtgtaatcatgttttctttttcttacttgggatgtaatgattttgttgtaatcttcactggtcatatgtttataagttgtgagttccacatttcattttatacagacaacaaataccagttcatttgatttttttaaagcattagagaattaagaaagtagaacaaagagcaatttaccttcaaataagttaaaaagaaaaaagagagacagcaggaagaaagagttatttaccttccatacatgcatggatctgtcttagaccgatatatatagcccccggttattgaagctgacccttcatttttgttagtttcggaatggttgtatcccaatacagggaaaattgggttaatggattttacagatgtatttccaccaggggattgtggaggattgtaagggtaaggaccctcaaaaagacgccagccatagtttccaccctttgtaatgacatctacctcttcatatgtatcctgtggatcatagtgttcgaaagagtgttaaacatggtatctggaaaatttcaacttagatacattaattgtgaaattgctataggtttcatattgattgattactacctccacaagagcaaattttcagcaatcagaaaagaaaaaaagggaaaaaagaactattgttttaagtagttctaacctccccaacatcagcgcaaatgaagtaagaaggattttctgaatcaaaactgcagcgccacgggtttctcactcccagagcccaaatttcaggctgtaaatccttatcttcactgaaagggttatccttaggggcagagtaatttccccacaggccaagtttatcaatttctgcagcacctgataacaacaaagaaagaaatagtaattactcaagtacattagcttcctagcatgcatggttttacaactaaaagtactttttttatttacttgttttcttcatttttccatcagcacaaaatgaagggttcatgaataagctgttgctgctgttacttacttggtatgttgtcaacatcaagtctcatgattttgccaagtaatgacttcttgttctgagaaaaattgtaaggatcacctacacctccaccatctcccatcatgaagtacaaatacccatcttccggaccaaagagaatttgacctccatgatgagatgtaaagggaaggcccatggtaaatatccttctcacttctactggtttagcactttttgcctggagaaaggacataagacttagttgaaatatggtaaataagatgataaagcaactgaaaaatgtattaacaaatatagagctgtaccaaggaaggctgagatgccgtgccatttgctgtatactctgctataacggtttgatattgacatggctgcgcaccattatcactacctatttttgaaggatcacaattgacatctgaattacatgagcatcttcctgtacatcctggccacttaaccttatcacagttgaacgaagcaaagaatcggccattttgtgcgaaatttggatgaaaagccatccccatcattccaaacactgtatcaaaatgaacttcatcagttagatctacaaaaggacttgattcatcaaactccattgcccctcctgatccttcttcaggaatggttgccaaccaaaccttcccttgttgactagagaagaatgcccggttagaaccatcaggatgagcaaccatattgagataagacccattgccaattttctcaaggcacaagccacttgggggtgtaggggttccagaactatttagagtaacaggttcaccattaaaacatactgattcatcagaagaaggtccaccgaacgcggtacagaaatcagcttttgattgccacacatcagtcaatttggtaacattggattttactggtaatccagattgaacttgtaatggaggagcaaatggggagttcaatatggatacattttgacaggtatcccacaagttggagcaaaaattattcactgcttggctagactgagaggaatttgctgaaacagtggaattgcaaagaagaggaaccggccgggtttcagaactagtcacataaagctcacccgaaaaaggatcacatttctacaaaaacaaaaaatgaacacatggtaaaagtttaggaaaactgacacataaaacaaaagcacagagaattttaaagggagaaagcttagttcatgataactttaaatggtctccagcaatagcaaggaagaagccaagaaatttccttatgaaatccaaatctatttattgtctatgcaattctatatctctaaacatacaaatattcaagaagaaagattgacaaacaataagaccagattatactagcatgattagactataaatctctcaattctagccgctagggacaacaagattataaagcttccacaacaaagtaacaaaatactgatttgacaagagaaagcaagagtctcaccgaacaaagtactgatttgacaagagaagaacagccaagatcagagatgttcatggtttgaaattgtttctgtaactgtagatcttctttggagttacagcatgttgtctcattgtaaggacaaaacttcagtggcgtagtcagagtaaatggtgcccctatattaattaaaccatagtattagaaaatttaacaagcaacacagaaatttcaaacaaacttcaaaagaggaaaaaaagatcaaaagaagaagaacccacttgaattgatgcatagaggaagtgaaatggaaagattaaacagcaggaacaagacaaaaagttgtagcccagcagtggccaaaacggttcccatcacaacctgaaactggagagaagaataagcactttgctagaacatgccttcttctcttaatccacttaagcagagtccaatgaaagagaagatttaattgaacattcttcttcttgttaaactattatttatccttctgtattggtcttcactggcctggcccctctcacgttcatatactaatataaaaaccatttttttccaatcatcatctggaaggagatcattgtaaaatctttctttccttttcacctatttatcaataccccacctgaaatcttcagacaataactattggctcttcatatctgactttagctagaaaaattgatggtttcaattattttttccctttctccctctcactctcacaaagtcacaacctttattaatttaatgaaagtatgactaaaattaataaactcgagaattaaagactgaaacaaaacacaacctttagcagctaacagatggttgactttgctgaaaaagagacaatggaagtggttgagaagacccaactccttatttagccttagaaaaccaacatgtatagatcttggttggacttggttcaatgtgcagatattagttgttatgtgggttagattaattgtgttcaaaccagcacaaaaatcaatacggcatgtaaaaagcagtgtaaaagacccaacttgaaagtaccatttaaatctattaacaaaaaggcctttagtgacaattttatccaaccattacagaaattgaaaaaaaacaaagataagatgtgtaatatgcactacactcagattttatatattttgccttttctgttgagaaagtatcttttatagtaaacaattgagaaggaaaaaattgtctgctcatggatttcttctggataaatataaaaaggtcatgcccacatgtaacatcaatgcatataaaggataaaataataataagtgggtcaatgtcttgtactattattttacataaaagagttggctgtgtgcctgtaattaggtttgaccatataggacagaaaactaacacaatatcttctcggttagatatgtttgcacaacttctgctttatgaaaatgtacaaatgaatttttttttattagaaaaaaataaataacttccctttttttaggtccacttggaaaaatgtgaaaatatgggattttatatttcattataaaatagattttcaataaagaatcctaaaatttctaacaataaatagaaaatttgagcggaagaaaaatgggattttgccttgtgagaaaaagtgggccctctaatagagacctgaagaaaagcttccttaaagcctttcttgtagtgtgatgattcttttgaccaaattgatttgtgttagagagtctcacattattaatgtgtaaaaagataataaaatacataaaaggaacgagttacttttcccattgccaattgattttgagatggaacctcattcaccttatcacaaattctgacatggtatcagagc

SEQ ID NO: 38165 - DNA, 3065 bp, Cannabis sativa
ttagaacgatggttaaattttcatctatagatgatctttgattataagaaatatgcattaaaaaatggtaaggatatttcatttaagaggaatgactcacataggctaagggcaaagtgccaaggtgttggttgtccttggatgtgttttgcatctaagattggtgatactccaacttttgtcatcaaatcatacaaagacattcacaagtgttctagaaaaaatacgaataaatttgtaacttctaaatagttgaggaagaagtacttgaatgagttcaagatgaatgacaaatggggtattgctgctttcatgaggaaagttagtaacgatcatgtgatagacataacaagggataaggcatatagaggtcgactacttgcaaccaagaaaattgagggaagttatgaggaacaatatgttgcactatgggattatgccaacgagattaagaccaccaatagagattcaactatggagttcttcacaaaatatgacgagaatgaacaaccacatttcaagaggatgtagatatgctatttagggcttcaagatggattcaatgaaggttgtagaccattaattggtttagatggttgtcacatcaaaaggatacatcctggtcagctactaactacagtaggaattgacacaaacaacaaaaagtttcctgttgcaatcgttgttattaaaattgagaataaatactcatggagttggtttctcaatcttttgagggtggatgtaaaaattgaaaactcaaaccactactggagctttatcttaaaaaggtatagaacaagctctaaaaggtatgtgggaagaaggtataccaaaggcagagcataagcattgtgctaagcatttagagaaaaaattcttaaagtatacaaggataaagttttgaaggatttattgtggaaggctacaagagaactaattgtgagatgatttgaagctggaggagatcaaagtgttgaatgaaggggcttttaattggttaatggctattggtccccatcactgggctagatcacattttacgactactccaaaatgtgatatacagacgaataaatgtgtgagggttttaacggaacaaggacaatattggatgctagagatagacaaatattgtcgatgttagagcagattagggtatattttatgcaacgattgaccaaaaatagataatctgttgtaatgtggcagtccaatattaggccaaaaatataaaaaatccttaagaagaataaggtggaagctggctcacatttgccactcaaatcaagggactttgagtatcaaatcataactaggtatgggggattgttctctgtggatttaaaaaattaaatttgcaagagtaggagatgggaactaactcgaatcccttgtactcatattgtggctacaatttcgcataagagattaagagagatgatccagagttgtatgtaattaaatggtatagaaagaaatactatctgaaagcctactctaatcaaattttcccaataaggaatcaagaagaatggcctaggactggtaaggtgccaatgatcaatccattaagcaagacaaacctggacaacctcaaaaaaagcaagatagttgaacttgatgaagttgttggacctagatcaaagaaactaagaaggagatacataaaaattagatgttctaactgtggtagaaataccaaaaatgcagtaagtatttgtgttgcttataatcatgatcattaatttagttttgatgagtaaatctctgatctttcaatatttcttttagacaactaagaccactcaggattctagaacttatgctagaaatagcaagccaaaaggtattgcttaagttagttcctcaacatgccagactaatttataaggaacaaatgccctcattgaggtaactctatttaatacttgtgaattttttatgattttttttactatgtgtattgatagtatttagtgctaaattttatgcagaaaatgatatcaataaacattgttggaattgtataaactgtataggtggttaaagttagttaaaggtctaactgtttttctggtataacagtttctggtgtactgttataacagatcactagttagttttgtttctttcttttcttgctttgtaacaacctgttatgtaactcctaatacagtataaataatagcaatgccaatctaatctgattgagcatccatttcattcattcaacttcatctttctctcttcttctccctttctctctctgctccattactctgtttttcagagttcttacatggtatcagagccatgtctaacaatggtgaacgccgagttgatgcaccagaacaagaacgtgcacaacagcaaaaccagagaattgcaccacctgctctaccaaacaacaacctacttcccctaaatctgagactcgatcgaaacaactacacaatttggagatctattgccttagctgctgttcgtgcttatgatcttgatggacatatccttggagctcgtccagcacctccagaaactcttgcaggtaacactcctaacccagaatatcaacaatggatgcgatttgaccaatttcttatgcactggttgatgaattctgtttctgacaacatgttgggtcatgtaatccattgtcaatcttcggctgagatctggaatactttctctcaactctttgcaacaagatccagagcaagattgctccaactcagaggactccttcagtcgacaaagaaaggaagccaatcgatcgaggattacattctgaaaatgaaacaatatgcagatagccttgctgctgctggccaaccattgtcgaatgatgaacttgtactgtacattcttggaggtttaggatctgagtatgaagctgtcgtggttaacctcacatccagatctgagtctttgaatcttcaagaagtacaatttatgttacaaagccaagaaatgagaattcaacaactctcgactgacacgttgactaatattcaagcaaatcttgctaataccagtttcaacaatggaggacgaggaacaac

SEQ ID NO: 38166 - DNA, 3373 bp, Cannabis sativa
cacttaattcacttttattggatattgtctcttcagttatgtccaccaccatcaagatgttatctaagctttggaagattaaccacttctgaatccttactgcatttttcttctcatgcaggtgacataacttgcatttcatgggcacccaagaacatttcaacgggtaacctaccttctactgaaatgtttacttattttctttacattgtgtatgtttgagcagaggaaatagagcaagggattaaaaattgaaatcaaccgaaatcatctgttaagatgttcttttgacattaagaaactacatgagaatctacctggagaaaccgtccatgtgcgacccttacctgtgtataacacttgaagaaataagaaaaagggactgaaatttactattgtccttgcccaaaaaatataaatttgtcaatgttcttaccaaaataagctaactttagtaatgcttacaatatggaaaccattttgaacggtcccagtattaccagtaattcttgttctttagaatataagggataccgtgttaaatgttaattgcttggtaagttgccagttagttgtcatagtagctgaactcaacgtacatgaacagatttgatattagtgatatacttcttcattttgtctaaccattttttcttacaggtgatggggaagcatcgcttttagccacagcgagtgttgataagaaggtgaagctgtgggcagctccaccgctctcttcataaggcaatctgctggttagtggaaatagaagctttgacatgacgagctgctgatcttgacattgtggtcatctttaaggatacgttctcacctttgttccttgtaggttaaagagctttaacaaaatcatgagaagttccagacatatgccattgccatcggagcctcggagctagaaactctttcgttttactctaggattggagtgagagtactatgtttcacttggctagcccctttttaactgggattttggtgacttatttaatagagttgagagtaatggatttgctgtttcagcgtgggacctagatgatctgttgatgcaaaaatctgtatcagtttttgagggaacatggggtgatgacttccattccatgattaattatagtacttatatatttaaagattttggttatttattcatcatggaagattagtttgttaacctttgcatgaataatgagcgtcacagtgaaactaattgtgtaagcaactcatgtctaaaatttgcttcggttgggggcttgttgagtagcgaaatggggaaacaaatatcaattaaattggtcggataatatgaaccaagtaatagtatgatggttgattctttttttcgatttggtatagatagttgatttgagcggaaataaaaatactaactaatgataacgtaaatttgatgcaacacagttagacaaagtatggaaaaaagaagaaagtttccaaataaaagtacgaaaaaatgtatactatgctagctaatcttgatgtccacaatacatggtcacacaaaggaattccaaaaatgtggagatgcggggtatcgatccccgtacctctcgcatgctaagcgagcgctctaccatctgagctacatccccatttgatgataatcttttataaataaaataatattctcatccaaaaagagaaatgagccccacatctacacgaatcatcctgtaacaaaaatgataatacaattatttgttacttttatttttttaaaggaaaataaaaatttatatgataggtaaattagatattgtccattacatgcacatattacttattaaggaaactcaataataataggctaaccaagccatttacaataattatgaaaaaaaaaaactaacatcttcaactaaatgattcagaagttgcaagttgtgaatcattaaaaaagtgtgaagaatgctaaatttgtcatcctaaatggacatgtgacaaatcacacctaataataactatcagtcaaagatctttcaataaaattttggtaaagacaccccaagtattcaaacaagaataaaggagaataacaaaactaaccatactaagaacaaacataataaaagatcgatctaaagaacaagatattaatagcaatccaagaatccctatatctgaccaccaagaagataaaccttactcaaaataacaattactactcccattgaaataatgggatggtgacaaacaaccattattaaaatcaataaagtagataatcactaaaaaataaaatagggaaatagaaacgcaaaagaagattaatggaataaccaaccaccaacacattagactttggggtcacaaccaatctcgaaggccaccagaactagccaaagtcaatccccgtgatacctaccccacactaaattcgaccaaagtcaatcccaacgaccaccgaacggaaaccccaaaatttattgacaaaaagcgtcgatactccattagaaaacttcttcgaatgcacaaacaacaacccccaaccatagtcccgaccaaacccataaatggttggtgatccacgaagaggagaaagaacaactcaagtgacagcgtataattttttgtgaaaataataatttttgtattataaaagttgtgaattgtgataatcatttgctatttaattcgtcttttcaacagcaataaataaataaataaataaaaatgtttttcataaaaaatttacaaataaatagtacaaactagaaaattggattattttattaatacctaagaatgacaaaaattttaaaaatacgaaatctaatgtattttttactttttgataattttttttgtcaaacgtccatgaaaataaaataaataataatgtggaagagataaaaaaaaaagaagataaatgctattttaaatcttgtgttttacaaaattatggatctgaccttttgttttcttaaataacaaatcaaatcttcttagttttcaaaatagtaaaatagtacactgagttcaattttcataaatttatttttaacataaataacttgaagccaattttttactatgaacatatgtaaaatatgtaatcagtctagtcataaacacttctaagttagcctatattaagttttattttaatgaaaattgagctcaagatactatattgtactgttttaaaagatacaatgtttaattttatatttaacaaaatagagaattcgatcggtaatttttgtaaaatacaggtccaaatggtatttacaaagaaaaagactaatttaaatttttatctccaaaactttgacatgtgctaaatcatgcttctttaacttttcaggtcgtcctctcaaattattaaaattgttggatt

SEQ ID NO: 38167 - DNA, 3763 bp, Cannabis sativa
aatccaacaatttcaataattcaaaagacatttttaacgaccttaaaagttcagagggtaaaatcctaattaacttattttttttgtaaggaccacacataacacattagaatcaaatattagggatttgtctatctataaattacaataacatatagaataaatggatgattccaaaaaaatacagaaataacaaaaaaatttataaaaatacggttgtacggaatttaaatatttttacgattttataattttattaacataaaatacagtattttgatatatttttatgttgtactcttattaattttttgttatttatatgttatttttttgttattgtttgatatttttttttaatgttatatttttattactttcatgtaattttcttattatttttgtgttgttttataaaacaccgtaaaaatataaaaaaaaaaataaacataaaaaatataaaaaatttacaaaaaaaaatatattttatgcacttatccctataataaaacttgcttacgctcttcaaaataaaatttgcttttattaacttttttgggcttgtttttttagtgcaactataactaattaaaatgggctttcacatcaatggtaaatttgggctttttcttcttttctcttttcaatttgatcattataagaagcatccccttttataataaccataatttaatttatttattgataattgatcaataaaaaaataaaaaattgaatcaatttaaatatattattagttagtagtagggtatcaatatttgagttcatatatgattgagatgggtttggtacctaaaaaactcataacatcatttgtagtgtttcttaaaatcattctaaaattttgaggtcatggaccctactttgcctccaaatttcaaattgtacttaattgaaacacagagcaaaagaaagatggcccaacccaaccattctcacttcaccactaaccaaattaaattgaaaaaaaatacaataaaataaaaaaaataattaaagctaaattgaccattcctttgctccatgagctagccactataacacttattcgagtttcctcatcttctataagagtatctcccgcgatattatttatttattttttatttttataatttaaaacaattttttttttttttttatatttttacagaattctacgtagaaactcctttagcaactaattgagcaacttaaatcgcaattaaaattcacataacaatccacataaaaaccacagaaaaaaccatcagaacaactcaaactataaatttttttaaaaaaataaaaagatagtatatggagtaatttttcttatttttttagctaaaataactaaaaaaattagaatagggaaatatttttattgttgttgctctaaccatattctttatcataattagtatttgattattttaattataatttataatttaaatttattaaatttaaattaatttataaaataatagaaaaataatggtgtgttccattaaaatactattaaaaaagttagcaaggaaatagaaacctctctatccactttttattatagagattaattttttatatgattagagcttatttttgtaaatctcactctctattttaatttagagagcatggttggaaatgttttaatcatttgagtaatatgttatatatgcgatgtaagattgaaacttttgttttattaaatgataaattagatcttatattttttaaaataatatataataatactttgaactgattttttgtcaaaataaaatttaataataacacaatctagagatgttatgacaaaattatgtatactttatgcatctatttgtactaaaaattatatttgagttggttatactaaaaaatattaaaaattgagctcaacataccatttttaaaaaataaagaatctaatttattatttaacaaaataataaatctaatcatgatataaaatagtattaacccatttttataaattataacccttcaaggatttaaactcataccaaaattatatttaacaccttaactattgtaactaaacgttttattgctatataatactataaaaatacaaatttgtaacaatatggttgctcaagtaaattaaatacaatgatttttttttctttctttccattatatgtaataaagaatatcctttattctttaaccaaattacatacataattatgtgtgcatataatttgtttgaacaagttaaagctgctgagatatgatagtagaattgtcattttctaatggtacccactcccaatccatatcattgtagcttttttgtgatggagatgccaagttgggcaaatcactttctctaatgctatttatcttcatttattggtctatacccacctaggcaggtaatgtaatcaaaaaagaaacccaattaattttacttttttatcactaatcattcatagctaattatgaccacttatccttttcattttttttaacataataaaaaaaattaagattacaaaggtaactgtgttaaccaataagatagttttttccattcaaaaaaaattgttatctaacttaagagtatacttgtgatttaaaaatataaggtttttttttttatttatactactgtagctaatagaaaaaagtgatttgaaacttcaacatcttctcctttgactgtgacaaatttttgacaaccagagctactgaactttgactcaagagaatgattgatagaggaagaagaagttaggttgcaatttatgttacaatttgggttgcaaagaaggcatagttaagattgattgcgatatggtttaatggttattcagggtttgtaatttgcgatttagtatgattgagattaggagtgagcaacattcaaactaattcaattaaaccgagtcaattcaatctaatctaattacaaaaaattagataccaattataattggattgaattggatattaaaagttagattctaattggattcgattagttattggatgtcaatctcaaaatctaattacaaacagatcaaatctaattaaatttatatatattaaaaaattatttatattttaaaaaatttacaagaaaaattagaaaagtaacttttattacaattttatctctacaaaagtagaataacctttatacctcttttttttttttttttatttaccaaaatatctcttgtacacacataaattttctatgatgatgtcattatactacaatgacactccaattattttccttatcttttacatacacgtcctctattttattttcacttttcatttttaacttttcatttcaatttcattttaaattatttctcaacgatcaaaatcaattttctctccaaaaaattgctcctcatgatctccaactgtcattgaagctccacccaacgatttatctttctatttttttcttccaaattatgtgtaaatggatgtgacctaagaagtccatttgtaaaagttctaaacttgcaacaattaatgttaaatcattgttgaacaaagggatatggaaactaactatagttaaagatgatgactcaaatgaagattttgttcaaccaccaacaaaatccatcacggtcctttgaagaaaaaattgtagagaaaagagttcgattcaagaagttaagatgggaaagaagcatgcagatcaaattctcaaggtttagtttcagtttctttttgagttttccctaattttggaatgttg

SEQ ID NO: 38168 - DNA, 2723 bp, Cannabis sativa
  modified_base (26)..(26): a, c, t, g, unknown or other
tccacaattaaattaattcacaaatnataataaaataataaaaaattagtgctaattgcttttactaatccacattactagagcggtcattacaattactctctctaagattagattcaataccaaaatgaccatataattccgtcaaaagtcttatcccacataattaataccaagaaaaaaattatcattcacctactaactcaaataatcacataatttctaattttccacaactaatacgcggtaccgctaaataattaaaaatataccgctctaaattttttccaatccaccaagttttcactattgttgataaataacatgttaatattattacgtatacatatataattttttaaaattaaaaactaatctcatgtttgcctattttctatatttaagtcttaatctctaatttcacataatattctatacactataatgtcaattaattaataatttttcatatctaattagcggtgattataattatctcccattaaaaagatttcgtcctccaaaatcgtacttgaataattttggataaatgtcatcatgtcagactctaactcccaggtggctttctccaccttgttatttctccagagtaccttaatcaaggctatggttttgtttctcaaaatttttttcgattgaatttgaaatattttttctcagcatggacatgtgaaatacattatcaactctagaaaaggcttgaagtaagtctagtcaacacgctacctcgccaaccctttctagtagctcaaatagtcttataaacttagggctcaacttgtcattcttgccaaagtgtttaacacctttcatgggtgaaacctgtaggaaaacatgatctcccacctaaaattcaatatttatatgctttgaatcagtataacgcttttatctactttgggaagcaagcattttagctctactcttcttaatatcatcattggtctgctgcactacttctggattcaaatacatcctttctcccacttcatcccggtgaattggaaaacaaaatttcctgccatataaaatctcatagggagccctcaaaatctataacacagggtcgaacaatgtgttccagcatctatattattcttttggactggccatcactttgaggatgaaatattatactgaactttagttctatgaaagaaaaaaaaaaaactcatttacatataattttgcatactaatcaactatataggttgtctaaatcggtaaaaagtatgctaacttagtgaaatgatctacaatcacccatatgaatcatataatctcgtggttctaggtaatcttataaaagaatccatgataatatcttcccatttctactcaaaaagagtcaagggctgtaataaacccgctggtctctagtgctcattctttatctaccaacaagtcaaacaattggatacatattctattatatcctttttgatacctagctgccaatataaagattcaagtcttgatacatcttggtggtatcaggatgaggtgagtaggcagtggtatgagattcatataatttccttcctgattccatcactaactggaacacaaatccaatccttgtacagaagcatcgcattcccataaattagaaagtccttagtccaaccaggtaagacttcttcctgagattttactaaattaggattttctatttatgcatatctaaccctttctaataggttatattggagagtcaaattactaagcttgcaaaacacaaactcaatgcaggtcgtagtcatttttatttctaaccgagtgattaacttggtaccaaatacctacctaggaccttttctacacaatgcatttattactacattagctttttcaggatgatacaaaatctcacaatcataatctttcactagctctaacaaccatctttgcgtcatatttagatctttccgagtacaaaagtatttgagactctcgtaatcggtgtagattttacatttctcccaataaaagtaattctgccatattcttagtgcaaacaccattgtggctaattctataacgtggtttggccttgtgattgtcagatattgtaattttccaacagtccttctatatagagttggatctgccaatttttccttttcattttgtctaagctttggattagcttccataggtgttcatgggcttgcatccaaggtatctaatatcttctatgagctggaaagcatatggtatttgagacgcaaatatgcctttttctgattgagcaacttccatccccaagaagtacttcaagttccctaaatctttgagcttaaatcgagcatttaatctggtttcaatggctccagttcttgtaaatcattgctaacaaggataacatcttctacatagaccaataagaaaatgaaagtgttactataatgtttaatgaacggggagtggtcaaatgcagaatgatcaaaaccttcatcaaatagagcaatggaaaatttggcaaaccattgtcttgaagcttgctttagaccatacaatgatttctttagcgtgcaaactggattgtgtggaagctcccccttaggtttatagccttgaggaagtgacatgtaaacaacctccttaagatcaccatgtaagaaagaattatttacatctaattggcgtaaatgccaaccatttataacagtacgggcaataacacatttgactgttactag

SEQ ID NO: 38169 - DNA, 1277 bp, Cannabis sativa
ctttcttactaaagtccgtgggtataataccaaggccaatctagcaagtctgtcaaacttggtagtatacttaataacaaactccctcctctttgtgttgcagaccacctcgttaaaatatttggcattaaaaaatcttggaacccatcctaggtatcccacaatatcaaggcatcctcctagaactgaaaagtagagaaagtcactcattcactatcggtgactcccatgaagttcaaaatacaattcatagtagtcaaccattgctcatctttcatcacattcgggcctcctagaaaaataagaggccccttttcaaaaactctcatacaatggctccaatcggttaccagctataggttgctcttctagtaacactagagcaggagcaagtggtacctgaggatgaggttcaataggaggaccctattgtctcaacctctgaatctacttgtctttactttgaatcttggcttgcatttctgcaaacctcttctcccaatcttacggagcctgtggcagatttgcatcaccacaaccatgagccctttctacgacctctgcctcttcaacagagatgaaggggattttgattctcctgaacgccaccagtctcaaccatattacattgacccctttatttcgttaggtgtacatatctatcgaacaagcctacaaatccataagtcaggtcgatcaggcagcaatcaaaacttgtaatctaactatcacatacatggaaacttagacatgctcatattctgatataaaactgctaacattcttcctatgatgctcaacttattaaaggggctaaaacacgtaaaggcttactgaatcatgagttgagcttatctttgatgatgattatacatatcttgacaattttcgaagaacaaattagcggctttgataccaaaattgtaacaccctactagcttaggcgtgctacaatgatttataaattactgtgctaacctttgataatcaaagggtttagtaaaaaatgtaactaacaaagacttttacaattaaaataaacttcactatataaacacaatataaagtttacaaactttaggatcccattctattttaaaatataacaaaatatattgtaacaaaaatgttgcccatggactaaaaaaatgagcccatgatgtctcaaaaatttgaaccctccaggtctaatcgtcctaatatgtacaatcttcatggagctctaatctctaatggctctttacaatccgctttcccttttccctatttcctatatt

SEQ ID NO: 38170 - DNA, 4647 bp, Cannabis sativa
ttaaatctcttattttttttaaaaaaaaataattgatattttattttaatattaacaaataacatcaacctaaaatttttgttagatacttgagtttctatttttttttgataaaacataataaaaaaaatactatgaattatttttatcaaatgcatataaatttatatttgaaaatatataaaaaaataagatattatataaaataagtttttacatattataataaactagattataacattatcattatcattataatagattttaacaactcacattactttaaaattcataatttaccaaacactcagttcagcttttttccacaattttgctatagttgctttttctcacagcacagttagagctgctttttttcacagcacagctgtgccaaactagcccttagtttggtaggaggtatcctcgatatatgcaagaaccgttagcacttttcacgctttttaatgaattcatgtgtgacctttttgatggttggccgacaataaccctcacgggttattttcttagataaactctaccatcctgcatagtctccacagaagccttcatgaatttctttgataattttattagccacagtacagagcacacatcatagtagaggcatggaatatcctctccagtataattttttgtcaactactgtgtacctcgggactgtgtataagagttttcatgccttgattttgtccattggaagttctccatctagaaagtatttgacaataggggtcatccatgtagagcttgcatcaatcatctctatttcttgctttttagtttcacatatacttggatcgcttaacacctccacttgaactaagttcaatttatccaaatcaaaatgtgatgccagttttgccaaggcatctgcattagagttttgttctcttgaaacttgttcaattttgaaataattgaacttctccaaattctcccaaaatttctctaaatatttgtctatttttgcaccttttgcttggtattctcctaaaactaaatttacgactagttgtgaatcactaaaacattggacaaacttcacttttaaagtttctacgatccgtagtccagctagcaaagcttcgtactctgcctcaatattcaaagtttcaaaatggaatcttagtgcataatgaaacttaaaattttcagggcgacaccaatattactcctgccctcgagccattctcgttcgaagctccatcaatgaactgtttccatattttatcatcatttcttattctggagtcttctctagagtctattccttccactaggagttcgctaaagcctggcctttgatggagatcctcgaatggtagattattttaaattatcccaactcaatcgactattttattaatctccctgattcatcgagattggacaatacttgtcgcaatagatgatctatgagaactttgatggggtgagcttgaaaatacagtcgcaactttttagatgcatgtacaaggcaaagtgcgagttttttaagcagagggtaataaacaggttgctagttcctttcatcttctcgcaccagtgcatcacttatatcattttctgagatggccaaataaatgaataatgtctctctagtgataggtttggccaatactggtggtgtagagagatgcttttttatttcttgaaaagcctgcttgcactcctcattcccgtcaaatttcttgttgcttcgtacaatgttgaaaaatggaggcatttgtcagttgattttgaaatgaatatgtttagtgccgccatccttccaatcaaagactgtacttcatttggtttggttggcaaagacatcttgagcagtgtttttattttgttgggttagcttcaattcctctcacatttacaataaagcttaggaatttccctgaggacaccccaaatgaacatttcttaggttttaatttcatatcatattttttcaatacggcgaagcattctgcgaggtcctctgtgtggttcttgcttttaacaaacttcaccagcatatcatccacatagactttcatattttccctatctggtttttgaacataccattcacaaggtgttagtatgttgctccatcgttctttagtttgaatggcatgaccttgtaccagtaaagccctatattagtgacaaagctcgtattctcttgatatgggacatgcattttaatctggttatatccagagtatgcgtccatgaaggtcatcatttcgtgccctgatgttgcatctacgtaccaattgatcaatttttggtaatggaaagtagtctttcaaacaagccttatttaaattggagaagtctatgcagattctccatgtcccatttggtttagggacaagaactggattagatatccatgagggatagaattcttcccttatgaagttattggctgacagtttgtcaacctcttcttttagggcattttgtctcttgggatctaaaggtcatcacctttgacattttgagagataggaagggtcaatattgacatgatggtatatcacattcgggttaatcttgaccatatctgaatgactctaagtgaatttatcttttttgccttcaagaaagtgattaattgttactttagttctcccccaaaccctttccaatgttgacacacttggtaggattgtttgggtctaaattcacctcttcaagttcattaatagtttgagttggttgtactcgtcatgaattcttggatctagatcttccatatcttttttattttcttttgtcaaaatcaccatcaattgatggttcacctttctatttttttaactccacgctatactattgtcgagctaatagttggttgcctcccactatccttacccttgaatgagtggggaactgtaggggtaaatgtttgatcgagcttattgcccctaaacctattaatgatgaccaacccatgagtatgttgtatactgaagggatgtcaacaactaaaaactcttgctgacaatacatggtttcaaccttgcctcttctaagccaattttctttaatgtttctttgtagagaatattaacaaaactctcattatcaacaagaactctttctattctcttattagcgagctgaattgttatcactaggggatctgtgtgcggaaaccgcatgtgtaatgcatcttcatcagtgaagatgataggcggttcttcaggcttggctctctctaaaggttttagggaaaaagtttacttttcattttttacttcatctatatatcgttttttagcattattgctatttcctgtgaggtgtcgccctccagaaataactaagatgtcctcaccctcaactgggggaggttgcaatccttgtttgttctggttgttgggcagattctactcatttccttaaatccttacatattttctcagatatcctcacgagatgatatttttgatctcgccttttagttgacgattttcctcaatggtatgcccaatatcttgatggaaacatcaatacttgttaggatcacgcttatttctttcatgtctcatttgggtctccgaaacgcgacccaagtttcatttgtgagatagatattttcatgagtttcatttaattccatatacactgagtatataggaatatatttctcgtgcttctttttttccttatcttttgaagaatctcttaactcgtcttttcttttagcattcgagccattggggtttgaatttctagcttcggttctcatagtgcttgttgtagctgtacttatgatgggtttgtctcccgagtcagatttgagaagcttcatttcattttttgcctcttccttttgcatgaaaatttacgctctttcattgaattcattaatgtttcttacagggtgaccttacaaatcatcccacatttcacctcctgtggttgacaagttagttattatattagcctgaagagttgtcaactgaatgctatcatttagattcctgactttggttgctgttatactagaatgacttaagtaagcccttatcttttctttattgatgtgataatacactatgtagccgccacttacatccttgattagcgcgtgattgctaaagaatggatttaatgcgtctggcatgtcttttcatatttgtttgtagacatttcctccaagtttcatttaatgccaattaatagttcatctctagtatcctaggcttggaggagctggatgctacccaactctcggaggtgagcaaaagattgatccctctgaactagccatagctccaggaggaacagctaggttgtccaaggggatccttcctacttaagattttcctttgactaccattggatccttaagctttatctgtcacatgtcgcgccatggaattgccacgtatattgggagaaaactatggcaacattacacagtaattattattcaataaactatccaaaacacaacttaaaattcataaaatagatactaatatactataaatatgcaaacatatatatataaattataaaaatattactagaaatataagaaaaatactaaataggttctagtcgacctactttgcccatgggtccttaaccttgaccaactaggatctgtactcgaccctgtctctt

SEQ ID NO: 38171 - DNA, 3783 bp, Cannabis sativa
ttatcttcatcgagatctaattatttacatctgttcatgaaatgtggatattctccacgttttatttttatacacatgggataatatttaataactgtccaaccactcttttgtctttatccttatacggttatgctgattatgtaggttgtttctcgctgagtacgagttgtccttctttaccatttttataagaaaaaattctaagtataggtatacttttcctcgcaatgttcttgtattataatgatatcaacgaggtagttattctatcatatagatggcgagatggatgaatgtagttattctctccatgtacaaatttgtgggtcgatgagttgcaagctcttactcccaagtatgtgggtcaatgagctacaagctctttgttatctcatcttgaacacttctattatgtactttgtttttcccgagatagacatattgtctcgtcagtttacatgttaatggttagtattcttatctcgcatatgcttatgtggaaacgagtttcaatatttctatcaactgtaatttaatattataatcattgagctaattcatattccttttgaagtacacgtattagcttctggttgatagctaattttagatataacaattgtcctctaaaaagtattttttaattaaaaggaatttttaaatgtcttcaaaggtataattgtatttttctcatttaaaacttgcatgcttagaatttggtggttcaaaactttgaggcacgtcatttctcatttaatgcttcgactattccatttcttgtacagtttctatctgtttgattatatttcacttgatcgaacggttgccaccggaccctttaggtatatatttgaaattgtgcaccatcttcgtcatttttatcccacgaattaaacttcaaagaaatctcaaccaccttctaatctgactttgcatgccttatctgtctctcacattcttcttacggatttcatctaattgttctcattttcttcaaaatcatcacaacctagctttttgatcatcaaaatcttcattgcaaagtctttttttacactaaacatttcatccaaccagtaagtggcatttctctttgttgatttttttctccgtgctttccgttttaatttcttggtatgtgtttttcttgtctatattattttactgcttgggtaatttaatttcgagtgtttggatatttctagagctagaaaatttaaggttatacaattcacatattttttgggtttcatttgtgctatgttttccaggaattggggcattatttttcaatcatgtcccaatttatcctagaatatacaatcccagaacccttagaatttgtttgtcttaaactttctgccatagaatttaagcctaaaactcgaagacctcaaaccattcttgaaataaatgataagaaaattagggattacctcattaaatctagtcaagatgaaacctctagccgttataagcaattattgtaagaagttattgagggtaggcgccagtgtttgtgagaagcagcttggcccgaaccctccaatttagttgatatacccttagtgaggcccatgtttttacctccggttactgttgctttttcaccagatgacttagattttgagataatggctcaaaaagctcgtaaatctaagacccctcaggatcctacaatcactttcaaggctgaattaatagagtccaaaattaagtccattggaccttatgttagggacggcgtaaggtcatgtggcattaggaatgaacaaggatgtcacattaggtctgttgctaagaaggagttcaattattatccccctaaatgtctagtccgagacaaaggttgcagcaccagcgaaccatctagattaggcacttggagcctcgagcatataagagctggggcagttcttcctctgaaagactattttaaagaattctgcaactaccttggtattgctccattccaattggctccaaactcatacaagatattggcttgtttaaagtctctttatcatattctgaagtgggagtgtctaaccccacttgaaattctttatttttattctgtcaaagcctgccctgcaaggaaatgaggtgcaggaggcttctactatctcaggacccacaccaatgataataggattattgtgaggttacccaacaaaaaggagttcaaggatgacttcttttagaccactagtcttttccccatcaacacaacaaaatttcaaattatacgtaagtatagctcttctcaaaaacttggatatgagtttcagttcaatatatttatgccatactttactaattttgttctttgttatattaacagtgatcaccaagagactcgtcgcaactcttgagatcgagaaaaggcacaagattctccttggccttccctacaggtatgagcacctgacttcttattgcatgagaacaacctaaaggcttgtgcccttcttggcaaagaaaaatctaccaataattttaagatccccaaatttttagactagcaacaagttctagttcttgctgacaaggaggataaggattatgtggctcgcagccactatctaaggaacgtgaccctttgggaagttgaagatgatgcgtccttgatggtaataattttggtgctttgtggatggtccccaactgttcttaggactgaacgaacaacattagttcaatttaaagatagctaatataacttctatatctagacctatgtagacctcatcgtcattaggtttgatagttggtacctaaacatcacgtcaagttgagctataatagttcttactataggatcgctaaccaatacggtaccaattttgatagggctggaagttcagattgggacttgtctccactcaattctttgatcttttcatgattactggctctaggaaatttagtaatttatatagctcttcttcctcatctgatgattctggtaatattgtttagtgggagatcatctcaccacctttttcctattttaattgtacaagtgtttggtatttcatcttttgtctcacaaatatggatctggactttgaagatgtcttgtgtagcccctccggttcctccaagcaaaccaagaagcacacagcttcaacagagactgtcgcaaggtcaaatccagagcctttaattagcagataattaataatttaaatattaatgtatgattatgtactttttagtagaaattaggattattgtcaaaaataggtcttaggaaaatatattctcaattacggagatatattcaaattcaagatgtattatatatatactgtatatgaaattttatgattttcatgcatgttttatgtctggtaacgatataatgcgacggtttgtttggccaatagagtcacttaaatacggtaaagtatcttaaaaataaaggcatcaatgcggatgagatcttcctatatgcatcacttacggtggatgctatctggaggttacgtaatgataaggtccataataatggtctgattgatgtatttaaatttattaacaatgttcgctcttcttttgcaatttatcatacctctttctttccagacgtgcctccgcgtcagatgagcgcctggtaaggccccccttaccactggactggataaagcttaactgtgacgttagagtggggttggattgcatgtgtgcggcggttgttgctagggaccatcttggtaggaccatctgggtccaaacctcttttttggagtatgccgatgctctttgtggtgaagc

SEQ ID NO: 38172 - DNA, 5235 bp, Cannabis sativa
tggttcaatgcaccagagattgaaaaccagggataggttattcaagatgggaataatagaggatcagacctgtttattgtgctgtgataaccaagaaaatgtagagcacttattctttgagtgttctactaccaggagcgcatacaaaacttgaaagcttggttgaattgaaaatctgctcatatctctctttccaatttaatcaaatggattgggagagcaaatgcctgcggaacaacaaagatcaaaaggtaatggctgctgctattgccagccttgcttacagcatatggaggatgaaaaacaaatgccagtggaacaacaaagaaccagaccctgtcaagatgtttaaagagctgaaattgggggtaacacaaatgattgagctatttgggccaaagaaaatttcagagaaagatagacaatagtttgttagtttatgaatgatgtaaatgtatagagtagaagcaagagttgagattagcatgtatagatgattattttaggcccttgttgggcgctattagtttgtaaacacaatgtttgtgagccaatacatattcttattcataaaaaaaatttactagacttaaaagctagcttaccaaattgaaaatgaagataaaaactgattaaagttaatcaaataaacacactttcattactctttcatgataatttcactttataggcactaaaaataactctataccatagagttatcaatgcttcttttaaattaatcaatttcagctcacagacctgactacgctctctaagcgctgagtaaagcttctgagttggtcttgagataactttggttgtctcttaagtgagttaaacactaccacccatgaatccttggataagtggagagtgctcacacatgctcacaggtgttaggatagataatacataacggttttttcgttattactattaaagattagtttttctgttatttggttttcttacttttgtactctgctattgaatataattaaagcttctctaagtttagtttagtgagttagttaataccactgttctagcttagtgtatgaattcagaaactctctgttcttcatcttcttttccactattacatggtatcagattgttattgactcacgtcaatggagtcctcctcgattgatcttgctaaaaattatgcttctgctacacctcctaagcctatggctcagccaattcctgctacgaacgctgcttctgcgacacctcctgcgcctatggctcaagcaattccttcttcgaatccattttccaattctttgtcatcctatctcataatcaaattagatcgactcaacttcctggcctggaaatcacaggttgttcctactatgataggccacgatcttgatgaaatcttgtttcacggtgttcctcctccctctaccctcgttaatggcggtcccaatccaatgtttgcttagtggagagagaaggatcaactcctctatcctggcttcgctcatccatgtctgaaggagtccttgcatctgttgcaaatttccaatcttcttacgtggtgtggcaagccctggaacaaaggttcaatagtcagtcttgtgccaggcttcttcaactgaagaatcagttctccacaatccgtaaaggtaatctttcaatttcggattatgctgacaaggttcaaaatcttgcagattccttagctgttgcaggttatactatgaatgatcaagatatcattctgcaactcttgaatggattaggacccgagtatgattccgtggtttctggtattacagcgaaaagtgatcttctccctcaaagaagttcaggctcttattctctcccatgaaaatagattagagaatcacaatgctgtgaatgaaatggccatgaaaatgcaagccaatttagcatatgggaactcaagatccaatgtctatcgacctcctcaaagcaccaagaacatgggtcgtggatatcaaaaaccaagaactcaatctactcgaccataatgccaagtttgcctttgatttggtcataccgcacccacctgtcactattgttttgataagtcatgggtcacccccaaaccaagaactgtgccacctcgtgcatttgttataaaaaaagaatgtgaatatgatcccaggctttctcagcttcctttgttccagattcttgtgatgatgagggctggtttgtggacacaagggccactcataatgtaaccaacaatcctctgaatcttgaaacatccatctcttaccatggacatgactcccttgctgttggagatggtaaaaagctggttatttctcacattggtaccacttctttacccacttcctctaattgtcctttaaaattgcattatgttcttcaagtgccggctataacaaaaaaccttgttagtgtatctcagttaactaataacaacaatgtcttccttgaatttcacaaaacttgttgttttgtaaaggacaagcaaacggggagagttcttctcaaagggaaagttaagaacaagttgtaccagttaggagacacaacatcaagccaaagatcccaagaaccacctcagtgtcatactacctctattgagtctgcctcttgtatttctaattcacgtcattgcaatatttttcaatctcaaaattatactgagtctgagatgaataaaattgatcaattttcttttgattcctatccctctgcatttcatacatttaaactcaatgatattaatatgtgacacttaaaacttggccatccctctcccaatgttatgtaaagaatcctaccctttattcctcatacaggcaccattaatcaattgcaattttgcaatgcatgtcaactaggaaaaaactacaagcagccctttcctatttcccttagcagagcatccacacccctagaaataatttacaccgatctttggggtccctctcacatcacagccaaagatggctataaatactatgtacatttcctagatgactacagcaggtatacatggatttttccattggtttaaaaaaagattaggcctttgatacctttattagatttaaaagcatggtggaaaagcaatttaatttgcccataaagaatgtttaggctgactggggtggagagtataggacttttgctagatttttgagtgatcaaggaattcttttcactcactcatgtcctcatacacatgaacaaaactggttagaccagtttctgagagaaagcattggcatatcacagaaactggtctaaccattcttgctcaatcgggtttggactttacttactggtggttttccttttagtgtactatttataccattaacatgttacctacaccaatgattggtcatatttctcctattgagtgcttgtttggaaacacacctgattacactatcttgaagcctttcgggtgtgcttgttttccatacttgagaccatattatcaccccatataaaatggagtacaagtctcaataatgcatcttcttgggctactctaataatcaaaaaggatacctatgtgagaataaagatgggagactttttatagcaagacatgtggtattcaatgaatcttgcttccccgctcattccttctctccacataatcaggtaccttcaactcattccactgtaaatccttccacaatatttttttcccatcccctaatagcatttctccacttgttttgcattctgcatctcaacccacaatggtgagcttcctacacctcaacttggttcaaccatgcaagggtaaaattccaacattggtgctgcaacattgccaaatgaacaaccaattcaagacaacccccttgatttggcaccagcatctactactgctacaactgatgctgtagcagtaacaaaccagtagcatcataatcctggcaccataaatgaaccagttgctgcttcccaacccgttatcaatgagccagttgctacaatccctcataacacaccactaattactcccatcatcaatgcgcctctcaatattgtcttgcctcttacagatatcacaaaccctgtctcccattctactttagttccttccagttcacgcaaacaccccatgataactaaatggcctttctaaacctaagtcctatcttgccacaaaacatccactcccttaatctctacttccaacagagcataaatccctcaaagctgcattaaaagatccaaaatggcttgcttccatccagtctaaattagttctctaaagaaagctggtacttggcatctagttccatatggaaatggtatgcatgtcattggaaacaaatgggtgcaccgtgttaaacttaatgcagatggctcgttagacagatgtaaatcacggttggttgctaagggctatcttcaaacacctgggatcaattttgaagaaacttttagcccagttatcaagcctgcaactgttcgggttattctttctataacagtttcaaatgactggcctatgcaacagttagatgtcagcaacgcctttcttaatggtgagcttgaggaaacagtatatatgctcaaaccacaaggttttaaagatgttaagtatccatctcatgtatgcaaacttgacaaggtcatttacgggctcaaacaagcaccatgtgcgtggaatgacaagctaaaaacacacttcatcaatggggatttcatagcagcaggtcagactcttctcttttcatacgtggcacaggttcaagccttgttatcttgctggtttacgtggatgacattctcattactggcctgaattctgcattgatttctcacataatttctagtttaaataaggcattttctcttaaggatctaggaccggttcattattttttgggagttgaaattcacagagataactcaagcatgtttctttcccaatcaaagtatataaataacttgcttgtcaaattacatatggagggagcaaaagccagtcctaattccacaagtgctgcaacaaagttggccttaaatgctaatgagccactggaggacataacattatacaagagtacgcttggtgctcttcaatatttgtctcccataagacaagatgtagcattcatagtcaataagcttagcaaatttttacatgctctacttccacacattgggaagcttgcaaaagagtacttcgttattgttggaatctattttaccatgatcttagatctactcacaaatatgttgttt

SEQ ID NO: 38173 - DNA, 2082 bp, Cannabis sativa
tcacaaataccattgcagttaatacaacaacttgacacatatcatgagaaggtagagtaacttgacaaccgctgcaacatgaggacgacaagactgactttcagacacccacaatgagcaatgctggacgactctggaccttctcaaccctcaaacatgttctagaactcactggaacagtagacaatttttaaattaaaggatgcaagggacagataggaaaagaaaataaattaattcaaaagccatcaggaaaaagatatacagagatctaaaaagaacaaaaatgtgtaaccttagttgatcccttaacctgagtgtgagtagcttgaatagaatataaaaaattgtgctgttcgtgaaattaacaaagagccatagcggtttcaatatagatgaggatatacatagaagatgttcgacacaacgaacctgatcattttcatctggtgtaggagaaggagtcttggttgagtcagctggtttatcagccccacagttctgtctgttacacttggttctgaatggataatttatgttattgcatttctcacacttccagctaccttctggcatcttttgttctggaaataaaaaatgcacaagttgatgcaacaagaagacaaacatagttcaacttaagcaaaaagctctggtttgatggaaattgattattggcaaacttacttgaatttttgtcagactttgatgccttcattgcaagggaaagtcaacatgtaatcagatgagatttaaaaatagatatatatatatatatatatcacaagattgttatctccagtgaaatcaactgcaataatcttaagcataacaaaaaagagagcacagacagacctgggagccaggctttggcgtgttgcattttctcatgttgcaaacagttctaaatgagaaattaatatttccacattttgggcatgtccagtcattatcacgtgtggcatctaaaatgtgtaagcgattgatcaacaaaattttacagtgatgagaacacaacagataaactactttcaaaatcattctaaatgacgcacctgcacccttcttttgtaatttatcatccggaaaaaatccaggccttgggccctgttaaaaaagaaaagttaattttgaaaaaaaaaaaaaaaacataaacacgtaaatttatctcatataagccaaaatgaatcctctgattcagaacgacggtgtggcagaagtttggcaccagagtaattaatttttactaaaatctaaagtacttaaggccaaattgaattctagcacataagacccagttcctaattctaataaggaacaataataataaacttcaatgcgcaccatagctgcaggccccatgggtagacccagtccatatcgatccatcattgggggaataccatacatcccacctgtaagagaaaagggattcagacacaaaaaaaaaaaaataagagaaacaaaggaataatcagaacattgtcaagacactaagaattcaggatttgaaagattgtttctcatctttcagattacaacttagggcttctgagattaattgacaccaaagtacgtgatcactcaactcagaaaatcatagatattagataaggttggacatataatgagctgacagagttatgctattccatattgaaggtcataaagtaatatatactctagcaaaaaagaaatgcattagttaacacagggactgtagtccttaatcacacacacacatacacacatcattaccattacccatcattgaaccacttgaataaggtgtcggtccagataaatgcaaaggtctataagggctgcctgtagataatcggttgttgtagttgtaatgataagctgatcccccggaaaatggaacatcataaggaggaatagatgaaccattaaagagagatggaccatagggtgggacaccaagatacatcgatgatggagcaccagaacccatataaggtgcagatgaggagtaaccttgtggggcttggataggcttggcagcagatttctaggaaatacaaacttatatgaatattatgcacacaaattggaacaaga

SEQ ID NO: 38174 - DNA, 6343 bp, Cannabis sativa
ttttgaattaaaccacacttttcctaaactaatagattattgataataagattataaaagcacacacgtggcgttcctgaggttcagggcgttacagatatagtctcgaagagtcgtatattcttcttgatgatccacaattattacaatatcaggtaaccccgtcatatatttaatccttcccaaatatgtttgcaaatgagatagttgtctcttcaacacaaccgcatctcttttcagaagacggttgactctgcacgtcttttgttccgttctcaagtctctgaacttatgaagcctcgtttctgtagtataccaattcgttaacataccaccaagccattttttattaacataatgacaccgagcctttattgctgccctggctactaaagcagctgctttatttttggtaccaacaattaagaattgttttccccgactacagctgctacattttgcccataattcaaagcatcccaacagttcgaatcaaaatggaaagaggtcgaacaacaacaatagacagggcaataggaataaaagagagttttacggtaactccaaacaatatcctagggtgaatgtctcaaagttcactgcttttttagtcctaacagaagacatagaaacaatctatgcaactatccagtctatggttccacataagaaacctctcccatgaagaaggacatgagaaaaatagacagccaagttttgttttcatgcggactacgaccatgacaaaaatgaatgtaataatttgaagtgagagatagagttcttaattagaaaaataacccgtacttacagaaatatgtcaaggctgaccaagaacaaagggccgcctaggcagataataactaaaactatcttatgcctccaccagtggacgggcatcttcaggttatcattggggcccctcaccttgctaaagaatcggacaaagatagagaaaagtatgcctgagccttgcaatacgaacaaaatgatgcaaccctagccgtggaggagagaaaacctaaattaacatgtgtgggagaaataataataacgttcattgaagttgatgctagccacgccattttttttgcataacaaacctttggttgttgaagtgcagattgcaaacaaaatggtggcacaaactatggtggaaaacagagcttcctcaaatattctactcaagaccacatatgtaaaaatggggctcaaccttaaagatttggttccttgcactcaactactctatgggttctccggccagagcataacaccacttggacagattcacctaccccttacagtgggacaagctttgacaagtatattagtaatggcacaattcttagtgattgatgtccctttagcttttaacatcatgttaggttgaccaaccctaaatgacttaaaacctgtcacatcagtatccatatgtgtgttaagttcccaactaaaagtggagtgggctgtctaaagggaaatcaaaagattgcacaggaatgctataaccttgctctatctaaggtcaaaaaggaaaatacttttggccagagtttagagaaagggaaagacatttcccaatgagaattcgcccaagaggaggataaggacatggatccccgacttggagaaagaaatgcaaatgttgggccagtagaagagttagaagaagtggagattgatccaaccatcttgactaggaaactcaaaattggtaaatgtttattgcttgaagtaaaattagccttaataaaatttctaagagcaaacatagacatttttgcctggtcacataaggatagggttagaattgaccccactattagtctcatgccctaaatattgatccacacttctgtctttagtccagcaaaaaagaaggttgctagacaaagaacatgcgcaagcactaaaagaagaggtagaaaggctccgcataaacaagttcatcattaaagctttctacccggcttgggtggctaaccccatactagtacccaagccaagcaacaactggcgagtatgtttcaacttcatcgacctcaataaggtgtgtcctaaagactattttccactctcaagaattgatcagcttgtggatgcaacgactagacatgaaatcttaagctttatggatgcttatttggggtataaccagataagaatgcatccaccagaccaagaacacacaagcttctgaacagacatgggtctatactgctgtaaagtaatgctgtttggtattaaaaatgctggagctacctatcaaagattagttaacaaaatgttcaaagactagatcagataaaacatggaagtatatgtggatgacatgctcgtcaaatccaagaaggctcggggcacatagaggatttggatgaatgcttgaaaaccctcaaaaaatacaacatgaaactcaatcccttaaagttttcctttggggtcagcttgggtaagtttcttggattcattgttaatgctcaaggaatagaagccaatctagagaaaatacaagccctcctggatatgaagtcgccaacaaaagtaaaggaagcacaaagcctaactagtcggatagtcccactcaacaaattcgtttcaaaatcgacaaacaagtgtgttcccctcttcaacatcctccgaggtaacaagaagtttgaatggacagaggaatgaacaaatgctttccaagaactaaaaaagcaactcgcaaagcctttcatactctcaaaaccattgaatggagaagaattagggatatacctagaagtcactgaatatgctgtaagccccgcgctgataagagaagagaataatgtccaacatccagtctattatgtcagtaagattagttaaggtagaaggtcgataccattttattaacttactgtctaatcttagccacaagaaagttaaggccctatttccaagctcatcctgttggggtacataccgaccaacccttacactaagttttgcaaaagcctgatgcttctggctatagagttgggacaatacgaaataatttttcaaccctccacattagtaaaagggtaggctttggcagattttgtggcagaatgcacggatgaagaaccagatagttcaaaagataatcccaagccaggaaaaagactagaacagtagtccctaccaaaagaaaatgaagacaaatctatctggaagttacatgtagacggatcagccaccgatcaactttctgatacaggaattgcgatcatcacacctatggggaaacctctgcacgaagcaattacatttgggttcaaagcctccaacaacaaagaaaaatatgaatcgctcatagctgggctaaagcttgctctggaggtacatgccgagtacattgaagtctacagtgactcacagtcggtggtaaatcatgtctcagggggatacatggctcgtggagaaaggatggtggcttatcttagtaagatcaatgacttgctcatgcaattcaagggttataccctcaagaaaattccaagggaagaaaatgaaactactaatgctttggcatggcttgtgagtagcacagtaatagataaggccaacctagttccaatccaatttttgaaagaacctagtatcacctctgaaaaagagatcgaaatgatagatactacaccgaattggatgactcccatggcagcttatctcaacattggagaacttccaaaaaatagaaatgaggctcgaaaaatgatgagataagatgcatggtgtatcatagtagaaggtgtaatgtatagaatagatttctccatgccactattaaggtatgtaacaaaagaagaagctacgtggctcctgtctgaggtacatgaaggattttgtggtaatcacgctgagggaaaaatctatctaagaaaatattaaggcaaggatatttattgcctacaatgattgaagatttaagggcccatgtgaagaagtgtgacaaatgacaaagattttcaaagattccctgagcacccccaaatgagctaatacagatgcaaagtccatgaatcttttccatatggggaatagacttgatcagaccgttacccaaaggaaaaggtagagtacaatatgcagtggtcgaagtggattacttcactaagtggacaaaagtcgagcctctggcaacaataacatccaaataggtattggattttgtggttaaaaacatcatatgccagtacggacttccacacaagattgtctcagggaatggtaaatagttcgataaccaaatgatcacagatttttgtacaccacttgggatcatcaaaagtttctcggcagtagcacacccttaaacaaatgggcaagtcaaagcagtcaacaaaacactcaaagaaaccatgagaaaatggctcgaagaagctaaagggaactggttggaggaattactagaagtattgtggtcgtacagaaaaactaaaagaacaaaaaccggccaggcacctttttccatggcttatggttatgatgcaaagctgcccctggaattagaagccccatcccacaaaatactaacttatgactaggaaactaatcatgccctcctgacagaatcacttgatgaaatcgaagaaaaaagagcttcaacaaacctaaagctagtggctcatcaacaaaaggtagctcactacttcaacaagcaagtgagggcaagaacattctttgtgggtgatatggtcctcagaagagtgttcttaaacacaaaagacattgcagctgtcctgctgaaacctaattaggaaggaccatatcaagtaacagaagttacaaactctggagcatacaaacttggtttgtatgataaaagcatgaaacaagttctagtaccaaggtattgcaacagtgaacatctaagaaaatactaccaataagtgtacaaggtctgatgaccacccaaagtgcacgatgctcgaacacttactctaaactaggtggccttctgagtggacctcactcaaaggtttagaaaaacaactggtactcaggtcgaatgacaacccctaaagtatagtatgttcagaaatcgttgctcttgagcaatgtcttttggacggaatatattgttcaattgttttatgttttagttagctaatgatcagtttgatcatgtaatagcttttataattcaataaatgtacattactacggtaacaacacagttagactgataaatgaataaagatattaattatcattctaattgtgtccactttatctcttttatatagcaagttatgtaattaccattaaaaatgcgtacaaagggtttgcctaaacctagtagctggatagacaaaattgaacttgtgaaatacaagtgaccaagagtcataattttgctcaatcacttggagggcaattatacacccgtacaaagcatatgtaagtaacaagctcgaatatttacatgtgcaatcatttagacttaagagaaaatatttatttttaaaaaagataacaaagcatgataaaaggttgaatgatactgcatgtgtgatggttgtacttcttgtaatgagtactaacattcactgttggggggaaaacccaaatattcaaattttaaatgatttatcttccttttttcggaggcctataaaaggggattaaggattttgagcatccttttagctattttttttctcaaagaaccagagaaaaaattcctgtccactagcctagaaatcctttgatgctatcctccaagcagatcaagaaagcttcaaacagtgagtaagtcctttatccctttgcttttaaatgagtgctaatgaatatatgcattgttttcttgatttcttaccatgaactttgactgttcttgactaattgtagaatagatagttctagggtttggaactttaatatacgtccatacttggggtcatccttccattgagtgatttttggaaagatattcaaagaatctcaactaacaacatgaaggagttcctcgacagagctgacaacttcatcaaattagaagaagccatacgacaggcctagatagagcatgtcaacaatagggagtcacaagactattgggaatattttaccgggatctagatttactaacaagtacattgaattaacatcctaaatacgaatatctctaatacgatgaaattaaacacataagagtttacaaaaccttacattgattacagcagaataatatgactcctttcgctcagatctctaacccttgttgctttctattacaaattatcaagatctgagcctggatctctttctctcctttgggttggttaccaccgtcttctgcactatgattgagtacttaact

SEQ ID NO: 38175 - DNA, 6350 bp, Cannabis sativa
actgtagcgtgccttagcattagggcgtaacatcctgaacaccgagatccgctatccacaaatggaacgactagcatttgcattggtgatcgcttcgagaaagttgcgaccttactttcaggcacacagtattaaggttttaacaatctaccccttgcggcaagttttggccaaacatgaagccttaggaagattactcaagtggtcagtagaactgagccagtttgacatcaaatacaaactaagatcgacaatcaagggacaggcccttgcagattttatactcaagtttccaaatgacgaagtagccataatcacataagagtgaattgatcccgacgtaccaaagggcgaggggtggactttgtatgttgatggggcatccaataatgaaggatcagggggtggcataatcctcataagtcctaacaaattcaaggtacacgctgcccttagatttgagttccctgcatctaacaacgaagccgagtatgaggctctaatcgcagggttgaaacttactcttgagatgaaagtcgagtatctacaagcctttaacgactcgcagatcgtggtttgccaagtcaacggagagtagctggccagaggagatcgattggccaaatatctttcttacacttgtgagttattacaaaattttaaaaagatagtcgtttgtagaatacctcgtgcttacaattctcatgcagatgctttggcccgattggcctcgacaagagaagctaaattactcgatataattcttgtagatgtattaactcacccaacaatcaatcgatatgagatcatggaagattgatataataaaaaaggtcacctggatgaccccgataatagactacttaaaaataggaatgcttcctgaagattaaactgaagccaaaaaactacaatatcgagccgctcgatatgtcatttatgacgacaagctctatcgcagaagctttagtcattcgttacttaagtgtatcgatggggctgagtgcaactatatacttcgagaattgcacggtggaatctgcggcaaccatgctggtggcaattcccttgctttaaaggtaatgaggcatgggtattactggccaacattgcgggcagatgcatatagcttcgctaaaagatgcgacaagtgtcagcaaatagctactcatgtaaacagaccaccaagccaattaaattctatcaccagtccctagccctttgcggcctagggcatagacttaattggagagttgccaaaaggagaaggaggggtaaaatacgccgtagtcactgtcgattacttcacgaaaatgggttgaagccaagcctctttcgactataatagccaccaaattgctcaagtttgtatacagcgtcatcatcggcagatttggtatcccttataagttaatttccgacaatggtaaacaatttgactgtaaggaaatgcgccaactatgggatgaattggggattcaaaatgcattttcagcagtcgcatatccacagagtaatggacaaatagaggtagttaataagatcattaagcataccatcaagggtaagctcgaagaacgtaaaggcacatggccagaagaactccccaagttcgatggtcctataattcaactcctcgatccacgattggtgaaacccccttctcgctctcttatgggtgcgaagccatggtactagtcgaagttagagcaggatctctaatgagaaatgtttttaaccttagcagtattaaagagaatcaattgatacagctcgatcttttggaagaaaagcgcgatcaggctcatttgaaaaatgtggcctatcagcagcgaacaactcgttatttcaactccaaggttaaagagtgaagtctgagtaggcgatttggttctgcgaaaggtcatgccaaacactcgaaactcagcacatggattttggcgataattgggagggaccatacctaatcgctgaaaaattggtagtgcgacctatcgattatcagaccttgagggaaccgcgattaaaagagcttggaatggcgagagtttaaagtattattatcaatagtactcgcattgtaattatacttagtcaatttattttgataaatatcctaagtataggcggtatagcctaccattgtactattgattattataataaattttttgaagtttttaatttttatcctcttcgcaagttttacattctaagttattacaccaagctgtaataataaaaaacattgcgaatagaaacaataaggtaaaatatcaaaagagcagtttagattatgcgagtacacctgtaccgcttagtaaacatgcaaaagtacatatccatgaaaggatatatcatttgaaaataaagtagttaaagtttatttgaagtacaaagcgtgagtacccatgtaccgctaacaaaaggaataaaagttcaacaataataaaaaggacttagataaattaaggagctggagtgatggaatcatctacgaccttgcttgcagcaccatcaacgacttcctcagtatccgcgttctcagcctccaaagggaaaaggtttcctccgcatccttgagtttgggtaggcgacatagcacgaaaagccttggctattttaactacttctgtcccaaggactgagaaatcgaagtcaggcaatttggacaaggtcgtgtatatatagtcagaaacagcgtggtcgtactgtctcttcccgtactcctcacgatgacaagtcagttccttaactcgcgactctgagagtctggctttgtcctctgcttgcttggtcttctcctctgcctgctccttggctttcttgagatcctcgacgtctttctctcccgaagtcgcttccaacttcagttttttcacattttcatgaagaagggtgttttgcttcctcaaaatatcgacctccatggtacctgcgacgaaagccttcgagaacatggcaatgaactacgacgccaattctgcggagcatgacatctattcctcggaaggagtcccttcaacctttgacataaactcctcacccacgaacttgtccaaattgcctgacttcgatttatcagtccttgggatagaagcagttgaaatagccgaggcttttcgtgctatgtcgcctacccaaactcaatatattacctgatgttggtcttgatgtttatttggatagacgcttgtctattctttccttttgtttctcagaaggctccttgtatactggctcccgctgaaggctggcattctcaagaattagcttgtgttcttgtagtttggtagtcgtacacagcaatcaccaatcgtgatcttgaacagacaagctactgagaacctcggtaatttctctgcgagcagggtccagaacaggtcgagccggcctatctgcgatcaatgaaagataaacattagcgactttacaaggtaataaaaatatactaagtgttgagatacgcgacgtaataggtcgacgattgaaatcagtcctatatcttggtactttaaacgcgtaaaaccacttagatttccaatctcccatattggaaaccatgccttctaccccattaatttcagaatttgcccatttactaaagtagtaaaagccgttgttgtggccaacgttctttatatcgtaaaaatagctagtcttccatcgatggttccccttggacatattccatgtacatcacatagaatcccagaactatgcgataattgtttggggttagttggaagggagagacatcgtagtgtctgaggacgactttaacgaagtaatgaaaaagtaaagataccccacatcgaagaataaggatagaaacaaccacgtcttgcgtggggatgatcacgtggttggtaaaagggagatgaggtctttgagatgcttaaggacacatggtcccaagtcgcaacaaattcaactgtgcaaatgtatgcaggtcagatttggtaactcgcgagaccaagtgctttcatgaaaagggttcattctattgagcatcgtcaactgaatctatttcactaccctcaactttctcctcctcctccaactcgcgatcaggaacctcgaagtcctctcccatttattcaaattcaatattaggcgcatgcctcgagtgagtgaggtactcttggggagacaccatagattcactgtcgcaaatctcaatcgttcctggttcagcgagttcctgaaccatcctatctatctcatcagtagatagtgagcctagatgcatagccctatcgacacgaacctcctcctcaaaaattgaggtaggtataaagatatcgctcttatccagttcatcagcaaaggccccgcctccagagtcgagcatttggctattcgacaggtcactcatatgacagatagaagatcttttcagtgtggtgaaagtacaagaattacaccggtgacctcacccgcataaaagaaattcagaaaatatggaggattaaccaaacatctccagaaaatggctaggtgtatctcaataacctaatgctcatgttgctacatgagtattaaggtattgaggcacaaccactatttcgagaatatagctaatcctctcaaggtgtaagtcacacatgtgcaactaacagtatgtctcaaaaaatggctgggagtttcccagtgacctaaggggcatgcgtttttagcataaccatagagttacttggacacacccaccctttcgagaaatctggtcagttccaacatgcgactaaaaaaaagcaagaaaagcaaaaacttgctatatgtcgcgaatggttgggtgtgtcacagtgacccaaggaacattcatacacttgcatgaacattaagttacagtgacacacccaccattcaatagactcaaccaatattcgcaacaaaaacatatataaatcagaaggctaaaaataaaccctaagttctaaacagggattaagataactaaatttcagatttactaaattattcaaatatatatgcgagtattcaagatgttcatcctaatactcgcgagtattcagaatactcaacaagaaagatgcgaatactcaaggtgttcttcctgaaacccgtgattactcaaattttaggcccatatttcctagaaaaatacccaattttgtcagaaaataaagtcacacatatatatacttcctaatgtctcatatattctctacttcctaaagtgcagaatatagattgactctcaaaataaaggaaaaaacagttacaaacgattttccactaaccttgagaatgtcgatattcttcagtcaattctgggagattcagaggctttcaaagaccgtttttggaagagaaaaaaggaaatggaaaaggggtttttgaagtttaaaaaaattagagagaaaagaagagagaagtaaaaatgagagggaaaaaattaaggatcatttcgtatcaggatggttaaataccattatccctcattaattgggattgagacatgtggtaagataatgcctaaggtctcacaatctaatggttatccataatcacgcctacatggactctaaagagttttgatgacgtggcaccccaaatgggttaagtataatgattacagtcgtcttttcaaaaccctcaattagacaaccaaaagtcaccatctcatgatatcctttcgcctgcctctcgcttatagtttcccttatgacataagctgtcaattgcaaaactaggggcatgtgttatagtgagaatttctcacttagaaactcgagaccaggctcctataaaaatgacacgtctcctcgaggagggctgagatgtaagtagtgagagagacctcctcttcttgagtagtgcaaacctcgcctgaaccagactcagcgggatgatgtgaccttgacagtgtctagtcgcattcgagtagctcgcacaaagcaggaccgaagatcgggttaagactctcatataccaagacatatgcgaggactataaaggtcttcctgtgaagagataaagattgcttctaaactcagcgagctggtttggatgacccaataacctcgataacccgataaggactcacatgtcttaagttatcggcatattacaagatgtccgtataagcgactagataggacgcaaacatcccagactcgatttgtcttgtatgcatcttaagcctatgagcttatgcaagaataagaacagacaactcgcactatagaagtcgcagacgttgctgtatttagtaaattaggccaaaactattcttcatttattgtatttacgtttttaatgatttaaatgttatattcaatgtacaaacggattgataatgaattcaatctctgtgtaatcaaagg

SEQ ID NO: 38176 - DNA, 1626 bp, Cannabis sativa
caataatatcaactcactaacaacacaaataaatgagataattatcctcgcacaattaatatccaaacacaaaattaaatactattttaaactagatattacataagaagtcattctgaacatcctatttctatcaacaacagaatcccaaccacaagactaaagctgtagttttcaaattgcaaataaatcacatgtaaatctttatatttcgacatgcaatgcagtttaagaaattaacctaatgatgaaataggcaaagactctacactcgaaagaaagtatggtttggaagaacacacactaacgtcaaaaaatggttgtatagaaattttttgaaccgaaggatcttcgtttcgatcaagcctatcaacaatgacgttgaactggtcaataagggagacaattttagaactaatatctagatttgcgatttccactagcgatgcagtcaaaatcactagtggtggtgcaccttgaaattcttgagccttaattccaagaagaagataaatggagaagtcaatatcacgctctagtatgacccaattcgtgtacaatgttgtttttgagttttcactctcgaagattataattttaaaataggaaaatttgaaatttgggtaaaggtagtaaaaattgcatttataagtatttatacttgcaaaaacacaaagcaggtccaccgattaagaaatctctctatctataacatttaatgcattgtatagaactgaggcaaaactgcataatgatatttttctcgaagcttgagctggaataaatagtcgtcaaaacatttgggttgtcacgcatgcctcgtcaattgaacggataccttgcgggccaatgaaataatgccacaccaaatcctaaaagtaaatgaataaaagttgtcttccatattcattttacttaaaaaattgtaaagatttcacctttagcctccacatgtccacttatgtagactgaaacaagcttatccacaacattccaaaagctttaggggtaaatattattcgtgtttccggtaagagacacatggacacaaggcaactacttaaagtccattagtgggccttaaatgacaaagatttggccaagtccaatatcaacctagcctttttggaagacactcacataacttacctaggcgagtctcatctaattaagtgtagcccatagttggaggacacttagcttcgcgtagctagaagtgcctataagcatgtgactagaaaccagtagtagtttcacatttgttaatttgcacataataaggaaggtactctcctcaaatcgtagacagagaataatatcaagttaaaacaggaaactgcataattgaagatcaaataatttgtaacgcctgtatttttaatttactaaacccaaaaaataattttaatatatcataactttataaacatataggccgggatcccgagtatcaaaatatgatttaacagtatcttactagcatatgtatatgtatatatatttttttttttacaaattcatgatcaggcaactcaaaacacggactcaaaataataaaagaccgaaactctccaggttgcactgccgcaatatgtacaatctctgccgagctccatctcactgttc

SEQ ID NO: 38177 - DNA, 1905 bp, Cannabis sativa
  modified_base (753)..(764): a, c, t, g, unknown or other
taagaaattattaaaacgctcaatatcaacaaaaacaaaaacagttattatatcataaagctatgcaataaagacattattacagatttttgtattcagagtgttcaaattcgagctccgaaatagttgtggaataagttcaaatatacccgatccgatctgatgattcgtgaaagtgaagattggaatctgagataaaggtagtttcaatcaacaccaccgcgtatacatctaatctaaatatatatatatatgtacggtatacgtttaatatgaaaaggtatacaataatagttagtttctctgtcaaaagaaactaatggaagaatctgaaaaccctagaaaggaagagagagagagaagatgggcaccttttgtaggtagctatggcattggcagtggcaccgaaccgaaggccgctggcaacgtgtcatttctgatctggtatcctcttcttttgggttcacgatagctttatgactatccaattatagtgtgacacgtgttcaattcactttgtttcttatcttggcaatgatccggtgctgacaccattattttaagtacttttttttctgtttttggtagctcttcgggtttaataagccagtgaatagtgatccctattcctatagaatacggatactagcttgccacgtagtcaattatttgtccatttttattaaaaataaaaataaatgaagggaatagagatggttttatttttattcaaatcaattttttttttttttnnnnnnnnnnnntttacaaaattctacatagaaatttttattgcaattagcgctgcaacttaaattgcaacaaaaaattgtataaaaacccctattgcaactagtactgcagccactatagaaacccgaaaccgtaaatttgaaaaaaaaaattcaaaaatcagtatatggagtaattccctaaaaaaatacttcatatcaaaatttaaatcttaattaatttatacaaaataatttttttctttacatatttttcacattttaccattggctaattaaaaaaactgaactaatggcacattctctctatcaattctctctctctctctctccgactctctctcttgaacactctctatctcagctcactctttctcattcttttcgctccctatctctccacatatctcggtagattagtatgtagtttattttcgatagatctgtgtggttgttatttgcattgattgctattttgctgatttttttttaaattgcgagatctggtcttctcgccaaattgggtttcttaataaattattgatactttttcgattatatatcgatatcttctcaataattagggtaagaaggtaagggatgataatttttaataattttttgatggtgtatcgttactgtttcaatccaagataaaaatatagcaaaaaaaaaaaaatagcaaaattaatcacacaaggaagaatcatcgataaaccattgatatactatcgatgaaccatcaaatcacttaaaataccaagcagaaaaaatgtcattatgccatcgatatactattgataaaccattgttattgtcgatggtttatcgatagtatatcgatggcagactgatatttttttatcgatagtttatcaatgattttgcattgtgtgattaattttgttgtattttatcctggaatgaaattgatcgaaatagtatcgatataccaccgaaaaagtatcgaaaattgtcatcccttaccttcttactctaattatcaagaagatatcgatataaaatcaaaaaggtatcgataatttgttaaaaaaaaacccagtttggtgagaaaaccaaatctcgccattcgaaaaaaaaccagcaaaacaatattaatgcaaacaacaaccacacagatctatcgaaaata

SEQ ID NO: 38178 - DNA, 1198 bp, Cannabis sativa
ccttcagtcattaaataggtgatttatatatgtacaaatattcatatatttacctcagtagggaaataattagtaattgatttgtttcaaatcaataaattcataaataatatgataaagatgaaactcagtaactagtagttgagatcataattactattaccatcattataattaaatttagaagtaattacagttccactaatctcaaatattccaacttaattggcttaatatttttttttttaaatgaagcgtttatatagtatactctttcagttccaactttgagttatgatatgtttaaaatcaagtaataatgctattactattttgagaatatgaatatgaactaaagaaaagaaatatgatcaaaattgacaagaaatgatttatgattaggaatgtattctagtgtgtatataccaatatttacgtctatatatttgaaaaaaatttaaatttggaatatttttttaaaaagatttattatgagaatatcaaatatttatttcagaaaaaaagatatcttattattattattattattattattattatttatcaaatctcaactttcaacaatccaaaaggtaatatttctatctcaaattatcaacagcaagacatcttagagcgatttgattatgcatttctcaatggcctaagaccagagtatgatcctgttgttgttgttgtttatgtgatgagccttgtccgtaatctctcatttgaatctatccaattgttgctctcatttactaaaaataataatcaagtgttcttagattttcacttcacttgttgttttgttaaggacaagataacatggaaagttttgctcaaagggagggttaagaatggaataatgaggcttctctaacagcctcttcctcatgtaataatcctgtcaataataaaaattcttgtgtttccaatccctcaacagtctctaaatggggttttttatgctaatcttaatcaagatatcaatatttagcattcaaaattaggacatcccgcccctaatattattgtcaaacaagttgaattttaaaggctaatttaagaatctaagattttgtgatgcctgcaaactaggcaaaaatcacaaactaccttactctctgtctaacaacagggcatctatgcctttagaattggtccacacagatgtgtgtggaccttctcatgttct

SEQ ID NO: 38179 - DNA, 1718 bp, Cannabis sativa
tttaatcaggacaagtatgccctcccctaaacatttccgttttagtcgctttgtgtgtaactttcatagaagccttcaattttgtgaagatctcataaactgcttgctattgtttaatctgaatatctgatgccttctaaatgctgtttgataacataaaaccgatcgagcttctttgaacacacatcttaccaacagttgtagagtttttgttttctttatgaactttcacttgtcataatccttaaatacattataactttttaggcggcataatccttgcaataggcagtatattcttgtatttgtgtcggtaagtctttttggcagccctattattatttacagtcgtaacgttcaaaattttgtaggtatctaaatgccattcaaaccaatgctccccatcttttacgctacttggccactgctttcgttgttaacaagagaaggagacaaaactttaaagactttatcaaagttattcagcaggagcaacattcttacaaagatcccatcacagaatttctagcatgtgtatatgtcaattatgattttgatggtgcacagaaaaagatgaaagagtgcgaagaagtaagtccatcggccccaattcaaccacaaaattagtgttccattataattttcaactgcatctacatttttaggagcatactgatttgtggactttgcttactgttacattttgacaaatgtaggtaatactgaatgatcctttcctaggaaagagactcgaagaaggcaacttctcaacggtaccaatgagagatgagttccttgaaaatgccagactatttatcttcgagacttattgccgaatccatcagcgcattgatatggggtttgggactttttacttcttcgtattatttatatcttaaatttccattattacatatgccacaggggttaatatgtatcttaggataggattggtagctgtctatttaatatttggtagcttagagtgcatttatataataatgtgtacatggaaatatagtttcattggaatattccaatttaaaagaacttgtttttttatgacagagtccttgctgagaaactaaacttgaactatgaagaggctgagagatggatcgtcaatcttatccgaaactcaaagctagatgctaagattgactcgaaaacaggaactgtaatcatggaaccttttcaacccaatgtgtaagtttttgatgcatatttattgacacccgaaatcgttatgatttttgttttccttttttcattctcctttctttcggctaaaatagtatgcattttttgcccagctatgaacaactgatagaccactccaaggcattgtcggggcgtacttacaagttagtcagtcaggttctcgaacacgctcaaaatcagacacaagttgcccggtaggcggtgatttttagtaagatttgaactcggagatttccaatcacttgagacctctattaaaaattcttgctaaactagcaacagattttgctttgttgtaagacttttagtttactatttgtggcttttgtctatggagaacttatttattatgttaatttttccaacctttgtaatgcagagagcaatttattttagttttcttcaattttgttcacttataatttcttcttttgtatggaatattggctagctttgagtcggcttattttataggtacattctcttttcatttaaaa

SEQ ID NO: 38180 - DNA, 3468 bp, Cannabis sativa
  modified_base (45)..(48): a, c, t, g, unknown or other
  modified_base (3394)..(3426): a, c, t, g, unknown or other
tactctctaaaagctattacattaaattatatgggacccgatacnnnnttggaccaatagcgatattatagcgatattgacacgtaagaagattctaggcaccactagtgccctttagcatttctctatgaaaaatgttatgatgattttcttcagccattatgatgatgtatcatatatatatatatatatacaacatttgaatcagtgtacgtagtactcactcactgatcacaatttcaaacaataattaatgcatgtatggtgaaataaaataagagtaatgatggtaaaatatttaagttacataattaatcttcattataaaattaaaactgatatgatttctacttaaaattatatctatgagtactaaaactaaatgcatattaatatgtatgtgtctatatataaatattactcatgaataatcatttttattgtgtgcaattttttttaggtgtaaagtattttagttagttcacctatattatatatgattattagacaagttttatttgtattctaaaattttataaatgtatactttattttaataatttttattttatattaaatatatatttttaattatgttagttcttttttttttaaatatttttcttctaatttatattcttaaaatatacctatcaaataatataaattgtatttcaaatattataacaaaaaaattatgtgaaattttattaaaaaaaattatgaaaataaaattcattttaagtattaaatttaacacaaaataatatgagaaaaagatttttaaaatattaagggtggtttttaaaaattattttgagctttattttttaaaatattaaagtgtatttattattttgtggggtgcaaataaaatttctcttactattattataataaaatttattgataaatgtaaatatcatgaaacaagctagcttttatacatgtacaaatatatattttctaatataattatatatacatatattttgggtttttctacacatatactcctctgatcttgtataataaatatttattaaaagtagtactatatacattagtaacaaattgttacaaaaacatacttgaacacaaatttttgtttagatttatgcatttaatattaatcaaaaaattattgtttaattgttaccgaataagcaagcacttactatatcttaaattattattattattattatctaatgtatttatagaataaaagaaattatagagtgaatatatattaatagtgatatcgatgaaggaacaaagaattaaaagtgcatgaataacatcgatctcaattctcagttctccacacaaataatattgtatacaataagtacctactatatatttacatgtatatataaaaatcatatatacatacatatggtgtataaactatacaagcccatcacatttttttaataataattaggaacttatgtcaattacgactctttgatgtgctctatttttttttttaagttattaaaaatattagtataaaataaaagccaaaacagactgtaaaaactaacccaacatttggtgatgcattattagtggtcacataacaaaagcttctacttgctttgtttgttactctttcctatctactattacatacttatcctaaaattgtggttactactccaactaacttttttatttgtttttaactggtttaaattataaatatatagtactttagtacaaaagtttttttacttttacatttagaagcaattttttttttgtttatatttatacagaaacatataaagtaattaataaagcaatataaaccgcaatttaaattcaatccacgcgaaaaatattttagttaacattataaaagaaaatgtaaacattgatcagaaattgtttataagttaagtcttcaacaaaattataattagaacatgcattagataaagacatttcaaagtctctgattaatcccttttaacatcactaatacttttgtatctactttttaaatataaaaaataattgtaatttagataataataatagtatactaggacctcccattttaatttgtgtgtgattgtaaataatgatacatacaatatgatatgatatcgaaaagagtacgtactattgttatttagtattagtagtgcctattatttttttattagtggcgctctataattagttatatttttatatgagactcgatatttaattataccaataacagtatgacactaagaaatatattaagcccaaacagtattttttaacaattttttataaaaacaaatagtgtgtaatttgaaaataattaatctatcattacaaaaattgtgataacttttaatcataatactcttttttgttactaaatgtcttttttattaacaaaaatatacatatataccaaaaagaaatcttatcactaataagaatctacacatttggtgtcatgttattatttactatttagtaatcaaatttgaacctagctaaaacactaaattatatatatatatatatttatatatatatagagagaatttgaatttataaatatacaacaattaatcattatcgaaaacacatgtatttttaatttgatgataaattgtttagtgactgaaaaatatgtagtgaataatgttggggacccatttataaataattgatatataatatatataatatatggagggaggaggatatatcaaagtcatgacccattatgtgtaacatgctcttataatcactgcaacaatattttgtgatctatacctaaatcatcattgtggtcccttaattttaaggaatatatattcacataactcatcctacctaggattaagattaacaccatccaaaattatttcatccctaactattttatatatctttataggccgataatgtaatgaaaaaaaatacagaaggagaacttttatttttatagtaaaatttataaaaataaacagtttagagtaactaattatctttgtatataattagaagtgtaactatttatcattttcatttatattaactattttaaattttttgtttaaacctattagtgtaggtgtatttgctttaattatgaatcgatacaaaaatattattgtttgtgttgtatcgattacaacaattatcaaattctttatatgtgacttaaaactaattagcatccgtacactattatttactttgattatgaactgatgtacaaattatatatattatttttattttggtatcagtgacaccaactagtaaatattttaggctaattatgatttttgccccctgaattttgacatgtatcaaatcatgccccctaaacttttaaaacaattgaaaatgccccctaaactattgagannnnnnnnnnnnnnnnnnnnnnnnnnnnnnnnntcaattttactatttcaatgattgtttatgtactaaacaatg

SEQ ID NO: 38181 - DNA, 2368 bp, Cannabis sativa
gaatgctctattgggtcgctaagctcctaatagtcaggattttattttcttctatccaccactgttgtttcctccttttccacaagagctaccacttccaaatccaccgccaccacaaccattctagtttattaacgaactagactcaccgcactactatgccaatttcgagagtttatcttactttttgtttttctttttatttttctattgtgtttcaataacttatatcccataatttttctactattagtttgctaatgcatggaggacaatgcaactgataagtgtgggggaaacttatgttgacgatgactgctcatgtttgatgtctcactttcttctggtcttatgcagggtcttttgaaaaataattgggttgatgaaaaaatctttgatagtgtgatagatatgattctagaaaaatgatagaatcttatgatttgtgtacttagctccatattaattattgatcaagcttcatttttaaatttttgcgcaaaaattaaatcatcatatttgctaatatttggaaagataaatgtgtgtttgattgttaatttttctatcccaaccactctagaacttgtttgataatcatttgaggcaaaattgataaattacatataattttgagatatgatataggtaaaaaaaatttagatcaattgagcatttcaagcataccctattttgtaaattctctagttatctaatttgagtttaaatgttgaaattttatttttcttttttaaccttatacatgaatcttttgagcttttttaaaaaaaaaagtatttttcatcttttttgacaccttagtatattgatgttttatgtttgtaaaggtgcgagagttatgttgagggaaaaatattgatggttatacttaagtgataaataaaaaaaattactattcccttagaatgagtatttgtaagttgtaagtatctcgctaaaaaatggaaaattaatgagaaatatatgaacacttgcaacaatttatgtgtgggggaatagtaaatgttatgctgaaaaaaataaaataaaagagtttcaagattaaattattgagggatgtgattggggaatacaagaaagaattatttgagatagtgttgtatatatatatatatatatatatatatataaatgttatggtgagatttgagcttaaattaaccttctcgtttacctttccccccagccttacaatataagcttgtaaagtcttattaatttttagattgtgtgtgataattaagcttatggagtagatttttattcaaatacatatttattttgagatgaatatttattgtccacatgcattaattaatttgaatattagtagtatgatgagttgaatgagcgcacacatacacataagaattgagtttgaaaagtaattatttagagttgaagttttaataattgaagaattttaatttttgttaaaattataagagatatacattttttgaaactaaaattatttttcataataatcgatttatttaagcattattcattttaccaacttacttgagggcaagcaatagttaagtgtggaaaattttgataagtccatatttatcttataaatattgccaatgttatgtgttaatattttaagttaattcttcaaactgttgattaatgtgattttattttgttaggagaattgatggttaatcatatgttcagagcagtatgatgtgattttaatacattttggtggtgaacggtggaggcgggacatatcaaactaactaaatagaatgtaactgaaattttgacacatttaaaagtagaattggatttggaactcaacatgaaaattttatatctcgttcttaaatttttaaaacatctcgaatcgttccattttgagaaatattgaagaagttatgggtaaaatactgatatgagcacgcgacagtaaaaaccagggaaggagcgcccatgtgccacttatactccacccaggcactcgggtctgcatgatttatgaaaaaattaatttttgagtttaaattgggtttatttttagggttctatatataagatttttagagtttattttcagaaagttttttattacgcttttgaaggaaagaacttaagagagaaggagaatctaaatccacgtctagtttttcttcttaaaatcttttaatttttctttttatttataattatgcttgtgcttatgtttaagattatggagtagtcattcttttaggttaagggttatttcaaaactagaaacatgatttcttaaatgttgattaatattattgttttatttcttcatattgaattgtttatatttttctatgcttaattttatgattaatattttgat

SEQ ID NO: 38182 - DNA, 2695 bp, Cannabis sativa
agtgaagaccgttgttggaatgtggatatggttaaaaaatggttcaaccgtaatgatgcgaaggccatcctcaacattcaactctcagaggatggtgttaaggatgactggatgtggatgggggaaccaggtggtctgttctcaattaaatcagcttgccgtttagttaggggaggaaccacaatcatccctgctgaaaaaaaatggaagatgatatggaattcgacagttcaccccagattgaagctcatttggtggcagctggagagagacgcttttccaaccagaggtaaattagcaaattttatggaattgaataatgtatactaccctatgtgtggagaggagatggagaccatttttcacctgatgtggaaatgcaccttggccaaagtcatctggtttaactcctcaatgggaatacgagtggatcgagtggatatgaatgactgggagcagtggaaggagtggttttcagtggataattacagacccccaaacatatctgttatggagattattgttactgcgctctgtgtggtggaaactatgtagaaagaacggaactctattgttcacgggcaatctataaacacgatttcgaaggtgatatctaacaccaacagcaaaattaaagatcactttcatgtcaccttcaatgccgtggatgaattttgttcgtggctctgttgcaactgtgacattgcttgcgatgaggagggattggtggcagcaactgtggttcgaaatgacaaaggaactatagtcatcatcaaaaccgagagaagtcaaataacaaatcctctgataggggaagctcttgcggtgtgtatgacagctgaattgattgtagagaggatgattgagcatgttgtgttccaaagtgataacatggatgtagtcaaagcattctccacagaggctgaaagggatatcaattttaaattggtacatataagaagacgattccatcagctctgtcgaaggtttaacaattagggaattggccatgtgcctagaaggtgtaatttcacggctcataacattgcgaaatgggaaagggaggctggtgtcacaggaattactcattgcagtgagttggaccatgaggtgctaaatgactatattgagtggaagaagcatgcaggctaaggcgttgctggaagatctgttttttcttaccttgctgtgctagtctcatttggttattttcagtagttttcatttccttttttactgcttatgcttaattctagtgtttttttagttctctgttatgtagacgttgtaatactttgtttttaatgcattggtttcaggtgttttaacaccctcttctttataaaaaaaaacaatagatatttttttaaaaataacattctagcaaaaaaaaaaacttgtcacatttggaaataaacattcagcttccacgtcagctgccttatattcttctaaatttcaatcatgttaactgtttgagtcttagtattttcaatacaatttttcggttaatagctacaaatacatttagtctcacaaaccaagtaattatttgaatattaataagaagcagttggtgaacagtgacgctcaaaattgcttgtgtaagccattatacattcttattttgcaaaatatgcatatttttgtctcaacagtatggacatgagaatctaaaatatcacctttttttttcttctttctttttcaacagaatttgtttaattaattaattctataagatgaaagtcgcataaaagcaatttaaagctaaagttaggtaagattctttaactttctactaagaaaattgagagagttctgattttatttacataataatttgaagtattgttttctataattgaatttgaataattaacttgtaccgtatgtggtcgtctcattatctcatatgtttttcttttgtctgtggaataatctctcatgccattaaaaatacttactcttatcagtcaagaataaatattaaattagtcactctccaactttaccggtatttgtaatgtaaataaaaaagtcctgttattagaaaaatcgaaatagtactacatcaatgaacttacatacaattaagcaagtgttaataaatacgaaaaaaagtaggtttttcggataattttaaacagtgagttaaagttagctattctattaccattagtctttataattgttgtttattttactgtcgcaaaactaattagtagaataggcaacggtaaaaaattgtcgacaaaaaaatttaccgaaaatttaatagctgccggttttaaaccagagacaaatattccaaggcctttgaaactctgctccatcgttcaccacgaaagctccgcagatctatcttccacaatcttttgattaccacccctccctaatggcgcactccaatgttccaaccacatacctatcaaaaaaataaagacacaacaatatcattttataccatgtttcaattgtccctagtccataagactacatgcccaacattacaggattcattgaaagagaatgagaaattgctcctttgacaaaatcaacacaaaataaaagtgccacaataatatttggacagagaattttaggcttaaacctcaaatacaaatacaatataacatactgttgattcaaaaatttggacatagattttcaagccacacctacttgctagatt

SEQ ID NO: 38183 - DNA, 3262 bp, Cannabis sativa
  modified_base (3162)..(3176): a, c, t, g, unknown or other
  modified_base (3225)..(3236): a, c, t, g, unknown or other
ctgactaaccatattaagtaacaaaggactatggtcagaagaactcaattccaggttcaataactgagctgaagagaaatagaccaaccattgcttagaaacaagagcccgatcaaggcgagattcaatccaagcatccgaaccacgactcttttcccaagtaaattgatggccaataagctctaaatcactcaattcacactcttgaattgttttctgaaaaccctctataagccagttagggtaaggagcgcctccacgtttgtcttcatgagacaatatgttattgagatccccaataacacaccaaggcaaagaagaagcagtagccaatgttttcagttgatcccatgtagtcatccttgcactacggttaggctccccataaaaaccagttaaccgccacacaccttgatcaaaagaagtaacctccacatcaatgtaattatgagcaaaatggagaaggttaatgtccccattattccgccaaagcagagctacaccaccactacgcccaatagcatccaccgcaaataagccatcaaaaccaatagcaactcgaattctttccacaacttcttttcgacacaaagtttcacacagaaaaataaaattaagcttcttttcgagatttcaagtaattaaaggcttgtattttcaatatttggaaaagcaattaattgtagcctaagtatacgtagttatttctctcgtgatgattaagtatgtaattaatattaatagtgaagataatcgtcattactatttgctgacatatttgggttagagagacttattaatatgcataatttcagtaaaaatattaatgatcttattgaatgaagaatgtattttttcccctaacaatatattacttttaaatttgatcaaaatcaaattacttcccacaaattgatgataattcagatttatattcatttatgtattaaaagaaaaattaaagtaacatgtcaaataaataaataatgtgcgcacgcacacaatatagtactttgtatatatgttaatttaaatggggaccaacttaattaatgtaaatataatacaaagctaccctgggtttatattaaaatgtatattaatctctaggattataatttatatataaatgtacattattaattatactattacttgtttcaaacccaatatagtaaagactataaactgcgtttgcatgaataaaaaacgtataattattaattgattataattatttcgtggtgatctatctatggactttttatatataatgagaatataatttgaatatacagccattactagtggggctcagcgcgccccaagatttatcttatttttacagagtcatatacatctatatatatatatataaatatacatcatagatataatcatgagtactagatttgatttatgtattttaaacactatcctacaatatcctttataaaaagttttaagtagtgttgctcatttagtttatcaaaaaaagattaacatgtaaaatattagtaccattgtatatagatattgtgaacaatatcccacataaaataaatggtagagaattgagtcatatataagaatatgggctaccccatgattcccttgcggggaagagatcatatccgatattccggacaatgtccgattgaaccccatgattctcaacaatagatagctaggttttcattatcaagaaaatattaatatgctccattcatgatctttttacttttattaatttttattattgttgatcaattttcctatatatacttctttcttcctctttttcttttctttcattttcttaaagctgtaattatcatagacacgtgacttcgctctaatataaatacatatatattgaaatggttaaaattataagatttttttttctttacaaaaataggaaccttgtcttcactaaaatgtaactaaaaaaaatccctaaaaatatatatttatatatattgacttataatattatatttacaaatttaatttactactatacatattattgagaccatatgatattacttttcattatgatttagctagtgggttttgattatatattattattattattattgatatatgtctccctgttaggggtgtttattctgtatgccttttggggatattctttggatatatttcgtatttcctcgtatatatatttatttaataaatgacttctttcaacaaattaattagttggcataaatgatcaaggtggcaatctatttgatatataaaaatacatacaaatatatatatatatatatatatatttggatatttatatggttttattcttaataataattagttgcccatgcggctatgccctaaatttattttcttgctaagtaaaagaattattatatatacgtgcttacaaactggattaatggaagaagatcatttatagagagtctacatcgaatacaagttgcaaatagttgacaatccacaatattacttgatctatggaatgtttcttttttgaaatatctgcaagatttttttggtgaatccagtatattctccaggtattataattaatcatatatatatatatatatatatatgagtatatactcaattgttggctattctattaattaatattttatccataatattctttgaaaaaaaaaatgtacaaacataccaatttgaaataaatatatatttgaatagaaatatacctaaatgtgtcatattactaaactattacaaaattaacctttagaggtaattatttggtaataactaataattaagaaaaaagttaaatcatcgatataatgagaatcgttggtagacgacatatgtcatcagttatttagtaataactactgtcatacatcattggcagacgcccgtcatgatatggcatttgttaccaaataattggtgccataagattttataaccttgattgaagattcatttcttcatcttcctcatttttcatcccagatcgaaaccctggaaaccatcaatgtccaccacttaaatagtcgaggtttagtcattttagggcctttttactcatttttttaaaaaaaaaaaaatctcatttttagtacctaaacactacatattgttagtattatactacaaaaaactgctactttnnnnnnnnnnnnnnnagtcacaacataatttttttgtgaatagtcacaacaaaatgttacttgnnnnnnnnnnnnagtatttagttacaagttgtcactaa

SEQ ID NO: 38184 - DNA, 2940 bp, Cannabis sativa
  modified_base (1280)..(1280): a, c, t, g, unknown or other
ataaccaacgggataggcttttgaaaatgcactcagaaatgttttcctcccaactgactctaaatggcataatctaattctataccaacgatttttatacaaaaattgtctctaaaagtcaattttcaatagacgggtatttttacaccctttagcttcccttattatgaaacttgttgaaaaaagcctctaaagagttattttatagtagtgcgccatgtatgtaatttaaaataaaaataattaatatatatatgtatatattagaaaatcaattagctatttttataaaaaataaacaaatcttaaagccttttaattttttttctgtcaaattacatatgtggccctaatatgtgaaaataactaaacaattaggtcaatattttatagggaaagcatggattgataggtgtcaatcagctgatatgtgtagacacctcagttgcatttaaagagtgacattatgtgtacagtgtgtgtaagtagtaaaattgtaaataaataaaacttaaagtgtacaaatgtaactactgccgcgtgggagtatatatgtaataaaaaatccattttgtatttttgatgtaaaaatttctagtttctatgtgggttgctatatggattttggttgcgatttaagtctccattagttgctataaggatttttatataaaatttcgtaaaaaatgcaagacaaaaaactgttttaaggtgtaaaataaaaaaaataaaaaaataaataaaaaacctcatttttaatttatcctaatgtatattatgtatttatgttaaaaaaatatattatcatatatataatacagtcttgtttattacgatataatctcaacttttttatttgacaaattagttaggatatataactatagtaaaagactatattatgttcatatataaaaaatgttagtttgagaattaatttgaataatgttagaggtaggtggtgaaactgtactcactttaatttgccaggaggagataaactaatactagtggcaaaaataaatgaggagacatatccattaatttatagatatgagtctccctgtaattaattatctttttagttaatatataatctgttaattaggtttgtcatacatttttctctccaaatactaaatatttcgatcttgtttagtccatgtgcataactgttaataaattaattaagtcaaatcgtgcataaaaaacttaattatcaatagtctctatgttcttggagatcaaggaaaacatataatattatattatatatatanatatatatatatattaatatatggaacttggataccacgtcttagatgtgttatatatttgaaaattaaacatactaagttcatcatcagttcgatccataatcaaatactatacattaaacaatgaaaaccaagaagaaagctgcccctcctaacaaaaataatcacaatatcgaaaactgtagatcatcatggccaaatctcccgcaacgtctcatcaaacacttagagaaacattcatctctaatgccaacaatcaactttggcagcgtaacaaagtcatggagatctcacacgaacaagcgacactactgcaacattaatcataagcatcatcaacaaacacaatcttataattggctaagcgaatccgatgatcacaactacaatcgaaaccaagtcaaaaagcctcaactgtgcaagatatcgtttcctttttaccacgtgaactccagttggtattttaggaagaaagagttgaaaccatttccttggctaaacttttggggttgttgttatggtcatttggtggtgcaaagggttgataagatgtctcaaataaatattttcaatcccattcaacaaaattgtagttatggttggagtgttgagaatttaggggacaatattcccatcaaaggtgtggcattatggtcttcaccttctgattatgattataagaaaagttgtgtcatgatggtggtgactgggatttcctctccagctttcatgttttattggctgagaggaaaacccgattcccatgattggatcaaacaagattgtccgcttgttgatccacatgaagaatactttcaaagcaaaaaaagtgatcgtaatcaaccattcatgcggtttacaaatgcgattggagtcaatggaaagctctatgctttaagctcacaaggaacgcttgtggtgatcgagcatgtggttgacatctttgaaatcaccggtgttgggaaagcgagagccattccttctgtactttgtaagggttttagggagtgcttgatagaatgtgatggtgaaattctgcttgtgtttcttgtttttggggaacaagatggagttgtggatggtgttgaggtttataagctttgtttggatgatttatctttgatcaaaatgaagagtttgggtgagaagacattgtttgtgggcagtgattgttgtgttttagttgatgctgataaggttggttgtaggggcaattgtgtgtatttcagagagcaaagagagggtgacatggatggttggttagaatatgacatgaaagtgggtgaaatttcttcagtgtggagtcatagtaccaccaaatgtgtagagtgggatgaacctattgcagaagatgatgatccagatcttaaaagaaatagagaaataataggctacccacataagtacaaatatttatggtaaagatattgtatgtgcttaactaataagaaatgttgttgatgttacttacttgttttttaaaatatgacttatgtattttttttccaatgtgttaaaatagtcttcaaactattgacattattgtataaatggtctttttgttaacttttttttgaaaagcttcaatccattaaactgccaaatcggcaagaataagagtttgaagagcagcaggtgctgtcccttctacaaaattaca

SEQ ID NO: 38185 - DNA, 2131 bp, Cannabis sativa
  modified_base (1033)..(1033): a, c, t, g, unknown or other
aatcttaatagttcaggaggaattcttaacagccaaaaaagtttaggaggcatgatttagtacatgtcaaaattcggggagaaaaattactaattagccttataattatattcacacactaaatttaaataacattaattttaaatttcttattgaaaaaaagttatactaacttttaaaataacaaaattataattaaactatctaatataaaattaaaataaatgttgagctactgctaccggtttcagaggaggaagttcgcaaaacgttgtttcaaatgcatctagacaaatctccaagccccgatggaacgactccaggtttttttcagaagacttggccaattgtaaaaggagacattatcaaaatgataaggaagttttttcaccatggtttatttcctccaaatctatataaaactattctggttttaatccctaaaaagaagcatcctatggatatgggagatttgagacccattgctttatgcaacgtgttatataagattgtgtccaaagtggtggctaatagacttaagaacgttatgccaactatcatatctgacactcaaagtgcgttcttataaggtcgtttaatttcggataatattatgattgcttatgagactatgcatcatttgaaaagaaaacgaagagggagggatggctatatggctctcaaacttgatgttagtaaagcctatgataaacttgagtggggttatctccgtgctatgatggtaaggatgggctttgatgggtgatggataaacttggttatgcaatgtgtttgttctgactcgtataccatcttgcatggtgggaaggagttgggacttattgctgctcaacggggtttgcgtcaaggtgattcgttatcgccttatctctttattttatgtgttgaaggcttctctagtttgttgtgaagttatgagcaaagtggtttgctcacgggttgtaagattgctcgaggtgtgcttgcggacgatagttatatttattgtaaagctactgaggaagaagcacanaatgttaaggagcttttgcacacttatgaggtggcttcgggtcaaagaattaattttgctaagtcctccgtgctcttcaaccataatacaaattgtgatcttcgggatgttatttgtgcttcgttggaaatctatgaagctgatgaaaatgggtactatctaggccttccatgttcgattaggaggaacaagaatgctatcctcgggtttcttaaggacaagcttcgtaagaggattcaaggttgggagggttgtttattgtctcgtgcggggaaggaggtcttgttgaaatctgtagctcaagccttgccaaattatgccatgaatgttttcttttggctttggaaacttgtatggagttagaaagacttatggctaagtttttgtggcattcagattctagtaatgggaagggtataaactggatgagttgggataggttgtgtcgtcataagcatgcagggggattgggtttcagatgtttgagagactttaatttggctcttctagggaagcaattctggtgacttttggtgaatgacagttcgttggtcagtaggatttacaaggcaaagtactatgcacatgatagtgtattctcaactgaattgggagataacccaagctttatttgacgaagcatcatggaagctagaagcctgatatactcgggaactcgaacgactattgctaatgggaagaatgtctcaattcttgatgacccttggctccctcataacactaatggctttgttgaaataagggatcctgcccttgttaataaaactattagttgcctttttaagatggatactcgggcttgggatgaagatgtggtaagagatctctttgtggctcgggaccaagacctgatatttagcattcagcttagtgactcggctgttagagatggttagagttggaagcttgagtcttgtggccagtattcagttaaaagtgcttataagttcttgcaggaaacatgggcctcactagttacaattttgccactttatttcaaccatttgttcttctttcaataatgccatattttctaattgtaatcctataaacgtcaaaagtatttatttaataatt

SEQ ID NO: 38186 - DNA, 1908 bp, Cannabis sativa
atatttaacgttataacgttataacgttatttttgtaaatttgtaaaaagtttaaagtttccttttcctaatatagtatattcctaaaaaaatcccttcatacaatctaattataaaaaaccaatcaaatctaattacattgttttacttattttaaatttttagttacattgcactcgtaataatgatatttttatagattattaaatttaaataaatagtgataattagctttgacgtgaattttgaagcataattgaatcagatataattttttaaatttaattactaattagaattgaatgtgaaaaaaaaaattgaatgggatccccatcctaaaatataacataccataataaacattttttttcccactaaggtataactttatatttttatttatatatttattatttaatataacctttatatgctaacatagttctgttcacctttttatttttttattaaaataaaattttattttaccaagtacaattttgtaaaaattagacataatatagcttatcggagatgttctaataatacatcgctttactttactactgttcattgtaaacaaaaaaacaatattctggtgtgtaaaaaaaaatgtaacagatgtttcctttccatatactaattggcagatccataagactggccaatgatgtttccttcgtagttttacggttagtcatgcttgacagtatgtgtagcttcatgaattaaatcatagatttatttcttattaagagaaaaacaaaaaaagaaaaaaagaaaacataaatttaatggtttattgatcttaatctgtttcatattcagtctctactaaaaatacaataattaaaattctctctagaaaacaaacataattaaaaatactattatgtcgaaaataggaagaccttttattagcaaatctagttgatctaggtagtttcttcactaactgagaaaactaaatcattttcactttatcagaaggaaggaaacgaaaaaaaaaaataaagcctatgtgatagaaaaataaatacttttaacgccaaatgtattcaaatcaaacttataataatcattgatccagaaatgaataagaaattacaatatgggagaattcatagtaccagaagagagcgaacaatccatgaccggaaaaagagataattatattcattgaaacaataaataagaaaagaaaaagttcagtaaaaaaaaacaattaaaaagaaaaagatggtaacagatgttttcttctcatatataatttttttttacaataaaattgtgatcgatgaaagagatcaggaaaccgtagacatggcgaaaaagagaatataggaatcagcgtctgatgtgcttgaccttgaaccagcctttcttgcaggagtttgagacgaccctaactcccttctttagcaagtgcttgagctctctggctctctgcttcacttgatgctcaaaccctgacatactgtaattgtagtatttcttttcttggagaagaagaaagaaagaaagaaggttttgagatttggggtttaatttgcagactgtggagatctgaaagtttggctcaagctcatatatagagagaaaataaaggaaggatgagcggtggatttgggtttttgaaaaaggaaagtctagtccagattttagtaacgaaaccatcgtgggatccaacgcattttcggatgacacgtggcagatatttgtgctatttggtattgatatttatctcggttcgcacgtgacagcgtatcgacgttgattgcgggataagcattgggtacctaaagcaattttttttttcttttttaaaaaataaaatcatttaatttgtggtctgatatttttcttttgagaggttaattgttgttgctttttctttttttttttttt

SEQ ID NO: 38187 - DNA, 1428 bp, Cannabis sativa
acctccaaccaaacgccacctaatccaattgaattagagagaaaagaaatagaaaagttctcctcctattttataaaaaattcttttccattttctaactactttatttttattttattttattaattaaaaattaaaaaagataaatatatccttcgaaaagctgtaaaaaaaaatacttatactttttaacaatgataatttagtcaaattttatcattttaattatctttcctagttatgtacacaaaataaaatgatatttaatttttttttgaatagtttagtaaacaacataataaaatattgtctaattattttatatttttaactcatttatttgtcttattgattattcagattccaattaaagtttaataattaaaagagtaaattagatggtattttcaagttagtgtatctcacttttaggtgctcttcaatattctataatttataccctcttttacattatttcttccaattacaccccctcccttttcattcttaactttcatctatctgaaactttaagaaaaaaacaaaattctttgaaattaatttcgtaaccattttattgtcagagctatggcagaggtagccatgtgatcatccctttataaatatagttgctgacctgagtcgtgtggagaggaattttttattttttttgactgtgagggtattttgggaacaacattcataaaaagaggtatattttaattaaagttagatttaatgtagatttagttaagtgataaaaagaaagaggtattcttcaacatgtcgctaattaaaatgtcattcaattaaaatgatttttcctatcattttagtgtaatgactattccattttgaaaataaattaaataaaaattattctaatagaagattagaaaaaatttaataattttttttaatcaattttcttatgactttttaaatttgattcaattttattcctatttttatatattctcgttcacattcttattctaatactttttcattcttatttcatacaacaaaatgcctcttacgtttttatatgtattttagtttataataaataggtaatatacatgaaacatatgaatgattaagcactataaattcccaaacaagaatatcctttacttaaaagccctatcaaaagacacatgaattagcaaaattaatgtatgttcatacaaaagcaataacctaaagttaacaaacaaaacccctattttataggactataaaagcaacattaatcaattaagctaaacaacgagataacaaataattagctatacgaaaaatgaggaatgctaccgtcaatctcctctcctgttacaacttcttaatcaacctctacgctagaaaacatgtcgggatatttttttttaaaattttttttcacgagagtgttcgttatgcttacaa

SEQ ID NO: 38188 - DNA, 1005 bp, Cannabis sativa
ttactaaataagactcattgtcgttggctaaaagcgaggtcaacaatacctaaccttggaactgatctaacatcggaccaccatcagacctctatcgaacaccatcaagctagacgaaaaaaaatagaaaccaaaaaaatgtaaaaaacttgaccaacaactatttccacacaaataaatagcataaaacagcaacaactaacagatcgaccatctaaacaacattataaactaaatataagaaccaagaacaagattaactaaagaaaaatcattacccattgaattcgtatataatgctctgtctgaaaaaataactactaccaaagtatcgagcttgtagtatagtttgtatcaaaatttgtgttatttggtaataaaatgagtgaagagaatgaggtttgtgagtgggcaagattgagggtgagagaagagctgtgtgaagagaagggaagagagagatggaaatgttgtgtttttgggctacagaagtattatggagattaaaattaaaattgatccaatctctacaaaaaaaaaaaaaaaaaagttgatccaatctcttaatattacacaatatgaatttaagagaataattttcaattaatatatgcatagaaatttaaatttttggaaagaaagatcgatactataatatatataaatgtgacatgcgaataaatatatatatatatataaaaaatataaataggaaagacaaatatgaaaacattagctattctttaaaggtggatttttggtgttaaaaataaaaaaaaaaaaaaatataaaacttaatttttcatataaactttgttaagtcaatatttttttttcataaaattattttcatgccaaacatataagaaattgatttcttttttgccataatttttttttttctacattttcctttactctttctttccctaccaaaatgcaacttccaaaatataatctaaaaaaaaaagaaaaattatttagaataaagagagagagagagag

SEQ ID NO: 38189 - DNA, 4124 bp, Cannabis sativa
attggaggtgaaatattttccaaccaaatatcgataaaattgtattaagttaatttagttaacatgtacaggtctttttctttatagtgatttttttttttttttgtttcaaaagtgttacttttggtaaaaaaaaaatcaagataaatttggtgaggtaatatataaaatgattatatatatatatataaatgtaacagtaggtgacaaattatacgttactcaactacttattgccactgaatgtttttggttttagctcattaattaacttttttcttttcacttttttttacaaagaaatatggaaaataaaagggccttatcactaaccaaaaatgtgcaaggcaatctttttaccagctaataaataaattctgaccacaaatattatagaacacaacaaacaagagtcacaagagttatatatacctaccaaattattcctatatagctatatatatagaccatatagctagcctaattaattagttgaaattaattaatgcatggttaataatatatatgattttattacttggtttaattggtgatattaattaaaccattcatttgcacataaataacatgtaattacgaatggaaggcaaatgttgttgatacaattttgatgttactaatttggtgaggaaaatgacttgaagaaaactatactattaattaattactctggagtctactcactaattgcaattttcattctatatagctataaatatatatatgaatttgtgagtcagatctaagcaatgttttacttgaaaaaattacaggtatatatacatatatatcttttattatatatattggggttttacgtaaatatttatttattatttttgctatttttatatttttattgttatactttttttttactaattggtattaataacttagttttaagttagctagttggtaagattaataattaagatttaaagcagtttatgcacaggatatataaacaatagttatacagaaaaattatatatattcttttagtagtgctacaagacagtaagaaatcagggtgattagcaccacttagaagtggcgctttgcgattggttagtaatattctataaaaattattattataaattatataagactcgatacttaattgtatcagtaaaaaatattattagacaccatgtatcatttaacatttctctcttttttgtttgactgttttttcagaaaacaaattagcaatttatggtatttgctaattataatagatagatattatttcatacagttctgtaacaatttgttacaattcagtaaatattgttttacaaaattagaatgtattattgtgttataatataaacttgtacatttttgttaaaaaacattcatttcactaaatttataaaattttgttatcagcataataagcatatttattttttttttttctaaattctgtatttttggtattctttctcaaaagttttgatatttttaataacctttccataattatatatgcttgtatatatagtaacatatattcatgaaggagaagatatacatgcattataaattgtgctatgttatgtatttatgaaagtacatgcaataatttatatatgctaattaattagtagggtatactaataaaataatatatatattaacctctcttaggtgcttcttgtatataaatactggaaattacaatattactatagaggaatatatatatatataatatcctaattaataataacctatttcttcattagtttatgttatcttttcaatattttcatgtgatatctacagaacactacacatgcacactataccatatatatcttactgcaatattttaaaaaaaaagttatgaatacacaaaaacacacattgatatatctatacttataatatatagatctagtaaactcttatatataggtagagttatataacagacaaaaagtcttatctattataaggaataatacataacttataggtgttataaattcttacttattttaggagataattaatgatacatagcagtggattttggctttctctatactcttaatattatatatataaatatttaattattatttataaatttgtatatatacatatatatctgtataaagaatttgtacctctcttaatcactaatttggaaatcctgcaaaagtggtcatatctagagtaaaattaatgtgatattttaacatttagctcatagtcatgcatatgtagatatatatatatatttataatgtatatatgcatatatatatatatatgtataataaagtaaaaaatacgaataatttattaactctatataattatatattattggaatcctatacgatcatcatcattccttgtatatattaattattttagttaaatgttagttatttgtgtaatttttatttaattaatcagaaataattatcaacccttcaaatttaagtttgtcattttattttattttctgtttaaaaactcgatttgactgttaattgccaatagcaagttaattataaagcattcatcagtaaaagttcatgtaaagatcatatatatatataattaaagtattagttcagtaattttacaactttgaatattttaattatatacataacaggacagaaaatacgacaacaaatcaacatcgtaattgctaaggttaaactggacactacttgcatgtacatgaatatatatatacatataaattaatgtattagatatatttatatagataaattaaagaaaaatgaccgataaatatttatagatatattaagaaaaaaaaagtgtagaagagagcatcttatatcacaatcaagacagatttttatttatataaaaaacaattattattattattattacaacaagtgtgttgtgtgtgtagaagagagacctttattttcatatataattatcataagtaataattaattaaaataatgtgtgaaagtaccaaaataccccttggggcgcgtgcaaagacgcgtttgtgtatagcatggtgggggggtgacgggagagaaagggtttgtattgtcaggacgttaaaaagagaagaaaagtggatacgaaataagagaaggagaaatcaaagtaatatatactataagttacagtaactaattaagtactactttatcagttgcactaacagtaacattgtatattacactcatatatacctatcaagttttaaccttacaataagaatttggtaatttatttaacagtatctctaattttactttctaaacatacttcttaattaaaataaaaagttaaactcaaaaaaaaaaaaaaaaaattagattcaaccattaaaaaattagctttataatataatagagaattaatagggagtttcttatttttttgctaatattttaactaaaagtactattattacttttctattattttataaaattaatttatatttaacaaatttaaaatataaaatattattaaaataattaaatataaattaaagtagggagtataattgcagtaataataataaaaatactctctatttttagttaaaaaaatagagagtagagatactctaagtgtgtaataattgaaatctattaaaaaagtaaacttgtatgagtgattcatataaaactcgaattaccaagtcttaacttcataataaaattttggtaattaattcggttaatattatgtgtgtaattgaaattaattttctttgtttatatttaaaagaactgtgacaataattggaaagcaataataaaatgctaagagaaatgctatagcaaattaagtatgatatcgtatattttaatttaataattattataaaaacggtatcattagcttaaaagtgtcaatataaatattggacattattaatggctaataacaatatgtaatattgtaataattaatgaaacttttgattcataaaaaaaaatgaaattaaaagaaaaaattaatttttttttctttattctattaccccaaccaaacaaaccctaatgcatttgattattagttgtgggtaatattagaatggaaaggaagggtaaataccattttggacc

SEQ ID NO: 38190 - DNA, 5947 bp, Cannabis sativa
ataaagttcaattttaaagcctccaacaatgaggttgaatatgaagctctaattggtggccccaagttagcacacgaagtgtggtcagattaccatatacaatgactcccagttggatgttaatcatgtcctaggtgaatatacagcctaaggagaaaaaatgatagcctatttgagcaagatttaagacttaataagttagctcaaaggctacactatagggcaagtccctagagaagagaatgcaacaactgatgcactagcacgtctaatcaccaacaccgtgataggcaaggcaaacttggtgcccattcagttcttaaaagaattgagcatcactatttcagaagaaatacacatgatggatgacaaccatagcgacatatctccggacaggaatcttgccagaaaacaagaatgaagcaagaacaatgaggaggaaaactgctaggtatctaatcctggacgaggttatgtacagatgtggtttattaacgccacttcttaaatgtgtcaccaagtcagaagctaaacaattattaatagaagtgcatgaatgcttctttgacaatcatggcgggggacaacgcctatccaaaaagatacttaggcaagggtacttttgacttactatgaccaagaagtgaaccacaccttgctggccgaatactttgacgaattagcagaaaaagagaccaagccaacttaaagttgcatgcctaccaacaaaaagctgccaggtacttcaataaacaagtcaacgagagaaaattctttttaggagactaagtgcttcgaagagtattccttaatatcaaagatcttatagcaggagcatttggaccaaactggaaaggtccataacatgttatagagataacaaataaaggtacatataagcttgataggtgcaatgagaacatgaaattagttctcttaccgaggtactggaatggagaacatctcagaaagtactaccagtgaccaacttataaaacattactattcagtagtggttcctatacaactcactgtacaagaattagtataaaagagctaagttttcaccactcttcagtggtggcccctgcctgacatgtcgcctaggggtagccaaaataatgaataaaagcaaactttataattgtaagcttttattatcaaaaaatgtatgttgcacaacatcaacacataagtaagaccaataaatggataaaagagtttctctttccagattgtgtaaaccaacttgctaacaagataacttcttaaagttagtctttatttttagttcaacatgtgtacaagcaggtccctccaagaaaatatacaggcaaaggtctatagtacttggtgaattacaaatgaccaagagaccataagtctgctcaatcacttgggggacccataccatacaacatcgaacaagcataactaaacataagcaaaatttaaagctttgataagaaaataaattaaaagctaagtaagtgcaaatggcataatttagattagacataaaaagcataagtccgagattaaaaggtgcctagtcagctacatgtctaacaaaaaaagtcaaagccaagattaaagatcgcctgatcagctgcctattcaaaagtaaagggccctaaggccaaacaagaataaaaatatcatctattcaaaagtaaaaggcttaaaggccatacaagaacaaaagatgaattatgcaaaataaaagcataaaaacaaacaacaaagtcctcaaatgtcttcagaataataactggagttggcaggttcatatcagatggactagctatccagactaagtatgtcttcgtcaatccgattgtcaccttcctaaaagtcgtgcggattcatctctgtaagaaggtggagggaggtgaacaaccagaaaacataaaaagacgtagacaaaagacaagttaattggccaaaacctatgggtattatccagacaaccttgaaatacaaagccaataattagcaaagtataaaatcaagaatcatgaaccagacaacatatgaatcaaaggccattgactcaaggaagatttagcccgagacgtatcggaaagagctcctggacggggttaagtaccagacaggcgtatacaatggatctaagtcctagatagaatgtttaggcaggatgtaagtccttgatagagttcctaggaagaaattaagtcctggacagagttcataggtaggatctaagttcttggcagagttcctaggcaggatctaagtcctggacagagttcctataaaggatctaattactagacagagttcccatacaagatctaggtattggacaaagttcctaaacaagatctaagagctggacagggtctctaacatacccaaggtaccagtctagcactcaatcttgctcatcaaaaagtcatacattatgcatcctaaagctatcaagcggattataatgtaaaaaggctactataaaatgagagaatcaaaaagtttcaaaaagctttaaaaagcttaaaactcattaatggtagattcgaagaaagaaaaaaattttaaagaagagaagatgaggaaagtaaaaggcatacatggagagagaagatcaaaggtttgaaagcgcaacatccaaaaagtccaatactctgccaaacaaggccacttggtaagagcttctgcaatcaagacaagagctgaaaagtccctatccaaacaggcgttcgaataggaacttcggagaaaatgttatcctaaatttattcaacctggcgtggtatgtccacatagtcaaaagcagaagacacgtggagaatatctcatcactaacttgccaagttagtgcgtatagccttcaacttgccagcgtagtgcctgcaacctttcaacctgcctggttagtgcatatagctttcaacctgccaaattagtgcccgtagcaattcaacctgccatgttagtctgtaaaatcttcaacatgccaggttagtgcctccaacccttcaacctacccggttagtgtgtacagcctgcaacctgctaggttagtgcgttcagccttcaacctgctaggttagtgtgtacaaccttcaacctgccatgtcagtgttcgcagtccttcaacctgccaggttggtgcgtgtaatctacaacttgccaggttagtgcgttcagccttcaacctgccagattagtgcgtacagccttcaacctgtcaggttagtacctgtaacctttcaacctacaaggttagtgcctacagcctttaacctggtaggttagtgcctgctgctttcaacctgcaagatcccatggctacacggtggacacaagcaaagacaaatccacatacctgctaacaaagtcctggctggccaagctggatagccttcatcaaggctgttcggccaggctcgacagccctcagcaaggttggctagccagaacgtgcagatagctcttaacaagctcacctacaattacaggacaagtctaacattccatgaaaatagagatattctcttaagatattagtcctatatttaatagatttaattatatttttttgtgatttaaatataagataaaaaatatattattttccctattttaaaggaatatcttcgcctatttaaattaggatcttatgtaagtcctacactatataaagggcattagatcacataaaaaatagactcaggctaggccacactcccaaatcttctttctctctcaatcctcatattctatctatgcctcatagacactaagtcaagtcttttcataagttcttaacaagatctcacaaattctttattataacatattgttctcacaattgaaatactgaaaaatagccatagctaaaaattacaaggtctaggactctaatctgcatggtattatcttatgagtgaatacaactaaaaaagaagtaggtcattacccgttcatcaagggggccgaacctgtataaatttgtgtgttatttttactttctattattcttatttacacgtagtgttaatcagtaattaataaggctccactatcagttgaccaaattttgagtcaacacaaagcatttatgaacttcaattagctttagggacactcctccaaccattaattactctgtgtaatcactcaattagtttgataataatgaatattagtgtgtaattgggcttgcttactatgacccaccttagatggaaatctataaatagcgtcatcactccactgtatagaggatcttgaatttcgatctcaagctatttcgctaccaaaatttcaagaacccccattgttgtaatttctccaagtaactctgatacagtgactcgtagtctaagattaattaacgctcaaccacgtaaaaatctcttctttaatttttctctaaaaatttcgtcaatctctaaagtcttcgtaattgtttggtcaccaaaaaacttggtcagcatataggtgtatgcttgacccatacatggcccatttaataaatgtgtcaacaaaataacacctaaacaggtcggtatattacgacccgtgtaatccgtttgtaaatagatattattataaaaattcaattcattaatctattaatgatcagtttagcacgtttatgacatatatattaatacatttatgatttatttataattgtaaaagttctaaataaattttaaatatgtcattaacgagtcaattttgtatcaactgtgtcaaccccaatatgacgttaattcaaaaatgatctaaacccatttaaaacaaactcaaatctttaaatttcatctgattttcaagtcatgatatcgaatctgacccatttaatgtttgaatatttttctcatatcaaaacaattcaatttgctatttgtctatgagctttttcataactatttttttttttctttttcccctaaattatcagattaaagaaaatagtcgaaccattttagtaataagtttgtttgttttactacaataggttattcttaatgaatctttccacacacacaaaaaaaatgaagtaatttatagtattcataacaaaaagtaattcaataattgttagcgacaacaaaatgtattccaaaatgtattctttttttttttttttttttgaaacgaacaacatgtattcaataaccaatcaaaatgagaatgagtaactaagctttgatttaattcgacgatatgcataattgtagtgccttaataatgaacttttaagtgtttcccactactcatgaaaactgtccatagaaattgcaattgaaaaaataaattaagtaataaaagaggtcggttgactaattagctaattggctctcctaaaaaatacttggtctataatttttttcagcggttttcctactaacattatgagcattatattatagccactctggcaaaggttcttcattcattaattaattaattattatgatagtcgaccaccattatattatataatattataatttcaagaaaacaacattcaactacaattccatgtccaattaaaaaataataaatttgtgtggaatataataaactaaaacccatagacagcacaacccagattttttcatcagaattgctacactagtgctcattttaaaattaatattcgattgaaacaaaaaaagaacaattaattaagctgtcacattctatttttggagaataataattatatacaatttacacaactaagaactacaattttttgttttgttttttcatccacgtaaggataaagctagctagctcaggggcaaatttgtccgaacaacagaccaacttaaagaatttccagttttttagttactttctttgaattcagtaactacgaacgggaccttcgggttctagcggcgaaaccctaatgactacttcttgaaccgccggtggcggggacggaagcgattccgaa

SEQ ID NO: 38191 - DNA, 3422 bp, Cannabis sativa
aaaaatattaaaatattacacattatttattatttaacatatttaatattattatctaaaactctaacaaattagaaaaattgtgctaatatactaaaaaataaaatataaactataaaatattattaaaaagataaataaaatataagatggtaccgtcagagcaaggagtgtcatccccgtcctattttatattcggagacaaaaaataatctccattcccgcctcataagtaaggatgtaaatggggcgggtcgggcccgacccactaccgacctaccgcggcccgactcattaagttttttgagttggggcagatcaaacttaactccgtttattcgggtcgggtttgacccagcccaaatctttttccctttgtttaaactaacatttttaaaaaaaattatatacattacattataattgtactaaaacttgtttacactaaaagtagccctagtgacgtaaatataaatgtttgacacgtggcaagaatgaaaatattctcaaaatgaaggaactcgagttatagcagtcaacttggaaaagggtccctagccctgcgcctaggttgacttcgaggttctggaacttccaatttgtttcaaagtcaccatcctttaatattcttagtaatgaagacatgaagaattcaagtccaggtctgaaagttgaaaatacacaaaacagcaccccccaaagtcaatctaggtgcctagggtttcaccaatcgcccatgttgacattccaactaggatttcagtttctgggaccgtcttagtgaaaatgggtcaaactttgtactaggacatgaattagacatgtcacgaacatatttgagacatcagaatcagattcggagcactttcattttttaacacccggagcaccaagtgccccaaacacctagtgctcaagttgacatattgtcaacctgggacacttccaagcaccaaactgaagaactatcctgagcattttctttgtcttcataaaaaacgaggaaacaagtacttttgggggagaaacatatcaaactggaggccagaatgagggcccaacccctaggttgccacttggtgttagcccagcgcccaggttgacattttatcaacataggcaatttctaaggagctttcccgagaagtcttctaggaatattctccattttcatcaaagattaagatacaagtattttcgagaattaaacggagccatttggtggcctaaaattagacccattgcccatgttaacacctggagctgggctttttccaatcatatttctgaaaaagtgtttcaaatattttttcatcatcacaaataatgaacaagtaaactcggggagaaaacgagaatcccaaggggcaaaaaactgagcccaacaccgaagttgacaattaaccttgtgcgctggcttcgatcactcaaatgcaaattttgatccgagtattctctccagaatggtcaaaaatgagataggagaacgttttctcaatttcaagaaccttggaagtatcaaaataatatccccgaagctccaagaagagaacgcaacatccaggttaacgtatgacctagtgcgctaggtttttcttatttgattttgattctgtctcgagcattcatctagtttttcatagtaaacgagagctatgaacccagacaagtgaaattcacaactttgtatttttactttgttagcaaagtgactaagtcgcaaattgggtagtttcgagtctctcgatttcacgaaacaacaacatcttcgagaattggtaaaagactttaccaaaaaaaaagaaattgactaagtggtgtcaaaataccacttaggcatcaaaaaatacatcccaacacattttccactcacctagcatccaggtcaacgtcatatgtcaatctcgacattggttgtcaacttgggcactgggctatcaacctaggtgctggtataagagtagcctttggtaaaatgaccataactcacttaatattaatttaattattgtaattcaacttgcattttgaagctatttcaatgctccatcaagtcatgtctcacactccaatctcaattttgaagttatcaactccaaattttatcctcaaaagagttataaatttaagctataacttactcgaagtgagtgttggggtgcgactcaagctccaaaaattaacaactgacctttggagttaatttcaccgttcgattatcatcaaatgttaaaaatatcttaaatgtatttgttcatatttttgtttatattttattataattattttaatatgacctcattccctataaaaagagagcttatctagttcatttttcacatttagaaaaatatcccataaggtcaaatcatctctctttagtttctctctctagaaattagagcttttacacttagtcatttctcttgtaattctcgtgaaaaataaaaattcgaagtagacgtagctagcttcattacgtcgtgacatggggtatgaactactataagttatgtgtgtctctctatttactctactcatcgctatttttatttcgacaatctagtgagcagatattgactactttttagcgtctaacaaaactaaatataattttttagcaaaactactgatattttgtttctaacatacttatgcacatatttatgtaagtattattattataactagatgaagaagaatatgagtagagaagaagaagatagacccatctttataataatatttgaaccgaggcaggtaagcgctgacctacaaaaaaattgagtcgggccatattgggctagtgattcggaacatttaggtcgcggccccgacctgacctacgaaatagcccatttaaccatccttactcataagcgagtcctgcgggcagggccgactcaagggtggggcagtagaggcccatgccctatgtcccccgcctaagcccaaataaccatttgacaaaaaggtcccaaatttattttttttaaaatatcatattttgtattttaactattatttattaaaaaaataattaatttaattttttaagatactacattaatattttattaagataaaaagtctaagtatattttcaaaatattatattttacatttttaccactacatacacaaaaaatataaaaagaaatttaaataaaaaacagatattcaattagatttttttaactaagacccgcaattaacttgagacgaatcacgggacatcctcatagagaaaatatgcaattattgttgtgataattcaacaaacaagcctttgaagctcttgttgttgttgttgttgttgttgttgttgttttttttctttttgacaatgaactttcattgaatataatcagagtttagtacatcatagagaaatggaggaaaatcatccatccaaactaatt

SEQ ID NO: 38192 - DNA, 1116 bp, Cannabis sativa
tgtaattggttcccaaaattatcttaaactactcgaaaatcaaattctcctgtgactttccaaacacatccttatattcataagctttttttaatttaggatttgaacccaaaacctctaatacacacgcacttttttatgactagttttcttatgactagttgctcaagtggtttatattcataagcttagatgatccatatatgacctagggttggataatagatagatatgtcactgtaatgataaagtagattctgtgattttgtgcctggtatttttgagtctgtgtgctcttgttattggtggtccaaactttaactcaaaactttatatttctttgcactcaaatcaaatttcacttttttcacattattattattactattcttttacaaaactagaatattcactttattttattactatcttaaaaataaattatatccttatttgctagtactattaagtaaaatttagaagtacattatacataggtacaataattgtagtaggcagttccactccacagatcttttgttattttctggctttttattttttattttttatgatatgggttcttcttatcaaataaacccataatacaaaatttgaacataatttaatttacaattgacaataattaggtaaacgtatttgattgattcattataattactacaatttaaaagtgcaatctatcaattaagtcttcctatatctttaaatcagaagcagtttttatttatctaattatcaaaaatctactaccaatatgtatatatagagttagggagaggatttagttacataatcctagttagactcgacttgctcattaaaggcttcagtaaacttgaaaaatctacacttttgctttaactagactttacacacagatgttaaattcattaactatagatcactaacaatatggactaacacagtgggaacaaacaagaaaaagtgtattgtttgtgtatttgcttggattctgcaaaaaacagatgaaaattcgatttgcatgaacatgtaaacaaattgatgattaatttttttttggggcctaattaatatatttttattttaatgtgaatacagttagttgagaag

SEQ ID NO: 38193 - DNA, 2642 bp, Cannabis sativa
cttgcagtgatactaaacaaggctggagtgtcacttggttggatgtacttggcaatgggagtgatcattggctcagctgttcttcccattgctttcatgcttctatggagaaaagcaaatgcaattggagcaatcctaggagcaacttccggttgtgttcttgggatcataacatggctttcagtcacgaaaatcgagtatggaagggtggatctcgacacaacaggccgaaatgcaccaatgcttgcagggaaccttgtctcaatactcactggtggagcaattcatgctgtttgcagctttgtgtggcctcagaactatgattgggacacaactaagcagatcacagttgttgagaaggaaaatagtactgagcttccaggtgaagagttcaatgaggagaaattggtaaaagcaaaatcatggattgtgaaatggggtcttggatttactgctgtcattgttatattatggcctcttttcactctcccagcaggtaaatttctaacaaaagacatatttctccaagtttctatattgatgatcagttgtttatatcatttttgggttttatgcagggcaattcagtgttggatatttcacattctgggcagtcattgcagttgcatggggaaccattggctcagcagtgatcattgctttgccattaattgaaagttgggcaaccataaagagtgtcattttgggaatgttcacaaatgatagactgattgaaaaggttgatgagttaaactctaaacttcactccatcattcttgctatgccagaggcagagaagctttatcttcttgaaaaggagaaagctaagaagaaagaagcatttgagcttcatgatgactaagctaagtctttgagaacatttcatgactcgtgtcatttttgtaaataaattcatttttctttttgatttttgtaaatgaattagtgtgattttctctacgcctaaaacacttaaatatcggtatattgattgagcaaagaagacgagaaacgaagctacttctctaataaccctattgctatttttttttctttcttgtaaatgcatttttaaattttgtttgcttccttacaagaaaggccaggcttcaaagttcttgtcttttatttgctttaacattttggtagttataattttatctgtctcaaaaagctgagttgagagttattaatccacgatcaacatagtcatggccccattttttttaattgtataattattgccaaaccttaccataaaattaataattaatttatgacatataataacatttttaaatattatgaattaaaaattttatttgacctaatttaaatttattatattcaaataatttcaatctatcatctgacatttagtaacacttttatttttaattttttaatcacaaaaataaaagtaaaatttttatttataaaaacaaaaatatattttatcactatttttatttttaatttcaaaaacaaaaaataaaagtatgttctataacttttattcttaattttgattcttaattaaaaaattgaaatgaaaacagttttaaataacatatttttggaaaatatttttacttttctaattaaaaaaaatagaaaactgattaaaaaattattgccaaacgcaccctaaaaaaagtactaataatatttaattacatgcaaacaaagtttaattaattaggcctcttagctagcttcttctgattcgagttttcttcttgtttttcttcatccttattttaaaaataatcccaacttcttgatcaatgacttcctaaataataagaagaattgatgtaccaatcgaaatttttttcatcatatgtgcacgacttattttcgcattgctttttaagtttcaagaaatactgaaagtactcattaggatgaataacttgcgactcaacctgtgttaattatcataatacaatattagttagtttatatcatcacaactacgttttataccacaatcgaattaataagatgccaaatacaaataagcaagtaaattaaccttttcaattagagctaaatgagctttcctttctttgattaatcgttgtaagttcgctcttttttcattttcttctctttcatttttttctttttcactccttgtcttttcgaatatttcccgcagccttttcttcaatttctcatcgacttcaatctttgtagcttggtaacttgagttggcatgcatagattttgcatcaagaagagttttcttgagaggacattctatttttttttttttttaaaaaaaatatataggttaataatttatcattaactctacatatatatataaattaatattaattaaattaaccaataacctttttcaaatgacgaagatggaattacagtctcactcgcagaaaatatcggtttacgatatagagttgacgttttagaaatttgggatttcccgtcaataaattgtttcatttcagatttgttcagtgatcttttctgaatatgttttttagtttcggattgattctccacctatgtatagaaattaatacataaactattagaaaacgcatttatatttaatacataaaaaaaagggataattgcggcaaaaatcctcaaaaacttgaggttgatgc

SEQ ID NO: 38194 - DNA, 2296 bp, Cannabis sativa
tctgtcatggtcacatcatctcgccgagtctggttcaggcgaggttcatactcaagaggtctctcactgacatctccgcttttctcgaggagagtaagtataggcgtcattttcataagagtccgatctcgaatttctaggtaaaaaaatttcacaataatatcactttttaaattgaaatagtattaatgttaatcccctctaacgcatttagcatttaaaagtctactattttcaactaatactcagataataagcaccctattaagtgaatttttgttagaaagaatgaaaaaatataactaaaataaaaatgatactcaaatattttaaaataaaacttaataaataataaaataaaaattattttttaccatttcgaattattctctccagaacgttaataaaataattctttatttttttttgttgagaaaaatgcttttattaaacagccacaagaggcttctctaccaacaaaatggcagcagcacagtcgggcaaatcaactgtccacaaattacaggaatgagtctttcgactccaaattgctaaggcattagccacatcattacactctctatgaacaaaggaaaattgtacaaaagtaaagtgtttctgcagcatttgaatctcccgagccatcattccccagtccgaaagagatgtaggagaagattgcaaagctgagacaactcccaaacagtccgcagcaacatgaaccttctttaaagaccatctttgacccaacatcagccccattcgaatagcataaacctcagccaattggacagataacagacctagtatgaagaaagattcagcaacaatcaagttaccatcatggtctcttattactgcacttaaaccacacccaggtttgccttgaacaactgaagcatctgtgttgattaatacatggtcagggggaggaggttgccacgaccttttggggcaaacttcctgctcagaccgaatctgaaacacttccccaaagtgctcatccaacaactcttgcacccaattcacccaagcatggtcctcttgcactttatgttggaagagaaacttatttctgcgatgccaaaggagccaggagaagccaatgaagtatagcatttcagacttggataacttgccccacagagaaaaaaggacatctggagctgagggataaccttcacaaaccagatatttgaccccaaataatttccataacctttgagtctttggacaccaccaaagggcatgacaaatatcttccttttccttcttacaccaagcacaaataggatcaatagccatacctcgctttgtgagttccactttcgttgggagccattgattaaagactctccaaatgaaatttttcattttaggagttagcttggatccccaaacaaacttccaccaagccttcaatgttgctttgttcgagcattcagcaatgtccagatgtgtaaatcttagtttatagccacttgcaaccgtgtattgaccatgattgtttaggttccaagtgaaccaatcggatcttgatgtgattggagtaataccaagcacccaaggtatatcatcaacatgaatacagctgcaaacttcagaatttttccaagttccctcttcattaattagtttgtctatggtgactccttcgggaagagatactttacatcggagagagaaaggagtgcctctaggaagccaagggtcttcattaattctaatagaagagccatctccaacacaccaacgcgaccctttcattaagacatccctaccccaaagaatgcttctccaaaccgatgaaccaaagtggcctatacttgcttccaaaaaggtgccgtgaggaaagtagagggcttttaaaattttagccattaggcaatccggcatagtcaataatttccacccttgtttagccaacatagcttggttaaaatcatcaagatcacgaaacctgatacctccttgctccttaagtctacaaagttttgtccaacttccccaatggattttgtgatttttcgtagtagatccccaccaaaatctagctatcatgctttcaatatccttgagaatacctttggaaatccgaaaacaactcatgatatagcaaggaatagcttgtatcaccgctttaatcaaaacttcctttccggcttaagagaagaggcccattttccacccttggagttttgcttctaccttatccctaatcttgccaaaaacttgctgtttatttcgacccacaaatgaaggcatacccaagtatttagtatgattttcaactaaa

SEQ ID NO: 38195 - DNA, 3081 bp, Cannabis sativa
tcaaaacggtcggttttaagataggttctagattggtcggtcggtttttcggattgtaccaattgagaccgaaaaccaaattttggatttttatatagaaaaaaaccgacaaaccgactgatgctcaaccctaattgatttttatataccttcaacaaacgaaaattaacactaatttgaattgatattcaggctttcatgctctcacggaatctttagatggagttattgaaagacagaaaatgagtagcctacttgaaaattggtatcctatttttataattatatatttgaattttttttatagaagtttcagtcataattaattatcaaaatattttaaattaattaaaaaagaaaattggataaatacaagccaaccctcataacttttagtgctagaaaattttaatgaagttaaaaaaaaatgagcccctaaaacaattacattataaaaatacaaaacacaaaaaatcaatttttatatttagaacttaaatttgggtgggccctcgagtggctaaggaaaataataatggtcattaaatattttgttcattaatctaacagtctaatattatattataggaaaatacttaggtagagtcatgaaaaacgtttgtacatacaaatatttttttttactatgtgtcaccctgatatttaatactaacatttaattaattctttttatatatttttttttaaatttggagatatcaatataaggaaagttccttttcaaaaaaataataataaaaaaatataaggaaagttactttaaataataagaaaatttattaattaaatatatgatacccctattaactttaaaaaaaaaatttaaaaaataaaataataataacggtcaaaaaataaaattatcctaataaggagaggtattatagatatcttttataggagattttggtgtgagaatttttattaaaaaataaaaaaataaaaagacttggtgatagactttgtttattcggtgacttccattgatgaagttaaaaggttttctctttcattagataattaacgattggagtttagaaggaacacaattttacaataaattcttcttgtcagacactagtttcagtaagaagataaactatctcagtgcaaactgtaagatatatctattaatgtaattgtgcattgtaatttatctttatttttttttatttattattaaaaaaattatttagagtttttctttagttttttagagaggataaattacaatgcactattgttattttgttttttttaatcatttttagagttgttaggggtgtattatatattatttagttattagtaactttttttttttagaacaagtaatttttcttatattaatatcaagaaattattaaaaaaaaataatataagaggaattaattaaatattaatattaaatatgagagtgacacgtaataaaaaaaaaagtctgtatgtagagatgttttttgtgactctacttaaacattttccaatatttaatttgtaaattactattgaattaaaatctaattttttaaaaattaaggtttctaaaattgatatttaattgtagattttattttaataaccatcaatgagtaatacacattaaaaaatatttcatgtatatattttgtaaggatatatagacatatttggtcaaacgaaaattcctaaaaaagattaagataattggagaagtgcatgttggaattttatatcttaaataaggtctaatttcaacgtaattttattatcaataaaaattagaaattatatattgaacttattatatgctttgttcacatatttatttcataattatatggctattatataagttgtattaaatcttgaacaaataattatttataattatagtgatgtcatcaaagtgaaaaataattatgattatatgcttaaaatatttcgtcccgtaatttatcagtgcaacgaatttacactgacgtgataatcaacgatgtagtttacttacacttaggtaagtgaaatattttttccaaggcattagcaaagtaagacttatatcgaatgtgttagctatacatatgactggaccgatattgacagtggaaaaaatagtataaatttatcattatatcttttataagtcaatgtcacttagttaatcatagatcacattacaagaaatcagagttttgccgacgaagttaatgaatttcgtcgacaaaagtagagttttcctagcgaaataacccaatttcgctggcataagtaagccaaaaaattgtcttaaagatcaagttttgtcggtgcttaaaatcgcgggcaaaggttatttatgttggtaatataacctagttttgccgaaaaaaaataaatcaatccaaccgctaaagggcagtaaatttttggcaggctaaatgtttttgtcggtgagcctattggttttgccggcaagcctatgcgccaacaaaacttgcaaaaaaaaagtcgcaaatttcttgcactaggaattagtggctttttttggggggaaatgttttgccagtgagattcttcgccggcgaaacccttctagtattaattgaaactatatgtttcaattaatgatttttataaaggttttgccggcaaagtgaattgcacttacaaattttttttgtataaataatttttctagagccccttcttcccctttcttcttcttcttccttccctctagtttctctcctcccactttgtcctcgacctctgttgggtcgtctgcccccacttcccgtttctttatcccctttgtcgttgtccatcggtctctctctcatatctaaaaaaatctccaaaataaggaaactcattcttaagaaattagaaactaaagattgatagtgcaatctctaatctccggtaacactattttttctttaattttttttttttgtaaatatatttgtgggtatatatatttatatgtatgtggatgtatgtgttggaaattattttaccaggatcttagatctacaaacaagtatgttgattaacaccctaaatatgaactttcttaaacgatgaaataaacacata

SEQ ID NO: 38196 - DNA, 1924 bp, Cannabis sativa
  modified_base (394)..(417): a, c, t, g, unknown or other
agaaactttaaccagtgaatcaaaaaatctataatgacatgaacatgagttcatgattacttaagatttaggcaaataaaccattatcatcgttatgatattaattaagtctttatagtaaacgacatgttaggtaaagataactttatttatatcggtcactgtcaaatgtaatctatattatatacaacaccttcgttcgatgtcatcctacatccataatgaactgagattacttgcatcgaaaaataggcatcaataaatcgtagtagcaaccattggttaaagattccataattctaatatgttgctgactattttattcatgactaagtgatcctagttctctctatagctacaagtcatagccttatatatgaataagaaatttttnnnnnnnnnnnnnnnnnnnnnnnnataataaatattaataatttaatagtcatgcatatgtcgaaatgtttagctctttattgatgatcagaaatgtctttatagacttttcagggcataagccccaaaaattacatcatacttagtgtaacacatcacataagttgtaaaatggaggagatacacaatctgaaatagaatttgtagcatatgaatcaaattttggaaaatgtaatttagaacataactacattatgaagataattgaaatgagtttgtagctgttagaaatggatataatcaacattaatttcacatgtaaatgttggttttagggttatcttagagaggagattcgaaactccaaaatggaattgaagaaaggttttgggcgacatgtcacctatagtgtctatgggctacgtaagtagtgcaatgacgtattttgaaggttccaaataaatgtctctaggcgacatgtcgcctggtgccaagtgatatttctaggagtctttttttagagaaacattgtaaaacgttatgcaatcaatgaagaatgttttctactttataaccaatgtgttttctgatccctaaagctctctcacgactagtaaatgccattggtgagtgagatttgaatttcaaattaggttcttcctaaccactatatataaggtcctatagtttatccattgaaacacttctttttttccaacactaaagctagagagttcttgaagcttgataattcccagaagcatttccattaaatccctaagttttttggacaaagatgttgaacccttgtccaaagctttttggtgatccttcctcatcactcaatttggttcttcttttcatctctactcttcattattttcactatattattttcttcatctcttctacacacttctttacatatatattatatctctcttataatttatatatataaatattatatacacttttatatatatattctatttttttattatatatctcatatatatatatatatatatactctcttatatatatatacttttgtattgttttctatttacatgtattttgaattgaaactctggtccctttctcttttttatttacttgtaattttgtgcattgtgattgtaaccttatttaatcttttcgtccttgtaacttttgcatagaatcctaattgtcttggaattattttatacaccttattttattcttccattgatttatctcatatatttttaacacacaccatatatatttgatagaattctcttttgacagtttgttttgttgtttttgatgacgtttcttttcttctcactatcaaactccgcaaatatggctttctggtgctatcatgtccttggaacgtgaagagctttcacatgtaatgtaatgtcttaatatttctaaacagattttctgaaacacatgttggcataaacaaaacaagaactccttaactttttttaacacttttcaaacacagggtttgcataaacaaagatgaacacct

SEQ ID NO: 38197 - DNA, 1445 bp, Cannabis sativa
aaaaaaaaaaatcaaaacccattaaaatttaacttttaaccttcaatctaattaaatttaattataattaaatattcaattataaatttttataatttgattgtattgaatttattggattaaattgaatcaccgctcgttaacatatatttgcggcgttaagggcgagactgtaatatgtgggtccataaaacgaaaaagctgtagtggttgagctaatatgttttacaggtgtgaaatgtgaatggatgtgaggatgaatgggtttactttgtaattttgtactcaaagttcgaatgcttaaagataactacttatttcctttctttaattttttcttcttcttaatagtaattgttattatatacaaaaacaaaaaagattataagctggcaatgtctgatacgtttgtatcctcataacatcaccaatattatgatgacaatgtagattgagaatatctgacatatatagaagatgaatctattaatcttaataataataattttcgtcttatcgaaaaaaattctccatgaacaagtttattaatttaagtatttacttcgttattgttgactcagaaaaacttgaattagatttctaagttacactcgctagctagattggtgagaatgaaaaaatacgtagttaattaagttattataagataaacacaaaaaatttatagtagttcacttcatgtataatgacacaaataaaattatgtcttctttgagtttttatttctcgtgagaagatattacagaaaaagacaaagtgtcaaaaactcgaaattgtagtgagagaatatagagagaaaaaatctctcatgggtagttttttgaaagtcacaaatgactttaagggctctccttttataggtgaaggagggccacaaaattaagagaaaaatacaaattatatatttatgaccgtagaaaatgatttaacaatgagaatcaacttctggtggtgataaccatttatttcagcccagcgggtcccgctacaggtaacccgaagcttattttcataattgtcttggggtaaaaaatttgacgctgaaaactttataattaggattggagtgtgagatatgacttgatagagcattaaaatagctttaaaatacaagttgaatcgcgtcaatcagatcagtattgagtgagttatagtcgttttattgaaggtagttcatgacccagtgcccaggttgacctcccagtgctcaagttgacatctgacattaacttggacgctgggtatgtaacaccctattagtttaggcgtgttatcgtgattttcttaatattgtgcactccttgtctaatcaaaagattttatatggtaaaacgtgtataatttcaattttcataattaaactttaaacttgaatatataaatactttacataattggggatccctttttttctttaaagttac

SEQ ID NO: 38198 - DNA, 2914 bp, Cannabis sativa
ataatgcctttctttataaagacttagctattaatttgagtgttgaaacctttgtgtccacgtgtctttatccggttggtccacgtatattgggcaaactcaggggcaacacttacgatattaattatttatctttttttaattaaaaatatacaaatttgaataaaaaatgaaatcaattttttttggtaaataaataaaagcttttgttagtgaagaaatcgtaaagtaaaatatttttgctgctatttttttattagggtcatatgtgttaataaaatataaatgctaaaaaagttttaccgcaaatatctcatttaataaagtatttttaaaatatttatcatctataaatttataatatagtttgactaatttttcatgatcacacttatgatagtcatactactagatttgatctgattctgaagtaatctatgaactcatatttatagtgttatataatttttaacttacgaagtgagatttatgaaaggaaacatatgaataatgtcatagttccacaactagagaatacatatgtatagagtaaattatatggctgaggaatagttacattaaatatgtaaccattatggttatatttacttttaaccattagatcattgttaaatggttgttaaatggttatcattaattaagaaattaaaaaaaaattgtaacttgatactttatttccttttaaaaacttaattaaaattaattttatttaaaattaaattattaagaattattaattaattttatacaattggaataattaaagatttttttagcaattatttttttaacttaaataattaaaataattgcaacaaaattccttataacttaaagttcttacacacataactttaattaataaaaaatagtataaatgacctctaattacatgtaattttgtgctcaatcttattttttaacacttttaagtgccaaattagtgtggcagtccaagattggttcaaattatttagttttttttttctttttaaaaataaaaattaattgaaaaatgtaattacaactataaaattaatgattgtttactatttttgctccttgttgaaatcatcttcatcaatctaaagattgtaaaaaaatattatcaaagtagattaccaattaattgaaattcttctttttcacaaataagcataacagtattaaaatagcagcaaattattaaaaactaaggagaaatctaactggcttgttgaatagagaaataggtttgtgacatagatgtaggagattgtatctaagtggaaattcacataatgtcaggttgggacaaactgaaaccctaatttaataaaaaaaaattataaagaaggaagatgggtcaagcggttgttgtaaaataataattagatgtaatttttaaaaattaattaagtattcaaaaacttattttagaaggcgtaaaagtttaaattttgtgaaaaaataaaattttattgtaaatattctagataaatggtttaaatgttaaaaacattataatcgagagttaaatattaaaataaaattatttataaatattaattgttaaaaaaagtcttattacatatttaaattaaaattaattattttagaaaaattattaattatgattaatttaattctttttttaaaaaaaaattacttattagcaaactgcagttacatgtaaaaaataatattaacggtatattatgatagttataataaaaatataaccattaataaatactaactcatgtaaatcttaattatattatgatcagtataaaattttctcttaatgatgaaatttggttatttgagcatgcaagtggtctttgcgcgcaagatgttgatccacaaacatgttaatgcatataatatatatctatatagtgtatgtataattgtgtgtaggtacccctataagattttgccctagctaattactccgtacttgagtaaatcaaatatcatgtacaccacaaattcatgatcttaacgtctgtatgcaattaattggaaatttggaacggaacttcaaacttttgatgacagataaaaatcatgactttatatgtgttagataaaacattgccacgagtcaccactaccatcttcagtagcagccagaaaaagaataattgaatatatacatatatattatatatacatattatgtaatgtagtatttgatcaaaattgatcacgaacctatgttttctcatattagtggcaaagtgataattaaatgaataatctatctatctctctatcgcctaataaagtacttaatattttatattcgatccatatatataatcgtatgatcatataaaagcgtacacgtcataattataatttcaaacgtacaactctctcattggtaggaagctcttgtgagaagcacttccttttcagaaagttatatatatatttatatatatatatatatagaagtattcgggtttttgattaatatttattgccatactgtacattttgatggacaacagcttgcaatattaaagtataatcatggaagatcgacgcctaagtaaattatttaaacatacatttatatatataatcaagtactggtggaataatagcatttttcattttatataggaaacattgaagagattgatttccacaatattttcattattacatatatatatatatatatagacagagagatcgaagtgtctagggtatgtgtacacataattgtatatgtcattatttataatattgtagaagactggtttaatataatatatcatttgtagaagaggacaagtctgaatgaccagtaaaaatgtctatgggtgaaatgaataataagcttaaaagaagtagtagtccaaaagaagctgagacctgaaactaaataaaaaagtaa

SEQ ID NO: 38199 - DNA, 1810 bp, Cannabis sativa
tatcgactcttacataataataatctattagaggtctattacattgacgggttgacgggttgttagagttagttataagttagttgtttaggttgttctgacaattgttccaccgatcttgattgtaaccaactccttgagagttagttctgtataaatactctgttttcatcatcaataatacagttttgatattcaatatattctaatatggtatcatacgtttaaagctttcttctccatctctctcgacaaggtttctacgttgtttcactatggtctagacacgggctactagttctagaaattctggcaaaactcctccgccgcatacctgttctttgattccagatgcctcttcgattaacacaccgatcatccctccatttcccaatacccctagagaacatcagcattacaatcttctccctattccttgacctgcgcatgaagatagcttaagtttgtattttctcagcttcggtgaccaccctagcctgatcttggtcactcctcctctatttgatcacaacttccaaccatggtgtcgtgattttgaactttctgttggtgccaagaacaagactgtctttctcaaaggcactcttcctcctccacctgaaaccgatccccttcacaaccactggatttgctgcaatcaaatggtcatgtcatggatccttcattctgtgacctctgagattaaaaggagtattatgttcttggacacagctgctgaaatatggagcaagcttcattcaagatttgattaaggcaatggacctcagatctttgagcttcatgaaaccttgatcaccctgcgtcaaggcgaagatgagattcaagaactcaaaccaagaatcccctacacttgtgttgcatctgctgataaattggcttttttttttaaaccaagaacaagttttacaatttctcacaggattaaatgaatctttttttcttgttcgagctcaaatattactcattgaaccttttccttctctgtccaaagtgttctccatgatcattcatgaagaacaacaaaggatactcaaaaaccccccatattccccttattgcttctgtccaagaacctaatccatctgttgctcttgtccaaaatccctcggcatgagcatgtaattataattatggacgcaataaaaaaatgagaccttactattcaaattatcataaaccatgacatttgaaagataaatgttacttctcaattggttttcctcctggttatgggaataaacgttcatcagataaagaagaaactgctcataatgccactgtctctactgatcaattgttggctaatctaaccaaacatgaagatattcaagcactatctcacagccaaaagttgcaacatgcatccctgccattagaggtctattacattgactagttgttagagttagctataagttagttgcttaggttgtcatgacagttgttccaccagtcttgattgtaaccaactcctcgagagttacttcagtataaagactctgttttcatcatcaataatacaattttgatattcaatatattctaatgataagtttatctgttacttttttattaacttggtaatattgcatataattaagatgatcgagtgactttattatcaataaatggtcattgttctaaaagaaaatataaataataataacaagaaatgagttccctcgtaattttttttgactatgctttaattaaagatattctagattttattttcaacatcgtccagagtttaagttcattaatacagagaatagtttatttttcgttt

SEQ ID NO: 38200 - DNA, 2174 bp, Cannabis sativa
  modified_base (1472)..(1483): a, c, t, g, unknown or other
tacataatttttatttttaaatatttatataataatattataaaattaataaaaaaaatattttgttaagtaataggatatgttgttaaagttaacgtggaaacctaaaaatatatctttaaaccaaaaacatagccacattttatatagaatagattaaaaaatagctctatataaattagtaaatttttcaaattgtgtatttgtttattaattatgtataacattatttaaattatgtttttttgattaattatataacaaattaaattatatttttatttaattataaatgaaatttgaattaaaatgtttcttcaactttcttatttgtaagcaagaaatattttttttttctataaataatatgaaaattatataatatatgtaaaatattacgattgttaagtttgttttgataaattagttgtcaaaatatttttttaatttaatgtgaatatttattgagaaataaatatgtttttcttgggttattttcgtgtgtatgattgtatttttccttttaggaaacttatagatgtattttttctattaaaaaaatactcatataagagaaaaaaaattctctatatggaaagcttgcctaagtttggaaaaaatgactttcctttttcctagttgttaatttccattttatagaaaatcatataatctttatatgacaagaattgaagtccaaatcgtgatcttgatcttatttagaaagtttcccattttgacattgatttgccactgtagagtgcaattttatcgttgcaaatcagggcatttttaggaaagttttatacagctgtgtaaacgtatttgtggttatctatagggtttttgtgttctataaataaaacttagagagcagttaaatatttttttacctcttcttattttatttttcatattatttatctttgtgaggagagagtttcttttgtaaaaacttagagtgttcagttaggttttagtctttgtttattgttcttatgttgttcttaaaataggttgaagaacttattgaacaagagaaagttcttcgagagatgacttgtcaaagccatacttcgagaggaagtaagcactcacacatgaaaagacgaagggagttctctgtttagtggtgttcagaaatcaatttggcaaagtaaattacaaaggattgcggtaaaactttagagagagatgtaacttgtttaagtcaattgtattttgtaattgtttgagactctggcgtggccccgtgaactaggagtgtttgaaagaatactgacaccacgtatagttctcttgtgtcaagtttttatattttgcactatttttttagttctattattgcaaatttatattctgcagtaacaagtttccaatttgttattgcaggtcttaacagttacatttttcattactattattaaagaaatttattggcatatgtaaaaatacgatttttcaattggtannnnnnnnnnnnactaaactcttagtgtggtcctttaatattttcttgtgtttttataatatgtttccttttgtcgaaagaagatctacagttgttctaccaatgctaaatgattctaactacctttattggaaaattaggatgaagactttcaccaaattctaaaataaaaaaagcttggaaatctattctaatgggttggtctccacttgttaaagacactaatgaaggtaataccaaggcaaaatctgaattagaatggtcaaatgaagaagatatattatctggtaataataagaaagttttgcatgatttttttaattgcgttgggaagggttttattaaattaatctcctcgtgtgaatttgcaagagaaacttggctaattcttaaaacttgttgtacctaaaagtgagtgttttaatatttatacttgcaagtgtacgaattatttcgggatataatattcatgtaagtacgattcaaactcatgagagttaactaaaatcaaaagaaatcttttaaacaaagtaaggatattctaattaacctagttccaaatatttgatgggattttggatttggaaaacaaaataaaagacaagcaataaaaaaacttaagattaaagatgagtgggtatgaaaataattttcaaataagatgtgtaaaataagattattaaaatattagaattcacaaaat

SEQ ID NO: 38201 - DNA, 1385 bp, Cannabis sativa
acccgcaccgcgaacacccctaggcacgacaagtcgtggaaaaataactatgggcactaaaatttgcatttgttggcaataattttaccgtgcctatatctccttttcttgtagtgatatttccattaaatgaaacctgcataccaaacgatcacttacagagtggaagtaaacgaagtaaccaaatgtaatatttggtatttaatttgtgaaaaaaatggtatataagtgtataaaacagaaagagaatgttaaaaggcgccagtggtgcttaacactctcatatttatcaatatcgatattagttcaattaagtatagagtctcatatagtttaatttaataatttttaagaaatattactacccaaacacaaaatatacaaaaatatggttataaatgtcataaatatttctaataataataatattattaatttatttgtgaaagtgtgtaataactaataatagtaaggacaacctatattttctaaatttacggaagcaaagatacgataatgtaggcaggggatgggcaatacatattttcacttttggtgtgtgattacatcataaaataaacaaggcataagaaaaatgtacacgaaaccaggtgaaggagaagcttctctcaaatctcaattgtatgatctctccatacatattcttctgagccctgactatgttccccttcttgaaacaactccttcactttttcataatacacaatactacaattttaactcttattataataatgtacgtataaatgtcatagaagaacataaattagcaatacccaaaaagaaaaaatcaacataagattcatgatacttacagagatgaatgtctttagaattagagaggaaatggaatggtgagaggcccatggtggagaagtggagcgcgtgcaacacaatcaattcaatggtaattactaaattaattactattgcacgtgccctgcttctccaacaaggagcaactcaccagcttaaaatgcttttatatataagtttaacactcttttttcttcactactactactctgttgtttttgctttgttgagatggaagagccagtaaagctagcttcatctatttatagcccaatccaagtaaaggctataaagtaaaatttgaaataaggttactttttctttaatgatcgtagtaaagagtaaggtggtgaagtaaattcaagacattagttgagagaaagaagaaaaaaatgtctgccaagccattccatgccatcatatgttttgtacgctaatataaatattttcaaacctcctcaatttaatagggtcttgtctatgcctcattgccttgtgtaattcacaaatgaggtcagtgtaataatgaccgttggatcaaggatcta

SEQ ID NO: 38202 - DNA, 1163 bp, Cannabis sativa
caattgtgtttaagttggtttatttaaaattgaatgtttctttcttttcaagaaattaataaaattgatcaagttcttcatacttaaattgttgctctattcaaatttagattgaagctttatgatgttgtatgtctcacaattcatttttattatgttcacagatttgtttaaacaataatttaatgggaacttttgtcagtaaaagtggttgagctttatttataatattagtatagttatcattctttttccgattggtcttgcttaggtattttataatattatttatggaagattttgattaaatatgaaacctattcacttaaaacaaaatcaagagtgcatgatgcatctctctacatatcttgaacagaatattttcaaactatttggcaatattagattgtattcatatttgactttagcataaatcaaattacctgatgcttatgataaattattattgttaattactcaaacttgagttagacaagacacttatggttcaagtctgtctaacaatgggctgagttggagaaacttaggcttctcatgattgtttctggataaattactgaacttagtggcatctttacacatttggcttctatggttgcccaacaaggggaactagctatcaggtttgctatttttgcttgataacatactatgatattttggctagtgttcttagattggggaagctcctatgactttctaaagaaactttgcaccatcaataaagcttgttagtgcttgattttatctggtctcagttgcgttgtactaaatctgattaattgatgcaagcaggattgatgataacatggatgagtcattgaccaatgttgaaggtgctcgcagcgctcttctgaggaatcttaaccaaatatcatcaaataggtggcttctaatcaaaatatttggggtactgatatttttcttgattgtattcattatgtttgtggcttgaacttcaatattgaactgagcattagaagttcctgctacatatcctttcatttgtaattgcttgtaggtataggaataggatacctcgttattaaggagtgatttgggctcccttgttctgtagaatggtctttcttgtttgtcttttttcctttttactacaataagctattgcatagtagaagagc

SEQ ID NO: 38203 - DNA, 1576 bp, Cannabis sativa
actgccccccctcgctacaatgtgggtccgcccctgccctcaactagttcatcattttctttcttctccttaacaaaacacattggaaattagtatcaaatatcaaatatagtgaaaaaaaaagaatgacaacttgattacaaacatccattatattgtcatacggttagttttctttcctctttctcattttcatgcatacaatacaataataatgtattccccactttctttaataatttatacttttgccacttggtgtggttgaaagatcttgattgttgacggcattcatcacacaatcaatttattttatgacaacccaaatgtgtaaataagatttgtacccaaaaaactgaccacaaacaaaacattcaaatgtacctctgtgagcctctgttttatatcccttgccattgaaaataaaacttgttccgcatttaaattggttttgatactcagtaatatttgtaatatttagactctcagtatataacaaataaacctagaagtttcatatcagattttcacaagctgtaagtgcttggcctttagcggtgggtataacctatacttacacttagcatgttctaagttgagcatgaatcttcattctcaatttgtaaaatattttccaattctatgattacacctgctcatagcaaattaaagtacatccaagaaagaaagaaaatgaaaaacatacagtaaacttcttagttgtagacaaaaaacttcttagctggaaatgaaagattcagtaaaaaagaagagtaaatataatttaaaatttaatttgcctaataataataccagaagttgctgactgatgttccacaagttccaaagttgtgagacctttgtgaagaatatatctatgttctgggaatgattaatatatttcaccaaaaaatcaatataaactcttctattttattattattaatgagttaattaaggccacttagaaaagtttattaacagaaattcaagcactaattagccaccaaattgaacaataaaaataatgaatccaaaataatattgtgtatgtcatatataatttacctaaaagattaatgattatacaatgtttttacatatatgataatgaatgagagttcatagaagagaagtggatacatataccgataaaacaaccctttttgtcaacatcttgaagttcgatcacccttggtgccctgaaggcatcgcagccaccaccatcggtgtctagcctaagattcacaacagaggaaaaaggagagaagtgaacacatatgtttttttgggagcttacccttgctgccctgaaggcgtcacaaccactaccactggcgtctgccctgattatattcatagtccattcctatgaaccaaatatcacctaacatgtcatcttaaatcttttatagatttccttttccatatcaataataacatatactgatgataaccatttctaccataaatgattacaaatgattggaggagataaggatgttgcaacaaataagggaaagagaatataatcagactacaaaaggctagtgcgaaagagatgggatatatcaga

SEQ ID NO: 38204 - DNA, 4551 bp, Cannabis sativa
  modified_base (49)..(61): a, c, t, g, unknown or other
ttcattgttttagagaattcatatataggatgttaatcaacatacttgnnnnnnnnnnnnnatcctggtaaaatattcccagcaactaggacagatcttcccttcccagagggaggacagacccttcttcaaaggttaaacggtgaaaactgccagatctcgggaaccagtgggatggggggctggccagggatctcaggctaaacaacaaccccttctatccatcctgtggccagccaaccaccagcaggagtcccaatggctggccaggctactcgagcagtcccaatggccagacagagaagagcactccctcggcgaggggagcgagtcatccgaatatcaattttgaaccgacgaggatcgggagcgggtggaaacacccaaaaaaacaatttgagaagtgaagttagtcacttaagaaagtttgatccaccaaactcaagtaattggtgcgatctactccatgtcaatgcacaaactctaccagccaggtagagaagtatgggctgtcagccctgcccaacctaaggctagctgaccatgtacaaacaaaagactcagagctggatgaccttgagtataccctctcccaaagtatggccgaccaggctcttaccaatccaaggctacaaatcaatcaaagaaggccaatcaaccaagctcctgtagcaacaaacccttatgtgtaagcacagttggatcaaatacgagacatgttcaaggccctagctagtccaaaacctttagaaatcgagcaagacagggcaaagggatcataatttttggcttgcatcaatgccttgcccttgcccaaattcaagatgccgacttggaagatgtacagggaaaagaagaccctctagtacacctgaagtactttgagatccaaacatgtctcctacaagtacatggagatgtgagatgctaaatctttccagcaaccctagcaaaaatagcccaataatggtatttcaaggtggcccaatgaagatttaattcttgggaagagctctcccgtgagttctatattcagctctatgcatcaagacaaatacctgcttgatttgaggatgttgccaaaataaagcaaagacaaggtgaacccttgaaggactacattcaacatttcatggttgaggccaccaaggacacaggcttgatagaagaaggccgatatacggccatactcagaggcatcctactgttgagtgacttttggaatgatataaggaggatctcaacgagcaatatggaggagttccttgtgcgagttgatggcttcataaagttaaaagaagctgtccgacaagtccagacaagagggcaagataagacaaaaaaacacagggcctcatagcgccccaaacattttctagcatgccgaccagcacaaacaatctatatcaattctcaaacaacaagaatggtggaggaaagcacaacaacaatgactctgatcaacataatggcaaaaaagggaaattcaacgacccatttatgccatgaagtccaaggaagaaggaggagaaatgtgtatgcttaactcttccatcaaaactcccaaagcaaggcatgcctagatgtaccagtacggcgagtcaacaacaggaacacctgaaggcttacctccatcacaaaaggctgacctccatctccgaagtctggcctaaatcaatgtaggctggcctctgcctctgaagactggcatccgtcttttgaggctggcctccatatctaaaggctgatctttgcctctgaaggctggcctccatctctaaaggctggactccatctccaaagttttgccactgttatcccaatttttcacactatgacattacaacacatactagtgacacgtggttcctatttcctaaatctggctgaagagatattccaaacagagctcagcatacatccgcatggatagagttttctcgactgagcagggtaagggtagcccgttcgagcaacatatcaacacttagcaattccaagacatgcatcgtgaagaaagaaagcaatccctacaatctagggatcgtatcaaagagatatggcaagctgtccaaatcccacaatctatatattctaaatatgtaatttatgttcttgccaattatagatattgtaagcaaaagggaaaccttccttcaagcatttagtcgtataaatagtgatccattctcacttgaataggggtagaaagaattacatcagagagatctaagaggataaactcagagatttcattgtgagagcttcaagagagcaaataatgtattctttgttgttgagttaatacaattcaaagggagtaggctattaccaaactaacaaggctgaacctctttaaaatcttgtgttctttactgttaattagttcttactttatcttaattatattttctatcgcttattatttgactcattatcgttggctaaaagcgagatcaacattttggtgctttcattgagagttgaactcaagtttgctcttggctataagtttaaccagacacacaaaagggtggtgcaaactcgcagaggcgtggtcgatcaggttgacacactagtggcagatcctaaactgcacactctagggaatgtaaggtcccaccagtcaccaatccttggccacctaatatgcaaccacctactgcgagtcaaggtgtaacatctcttctggctgggaccacacctggtgtgcaagagactggaaacaccagttcaactaccaacttgggtacttccagtactggaatcccttcagtaaccaatgttcagacaaccatcggagataacactgagattcagaacctccacaatgctcttgggcttatgcaaggtcataccaataccttgcatcatgatcaggaagagctctatgctgcagtgaaccttgcattcgaagagcaaaggcatcagttcgctgaatggagggacagagagatggaaacgttgaaggcttaataagcagccatcaacgactgaacaaaatagaccatcgtattgatacgaagagccttccaatttgctaaccagaaacgactgtctagcatcccgctgggcagctcagaagaaattcctactgggcacaccacccaaactgtgaacgaccagtcctccaatccctggtcacaggttccacctgtgggccaagtggtaggcagccaaaccttatctggaaattcatcaggtggggttatacccaataactctacccagactagcgattctggccaactggtcggccaaaccaaccagtcactgagataacttggtgtttcaaaattcaacagactgggaacatctcatgatctcagggatgatttgaatagaaggaggggtctggaggaacaatatgttcaaccagccactcagcccggcatccgcatccaagatccaggtcaaagagaccctcacgtggcacaaattggccaagaggccgaacaagtttacccatttgtgcaagcatagttagatgaatttaaaaatgtgttccaaggcctggccgaccaaaaactcaatgatcttgagttggatcgagcacgcggattgcccttcactcctgagatcaatgttctagagctacccctcaagttcaaaatgctgacctggaagatgtacacagggaaagaagatcccctatcacatctcaattattttgaaatgaaaatggatttgcaaggggtgcgaggagatgtgcgttgcagagtattccctgccacactttcagaagcagcacaatagtggtatttctagttatcactgggaaggttcaactactagaaagccttctcctcagagtttcatgcaaagttctattcatctcgccaatttcaattgcatttagaagagctggtcgaagtgaagcaaagaccgaaggagcctctttgagcctacataagtagattcatgacagaggctacgaaagtagcatggaagctagccgcaatactggggggcatcgagattcttggagaactatggaaagacatcaagaaaagtggtcatctagactctatgacagatttccttgaccgagcagatggtttaatcaaacttgaagtagccatttaacgggcagatgtcgagcctacatcgggcaaaccacaggctccctcgacagggacatcgccccataaccccagtgccctagtatttcgaatttaggcgacaaaagatccaacaacaatggtagacaaggcaatggaaaaaggaaagtttgtaggaaaagccgaacaaatgcctagaaaaaatccttccaagttcactactctttctctatcttgactaacgacctggagaccatctacatggctacccagtcagtagtcccctacaaaaaacctgctcccatgaaaaaggagataaccaagcaggacatgtccaaatttttccattttcatggagactatgaggccatgacaccaatgagtgcaacaatctgaagagggaagttaaattcctgataagaaaaaataacccacacgtgcaaaagtatgttaaggccgaccagaatcaaagggccacccaaacagacaa

SEQ ID NO: 38205 - DNA, 2941 bp, Cannabis sativa
  modified_base (45)..(70): a, c, t, g, unknown or other
  modified_base (2881)..(2904): a, c, t, g, unknown or other
caacattaaatgttatttctgatgtatattaataagtaaatctgnnnnnnnnnnnnnnnnnnnnnnnnnnggcataaaacccaacagtttttaaccgtgtaggctgtaattttatctcataatgtagctcaatctaaagatggcagatacatactcctgtgcctagtctgcaaccttaaaaaccacgaccaccaccaacaacttgaagaagaagatggacaaggctaaaaaggaggccgagatgaagagcactcatccaggaaaggttatcaaaaaattcctggttgctaataagctcattgaagacttgaggaaggagattaagataggtcatccactactcagctcgaagcagacaatgagcccttggctaaggatgtcaactcccttaaggacgagagggaaagcctccacgctcttctttcaagtcttgagatcaagttcaaggatctgatcaaagaaaagaggagtttgcaggagtcccttgactctgagcagatagattttggtgctgaatgggaggtgcttcaaaagaaggtggaaacttggagacggctgctctagacatcttctatggattttggagggctaacttagggtcaaactttgattacctcaatgaaacaaagaggattatcttagtttctatgaagcccaaaaatccaaggaagatggcgaggtagccaacaccaatcctctggctgaccaagacaatgaaacccctaccgctgatgacacatttgatcggtacaaagacctagggactccaactgcatgaattgacttctttttctatattagttcggcctacgggcctatttttaagtacaatatagcttataaggtagcttttaaacttgggaatatttcattttgttctaagacaactggctggctgtgcagcttttaatcctagagttatcatgctttgttatctttcaaaatgaatattttcccttaagtctaaatgattgcatatttaaatatttttttttcaagcgtgttacttacctatgcttcgtacgggtatagtttccctcaagtgaccacgaagacttatgactcttggtcacttgtattgcacaaattcaattttgtttgtccacttgctaggtttagttgaaccctttgtacacattttcaatggtaattacataacttgctataaaaaagagataaaatggacgcaagaatgataattaatatttttattcatttatttgtctagatgtattgttaccatagtaatgtaaatttattgatttataaaagctattacatgatctaactgatctttagctaattaaaacataaaatagttgaagagtttagtccatccaagagacatcgctcaagagcaatgatttctgaacatagtgtactttaggggtggtcatccgacctgagtaccaattgtttttccaaacctttgagcgaggtccgctcagaaggccacatacttaagagtgagggttcgagcattgtgtactttgggggggggggtcattagaccttctacacttattggtagtattttcttagatgttcaccattccaatgccttcgtactagaactagttccatgtttttatcataccgaccaagtttatatgctctaggaatctataacttctgttacttgatatggctcttcccaattgggtttgaccttgccagttgtgctatcttctgtgtttacgaacactcttctaaggatcatatctcccacaaagaattttcttaccctctcttccttattgaagtactgagctaccttttgttgatgagccactagctttaggtttgccgaagctcttttttcttcaatttcatcaagtgattctgctaagagggcgtgattagtttcttgatcataaattagtcttctatgggatgggtgctgtaatccacgggcagcattgcctcataacgatacgccatggcaaaaggtgcctaccctgttattgtcctttcagttgttatgtaccaccacattacttctggtaattcctccggccagttccctttagcttctttgagccattttttcacggtgtctttgattgtcttgttgactacttcgacttgcctatttatttgagggtgtgctactgcgaagaaacttttgatgattccatgtttcgtacaaaaatctgtgatcatctggctatcgatctgtttgccattgtttgaaacaatctagtgtggaagtttgtatcaacatattatgtttttttactacaaaatccaataccttcttggatgttattgttgccaaaggctcggcttctatccacttagtgaagtaatccactgcgaccactacatattatacttcacccttacctttgggcaactatttgatcaggtctattccccatatggcaaagggccatggactttgcatttgcattagctatttgggggtgctcggggaatctttgaaaatttttggcatttgtcacactttttcacatgggcctttgaatctttgatcatattaggctataaatatccttgtcttagtattttctttgataaactttgccctcagcattattaccacaaaatacttcatgtgcttcagacaagagccatgtagcttcttctgttgtcacacatctaaataatgacatggagaagccccttctatacattataccttccactatgatatattgtgcaacttttctcataatttttttagcctcatttttgttgcttggaagttctccagtgttgagataagctgttatgggagtcatccagcttgatgtagtatctatcatttcaattcctttcacacaggtgatactggattcttatagaaattgaattggaactaggtttgtaaagaacgcttagtttaatttggaaattnnnnnnnnnnnnnnnnnnnnnnnnaaattatttatagctatttaaaagatcggaagagcgt

SEQ ID NO: 38206 - DNA, 4339 bp, Cannabis sativa
tattcaaaactaataaaaataacattaaattaaattaaatattgtaactaatttccttaaaaatatgtatatattgtaactaaattgaacttttgttcctaactactaaattgaattattaaatcaattgttcacaagcccaacaattcctacgtatgaacactatacgggtctcgttaagcaataatttagattgaataataacatttactttgtctattatctctatttattatttagaactagttaaaacataggaacatatcaactttaccaaaaaaaaatcataggaacggatcaaataactccacctgagcaccacaacacaagtcattttcttttaaaataaaagaatctgagagtttataaaaaaaaaaaaaattaggatttttattttttaattaataatttaatatatactgtaatataaaagtaaaaatatatataatatatttaaattgcgggttggcggcaggttggcgggttcaacccgaaactcggtactcctaaaaactcaacccacgaacccgcccgaagggtaccgggttgaacccgacccgctcgaacatttaaaaaaataaaaatttgcgggttcaccggtttgggttcgggcgggttgctcgggttcgggtcgaacccgctcgaaatgttcaaccctagatcgtatcagttactggagttaggttgatctagacatctaaagtgactgcactcacttctcaagttattattttgggtgtttccacccgttcctggacctagtcggttgaagataggcctctgggttacttgctctcggaggccttaggatgggatttcacattgctggctagctagaggtgtaccaccaagaggttggtcggccacaagatgtctaagtgggggtgttgcggagcctgagatccctgatcggcccactagaccactagtttttgggatctgattgttctcgccaactaacattcacggcaaggccttccctccttctggtaagggaaggtctgtcccggttcctgaagaactaagttggacagtcagtcgataaaccctccccaatctatcaactagtctcctttggagaggatttatgatgaatttgtggcctctcccagtagttcttttattaaactgccttatcaggtcgctagcttctctgttgtggcagtccagctctgctagtgtgattggaggatgtactcatggtcatccacccatctcaaaaattgacgtctctgctgtgcgaatacattgcaatcaatagcgtgtggtttttcagtttggccaacttggcaaacggtctctctaagtctggctaacttgagattttctcccaattctacatggggctcaccgattcctagccccgttaatccagcatagtaccaaacacgaggttcaattgttgtgcctaggggctgctccacgtgggtccttccttcagtgggaggcgtcagtggagggtcctccctctgaggtatgggccgattatttagatccaccgaaatgaatgtgtcgacctggccagctatggtggccagattcgtggtgtctgtcgagatggcagaagtggccacatctttggtgttcgtggagattctagtttcgtttggaacacaaacatcaggatctgtagtcatagggtcttcaggaagacccgatgaggcaaatgttgcagccaaagttctcctcgtgttaaccatgacgtctgattatataaattatcaactcgctctcaatgaaagtactaaactgttgacctcaaatttggccaaccgacagcggagtcaaatttaatgttgatgcttaccacgtgctacacaattagaataataaagcaaatagacacatgattttatagaggttcagctccctttgttagcgggtaatgacctactctctttttagttgtattaataccgatatattatactactcagatcactatagtgatgagatttgaagtagctctctaaggattacaatgtagaaatcaaaattggcaaatctcaagtaagaaaagagcagtgggcgcatgagagagagagagagagagagagatgagttatcagacttagagcttaaggttttaggatttgactaaggctctttatatatgagagcttacgcccttcaaatctcttagaaataggtaaaataagacattatttacatattaaattaataaaattcaaatgattaaaatgcccctcaaaaatagatattctccctctatttttgtgggttgttaaggcccaattcgtggtctggcttactatccacgtatgaaagttgtgcaccaaaatcctgtcaggccaaaggctagccggccatgcaccttcaagatgcaagatggccgaccatggcttgtccagaagctagatggcctatattggccatgggatagtcggccaaccccctagaagtggttggttcgtcactttgtcgtcccgcttgagtactcggactcctaattggttgaagtgctgagtagatgacttagccttcttgttggtgagttgtattgccacgtggcaatgatattggccacgtagacatgtcacgtcaagtgggcggaataacaatcatcatgaaaaaatttgtcagtgttttctttgtcattgatcaacaatcaattgtactttaataatattatgtggagaaacaactgttagaattttgtaaactaactttataacaaccaaatgaatatattaataaaactaacaatgtcataatttttttaaagagctttgtgtgggattgtcaatatgaaacacctgcaaatatcaataaaaattattgtatcgttatcaatttgtaattattgatatgtcaagtttcagagcattagtaaaatattaatgcagctgcaattcaactacacagaaacttaaaaaaccagaacaatatttctatgtacgtggctctagataaattcaattttttttttgttattcgtgatttgatatgaataaatccaccattgaaaacatgaaaaataacgttaatgcaacgagagaaacatcagctagtatattgatacatttttttttttcagtttatacctgatttggattgatgaggaactccaaatctatttcagacatatctgcattttatgaatctaaaaaataaaggagaattagttttctacgatttaaatcgtaattcatagttgaatttaagtttcaaactagtttttctacatgattttgcataaatttgaaattatatgtggttagattgattacggtcttcttctcaagtgaaattaccagaatttatggtaattctacgtctaactagatttcttttcagttggtgtgctagtttgatcactcgaagctcttgttgttgaagaaggtggttcgggcagctgaatggttagagcaagaggtatttttgtaattttttgttgttgagctctataaaaacttataggaccgacccaatataattgtgtaatatttttacctttttagtatatacccaaaaaaaaatccttttgaaaatatagctccccttcctaatacatatagatggatagaatataaggattcttttaattttttcttacatgttgctagagtacttgaaaacctcaaaaggcaatgattgagtttccacaaaatccaaagtcaaggggttgtagggttcattaaaaaaatgagcactaccaccacaaatagactgttaaagtcatttttatttccaaatttcaaaagaaatggctaaggggttcataggcaggtgcaactgcaaccatgtatagagttactcatgagaaactatgagaagcccaccttccaacaacttaactcaagtgggcactaaataagcaaggcatgctaccttatagccttttttcctttctaattctaagtcttctaaacacctagctaaactcaactttccttacatattataaatttgtgtactttgtccatatgaaggttaaaaaaatgggaccaatgaggcctttaaacaaaggagagataggaccacattttcccaatttgccgtaccgtttcattcacctttacttttcattttggacttggtttcttcctacattaatttgttttgactatccatctgctcttttttagttaaaaaaaaaaatattattttgggaacttctattcactattggaatcttctttgaattgactaattgagagtctttgttatatttatcatcactttattataaaaaagtttttaaagactaatcatcttagacaaacacaaaaccagacacactcaaaagtgatacgttctttatgtgctttgtcaaattaaaacgtcttagaatatggcaatttgtcattataaaaca

SEQ ID NO: 38207 - DNA, 1741 bp, Cannabis sativa
tggtaataaaaaccaatgcaactgagaagatggtacagaaacagctacaccattgaactggaagctcgctcctcctcaaaagagatctgattgtgaaaaatgattactactaatccaatttcaatattaacaacagcgaaaatctagctttcgttgattttcctaccgagacggattcgaacataaaaatatttagaatgttagagaaaccctaaccctaagcttgaagaggaacagtttggcgtaggattacagcacagtccgaagaagaagaagactgacagagacgtcaaatctgccacgagaggccatttttggaccttgagacttgagttagccgcgagaaagaattatttaaaaaaaacccaaaaaatataaacaaataattttgcttaattaaacttttcctgtgctaatagaaattaattgagtcaaaaaaaaattaattgaaaattatttatcgtccaaaaggttgcattgtattttattttaatttgtttggaaaagtttatgtatctcatatatattttctttcaacaaaaaaatggttccaatatttttttttttattttgggttaaaaataatatttttttcaactaaatcttaaattgttaagaaaaaatatatttttttaataaaaaggatattacgtggtgtagatcattttctcatttcttcagtagatttgataatttcgataatttgtggaggttttggtctctatatatttgaacatttgttagacttatctattccggctcttgttgtgtttgaagacttgcttttgcttgttgccaattttagtaaaatactcaagacttagcttaacgatttgtaacagaatatgttaattgtgttacaacttacttaagctcatccactctctttctcaccttatatatatatttaaactcttaatgtgacaaaaattatataatgatatttctagagagaaattcataaaaaaaaaaaaaaaaaaaaaaaaacttgtattcgataaaagaaatttgtaatgggagcttaagtgaagaatatattttttgatctgagagtgtgtagcacatttctgcatagtgaattcaactcaagacactaccttagccttagagtaggaccagtcacattgactcgcatctaaaccaagtaaattggttgtgttcttatttgttttatcttttcttgcttttattcttttttgatcaccaagtgtttgcattgtgttatgttttcttgtttgtgttttttgaattgagatttttgctagttttgtgtgtattgtaggttggaaattctaaaaaagtagtattagaattgggatacttgctgcatcaaagttgctttcattggattcaaaaattaagatctccaagactcaaggaattttgaagttctttcaacttgattactagttaggaataagttcttatcaagatgtccacattaaaatttgagagggaaaggtttaatggaaagaaggatttctgtttatggaaagcaaatatgatggcacacatagggaatcttagacttgaagaagccttgaaagaagatagcaagatttttgaaaaatcgaaaaagaatgaagaagtgttaatttttttttaattacgaaaaaggtatcactggtacatatcacatcctcatcccttcagtagagtagatttaataattctattaactatgtgtcagttataaaggtcttataccttattctgctttaattggatcattagtatacac

SEQ ID NO: 38208 - DNA, 1950 bp, Cannabis sativa
acactacatacatccacacacacatatatatatttatatatatatgtgagttgaataatgtccatgcaatagtacaagttatatatatagttatgttgacatttggttccatcttattatgatgacttttgctaaagaaagagtagatagaaattgagaagattactatatttttacatatatgacgccaatcatcgatacgacagcactacgcaattcaatattcgatttttgaaacaataatattaataaataattgatatgtatatacatataataaataaataattacttttttactcagtttagttcattatatatatgcaaaacagtgccactactactaatgctatacatttcctttggtaactgtttgacgaacccgttttgggcttcattccatgcatctgtacatctcttttgaatttactccaaaaagattaaaaatatctgaatagtacacatataataacaccacatattaatcgcagatcataattgatgatatgatcaccaaacaacttcctacttttcataaatcttccactaggcaatcactaattatttatgtccacaaatatatattattcaaatatttatccatctatataaatatatattattaattgagtttaatttaaagttattaattcaatgactaaattctcatggtagtagtacgtatatatttatattatatatatttttggtggaaagtagtatatatatatatatatgatataaaataatcttaagtacatctcaatgctttggttatatataaaaaaagtacatctcagtgctttttaatgctacaaatttatttggtatatatgggacaaaaactacgtactccaatagatacgtcatgtgaaaaggagaaaggaataacaactcaattatttcaggaaacccttgtctgcgtacgtaaaacaaaaattgtacatgaaatgtacgttggccggaaaaagcatgagatgccgatgcaaactcttgcgcaagctgatgcatgagatgtacacgttgattttctaacgacgtttaatgtcgtgttagttaaaaattgacgtaatattaaattaaaactgttagttgactatttatgtctaacaataactgacatctattcaaatgtagtaataagtaagttgaaatatattttaaaattaagattgtcactactataaaggtccgtggctaattaaaattggctaactgacattaacaaaatttatgactaaagataaaaaaagttgtggctaattataaaccatcattattgtattgtgactaaaaggtccgtgactaaaagtattagtcacaaaaattataatctgttgtgactaaatgtatttttagttacaatatttgttgtgattaaaactaaattagtgacaacttgtaactaaatactatgtttaagtcacaagtaatttttttgttgtgactgaaagtcaaatttaatcacaaaaagtttatgttgtgactgagaggttatcactaaaagtagttgttttttttgtagtgatgggatattcccaacggttaataataagatggtcaactatgaaagttgttggaataagtaagcggagattttttgcagtacgtgaattaaataataatttttagaatttcagtggcagaataaatagggaaggacccatgtggttcattgttgtactccttctcgggtggaccacacctacaaaaggttagtgacctcaaaattaattttggaagatggaattctgatcttgtggaggagtgtttcgacgtaggggaggctactgccattttgtctatcctgtgatccttgtttaatagttaggataggcttatttggcatttctctgttaagagtggatattggagcactgtgtccaagttggggtggggccaagcttcgggctcctgtggttcttctcggtggtggaaaattttttggaa

SEQ ID NO: 38209 - DNA, 1587 bp, Cannabis sativa
attctatctcgtctttcaactaacgagtttcttctgtcgtatgccctatatccttatgaaatttacgaaatttcgttgcatcccttttgtgtcttgcatgtctcatgggctcaagctcgcagaatgcgaccctgtgctcatgtgcgaggaagatattttcccaagtttcattaagctccgtataaatagtgtagattggcacatccttgtcgtgcttcttctgttttttcttgtctttggttgattccttagagtcatctttcctcgttgtactagagcgtcctggattgtcagcctttgtcgagacagtgcttgtcaagacagtgctaggtttacctcccgagcctgtctttaagaacttcatctctttccttgcttcttcattttgaataaacagctgagctctctcgttgaactcgctgatgtttttcactaggcgatcctgtaaatcatcccacagttttcctctagccgttgagagatcagtcatgatccctgcttgaagagcagtaagctagatactatctttgaagtttataactcttgcagtggccgtactgaaacgacttaagcaggccttaagtgtctcgtacggttgctgctttatgttagtaaaggaagacgctttaggtcgtctatctctcgttgcctgaaatagcttcttgaactctttagacagttgttcccaagaagtaattgagtgatggttgaatttgttgaaccagctgctcgctgccccagttagcgaggtagggaataaaataaaacgtaagttattcgtaacatttctggctcgcatgatggtatgaaagttgttgaggtgagcgaccgtatctgtggtcccatcatatgacgagacatgagggttttaaatccctggaggaattcagggctcataatgtttggatggaaaggttcgagctcttcgtcggagtcataattaggcagtttcccatcttggtatttcttaaatttgttttccaactcactaattcccaattggataggatcctcttgcttttgattgagttgctaacataagttaggcttcttctggttcaattgctcacgaagattcggtcgttgtcgatcagagttacttatagatctcatccttaagtagctttcagtcctagttgtgctcgtactttctaaatcattactgcaacgagttctattcccttctcgcgtagatcggctgtgatctcgagatctcatacgtcctaagctagaacttgcctcatcatatataggtcttctcctttgggaaaggtttgatacacctcccctactggggtgagtacgcctcctccctatcaatgcgagaaggacgttgacaatgtctcaggggcaacccacttgtgctaggttgagtcccaggatttctctcgttaccacgagggatttcttgttccttagtcccgagttgtcttcggttctcgtttctgtgagaggattctggtaaatcattgtttccgttcccttgggttatgcttccctggggtcttcgaggaacttcgcggcgaggtgcctaattatttggttgttcaccttcaggaacatccgcagtttccccaggttgctcct

SEQ ID NO: 38210 - DNA, 1284 bp, Cannabis sativa
tatagattgcaataatgagtcttctccacattttattagtaaattgaaaaacttttctctctccccaaaaaaaagtcttacgagtaccccatatattgctctaataatgaagagttggttaaggtgacaaaatgtcagttttgatttttaaactcatacatgatatcgagacacacccatctattgtgacacttttctttattagagaagaagagttcaagaaaagcaagtatttttcttttcctttttttttttttttttgaaagaaggaaaacaaaaggaaaagggtatgaaagaaaagagtgaataataatagcttttgggtggttcttcgtgcatctttgactaagttacaatgtgattgatttttcttttgattttttaggtatatctgataactcggtagtatgactctctagatagggtttgtggggctttgtatattgtatggaacattgaatcaaatatatatgttattattattattattactatatagtttatggacttattcccaattaaaacagttttagctaccttttctctaaagcaaatttgtgatcaaaaccatttattaaacgtttcttccttttttttttcaaaatttgactttgctcgatcttgcttcgaggaaggctcgattccttccaacaacgtaactgaatagacaataatgatatataaattttggaactttgaccgtgctactaattatcatgtcatcacgtagatttcaagccatttatttatatacaatattaacgcaagtagcctccggaagtaataataccttgtttcgattcatgttgttttatatgtacgactttattatattgggtatggcattaagaaatatattggtggaaaaaaacaaccatatatatgatgatatgattgtgctagctagcaaggttaattacgtacgttgttgtaaattgtaatttcgaaatactttgttaataattatgttagctatcaaatctcatgtatgacgcaatgcatagttatatatagaatttaaaatattagtgtattagtgctggtgttattaaactaaattgtttattctattaccatgtctatctttaacttcacaattacttaaacatccataactaaaatacttagttgtacatttatcataatctttttattttcatgttatctaatatttaacctaaatatggttttaagggaactttaaatttgagccagttataaataagaataatctctaaattgtaattagttatacattttctaagtctcgtattaacaaagtat

SEQ ID NO: 38211 - DNA, 935 bp, Cannabis sativa
tgtcattttcaactaaatttgagtaatattggataataaaaaagggtataattgtaattatatactattctaatattttattatttgtatttagcataaagtagtttgtatttttatagaaatgttttgtatcaatgcaaaatattgtatcaagccatttcactaaaatattgtatgaagccaaatgtgacaatgaaagagattatgctacaaacaaaattaaaaataatttaaaatagattttagaagtgcaaaaagaacaataaaataattaacttttttatttaatgactaaatcaataaatgtaaataatattttaatgtttctttttcaatttaaattttaataaacttaatgtttattaaaacgattacacaatatattaaaatcattaatgtatgtttaagtaattaatgaattatttcaaaaaaaaaaattcttttgtttttttttttaaaaaaaaagtatttagttagttgaagtcattatgtatttcttcgatcttctccctcaagttgtttaaggtgaacttagattacaagttcacaatcaatgtataaaatatactatttttctttaatttgagacttcatataaataaaaatatataatttaatgaatggaaacaaaaaaaaaaaagtctaaatttaaatttatttccattataaattgaacaaatatattaatttaatatatatgttattgacagtaaaatctcatgaattaagttattggctcgaaaatgaaaaaattgttgtgatttttaaaaaatatagatttgattttttatttaacaaaaaaaattatttaatcaataaattttgtaaaacataaaatctaaaataatatttttccataaataaatagaaaataaaaataacatcttctacaaatttagacatataccttttaatttatttttatcaataatttt

SEQ ID NO: 38212 - DNA, 2722 bp, Cannabis sativa
ataagcaacttgcaactggaagaaacagtcgcaaacatgcaaagggcgttaggggagctcttgagaggccattttgaggcacccataattgggcgaagaagaccaaaagcaagaaaaagaggagtaagtgggctggaagatgggggagtatcaaagtacttgaaaaataacacccctgaatcctccctaggaagagcttcaacctgaaaaaatccagaaccctcatcacgacccaaaaaaattgagtctaaagcagtccaaggtgacttaagagaaaagctccactagaagaccaaagccaagaagcaaacactctcaaaagattcaattcaaaatgaaaagaaaacaaagccaaccaccacaaacatgtgggcgaagctaactaaaaggaggaaagagttagataagaagatgtaggatcttcgacggaggatagcattagttgcatctgaagatgtaactgggacgaggacgacttcgatgaagaatccccattcttaagggagattcaagagaagcctctacccatgaacttcaaagaacccaacatgttgccttacgaaggcatagccgacccaaagtactagatggaggcttttaacaaaataatgaagatgaagagagtcacaagaaaagcaaggtgccagtactttgcagtgacgctcagaggtgcagtgtgtaaatagtttaaatagttggcacctgggtctatcacatcttggaaacagtttgtggatgaattcttagcccaacaccatgcgtcactggactacaccatccctagaacttgcttggaaaacattaaacaaggagaagttgaaagcctcaagagctacatctagtgctttgacgctgaagtagctaaggtggggagactgactaagaatgaacacaagatggccatcaccgcggtcgttcatctaaaaagcaagttgtggaacaacatgcttaagagagctagaagaattctacgaaagggccaagaaatacatctgggttgaggacagacacgagaatctcacaatagggaagagtgaccctagtggattggctaacccctgcacgcatgaagaaccatgaaggaaaaaagaatttgataggggcatgagtgaccaaaacaagaaggttaggagggaggaggagccccggtaccatactcacgtgctcaatagagcacgtcttcctaataaatgaacaccgagttccattcaaggaactgcccccaatgagaaaagataggttgaaaagagaccctaataagttctgcaaattccatagagatatcaggcacactatagaagagtgcactcatctcaaaatggaaattgaggacttgatacaaatgggctacctgggaggatatcatagggaggataggcaccccgaggagaggagagtagaagatcaaaggaaaataaccccacacgaggctctagaggcgttaagggactttagaacaatatttacggggccaggggtaggaggagacactcacaaggggagggacagatacgccaaggaagtaagacgacccccaatggccatgagcttagaacaaaggctgcagaagaactctaaagagcagagttactctgtgacgttcactgaggaaggtgtgtgggggatccactttccttataacgatttgctcatattggcaatatagttggcaaatgcccatgtccaccgggtgcttgtgaacaatggaagtttagtcaatatcctctaccggagtgcactaaaataaatgggattaagtttgaaagacttaaagccatgcacaacgcccatacacgagttcaccagggattcaatccatcccttagggatgattaaactccccctcaccatgggagagcgaccccaacaactgacggtaatggccacgttcatcttggtggactgcccgataactttcaacacagtattcgaaaggttgttcctctacctcttgaaagttgtcatgtccacctatcacttggccatgaagttcccaactccaggttgagttgcaacaataagtggagagtagaaggaggcgagggagagttagaccatgtccgttaagattgccacaaaactctgcgagtccatggccctgaccgtgtgtagcaaggaggctcccctacaaagggtagacacagacttggacccaacggtgaaggaggaggttcatgcagaaccagatgaagaaattgaagaattagttatatttgagcactcgttgaaagtgctcaagattggaagaggactctacgaagccctcaaacgtgagctgagagaagaccttaaagagatggtcgatgtctttgcttgggagcattaagatataatgggaataagtgccattattatgtccaccatttgatcgtagaccctcaggtgaaacccataaggcaaaaaaggtgagcctcgactttgtaagatacacagctttgaaagaagaagtggacaagcttgacttgttccaattcatttgagaagcctattaccatgtcaaggtgtcgagccccgtcctggtcccaaagccaaatgggttatggagggtttgtgtggactttactaacctgaataaagtgtgcccgaaagacagctttccactttctcgaatagattagctggtggatgccacagcgggcacgagttgttgtgtttcatggacgcctactcgggatacaaccaaatccatgtgaacccagacgacgaggaacacacatccttc

SEQ ID NO: 38213 - DNA, 2362 bp, Cannabis sativa
caactaaacccaacccaacccattggcacctgacccacccaagctcgaaactcaaaaatccgatcatccacacgggtgtgttctgtacacacaatctatacacccaaaactcaaaattcatatagttattgacttgacacctaatgattagatagttacaaatctttctaaaatataagttatttttattattataaaaaattaatttaaatatttatgccgcaatttacccaaaaaaaaaaaaaaaaagaaaaatataattttttttagtaaaggaagttgtcctaataatcttcatttttttttaaatagaaatatcaacattttcttcctatttttaaatctatttatttacaaaaacggtgtcgtataagggctctcatcatcaccatcatatcagttgttacaggcactgagttctgttcttctgcatctgaagaagaagaagaagaagaaagttgatgatttcagattgaagaagaatgggttggggatggaccatatacgaaggagtagtaagcttaggttccctatggctactcggttgggctggtctctggttcttgaaccaaagactttacaaagagtacgaagaaaagcgtgtattggttcagatcatcttcagcgttgttttcgctttctcctgtaatcttctccagcttgttctcttcgaaatcattccaattctatcaaaagagtaagcttaactcttaaatctcgaatcttgaatcctaattttattgtctacttattatgttcttaaaatcttagggctcgatggttgaattggaagatcgatcttttttgtttgatactcttgttggtcttcatgttgccttattaccattgttacttgatgctctgcaacaacggtgtgtattgtgtactactcactctctcttttagattttgttgattgttgtgatgatttcttttgaattgattaattttgattttaggagtgagaaaggaaagggctgctcttggtgctatattgtttttgtttgcttttctttatgcattttggcgtatgggcattcactttcctatgccttctcctgataaaggtttcccctttttctttctcttcaagtatatatgtatacatacatttatctggattcatatttattcattcacatttcattctcaggtttctttaccattcctcaattggtcagtagaattggggtcattggtgttacagttatggctgttttgtctggttttggagctgttaatttaccctacagttatctatctctcttcattaggtaaatttacattctcttctatgctcataatagtatagaataccctaaggaatggaatgaatagaaaacaattttcattacatttctatgtttggtttgattttaggctatgtttggtaggaatgatgggaagtaagatggatggagaggataggaaagatggagatgaaagtggctctccttcatgtttggtattaggagtggaatgaaaaggatgtagaagaaattaattgtcaatattacaatattattttttgaaaacataattatttataaaaaaatttaagaaacaaatatgatattttatatattgtttttgtcattttctttgatcgcttcacatttagagggattaagaaacttgaatttagagggagaaagcctctctccatctatcctcttcctcttaccaaacataagattttcctctcccttcatctctttccctccatctctctccatccacccttctttcctccctaccaaatgtagtgttaaagtattggaatgtcatcccaatcaatgtaataacttttgcatcattttggtggaatgactattccatttttaaatgaaaggaaataccgttccaatgcaaagacaaaatttaataatttttttatcgatttttttaatgcaatttaaattttgtttccattccatttctattcatgttctcattcttattcttatttttttattccttccaaccaaacgccacctaaattcatagtgcactctagaatgctgattttgtattcttcaatgtagtagtaattactaaatctgtgcttgtagagagattgaagaatcagatattaaggcattggaaagacaactaatgcaatcaattgagacttgcattgcaaagaaaaagagaatcgttcttggtaaaatggagatggagcgtattcagggctctgaagaggtatacttaccgataaatgtttttgttcaactttatacaaaatatctctaattagtaagttgcggagtcttaaactaagtgttgtactacttttctagttagctatttttctcatcagcttttctgcctatgtttatgatgattattttgatccagatac

SEQ ID NO: 38214 - DNA, 2467 bp, Cannabis sativa
attataagttatactacaatatacataagttacaagatcagtttactaattttaatttagctgcaaaaattaaaattattacttaattcttattttaaaaagttgaaagttgtttccattttttttattgtaactatgatcatttgtgttgaagaaaatttcgaaaattagtaacattgtagctagggctcttattagtcttgtatatttaatcacaacatttttcttcatgtaaagaaaaaaaaaagttaaaggactaacaattcttaatatgatgataaaattcggataccactgaattgtttaagaaattattcttagcatctttgttgataccatagacaataaggacaaaagtttataactttcatgaatttgtattttgataccaccaaagacaacattagtggttggccatggaactattacattattgctatatgctattcatttttgttttattgttttgaactttgcttttttgggataccgtaatgtattgtattatattgtattgtatagtattgtgttagattgtataatattaatattatttagtacagtacaatgtttgatattgacttgtactaataagttatgtaaaattatgaattctttacaataaactcaaccctaacctcaaccacgacctggactcatacacttttccgaactcagaatccggacccaaatccgaacatgaaaccctgactcgaaccctaaacccaaaccccaaatttagatccagactcgagccttgaattcatggattcagactcgaatcctggacccggaccccagacctgaactcgaacccaaactcaggtcagggtgttggaccctaacctgagcccggtccggggtccaggtctaagttggggtctggggtccgggttcggggtctgagtccgggtctagggtttgttgggatttaggtcctaaaagcaagtaattaatggataatatattacagaatatatgaaatacaattatagataaatgaatacattaattatagtagtataattaataaatatctgaaaattccttattcatatggagaaggtataatcttgtaaggatgaacaagagaagtaaaatacgagatggataaaactagtctgtagtgtatcaaagtaaaatgaatctttaatatagatttgctaagtatggtttactatacttctagtgtgtgtgattttgattctgatcacatatgtggataaacatttagtaaatgtgttgtgtataatttgattatgcatgactgaactgatatataataatatctttcattaacgtgtcgtttattatgaaaaaattattcatatcacaacgattatcattagattagtctgaattctaagtatacatgaactcatgtttatgttcattgagttctttgattcatcgttaaagtttttcagagaaaatgattcttacaatttttgttttgagagcttaataacatgagtggctgagaacatgctatacaataatcgaatattagttcccttatagtgttaattccaggagtgctatcagttagatccaaatctataataagttataaattaactattcacatcaaataaatagtacataaggagtcaagagataattagaaggataaaacaataattttgactaactctgattattaactaataattggagggcaaactacttgtattgattatatcaatagactacaagtaagaattttgtaaatataattctatattgtcaaagagtgtaattccatatttatagtggagtaataatagaattaataaacagattattctattgatgagatcgaaaataatcaagtgtttattaaagcttcaaaatataggtccatggtccctaagtcacctttatacaacactgtacacggggagattttatttgatgagtaaatttgagtgtgaattaattcctatgagaaataaattcttaaggggaaagtagtaatttatagaaattattattttaaataattacgacaaatatgaactgtgtaattaaatagtatttaactagtaaagtataatattattcataaataatgttaaagaaaatatattatattttaataaaataatatttattttaattcttatgaaataaaagattaatgataattaattaattattatttattggcagaatagacaataaatcttatttatggtaaaattaaaaaaattaattttgaaccttataatatggcccaacctacacgtgtagacctaacccacatgcgtagggtgacatataaaagctcatattaattttgtttgattattttattgttaaaataattcaaattaaattaattaattatcttttaattattgaattaaatatattatttaataatctatttaattaaaaatataataataaaataaaaagatttatctaatttttgttcatcagttatataatatttatatttgaa

SEQ ID NO: 38215 - DNA, 2460 bp, Cannabis sativa
attgctttgagttgtaatccatctcttcatctctattctctattttatgtgtatattttatttaatgttgtaatattatttaatacaacaaacaccaaaaaaagtagcaactttgatcaagatggctatgaagaaccgaatttcttgcacctggcctaagagagtgcaaccggcggatgaagagtggtttctcatattatagtcatatcctgtaactaatatagatggttgggaaagattacaaaggattgtatagattgatattcaggtctcttttttttaaaaaaaaaaaagcttaataggttgtaatatgatatttggagtaatgaatttcatgattgatcaaaaaaaaaatatattatttaatacatattttgtcctttgtattatttgtcattgagttataattttgttggtttcatacttttattagagcacaataatttctaagagaagataggtccacattcagagaccaagccatggacaaccaaggtgtggggttttgaggcttgaggatgaatagggctttgtataatgtagtatagggcctttaaacaccatttatgagagtttgaatattatagccaaatatcatgtcatcaaatacatgcggttggagtacttggtctggtagatgtccggcaattctggtggccacaaagccattttactatttatgcccaaagagtagtagtgatcatcatttgagatcgtactcatcatcataacctcttttttaaatatatattgttgattcactacaaagattttgctctagtagtatggtggatgttaatgtatatagggtaattatattgtacaccctaagaaagttgttcaaattttattttatttcatttttagtgtcaaattactttctatttctaattattatatattcatagtaagtactgcatgcatatattttattttattttatttttaatagaatcacactaaatataatttttatccaattacctaataggtagtagggttaagactttttataatttgtcatatattgctttatatttaactgttttcactttttcttggaaagttgactaatggctttttcgagctcttcacattaatcttcattcgaaaacttatgcacatactcgattaaattgttgtaaatattcctatagcttattatatttcggttcttaatctatatatttattatgagttaaaatttccaacttcgatttagttttctcaacaaattggaatgaaataataagatggcaggttaaggacaatgcaattatgcaagtaacaagttactcagcaaatagtaaattagcaggatcatgatgattgatgagaagctaattaatcatgtgtgattattatctcactgccattagatttttaaataatatatataaatatgtagccttcaagctaaagtaataataataatacataatgattaagataataattatacaattacaaatcgacttaattaaattgataaactcttaaatgtttggcttatcggctcatgagatttggcttattaattaagaatctcagcctataagacaatatacatccttaattatagtttaaaaaacaaaaagaattaaacctttattatttgttcacttattatattatattgtcttactttatgttttgtactgagatttaagatatagctagtgatataatattctaacaacttgttttttaaacattttctgcataatcattctatagagggtggttttattaattagtctttatatatacaaattaataattttatatttcttattaatggtttcatagggtcaatgatttctcacatggagttcctatttggctccacaattatatcatattggaattaagttttagaagtatttgatggaaggtggaggtttgttcaaaagttaatgctcttcacatggcacccacatgcaatacatcatctatctttatatgtatctgtgtctatatatgtataagcatatattcatattcatattccaatccaatcttctcttcttcttcttcttcttctttttttggtttccactaaaagactcctcaccttgctagtacaactaattatcaatcattaattggaagtctctatgtaaaattggataatactactttcatttaattttattttatatatttcttctaaaataataagtgagaatccatgtggataagtatctatgcttatagccacaaacttcaaatatcaatacattataattactcttctgaattgatttctattcttgatcatgatcattatcatgtttttgtttttctttctttttatatatctatatacatgtaattaacatcatcgacaataatgtacttactggtagtaatagtataataacaacaacaatattataccaaacttttttctatattataaaaattatatattatgatcctaacctccaattaattatt

SEQ ID NO: 38216 - DNA, 1016 bp, Cannabis sativa
tccaattcattccatacatatttttacctatatatattttaaaattatacatgtaattcttatctatgtttccagatgaaggatacatggcaaaaaatagaagacaccaatccaatgatcactgattaaatctccttaatcacggaagggtctaatttgtggaaaacagagattttccacaagtcaaaaaatcattcagttattcttgtcttacacagaatcagatcttgtcccccatgtcagaccataatagtgcgcacaccaccatttgaaactctactttgtttgacaactcctctgagcattttttctaccaagtgcaagcctttgcccgacacgtgccctgcaccaataatggtcctcactacacgaagagtttgccacacgagaaagaaccatcttgaggcccaatagtcagatatttaatatattttaccccaatagtgggccttttggcagaaaccctagacgggtcgtgggtatgcccatgcccgtactttagcttgtaaatactcctttatttcaacacaaaggcagataagaaagagtaataggtgaaactctgttaaaatctctccatgctttcttcttcaagagtaactaagagaataaagttaaggttttctactataaacatcattgtaatacattatacaagtcttctaaggctaatatactgactcgtggattagagatcattaatgcctaaaccacataaaaatcattgtttattttatttattgcttcttttatttcttgagctcttatttaattcatttttgaaaatctcggtaaacattttggtactttcattgagagccgaggaaagactcaagctattaggttactgacactatggtagctacacaaaaaataatgaccaagaaaactcttgaggtcgacctagacgctgtcatttatgatgtaaaccctctttttcaagagcatgcctagttgagtaatgcgagaggaggggatgcatccgaggctgacattggaagggacgacctagacca

SEQ ID NO: 38217 - DNA, 1392 bp, Cannabis sativa
tactacatatgtccttgttattatcccttaaagcatatcttgtgaaagcatccaaatttactaggtgaatcaatgctaatatatgctatgtaatgtagtgatctagcagtcttggctccaaagattgtaaggttcagcaggatcatatacaaaaataaaataaataaatgctgtgatatgtgatgttgtgttgtgctatgttcctattagctattctagaaaaagtacatggattttgctggggcatttaagatcattttctttattaattaatgctctggtttcagtagctcctcaggctgttggtagcctggagataatttgtgctgtgttatttaccattctaatcaaacttaaaacttttacagtgctagcttttcttgttttcttgtacaaactaaaagcttgttaaattgtttgctctccagtcataagggatttttacaaaaatttgtgaagcatttaaaggatataaactttttaagggaggacctgattttcagcactcacagtgaagaggtaaagaacttttgtccatttcagttctttttggtcattacttttcaaatttcacatctcagtattttatattttagtgggaagtttattaatgtgtttgaattgcagtgagtattatatgtgcatcacttcattttttatttttctctctttttctcctttcgggtgaaggattatttaattgggttgctgcaataggcctttacattaaccaagtgggggagctcaaatggtcaggctgtagtttgtttccagcagatgtggactatccaaatacaatagccataagcaggaaaactcaattacagtttttgatcagattctaactccaatatattaggacataaataattatgtttgtcattttgagtgctttgctccaactccaagtatccctttaaatatatttattaaaatgctgtacaattctccttaccctattaacttctcagagataatgtgacagggtacagattctggtgttgacacatatttcggtctttgcacttatcctggaagagagcttcgacaccgaatagatttaaaggtaattggttacatgtcatgtttaatgttctagcaaagactaaatattttattcgagatatcttttctcttttctctttggttttggatgttatatctacagaaatttcaacatatactgcatcagatataccttccttatagttttgggatttttaaagcagagctggaagggatgtatatcagttgctttgtaattgttggtaatattgccttatactctttcttttcattctctaggtgtacccacgtgatatatttgccttcggactaatagcatggaccggtaatgatgtactaaataggaggtatacacttgttatgtat

SEQ ID NO: 38218 - DNA, 1926 bp, Cannabis sativa
gaacaaaatttatttaaaaagaaacatgttcttacagtgtgtctttcatcaaaagaaaaatattctgtaatgaatccatttgcttatttaacacagcttcttgaatgccatcgatacaactcaaattaccataattttttatatccttgagcacctttatttattcagcaaacataattttaaaaaattatgtaaaaaatgattaaatttgaagagtaaaataattcggcaaacttacttccaatcggccgatgatggaggctgcattgctgaattgagaaactaaacgagattgaagttcctcccaccgttccatttcatcccgaactttcttgaatcgtttctgtaatgtctttatcatcatgtccatattcattttgtaaccttgataatgagacctaaaacccgaaaataaatttgcatagttatagaaggaaaactgaaaaaagattaagaccatagaaatcagatacttgcaactgaaatggtgtagagaaccacatagtttttaaaatgagtacaatttaaatcactgttatatccctacttctcattgtctatgatatgactctttgcaatcaaaacatcttccatacaaaatttacagaaaatatctcttgattattcagactcataaaagctatggcaagttgaagaatgcctggtatacttgtttacgaacccgactgcttgaacatggaagggaagctggaaaactggccatgttagtaccagatggaagatttttatcttgctgctgcagctggcatatcgatttctctgatcacagctgatgctatagttttcttacacattgaaggcgttcgatgttatcagctaataatcatggttatggtcactttgtcccaataaataagaaaaggaagaatagggtggctcatgtaattcttattcacattgatttctatttattatcccatctatgcactctaaaaataaatgacaaaagaaagaaaataactggtatatttgtgtcaagactaaaagcaaaaatcttccactggtaagatgaagtcttgattttcaaagatagcatcacatttgatttgatttgtcataaaattcaggaatgaataaattcgtttagactcgggatgaacattatcatgggcaatgaatctatgaagcagtccagaaacctccacaaagctaaaaccaggggatttcttaactcctctcttctccatggttttcctcaaacttttcgcatcgtcccaacgcttggaaacagcataaatatttgacaatcctacatatctaccatcatgatctggctcaatctctatcagcttccttccaattttttctgccagatcaaattttccatggttcatacaaccatttagcaaagcacctaacattgaggctgttggctttattggcattcggttgataaatcgaaatgccttatcaacttctcccgctcgtgccaaaacatccaccatacaagcatagtgttcgctcttcggtgtcatagcgtgtttatcaagacactcaaagaagtaccaagcttctttcactaatccaccatgagcacaagcacttagcaagcacaaataagtaatctcatccgggacaattctaatcgtttgcatttcatcaaacaaatcaagagactctttaacaaatccatgagttgcaagtcctccaatcatcgcattccaaatcaacacatctgttcttcgtgtccaacccccacgaaacacactcaaagcctcatctatcgcaccacatttcgcatacatgtccacaagcgacgtttgcagcaccaaggttaacaacaacttgttctcaacaatgtaacgatgcattgcccttccttgctcaagggcacctaagtgagcacaagcacacaaagtactcaccatagtaacctcattcgcttcgggcccttcacattgcatt

SEQ ID NO: 38219 - DNA, 2354 bp, Cannabis sativa
gaatacatgtactgcggtcggctgggtgaataatttttgaattgttaatgatattttgttattaatgtattgttatatgtgtttattaattattttttttttcatgttttaaatttttggacttcgattacagtcgttatgctatcaaaatttcgctagaattaggataaatttcaataaaatgcataaacttcactaatatatatatatatgtgtgttaattaatttaactaattatttactacacttattcaaacaaataattgattaaagttttgtttttttagaagttttgaaatggatagaaattagatgagtatgaatagattatcagcgaagtatagtgaaggtgttgaccatttcttggacctttgttagaattatgtcaaaaatcctaaattggttctttgtccttgtcttaaatgtggtaacatggaacgtatggacattattaggatatatgaacgtttatttaggaatataataaacaagagttataaggtttgagtttaccacagggaaaataatagagtaccgggcaagggaacgtctaagtctaataaggttaagggtgttaacttagactatgaggatgatcacattccaaaaatgataggaaatgcacaatttgaattaaattttgatcctttgaaatttcaatgtttagtagaggatgccgagaaacttatttaccctaattgtaataggtttactaaattatcaacacttattagattatacactattcgattataaacactcatttcactaaaataagaattttaaattttagggcataaacaagtgttagtatttatgccctaaaaagtatgtaaagacatttctatttataaataagagttaaaaattttcatatatgcttgaatgttaaattattagtatttaatatggaataattcgtatatagatttttgttaactataaatattaaccttaattgtagtaaattaactacaaaattgattatataaaaatttatttattaaataaataaacgacatgaatgttttaacgtagttttgaacttaaatcttcatagtccacgagtccatcttattaaggataataatatttgaatacagaatacaatgatataagtagcaataatatctcttttgtgctagatttgtcgttcccttttaccctaggttctgtccctatttatagatgtatggaatgacagttatttccttaagatttactcattcgtaatcgctcatgaaatgtggacattccccacattttatctttgtgcatatgagatagtattaaatatccgttgaaccattctttttccttatccacagatggctatgctgatagtgttagattgttctcatcggttgcacattatctttcttaacaatctttgtaggaaaaatattaagcaataagatacaatgcttctcgcagttctcttttgttgtttgaaaggtattagcgaggcgattacttgaatgcgtcaaaagcgaggtgaacaaatgttgttgtcattctttgaacatactcacgagtatgtggattgattagttgtaagctcttattcacaagtatgtggatcaatgagctgtaaactctttgtttactcgttttgaaaaactttcagtgtattctatttatcccgagatggacttgttgtctcgccaatctcacctattaatagttattattcacatctcgttattacctatatggtagcgagtgtgaatatttctattaattgtaattcctgaggcaagttatttaatgtgcatttaataatgcacgactttggttggtttgtattcttgccctggtacacgtgtcagcttcttattggtagccgaaatttgggtataataattgccgcctagaaagtgtttttttttaaagaaaaagactttttaaatgtcttcgatggtacaatcgtatttttatatttaaaattttacatgcttttagtttggggatccataactttggctatgagagagcaaaaaagtacacccgtgttgagggtaacaaagtcttagagacggacacaagcgagtgtattttgagaagctcgtcagtccactacagagtctattagacaatacccccagcactcgtaagccgatacattcaagtgaagtctctgctttacaatctttaaaaattaaatatccaagatatttttctaactaaagtttcgctatgcaggaaggtgttcctagcaatggcaaatttacctttagtacattgcactaaattaaaaagggcactcatataggcctccgaacaaagcatattgatgtcgcccaattagttacactgcggtcgcggtagtaaacgggctatatgtcgtatccaca

SEQ ID NO: 38220 - DNA, 3917 bp, Cannabis sativa
  modified_base (26)..(34): a, c, t, g, unknown or other
ttagaaagatataacagtaagtttannnnnnnnnatccaagttcaatatcggtctagtccgatgtatactccatacatgcgatactagcatactttaccaatgcactgaaaatgacatactacttatccaaggtgtaagtaaaatttatctataattattacattagtgtaaatttagtgtactaataaatcatctgactatactttgaagcatataatcacaattactttccactatgatgacatcacggtaattgtgaattaccatatgttctagatttatcataaattatatattaacccataattataaaaataacatgttaacttaaatgacttctaatcttctattgatagaaaataagattatattgaaatggcttttatttaaggcataaaataccaacagtataaacactagatgaatgattattagtagaggaagagtgatagtcaccttcgtttacctcagtttgcagttgcacacgactctgcgggttatgttgtttgggttcctcctcttgcggtctctcttccctttgatcaggttgccgacttgtattaagagtggtggggcctctactacgtgtagagtcgcgaagaggttgatttaaattaagacttcctggccattctcatcaacacgttccatgtgattatgagtattgtcaggatgttcattaccatgactagtattatcagtttcctgagtttcatctcgatgccgattcaagactcgtggcggacattaggtttggatcttgtctcttcctacaatctctacctacaatgctcgcatttgttcctgcttggttgttgtatactgtgaggttgtgagatgaatgatgccttcagataaaacgacaggtgtgatcggtggaaaataccccactatggctcaggtctcgaagtttctcctgcatgtctagcggtttcagggaatagattgaggggggtaacatgggtttgccccactcctcctatgatgacttaaatgggggttgttcctctttaaggcgttgttcctccaccgaggatcgttcccccgccatgaataggaacattaagagtcccaacattgagagatccaaaattattcttcacaattgttttattcgtagccatgttaattctcctctagaattcttcaagtatatgtgtttcccatagacggcgccaattgttaccgggagaattttgacaacaccaaactcatgtgagtattcaatataaataagaacactcaattaaaaatgtgcgagtactcacttagaaaagtgaggactcaaactattggctactaaatagaagaaatacaagcataaaggaaagagaacacaagagaattatagtggttctgtcagagattgatctgcttaatccactgttgcaaaaattttaggttggtcttatcatcactcctttatatagaaagaaagtgtcctttagatttacataactgattagcttcagaaccatttttacattaaataataaatattaattaaagtaaatgctcaaagaataaatgaagaccgtcttaattcattcttgtattaagtgtagcaacgtatgcgacttgataagttgcgagttacccgttcatattccaacacacgagctcgcaggttctagggtgtttgtattcacacagtggccttcaagacttttgtttggatatctacgtttgcctttggttgcatacacaaacatcctatgcattgacaatgtggaacttgcgagttcttgacaagtcgtcgaacaatttagtcattcagaccaatactatgtaaagaagcaatctttataggtcgcatgagagttttacttggtcgttgcatataatcagtatatacgcgatcaatatcaaatcttcttggtcttgcttactgttgactatgcaatacataatatgcgactagaccctgttacagttgtatcatctcacgagttctgatcaagcaaggctagccctatgagagtcatcaattaataagtcatctttttcatcaggaacaggatccacatgtcaattttatatgaggttgctttcgtatttctaagcgagaaattcatactataacaatttatatgcaattttttttttgacgtggaatttatatacaatttaaatgtgtcaaacttattatttattttttattcatattttcatttatctttaagaaaaaaaaagaactttacatatatatacttgtaaaaataattacaaatacattactctctctttaatgtgatgacaaatgtcatattttcagtaagagttatttttacataataattagttatgatattctaatgttattacaattgtgtcattactacttctaatataattattctactaacttataaaagaattaaccactttaataaaaatgaaaaaaaaaaaacatatacatatattttaaaataaaacaaaataataattaatatttagataaaaattgtaattttttttccttttaagaaattatgcaatataaaaattaatacaacttaaatttttttttttttctgaaaaagtaataattttttttatgattattataattatattatttatcaatataaatacaccaataaaccatctaatatatttatatatgtaattaaatatttttatttatttttcttttgtggtatttatatatgtatttttttttctttttcatatacaatattacatatatatactagtagaatagacacataccatatggtgtactcattctaatattaatattttcttattataatttaatatatagtaaaaataagtatatatataagataaataatagttcaaatatttatctatatacatagtctactgtaaaacgtacagcaaattaaaaaaaaactgagctactaaaataatttttttcctatcattgaccttttttttctaaaaaaaaatacatcattgacctagtaaattaatattttttgagcaatagtatattaatttatgattgtacacatatttggtaccgtatgtcttatttaaatacaaatttggtaccttgtattatcaataatacttattaagtagtctgtattttaaaaacatacatatttagtactaccctaacctcaaaaaaataatttattgttgataaaattttattaatacaatcaaactgtctttaattttacaaagtttggattcaaatttaattatttagttatatataaatgagaattgtttggtcaaatttaaaaaacgatattgatgaaattttactttaggatactaaatatgtataatttcaaaatataaggtaccaaataagtattattgaaatatattttcaaagaaaaaatagggtactaaatgagtataatctcttaatgtattgaatctcgttttatgctatactaaataaaaaaaataattaaaaaatactgtattagaagcggagtgaattttcacttgtataagaagaataaaaaataactaaaatagagtgatcaatctaaaaactactactgtataataaaagaactaataaaatataaaatagtacaaaaagattaataataatagtattaagtcattgaatttttttttaattgtattatattttgtatacattaaacttattatagtttttacttttaaaaaaaaaaacttgcaattaatctatgtataatttaaatatatgtattgtattatttaaatttttttaatgtggttatttttttcttctaaatatatatatttttttgcttgtaattaagtaaaaataaaaagttaatgaaataattaaattataataaataactagttattataaaataatttagttagaatgatataattgtaataacattagaatatcataactaaatattcacttaaaattttacatttgtcattacattaaagagagagt

SEQ ID NO: 38221 - DNA, 1013 bp, Cannabis sativa
  modified_base (35)..(65): a, c, t, g, unknown or other
aatacatatcgggatcttgatcataatcaagactnnnnnnnnnnnnnnnnnnnnnnnnnnnnnnncataatacttttcttacctcaatctagaattcaaacgtacaggtcaacccaagtggaaataaagcttgatgacccccgaccctatgtcacgacaacaaaaatcaataaataccttaaaccgaaactctgggaactaactctaattcccgtaactggataaaacctaacttccatttgccctaaaataagccaaacaacactcaaataacctaaaatagacactgggtacaaccccgagccaaaaatcaattttcgtggaaaaacccaaaaatttccccgtgcagggcaaccggtcgaccggttttgctacaccaaaaccaaccggtcgaccggttctggcagactagggattctagggtttcttcccccaaactcgaaccaattccttcccaaccttgttaaacacttccagaacaaaatactatcacaaatataacatatttcaagcactaatttatagcaattcatcatatttctcaatttccaagtttaaacctaaactagacatttaaactcaaaacccactactctacaaagtagccattagaatcaataaaacaaagctccaacttaccaaaataagtctaaaaactcaacctcaatcccagttaaacctacaaccacaaaacctcacaccctagtctaagaatcaactttaaaatttaaaaattcttaatctacaaagtaggtaacttaccccaaatacttcaaggttgacttgtggagcaaaaacagctagaatttgataagttttgctgcagaaatcatcaatcttggctagttttcttaatggttcgaaaggaagaagaaggaagggtcacttggccactactctaagttttctctaatattaggaattcatttcagcaataagaaattaataaacctaagctaagtttatctatagcactacaaaacaaaaggaagataacataaccaaaatattaa

SEQ ID NO: 38222 - DNA, 2799 bp, Cannabis sativa
  modified_base (1733)..(1736): a, c, t, g, unknown or other
acagttctactttcatgtgtaggtaagggaaaggcgaaagctgaaccggagtgaacctgagctcagattaagttgtacatgtcgaagcggctcgacctggagtgttcagtgttgggacatccgaggttatatattctgtagtggctgtgcgaccttgtttatatgtattttggaaaaataaatttaaaagtttgaaaacgggatcccgggactagtaaatatttctatctatcataaagtttaatatttactataaaaattttaatttgacacgtttttcaagaaaattttttgattagcaaagattgcattgtaattgaaaaagcactgtagcgtgccttagcaatagggcgttacaattacaatgtaaaattcagccacagagttttaatgatagagttagagaggataaaagaaaaaaaaagaaagaaataacaaaaaataatggaggagaagttttccaaaggtagatgatgaaatcttcttgtccttctcctcttttctcttccttttcttcttttttttctctttcttgctctgtatgaacagaggttctatggcagaaattattcttctcctattttttctgatgaaggttgtcttgtacagaagaaggtctttagagtttgtaccctttacccaaaataaaccctaaacatggcatggatctagtctctccaaatattttctctagccaccaccctaaactgctacatttgatgcaggaaaaagttcacagaatttcagcaaaattaacaacttgactaacttgctattttcttgccattttataaacaaaagttgttaatttcttactaacaacttcaaaatacacacataagcataaaacactaaaaatttcacaaattaagagacaaaataagtgaaatgaaacacaaattacataaaaaaaaaaaataagcttaaaatgatatcaaataactctttactcaagagttatcaattaacctcgcaggactctatgtatagcctaaaatttggacaacaagctacctgtgaattgggcccttaatgacccaacaaacttatggaaaatatcttgatttgaggggcagtttagtctttcgtatttaataaatttagtatgtaaatatcttaaggtttcattggaaattagggttttagacttcctatataagggccttaactctaacctagaaaacctaaattagtaagcctaattcgtagcctccaaatttctctatatcaagaaccctagtctctctctatctctgctatacgcccctaagggctctctctctctctcttcctctctcacattcctctaaggctatttctctctctcatcagagatctgccaactttatccatgtttagtatccttatagagagttatatcaaatcctacctatagtgatctgaatattattatctctaggtatcgatataaccaaaagggtagtaggttattaccagctaactaagggggccgaacctctgtaaaaattcttgtctcatttactttacgattcttgttgtgtaacacgggcaggcgtcagatccatacgaccctactgtcagttgatcactttttgaggtcatcaaaatggtttgtaaataattttcaaatatgaaagtacttgatggatactcgtttaatatcaaaaacttggtaaataaggatgaattgaaactaatgagtatgaaataacatgattatcatgcgttaatgcaacatctgcttccaattnnnnttagatcagtcttgccaaaaaatatcaaagagtgtttgacgcaagcttgcattttctttaataagttatgtaggaaggaattagaaatgaataaattagatgcattacatgaacatgtagtcaaaacattgtgcaacctcaaaaagatttttctgccatccttctttgacatcatgatacatttattggttcatctagtgagggaagcaaggttgcattgtccagtatgggcaatatggatgtatccatttgaaagaaatatgaaggaacttacaagttatgtgcgtaaccactattggctagaagcatctatgattgagtactacatatttgaagtggctattgaagtttgttcagagtacatggccagaggttaggcaattagaattagcaaaccatgaatggacccagatgagcttgatagaggattaagggagaaaggaacaatggtgaccgtgtttaagtttgaacgagatcgagctcaattagtcatgatgaacaataatgcagaggtgcagccatgtataacgtaacttataggtagcttttcctttaatttttcacgatgaacaataacttgattaacattacatgtgttgcagtgaccatatggagatattacaataaatggttccaagaaatcataaaaataaacagaaatgggttgcagacgagcatcatcaaactttcattgggtggttaaggaatacaattctagcaaatttgaacgaaccgaatcatggagtatccatttagttgagtcgtattgcccttaaaccaaatttttcagtagcaaagcatgaagcgtacattgtaagggataaatgttttcatacaaagtcaagagatgatgctcgggaggttcaaaaaagtgacatatgtatcctcgcagaaacgatgcatttgcaagtgcaaaagataaaaccctcttttaggtaccatgatgtattatggggttattgaagaaatatgggatctcaatcgaattccacgttttaaatgtttttgggttgacaacaatgttggagtaaaaactgatgagcttggttttactttggttgat

SEQ ID NO: 38223 - DNA, 3248 bp, Cannabis sativa
ccccttgaggtggctggtctatagctcatcggcccgtttgagtgttgggacctccattagctaaggtgctgacttggcctccttgttggtgagatgtactaccacgtggcactgatattgtccacataagcatgccacatcaggtgggcaaaaattgggataacatgtgcccccaagtccctatgtagacgtctgtgtggatagggacttatcagctaaggttgaactgatataccctttactgaataaatgttgctgcatttttagtctttgaaatacttgctcttgaatgtctgatctcattaattaactacattgtacttctacatgcttttttgggttggagtacttgtgtggcaagtgaaggaatgactccacagaatctatttaagtcttttgggggaaacttctcttcactttgcattttcattctctcattagaaataaaaactttgaggaagctcctccttctctagaggtcgaagccacattgttccatcttctcaagattttcgcgacattttgacgatccaagcttcccatcttcttcgtcaacggtttcttattgcaggtaagctttctattcctgctattcacttgatttagttggtttttccatgaatgcatgaaccttgttctttgctttgaatgtctttagattcccacgttagattgtaattttttcggtattttgatctgcatggtatttttaggatgtgtgatgtgtaatttctagaccaaaaaagatctgattatgaccttcattatgattcttggctctttgagtcacgaagaacacaaagaacgtatttgagttcttgaaaaaacacatgtttggatcctgtacacctcctgcccagccaaggaggtcttgttcaagacctagccggtcgtgggtggtcaccatgggtctggccggccaagggggataccctataggctggccggcctatgcctaaaagtgaagttccttgtcggtcctaggttgggtcatgggacctgcccaatcctctaaggcttgggaaccctggctagccaaggctaaggttccaagcgggtggctaattttttttcctttgttgaccttggctggggtctcgcgacgaccttggaggcatatacaaatgtaatctcatgtgcggtccccttggaaactttttatgagacttggtagtgagttcattataatcaagcacacaacttaggactcactatttgtctaagtaaatgtacttaagccggtactttgctgatactcagccttgtacaatgtgatttacttggacggtacccttaggtacagttgactagaactttgtctgtagctttatcaggttgctcaccttcccttatctcttctatgtaggtgattttgggaggtgtcagttgttgtgtcataggtcctgtcagcctcgcttttaagagagagcatttagtctgtccctttactccttttgtgtgatctcagatcgataatcatgcccagaacgaaatgatcatatcatagtgcactaccatatgacccccatgttgctaggggtggcaactatgggcagagttagagttatagaggaggccacacaacctcgtgaggatgtagacccagaggtcgatcaagcagaggtacttgtggttgactagggggtcgatagtctaactccgaatctgaggtggaagaggttgcgccagttaagagaaggacttgcagaacttgttgtgtcctcgctaacaaccctcttggtggatatgatgctgataggaagccattgaataggcttggtctgccttcagtgatgggtctggaccatgtcttaattcaattttcagagcctcaggttttggatgctaggtcgtggggagacaggtgggtctctcccgcatttgtcattctcgtcgagacttttaacatgatactgactagtgatattatgaggggtgtctaatgtgagatacccactagagattagagagcacaccggcttgctgtcacttggatggcatggttggagcgtcatatacaatagggggtagtgttgccactacacccatacttcagagacatcgttgcttacttcgggatgtgtccaacacaaatcaagtataaagtatctttcaacaatgtttgttttgtatgaagagctaggctggcctcaacctacttcatatgagactagatattacttcgatctaaagtttgccccctatgtccaaagttagtgggtatgcccaaccggactggatacttctacttcagacagattgaccatcaatggttggacgacaccaacaacatacctatgtccaaagttagtgggtatgcttaaaactacttcattacttgggacatctgtgagatccaacaccactatttccagtgagtgccattttataagcgcttcatccctacattgcatataagagatagggcaaatcacatcatgtccctcctttcggagaagatgaacataattcaattggccagtgcgtccaactttcagaggtacaacctgtacccttttgcctctggtgttatgggggcccacggcccataagttagcgtgaatagagccccagctgctaagggggcatatcctggtaatggacaagtctttgacatggacgatgatgtgcctttgtctcagatagcttgaggtatggagaagagagaaagggccccccgccagcgcttagctcacaggggcacaattggagacgcttctcttcagattacgcctggaggccagagcactataggacccacttgtcccttacctgcatctagaggcaaaggcaaggcggttgttgaggattcagatgaatcctcttctgaggatgatggtatttgatagtcgattgcaccatctcttatatccttgtcttacatcgaatatttgtgatttgtattctaacttttctactttcttttttgtaaatatgtttctaggttgagaggtcttgctgacggaccttcaaaggagccttcgggttgtctggggccaaggtggctcaaaccactcgtgctacgaatgttgcaagatcatctcttcctcctcctttagggcctgtgccaatcgagcagctcgtgatggatgaccctccaactaggagggaacgacctttaggcaggggtgccccaaggcctagtgagggtgcaggctcagccacagggcagagaactaaggaggcggctcacaggcatctagagagagcctttccttctgtggacgatgtgttgggttttatgccct

SEQ ID NO: 38224 - DNA, 3290 bp, Cannabis sativa
ctgactgcccaaatggcccaacagggcatcactactctgcccaaatcctcattgccgaccctgttagcagtagcttccaaccacaccagtagagaagaaaatgagtctcttccaacaacagccaaaccagcatacctgaagcaagaccaagcaaaatgacaagataccaatacatgccattccgtttcagcaaaaacaccacaaaaaggacatgagctatcaaccaaaacctttttgatgcataagttccttttggaagcaagacaatttgatgccgccctccacacaagatccttggccttaggaggcactttgagagaccataatttcttccaaaactcatttacctctgaaatatccgaatggtgtttaagttgttggagcgaattgtacgcacttcagactgaataaaaaccattcttttctgcaatccaataccaggagtcatttacaatgttctggtttaaggagatgcctaggatgatagccgcatcctcaggggaaaatagatccttcacaatgtcttcatcccattttcgggtattagcttcaaagaggctattaacattgaagttgtcaaggccatcaacaattgggactggtgtaggatgatcaaaaacagggagccaaggatcagaagttatattcacagttgcaccagagtcgattcttttccttaacccatgtttgacagtatctctagcaacataaatgctactccatataaaactcgggtttgacccaagctccgcagttaggtagtcaccatgtgggtaatatctagctttataactttgctggccaaagaatctgtattaaataggagcctccagccttgtttaccaagcatagccaaattaaagtctctcaaactacggaagcccataccaccatcaaacttatgcttggtcattctatcccaactcatccatgtgataccgctgccattgctattagagttgttcgatttccaccaaaaacttgccatcatcctctctaattctttacaagtaccgattgggaagaggaagacattcatagtgtacgaaggaagggcttgaaccacggttttgataagaatctctttcccagctcgagataaaaatctaccctcccaaccattgatcctcttcctcattctctctttaaggaatcccaacatagcgtcttatttcgaccaactatacttggaagtcccaagtacatgctatcactgcccgcttcttgaatttgcatcaagttacagattcgggtccttgtagcagctcttgtgttcgagctaaagaaggcagatgatttatgaagattaactttttggccagaggcgtgttcaaaggtctggagaagtgaaagaacatggcttgcttcttcttttgaagcttggcaataaacatagctgtcgtctgcgaataatagatgagaaatagtaggtgcgcccttagcaactttgcaaccggtgataagtctagtggcctcatagtgacgaatcaaagaagaaaagccttccgcacaaacaatgaacaaataaggagatagcaggcagccttgacgaatgcccctagtaggagtaatcgtccccattctctgactactattgataacatggtatcgaattgagttaacacagctcagaactaacccaatccaccgaacattgaatcccatcacccgaagaatagactctagaaatccccactcgacacggtcatatgccttgctcatatcaagtttaatcgccatatagcccttccttccattggtcttccttttcagataatgcattgcttcaaaagccaccatgacattgtctgatattagtctaccagaaacaaacgcactctgagtttcagaaatagcttcgctcaagacacccttcattctgttcgccaccacctttgaggcaattttgtagagcacattacaaagagatattggtctcatatcactcatttgtgtggggtatttcttttttggaattaagacaatatgagtatcattaatggaatccggaaacttgcctgaatcaaaaaaatcctgaacaaattgaacgacatcagtcccaacaatggtccaatgtttttggtaaaacgccggagtcatgccatccggaccgggagacttatccagatgcatttggaaaagtgcacttctaacttcatccttggaaacagggattagtaattcatcattttgctcacaagagatggaaggccaaattctatccaagaccgatcccaaattagttccagaagcttgaaacaagtcacggaagtagcccgtgataacaccttgaagccccgattcgcaattgacccaaacaccattgttattctggagctgactgatgctattgttgcgcttcctagaacttgcaacggaatgaaaatatttactatttttatcacccaagttaagccaatattgtttcgacctttgcttccaaaaagtttcccgttgagccaaaatctcagataacttgtcctttccttccttgtggagtcgaattgagataggatcacgaccccatttagagtcacagatttgctttttacaaagattgatccgttggcgaaagttcccagttatatctcgaccccacttcccaagcacctccccacacttagctattttatcttgaatttccatgaggcccgaacccaaccagcacccctcaactaactgcttacataatggttcacgaatccaagcattctcaaagcaaaaagagtgataagtagtagttggaaaagtacctttaagcaatagaaagatagggcagtggtctgaattagtgatctccaagttgtataggatcggcagtgggaaaatagacaaccagtcactagtaaccagagctttgtccaatctttcttcgatccaatcgtttctatttctccctttttcccaagtgaatggataaccaacaagaggcaagtctatcaaattacaatcccccaaagctatattaaacccctacattaaacggtcaggatacttcttgccccctctcatctccgattgagagcccaagttgttcgtgtctcccataaggcaccaagggagattactatcatttttaagagaacgaaagaggttccaagtcaagtacctcaactcacgtttcggctcaccatagatgcctgtaaaccgccaaggaagagacccctgtaactcgactgtagcatcaacatggttgaaagagaagccttgtattaccacctccttaacatatttccataataaagccaaaccctcactgtggccatgagcatcaacaacaaaacaacctt

SEQ ID NO: 38225 - DNA, 1180 bp, Cannabis sativa
taaggataccataagaaaatcaaagtgcacagaaacatgcttagagaaaaaaataccagaatttaagtaaagcaccatagattaaaagcaaaataataaataaacataaagggcaggcatttcttacaacagaactgattggcgtgaaggtatcctggcctttagcaattgtccatggaagacctgcagcctaggaaagcaaaccatttctaatgaggtaatgacactaactatggacaacaatccaatcatgcatgtttcatagtttacataatactttgcagcagcaatgaagctattttctctatacaattaggcagaacgtgactgttggaccaagtaatctatctatgttaactcacagttgtgccaacctaattaacaaaaacttcacacaagaaaatactgcttctgtacatttcgttgtaattaaaggctgcaacagttaattgagctaaaactagactaggcttccctaatcaacaaacttaagctaaaattgatgaaaaaagatacaaaaagcattacctttgctgaagcttgaatttctctggcagtcatatccagtgcaagagcatagcctagcacaagaatgaagcaattaactaccttttaagtgtgccaaacaagtatcagtaaattcattaaaagccaaattccacactttcagtttctttacaagtccagaaaaaaattcacatccattgtcagtaagacaacatctgctgagattcagatagagaagagcaacaagagctaataaccagcacaaaacaaaaagcttacgccaaacaatcgaaaaacactagtatgagattcactttcgaaaactgaagcataattctttagttgttaatagttatctttaaaatttagcagatattaaattgaaattcaagatatcttgtcttaccagttacaaatacatgtataagtttaaggttaccagaaatatacctagttgaactaggtgtaatttgtaacttcaagttctaagcttctactggggacacaagcatttccagaaattagatcacaatcaaaagacaggtcgtggcacacataaaaaaaaaagtcatattcggaaatggaatgcatgctgcatagtaattcaaaatcaaaacccagaggttgattttaactccaaatatgcagaaatcaaagctatacatactagcca

SEQ ID NO: 38226 - DNA, 1411 bp, Cannabis sativa
gtacattcagacttgtttgcgcttgaccaaataaaagaggatttactacgtacgtagtactcatcaacaaatttggcatctcacagattcaaaagctgcttccacatattgtgcccttacactcgtctccttaacctgttaacaaaacaaaggacatacacatgtatatataatttccacaaaaattcacaaacagacaataatcttcaaaaacattcaaatcaaccaactttttattcaaaataaataaataaaaacctactttgaaagcatgaataaacataataaagtgtcaatattgtaggttccaacaggcccttataacaaagttatctaacaggcccatacgttatggccacatgaatggaccagggtagtacgttaaaggaaaaataggcctacctttgtctgggtggtgggctcatattaatcataaacaatgttttgacaaataattaaaaaaaaaaaaaaaaaagttggcaatagtagccattaagaccgttaatattattgcataaaaaaaaaaacccttaatattaatttttgataaaattcaatttctaatgggaaattctggtatttcttttttaagaatgataaaaatcctgaatagaaataagaatgatactcaccagtagtgtagtagcaagtgtaacagttttctccagctcctcaagattttctatttgttgttttgtggtaataagaagctctgtaaccatgtaaagaattctctcaacctaataagaacataaatattattatattatttatcaagtatgctaaattaatattgtttcccctaccttaactaataattacctcaaaaaaatatttagtaataattgattcgatgccatccatagcatcaatggctgtgtacatggcttcgtagattgacataacatcagcctgtgcacaaatatcaatattaatatacatgttcatttatttattagatttacatgaaaattagatagggataatcttaattaattaaatatgtatgtaccttagcaccattgatcaaaggaagttgaatagaaatggctgacaattttgtggccaactttcccacagattcttgatttcttttctctaatttggcccactcattgaggtgcaaaatttgaggattcaaaatctgatacaacttgatctcatgtttaaccctctgcacctctattttcttttccataattgagtttctcattttaaagatccagagccacactgagaacaatttactctgaaataacgttaattaataattaattaacagtatgttttcaaataacatttctatattattcaaaggtaaatttgaaaaataggattatgtagtcttagaatattatcagaagagaattattgaacctttattaaaaaaaatatataatatttttgaaaa

SEQ ID NO: 38227 - DNA, 4339 bp, Cannabis sativa
tcattggaattagtggtgatattcgtcaacattaatggagttcccagatttttgaatctgatccggtggcttctgaacctacttttcacaaataatcacctagtctgtgttcttctttgcatgggcttctcgatttcatggttaactatctatttcgttattgtcaaacgtgagcagccactgcgtgtggtggtgcaatgacaatgctgctttttaagttttcaaattttgttgtagaccttggaagtcaccattaggcaatccaaaattttcctctcaatgattcgttggccatttgtttgttagatttttttttttatactgaaatttgttagatctggtttatagttatttttgagttttatttttattgcggatgaaaacgtaaaaccagaaatgtgttttattgatgaattaaattaaggaatatgtacaaagatagggaagtatatatacggagaagctggactagcaactaacaaccgaaagtttaagaactacattaactaatataactgccaaccgacttaactaatattacaactaaccaaggacagtaaaacagagtaaatagacagagcataattcttgttaccccctaaagatggatcatatatgtcatgtatggccatcttggactagtgagaattgagagtagtagaaggcaggggctttgtgaaggcatctgcgagttgaagtgtgctactgattgggatgagacgaatggtggaattggcaatcttttcacgaatgaaatgacaatccagttcaatgtgtttagtccgtttgtgaaaagtggggttgttagctatgtggatggccgattggttgtcacaatatatgaaggctggttttggttgctcgatgtgaagatcgttgaggagatattggatccaagtcatctcacttgtagtggctgctaaggcacgatactctacctcaacacagcttttggaaactgttggttgcttcttggttttccaagaaacgagacagtcaccaatgaagatgtagaaacccgtggtggatcggtgagttgtagggcaagtagcccaatctgaatcggagaagccacggagatggagagacgatctaggggagtaaaggatgccttggccaggcgatcctttcaaataacgaagcagatgatggagggccgtcaagtgtggtgtctgagggcatgacatgaagtgactcagtgtgttgacatcaaacgttatgtctggccgtgagagtgttaagtagagaaggcgaccaatgagttgacgatagtggggcggattgtcgagaatgtctccttctttatcatcgagtcattgtcttggatccaatggagccttagctggtttgctgctagtataccctgtgtcatgaagaagttgcaaagtatatttgcgttgagatagaaagagaccagctttggctctagctatttcaaaaccaaggaagtacttgagaggacccaaggttttgagtttgaatctcgcttgaagggagtcttgtaaagcatgaagtatttgaatatttgggctagctattatgatatcgtcgacataaatgagaagggccacaaaggtgttgtgagagcctttggtgaaaagggtgtagtcagcttgggattgggcaaacccttcctttaaaagagcatcagtgagcttcctataccattgctgtgaggattgtcgaagcccataaattgatttatgaagcttacagacaagattgttccctgtgacagatgattgaattttgagtccttgtggaatttgcatatagacctcctcttctagatctccattgaaaaatgtgttattgatgtcgagttgcaatgtgtgccattgtttgatggtgacaatggcaaggaggagcttgaaagtaaccacttttgccatgggtgcgaatgtgtcaaaaaaatccaatccttcttgttgcgtgtaaccttgggcaactaaacgggctttgaggcattccacactaccatcactgttatacttgatcttttatacccaacgacaccctataacacgtttgtttggtggaagaggcaccactgtccaagtgttgttagtgatgagagccaagagttcattgtccatagcttgaagccaacgcttgaattggattgcttgtttgtaactttgtggttcgaattcagttgcaactgcaagaatgaatgctttataagtttttgaaagtttagaataagacataaactttgatatgggataactagtagtagttttatcttggggtaagttatagcattcaaaatcttgtaaatagctaggtggtcgtgagacccgagttgatcttcttggtattgcaacaagttgtgatgggagatcctgctggtttggagttgcagtgtcttttgcattgtttgtttcttgtgtctcatcaatttcttcttgcaaaatcgggttaggagtaatagtgcaagtatgttgtgtgggataatcattaatgtgcgtgagagtaacatgcgtattggggaggacaagaagtgagaagggatcaattgtatgatgattagtattaatcttgtggaaaggatagacattctcgtgaaaaaccacatttcgtcaaataaagatttatttagagtgtagatcatataatttatatccttttatacctctaggatatccaaggaaacaacatgttctagcccgtggttcgaatttagttatgtgagaagtaatggtcgaagcaaaggctagacatccgaagcatcttaagttgtcatattcaggtggcttaccaaacaaagtctcataaggcgtctgtttttagagatttggtgtaggagtgcgattaattaaaaaaatagcagttaagaggcattcaatcaagtattggataggaactcttgattgacaaaataatgctctagcaacattaagaaggtgctgatgttttctctcagcgacaacattttgctcaggcgtttctatgcaagtaaagtcatgcaaaatactatgttttgcaaacaaatctttgaaggtgagcttaggtgcattgtcaaacctgaagcgcttgaaaacgcaattgtattgagtttgtatatatgaaataaattcaggtatgattagaagaacatctaatttttatttgagaagatagacccaagtaaacattgagtgatcatcaattaaggttaaaaaatacttatggttagaatgggaagcaacatgataaggtccccaaacatcacagtgtataacatcaaagcaatgagaagtaaaatttgcattattaggaaaagaaagctttttctgtttagccaaagggcagatgtaacatggctcaatattatgcaaattcttggtattacaatgcaaagaatcttgaagcaaatccaagtatttatttgacaaatgacctaaacgtttgtgccaagtttcagtagatgtaaaagcattgatagaaacaggtgtggtgtccaagatgtagagaccattatccgaatcacctttgccaatcatcttcttggtgtgtgtttcttgtatgtaaaacttgtcagcaaagaattttatggtgtgagtatcatctttagttaaacaactaacaaagatgatattatacttaaaattaggaacatacagaacttcatgaagtatgagtttactgtcaagataaacattaccacttttatataccatgagatgttcattattcgaaaaaattggtttggttggacaaattggatgaacactttgaaaggaatttatatctgaacaaatgtgcctagtagcacatggatcaactatccaagaattaattttaggtaaaggagaataattggttaggacaatacctgagttacctgttgatggaccaagatcagtaagcggcagattgctggtttgggcagcaaggagatttaggagttgctgaaactgatttggtgtaagctggggcaacatggtgttgttttcattagaactggaacaagtttcattagaagtctgaaactggtttgctgcagcatcttttgatttcccatttttgttataccccggtggatagccgtgtattttatagcacttttcgatggtgtccatgcatattgcagtgtgtgcaggagggtctgccacgtttttgtggctgagtttttgacggttctgattttcccatggttctttctccttgaaaggcaaaagccatgttgccattcgggtttgtggatacattttgccccctctctgattttcatcctgtgaaagtaggtgaaaaaatctattaatctcaggtaaaggatccataacaagaatattacctctatcacttgtgcataaagatcagacatccccattagaaaagacatgatgtactccat

SEQ ID NO: 38228 - DNA, 1456 bp, Cannabis sativa
aatgaaaattgaaaaggattagacacttttttcttgtactatcttccaatgtaagtatgttatatttatataactagtagaactagttagaggcataatatatagtatattatatatcaaatattatccaagatttgatgccaaagtgaaaaaaataaagatagaaaagaaagtagtgacttgtaagacagggtgttattagcttgtttgtatgttcctatgttattttaataatgagttatgtgttgaaaatttgtatgtatatacaatgtcttatttagttttaaactaattaggatatatataatgtgacattgaaatgttcttaaggttagagaagagcgtaaactacgaagatgctggttttgtctttaagtaagatgtccaaagcatagttggagaccattgtcttcttatggagttcactattggaatctttatcaaatttgattctaaaaaaagttgttagggtaaataccgttttgaacttgtgtttttataaaaatgatagatttgaccctctttgttttgttatatgtttgtattttttaaaatagtacaaaataatacaccaagtacaattttgattaaaataacatttaataatagtttgatcttggagatgttatgactagactgattacatttttttatctgtttgtgctagaagttaacttcaggttggttatattaaaaaaattgactaaaattgaattcacgatattattttgtactattttgaaaagtacaagtttagttgttatgtaacaaaatagagggtacaatctataatatatgtaaaatgtaaagtccaaaatatggtatttacctttattgttagtttactttgtattttttaaacattatttctaattgtgtttggatttcaagtgttgtccatggattttgttagaacaagatcattattgttgaagtagagggattagtgttaatttttttcattcttgaaactatcacaagaagtagtttttacctatgacaagtcaataattttgagtagtttaagttaaaaatgttttataacaacaaggttaatagtagtttacctatggcatgttaatattttaaagtagtttaagttaaaattgtttttataacaactaagttaactataggcacactaaattttgatgttatgtatctgcaactttcacacacacaaaaaaaaaaaacttaaataatttttgctattaatatcccatttatcaataacacactttcaatctttgaacaataaaataaataaataatttaaaataatgaagggatgcactaagttttcttagtgccactctcatgttattatattatagtccctcaatgtcattatctatgttgaagtcactcttaaccaagctcctaataaaatacattatattcttttctttcttaaataaagatcagttaaggcaccaccatacatatatatatatat

SEQ ID NO: 38229 - DNA, 2276 bp, Cannabis sativa
tcttttattattttctccattttcaaattaaattcatcattgttcttctcctcattgtattggattacttttatgtcttatataatacatttacagccaaacattgtattcatatagcaacaatataaataatttaatgcaatacaatacaatacagtataaagatgggctgtggacttactattgtgctggaaaactcgaactgtagctccagatcctcgtgcaccattaatgatagaactatggttcaatgaatcgctaataatcaagcttccctacgaattgaaacaatgaaaaattacattaaaggatttatgaaaccatgaaaaaccaagattaaggttaaaattaataaggataacaagatgaaaacaaacataccttccccattaggacgggaagaatagcagaattggtgacataacccattccaaaaacaattgcagctggttttccaacaaaatcagcaacacatttctccaattcgacgtgtaatgttgttgtgcctgattgatttcagtgattattcagcgcaattattgtcaaaatctaaatataatcaattcaatttcgaatcgcaaaccaggaaaatctcaaatactaaccaccatcgacacgactgctacaggtactcggtgaatacttcttcaaagactcaatcacacgaggggtacagtactcatcggaagccgcaaaaccaaggtaattgtaggatcccaagttcaagcatttggtcgtattcgaggttcggctgcgaaaaggaacaatgagtttcgatacatacacagaaagaacgaatacaaaaaaggtttgaatacaataatgtttacttgagcgtcttgttattgtccttggagaatcgctcaaccacatcgaaccaagcatcgggagcactagcaataggtcgaccgaaacaatcctttgagaacgggaaaaagaagaggaagatgagattgagattgagatagttgttgggaatatgatatgtaatatagcttagattacctgaatacgaaggtagagacggcgagtgtagaaatcttcgagtcccaaacaaagaggtgcataaccatggagattattagcagaagaccaatcaatgagtttgcggaagaaatccctgatttggccaaataagaagagaaggccatagctgaaataggttgataaagcagttagatatggaattgcaatcattttgaggcagatccagatcgaaccagagaaagaaagagataacagaagagaggcttcgaaatttcaaaggaaaggagtttaattaattaatgttgttgttatggcttatcaaatcaaatatcaaatggtttctttctatttgtcgcccccacttgttggactattcgtcccacctcggcctcccgcgacccttgttttgccggaccaatcaaataaacctttttttttttttttagtaaatactattttagattctgggtttttcaaaaattataaattacatccccgttttgttataagataaaatataacttgtattttctaaaattgtataagtaggatcctaactaattttttgtcaaaataaaacttaataataatatgatctagagatgttatgataaaaccggttacattttctgtatctgttcatgttaaaaattatcttaaaattggttatattaaaaaataatatttttaaaaattgagctcaaggtcttatttttaccattttaaaaaatatatggtctattttgtcatttaacaaaatagaatgtccaattaataatttttgcaaaacagatgatccaaaatagtatttacctttttttcttaattttattttacttttgaacaataataaacctttatttactttttaatgggatattgaccacaatatctgaattatacatttgttacatttaacttaactcatttttgttagggagttgttattaggcactagtggtatatgtgatttaatatttagttgaaccaatagttatattgacatataagaagacccttgagttgttcatggtaataagtttgtgcttacttatgtggccaatcggtcaagtggggttgacaggattgcatacattctcttggattctggtgagtgggacacttctaagcttaggcacatgttcgattctaagacttttaataacattttgaaagcgggcacacccaataagcaaggaaatgataagtggatttggacaaaagagcattcagggcagtttactactaaaggcttacttagtccaagcgattgaccaggccccgccttg

SEQ ID NO: 38230 - DNA, 6210 bp, Cannabis sativa
  modified_base (3873)..(3879): a, c, t, g, unknown or other
  modified_base (4603)..(4605): a, c, t, g, unknown or other
cttgttgcttgtcaagagattctcgaaactgttgttgtaagttatccattaatttggtatgttgttcaacctgagggttgacttcctcagggtctcctaacttcacgtgaggctcatcaggtggaatttggttgctggaatcaataccaacagtagttggttgtctcgaaggacgagctaaggaactagttctgaggcctccacctgacatctagaatttaggtgttatcccatcaccagttccaccaactggcatgccccaagtgggttgactagttgttttaaacacttgctgatctcattgcaaccatcttgattaggatcttgagttgtggctctcaataaaagcaccaaaacattgacgcaaaaatttggctaatgctcactcgctagattggcaagagaaaatagaatttaagtagaatcaatgagagagagacacaagatttgtagtagttcactccccatatcgtgacggtaatggagttacttctacttcgattttttattgcttatgagaattataagaaaattgactaagaaaagagctttatatttcttgagagagaaactagagagagatgctctaaacttatgagctcttgtctgaatgtgaaaaatgaactagttgagctctccttttatagggaaggaggtcctattaaattaataataaaatattacaaaaattatgaaaagaaatacttttagttaatcttgcccatgatgatgatctaatggtgaaattgactttgaatgataactgccagttttcgaagctcacatctcgtctgttggattgttttttcggtaatttgtagaaaaaaatcacacttgctttggggaagaatttttgaattgaaatcctatgaatcatgatatgggtgtgttacttgacttgaaagatctttgaaagagatttaaaatgcaagttgaatcgcgccaatcagatcaacactgaggaagttatggctattttactaaaggctattaaacactcagtgctcaggttgacatccaacgcctaagttgacatactgacctcaacctaaatgtcgtgtgagtgaaaaaaattcacagacttgtattttttgatgcctaagttgtatgttgacatcacttagtcaatttcttagttttggtgaagctattcaccaattctcggagatgtcatttttccgcaaaattgggtagactcaaaatttcccaattttactgatattttactttgtcaaaatgttgaaaaatcaaagtatgaatttgacttgtcacaagtcgtagctctcatttactacaaaaaaatagtcagatgctcgagatagaatctgaatcagataagtagaagacaacacatcaagctatatgtcaacctgggaactgggtgctcttcaaggggtttatcagggcctcgtttaaatacttctatggcgttcaggattacgaacaagatctcctaccctatttttgatcaaaataagaagaatgccagaagtagaatgtgtatttgaggagcagaaacatgcaaaccaggttgtacagcaacctgggtgctgaggcccagttttggctcccaaagaatcttattgtctccccgagatcacttgtatcttcattattttcaaaaatggaaaagatgcctagaacacttttctcaaaaaatacttggaacaaatctcggttgacaaaatgcatccctaagcgttggatcccaatttttctcatcagatgcaaccatttgattctcgaaaacattgaaatctcaagtattggtgaaaatagagaatatgctcgaaagacatcttgaggtaaatatttagaaatagcccaggtagacaatatgtcaacctaaacgctgggtcccgattctaacttctagatggctttgtttattccctgaaagttcccatttcttaattgttgatgaaaacagagaatatgcctagaatacttcgtttggattgctgttggaaatggcctaggttgacaaaatgtcaacttgggtgctgggacttagcactaggtcaatctgggcattggatcccaattttggcctccaggttgatctgtttctttcccaaaagaacttgattccttgtttttcttggagacaaataaaatgttgtagatacttcttcaatattgtggttcgaagcgtcccgggttgacatattatcaacttaggtgctgggtgcgtagctgagtgctccaaataagaagtgttttgattcttattctgatgcctctaacatgttcgtgataggtcttattcaaggttaagtataaaatttgagtcatttacactaagacggacccaaaaactgaaatcctaatcaagaatgtcaacctgaacactaggtgaaaaccttaggtagtacaaaggtagcaattaagagagttaatcataatctaagaataagagagttaatcataaaaaatattgtctgaataagtacaactatcaacaaaacacgtagcaattaattaaagtaagcaagtacaagtccacaataatatatagtactacaaagttatgcatcaatagtgcaagtacatacatgaccaatacttgcaacttgcaatcacaattcaaataccaactctctttactcaaataaataaatacgaactctctaactaattatgatgaatgtgataacatgtccagcactgtcgtcagatgatatcaagtgcaattctctataaatataatattttattaatttttttttaataatgtcgaaaattaccagtgtgcgtataatcatgctcaactaagtaattattagtttgaattttactattatgataacggaatgtgaaaatgcaattagtgtagtacagttgctgaatgtgacgtatatatggtagctgaaaattgacatatgaagacttaaaaatgtaatagtcaaatatttgaaaggatcatggtgaatgtaatcaaattactaatgaaaatgaagaataattataaaaagaattcaaaagcggtaattaaatagtagtataggcaaggccaattgcgtattatatatgtgaccaacccatttgtttgctcccaaagataggcccttcccttgacttgactagggcgtatgcatttgtgtcaccctcaattgttcaatccttgttatattgtttgaataatatcctgccaaccatatatatttggacataattttgtcacgtaatgtactttcatggaatgtattctatgatgtacggcagcccttagatggatgagttatttgatctgagggctggggttgatttaggaataattagggttaaaaaatagtaacgtaccctgagacccatttaatgtaccctgagacacatttaatgtaccatgagacacatctaatgtaccacggaatacattccgtaaaagtacatcacttgacaaaatcgtgttcctatatatatacatatgaaaaaatttagaatacacccttaaaacgagtttacggatgtattttttttttttatctgttttgacatttaggagaattttttagctcattttttttatagtcgtttgtgttgtagttatatagaacatcttgtaaaattttgagcaattcataaaaatttaacatgtcaaaaataggcttcaaatagtctatttcacctgtacgtataaaataaaagagtgttttgtgcagctgattgtttgaactttatttttcagcgtgttaaatttttctaaaattctcaaaattttagacgacatcttaaataattacaacataaacgaccataaaaataaattaactaaaaatttctcaaatggttgaaacaaatagagagtatatggatagactctttttttaaaagagtacattgttgaaacattctatatatatatatatatannnnnnnatatatatttttttttctttatttcaaatggccccacatttgcctattttcacttccttgctgctgaattcagatttctgatggagttaaatcatttttgtaagagaaatggtaaaatggactgttggtagctagaatttttatggtctcatattaatattggtatagttaagtactgagtctcttatataatttaagaaaatattttttaaggaaatactggtgcttaatcataaagcaccacctataaaaaatgtcggagaccattgatgctaaatattaacactcttttcttaattttatagttatcaaaaaaattaaattatactttgaactttccgtccctctgaattttatgtggcaataggagtacttggtcttttgctgtcatggttggaatatttaggtgcatgttacaaatatacatatatatgtatatatagatatatacataactaaatgatattggaaaattttagaatgtatctagtgccaatatattaatacttgttttagtatgcgaaataattttttagacaatttttttctcgtgatcatgtacgttatagttatttaaaatattcagcacaattataataaatttaaaaaatggaattaacacgccgaaatagggtgcaacaatttgttgtgtccgtgattattttattttatacgtgtgtaaaataaatttttttaatactatattttatattgtaaattattnnnaattttttaaaaatttataaaatactttaaataactatgaagtaaatcaatataaaaaaaattgaaacaaaaaattcttctaataccgaaacacataaaaagtagatgagtggattcctattaaaaaagtgcattgtaatcacgtaaatcatattttttctttcggattaacgagaggtattttttttttcctttttaaatataacatatataattcctgttagagatatatatacacactggtgaggtaccgattccaagatctatatttaaatattgcttaagatcaaccttagccaaactcattggaacttctttattaattagagtgaagatttaagtatagggttgtctctcacatattttaatttgacagagtaataatgaataaggagtatgtcactttatcattcacacagactttaatagagtgatctacaattcaaccaccataaatctaccctatgtagttgcatatataattaaatatatatatatatatatatatataaaatgtggagaagaattataatttatgaaattgtcaacttatattatattattaattatttgcattgagagaaaacacttttacttgttcttagattgtttgttagaccaattctacatgactatttattataatattcatataagcacgtggggtaaactgatcaaagataagtttaatttatattattactgcatggatatgcaggcttcatttcaaatcttgcgtactacgtattctgtcaaaaattattcctctcgtcttgtatatctacatttggtttaaaagttaaacccagaaacaattttttaatttgtcattctaattattgttggagtctaagtgtttgatagtgaatagagtccatctggtacttgggatcagttgaggccaacccaattttgtgtgaatatatgggtgaggacacccatttgaccaccatgcacaactcctccacggcaaaagcaacatagtccaccatctgcaagaaatttctatctataatttgtcctaatttttatttcaatttaagtacaacaactatgtatataaattaaatcgttctaactaaatactaatcctttgcaaaattatataattaataaattaataagtttacagtaaaaagaaatgaattaaggcatttatttatatatgcatcttcaaatgtattttgtgtaatatataggttatctagaattgtgaattaaattttaaattttattattattcaatactttaaaatgttaaacactatatgcgtgtattgcattattaattgttaaaaaatttcttatattatttattaaaaaaattgtggggaatttaatgctaaaatacaccgataacttcagataaaaatactataaaaaataaaaattaaaatataatgtcacattttgtggtgttggcaccttatctaaatattaaattctaataacattacacctataatatatgattacaaatgttagaagggacccatatatatttcaagatttaaagattatgatcaagcaaatattaatttttacttacgtacatatatttattaaaaaataataaatgcaatatatttacaaataatattgtgt

SEQ ID NO: 38231 - DNA, 3061 bp, Cannabis sativa
  modified_base (35)..(42): a, c, t, g, unknown or other
tttggaaaattgaaaaaattgcatgtgcgggttgnnnnnnnnaaatagtcaaaaaccgcaccacccacaccgcgaacacccctacattcttcttcttttacactgttctctctaagttctattagacgcacaaatcgcatccttctgatcccaccatgtcaaataaccaagaaacagagcatgacaatgaagctcctgcccagatcaacaatggcgataatcaagttcaagcactggtattagaacgaatactcaaatagcaagatcaagaaatcctattgaagatccctctgatccttattatctacaccatagagataatcctggaaacgtcctagtatctcaattgctcactggataggacaattacattgcttggtgtcgagcaatggagttggccatttcagtcaagaacaaattggggttcttgaacggttccatacctaaacctcctatgtctgatcaaacactctatcatgcttggattcgcaacaacaatatagtgatttcttggataatcaactcggtttctaaggagatttcttccagcattctctacgacgagtcagctgctgcaatatggaatgatctgagggtcagatttcagcagaggaatggtgcacatatctacaatgtcaagaaaattttgatgaaacaagaaactaagtccgttagtatgtatttcaccaagctcaaaacagtgtgggaacaattgtctaacttcagacctagttgcacatgtaatggttgtacatgtgggggagttaagaagttgcaagaacaccacatcatggaatacatcatgtcttttctcatgggattatccgatctctattcataagtgagaggtaatattcttgttatggatcctttacctgagattaataaagtttttcatttagtcacacaggaagagaatcaaagaggggggcaaaatgtttctgccgatcccaactccaacatggcttttgcctttcaaggagaaagaaacttagggacaccagaacctcccaagaatcaagcacaaaaacgtggcaggcccttttgcacacactgcaatatgcacagacacaccattgagaagtgctataagatacacgggtattcgcctggatacaacaaagcaagaaaatcaaagaggcagctgctaatcaatttcagacctcaaatgaagctggttcaaatactaatgacaacaatacactgctgcctcaattgccaccaaaccaataccagcaacttctcaatctccttgcatctcaaactacaagtctgcctgccaccgatcacggtccctcgacaggtagttcaggtatcgtgttaaccaattgtgctttcttgcctaaaaacaaatcttggatagtggattcaggtgccactagacacatttgttctgatttgagtttttttcaaagtgttcattctatcaattcaactaaattaattctacctaacaataatcatgtcatggttcacaaatgtggtaatatacgcatcaacaacaatctggttttaaaggaagttctttatgtccctactttccaatataacattatttctgttagttgtttgacaaaagacaataactatgttctcaaattctttgctaataagtttcacatacaggaaacacacaccaagaagacgattggcaaaggtgaatcggctaatggtctctatcttctggacaccacaactgtttctatcaatgccttcgcatctgctgaaatttggcatggaagattaggccatttgtcaaataaatgtcttgatttgcttagtgattgtttacattgtaaaacaaaagatttgcacaatgttgaaccttgctatatctgtcctctagaaaagcaaagaaagcttccttttcttaataataaaagctttactactcattgctttgatcttatacattgtgatatatgggggccttatcatgttacttcccactctaatcacaaatattttcttaccttaattgatgatcagtcaagatttacttggatttatcttcttaaacaaaaatcggatgttctttttattatacctgagtttatttcttatgtgcaaactcaatacaattgtgttttcaaacatttcagatccgacaatgcacctgaactcactttcaaagatttgttctctaaacatggtattttacatgacttttcttgcattaaaactcctaagcaaaatgtcgttgctgaaagaaaacataaacaccttctaaatgttgctagagccttgctttttcagtctaaagttcccatacaatattggacagaatgtctactcactgctgatttttaaatcaacgcacgcctacaccgaatctaaagaacaaaatgccttatgagatttcatttggtaaacaacctgattatgatggattaagatgttttggatgccttgcctttaccattacttttcatagaactaagttcgagccttaggcaaggacatgcgtgtttttgggatatccaaggggagttaaagggtgtcgattatatgatctaaacacaaaacagatttttatctctagaaatgttatttttcatgaacatgtatttccttttcacaaacttaacacaactagtcataatattaatccttttttacctctcattctcccaaatgagcatataactaacacacatgttgaaaattaccctttgcaacatcccagttatgtttcccctgatcctattctgcaagatattgcagcagaaacaccagaaaatgacgctgaggagcatgaagaaagctcaactcagcgcgatccttcacctacaccaaacatcatgcctagaagaactactagagtgtcacggccacctagttatctacaagattttgagtgtaaaaacctactggaagataaaacttccacctcttatcccatctcaaaatatatctcttattccaaactttcaaaagcttataaaatgtttgttcttgcagtaacagctgaattcgagcctcaaagctacaagcaggccattcaattcaagaaatggcttcaagccatggacaatgagcttttagcactcatcaccaacaa

SEQ ID NO: 38232 - DNA, 2029 bp, Cannabis sativa
gaatgaaagtgtacctctatgataatttttttcttgtatatgcaaactcaataccacaataaattcaacaacaaatgaagattttagaatataaaagatatatagtatatcttataaaagaaatagtgtattgtgtttaaaattgtaaaagagaacatatacataggctttatttatataactgaaaaaaaaaagataaatggtgccaacggttgaatcttttcatatgccaactatttaattttttttactaggagacaactaattaattgctttttatcaaacaaatacacaatttaattattataaatcttttcatatatcacataattaggcattattgtgcattaaaataggctttttgtctgttgtgcattaatgtgggtgggtaggcacggttggaatttttctaacaaaattggtttgcccatttgggctttgttatagaaaaaaaaaattatggggcctattgggctgaggggcctggggcagtggcccctgctgccccacccttcagccggctgtgctggttagttatagatacctatcattgtaattgatcattacacttatatatattaagcttcatttttgaataataatttacagctcaactctctctctctctacattctgttatttcttagatggtatcaagagctacttttttttctaatcaatcgttgctcttttgttctcttcatcttctccaaaaatgtcttattcaacctctgctcggcgacttctcacaccaatgacactacttcattcagtccaataatcttctctcacaagctctctgccaagcttgacaataaaaactttcttctctgccaagcttgacagtaacaactttcttctctggtgccctcaaattctttcagccattaaaggtcgtcaggtattgaattttatctctaattctatcactgctccaccacgatttctcactgatcgtgataaagaaattggacttatcaatccataattttctcagtggaaaattcaagatcagcttctctatctatggctcctttcgtctatgactgaaggtattctcacatgtgtggttgattgtgatacctttgctcaaatttggaaaattctcaaggtctattttgttacccaaacatccaccaaaattgatcagttcgtcgcttaacttcagaatctcaatataggctctctcttaatcaatcaatatctcctgcgtatcaagactatagtcgatcatttgagctctgttggtcatgttgtgtctcttaaggaacatgtagttgcgatcttcaaaggtcttcctcttgattatgacatgtttgtcatatctactaattccaaaaatattcacatagtcgctgaaattgaatcattgttgctctctcaagatcattgcagggacagtcactccaaggatattgattcaacaaatcttgccataatcgatcaaatcacaacaagaattcaagttactcccccttccatggtcctcggccctcttcttcaaattcagctggtcgaggctcatggaatccatatgttgttaatcctcgtggtaacttctcttctcgcatgtctgtgttagggtttatgccctaaaagtaagtatttaatggataatatattatacaatatataaaatacaattataaaatattaaatatattaattatagaagtacaattaataaatatatgaaaatttcatattcatatatagatggtatgatcttgtaaagtagtacaagagaattaagatcatacaatatgaataaaataagtcggtaatgtattaaagtatggaatctttaatatggaattaccaagtacgatttatatgcactatactctagtgcgtgtgattttgatttgaattacatatgtagataggcatatggtaaatgtatgtaataacatctttcatcaatatgtcatttatcatgaaagttttattcatatcacaacgatgatcattagtagatctatttgaatcctgggtatacatgaagtcatgtttgtgttcattgagttct

SEQ ID NO: 38233 - DNA, 2055 bp, Cannabis sativa
ttttttttttttttaaatttgattgcatcacataaggggaacggaaaccaaagactaattttgccaaagttatcatctttgccaattttcttggtagggactcttattcacatgttggttgtattgtacttttggtagggatgatcttcctattggtgtgaaatccttacttgcaggatgtttgattagtaaaagttacaacttttaattttttcaaaaaataatgcaaataaattttttgaattgaatggttgactatataacctttgacttctaattatatggaatacttagttacaaaaaaaaataataaatatatcaattttaaaaatatatatttttagaaattaattaataactacatggaataactatcaacaattaggttttattctactaattaatggtgatgtttataattttgatatttcactcaaaaaaaattgatattatatttcaataaaaaaatatctaaattataataatttataataaaataaaaaataaacatttatttctcaataacaaaatttttttgttttcaaatagtaaaattgtttaatatttatttaactatttcacaaaattatttattttgtgtttttgtaaacattaatatatattattaaaaatttctatgccattgttacagtaaatataaaacatgatcacgtgtttgattttcaaaaatttactttgtagttatttgggttttaatcatgatcatattaatgttattacatgtttaatagagattttgttttttattatttaagaatcattttgaatattactaactttaatattaagatcacgttcgtatatttaatatcaatgttgacatttattgtattgtattaaaattataaaaactattattgttaatgatataattatgtatatatttgaagtaagtttagtcattaacacataatattatttgatgatcaatttgtgtgattttatgtaaatatatctttaaatgtatatatttttatttttttttttatattttttttgtaattatgttgtttttatattacactaataaaaacaaccctatcaattttagaattattaacttttagaaattaattaatataaatggccaataataataaaaaaattgagtttctatgattaattttacttaattacgaaaaaaaaatatctatctcttgttgaattgaatggtgggtagactacatgatctttgacttatataagtttatcatcttatttaaagccacttttatagagttgtcaattttttttgctaaaattggactcctatttacatgttgattgtatttggtggatgaccttcttatggtgtgaaatccttgatgtaggatgtttgattgataaaagttgcaacttttctttccaaaaaaaaaaatacaaataataactttgttgaattggatgataaattatataacctttgacttgtatatagatatggaccacttttgataattaccgaaaaaattaaggagttttttttttattttttttttatttttacactttaaaatatatatatatatttttgtatttttacggaattctacatagaaacttctattgcaactagtattgtaacataaattgtaacaaaaaatcatataacaactcctattgtaactagcgctacaaccactttataaacacaaaccgtaaatttgaaagaaaaaaaaggttaaaaaaatagtatatgagataattccccaaaaattaactataaatatcagttctaaaaatatacatttttagaaattaattaataactactattgctataacaatcaacaattagactttgttctattaataacagaaagaaattttaattttcatgcttaatttgattatttaattaaaaaaatatatataattttttacatttatattaaaaatatatttacattcattattatatttttatataatgtaaaaataatttttttaattaaatagtaaaattaaatataaaattcaaaattctaataatattcatttataagtaacatctaagtgcacccataatatttc

SEQ ID NO: 38234 - DNA, 1913 bp, Cannabis sativa
tgcggattagattggatcggatacttagtgaacacccctaattgagcaccttaaggtgccacatagcaataataataataataataataataatgatgatgataaatcatttaaaaaatagtacaaatatcattcataaaaaatataaaaaaattaaataaaaaataaaaataaaaaattactaactaattaatagataccacatcgatatgacattaaatactttaaggtactaataatatggtaaggtaggttgggatgctctaaagcttgatatggctaaagcctttgatagagtggagtgatattttttgaaaggtcatgttccattttaacttccatttgcaatttgtctctcttataatgaaatgctttactaccactagtatctgctttttgattaatgggactgttcatggtaatattcagcctactagaggtcttaggcaaggggatcatttatccccttacttgtttatcctttgtgctgaaggtctatcctctcttcttaaagctaaacaagataccaatgttctgaagggtatatttatttcccgtagagctctctcttcaactcacctttttttttactaatgatagccttatattttgcactgctgatagattctgttatgctgcccttagtgatgatctcactgtctattctaaagcttcaggtcaagctgttaattttcacaaatcctctattctattttcacctaatgtttcctcccatatcaagggcatcttttacactaatcttaatattcaagataggcctttcattagtaaaacacttaggtctattgcaatgtctgaccaggtcaaagcatcactcttttgcttttcttaaagatagagttcctatgtgcttcattcttggcattccaaatgcttctctaaagccggtaaggaaattttgcttaaagcagtcattcaggctattcttgcttatgcaatggcttgctttcgtctacctgtaaagctctgtaaggaaattgagggtgtgatggccaaattttggtggggttcctcaagagattctaagaaaattcattggaaatattggcaatctctttatcgttctaaatttgctgggggtttgggctttcgatctcttattcattttaaccaaggctatgcttgctaaacaagtttgacgtatttttactcagcctgattctctgttgggtctcactcttaaggctaggtactttccaaactcatctattttagatgcgaaggctaatcataatccttcttttttcatggcgtagtattctctggggaagggatctattagcttttggtttaatttgaaaagtgggagatggagaggatgttagaaccctgcatgatcattggcttccttccactaagttcaagcaacctattcgcaatctggagccaaaccagaccaaactatcatactttattgatcattcaggttcatggaatcttgataaactttacaccgattttgatgcctttactatcaatgatattttggatgttccgtttccgggaatcaatggtgaagatgagcagatttggggaaaggaaaattctggtctattcactattaaatcagcatatcacttcgcccttgcaagtagagatatcccctctacttcttcctttcaagctttaaaaaccttttggactaaagtttggcatgctaatgtttctccaaaagttaaacattttgtgtggagaattattacaaactctatccatgtagctacctaatttttttcaaaaatatattatcccttctgctttgtgtcccttatataacatataccatgaaacctgttgggttttatgccctaaataaaactcattttcatataatcagatttacttattaataaatatcaaaaataacattttttttgttgcatggttcacat

SEQ ID NO: 38235 - DNA, 2287 bp, Cannabis sativa
tatatgttatattacatgtatcaagatgataatattttttaaaagtctcattgattgaagtacttacacatcattaaatacatgagaaatgaaggtaatgatatatgatacaatttattatataaaaggtccatatattttgattaagtaaaaaatagagcattgttattaagaattagtggtgtctaacacttctagatatgtcgctttgcgattggctagtaatactttctaaaagttattatattaaactatatgagactcgatacttaattagaccaatagcaataataacacataaaaagtgctagataccactagtgctgtctaacatttctctaaggaatatatagcaaattattaactacttataacgtattatattaatatggtgttggacactttaagatgtctaatagtaatgcactttaaatatgagtattgttataaggtactagtgacgtttaacaccacctaaaagtaatgttttacgattagttaacgatattccacagaaactaatacatttaattatgtaagacacgatacttagttgcatagtaatgtattaggcactgtacctttaacatttttctgtaattaataacccttataaagaatgtgacagagaacaaaatatactaatatatgtcagctcagctgttttcaaattgaatgacatttctctttggcactaaatttgcaacttgctagcaatgccctgtactatcttcatcacaatattatataaatatgtatatataagtaaaattacaaaatcttgaatcagtgcaggccaagttcatatataggccagttgccagtagctgaactcataagtagtgactcaatataatattgtgtcaaaaccttaaaatataatagagaaatcgactaaaagttgagaaaatcacattacaattcaagagattcctcacgtggtagcttccatgatctatatccaacaatatataaagttgagtgagttgtcagtcgaaaaaatcacacaacaatatttatgtgacaatatgattatggaaagagaaaagggcaaaatctgtactgtgtcattatcataaagaattaatgtgggacttaatttgggagagagtgcctctcagactaattaaaatggatcgttgccaattattaaagcatcaactacaaaagcatgatgatctattgaaaaaagtatggtctttagtcttaatataagcatttaatctaagttttgaggtgatttaagtcctagagcatacattatagtctttgctgtcattgactcattgatattgatatattcatgtttgggtgtgtggccataaagtgagaatctaatggaaaagaattttgtaaataaaatacgtacacactagtgacaccaacgaaatagaacttttaacatatctctgatttgataggaaaaaaaaaaagaaagtaaaagcatgcacatgatcatacaaaagatctagtgactaacacataagaatttcaaaaacacctttaagaaaattaaaaaaaaaaatgcagagaattaaatatttacatatggaagatgcagattaattaacctttcacaagtggtatgatttacatttttacaacttgaaatgaatagggttggatagctcccattcatgagcttaattcatgttttaacacacaaatctctcaaagatcttctgttgttttttattacatattttttctctttgttttttgttttttattatataaattttgcctactaaattttgtgattgatgtatagccagctagctagcctggaaatattatccagatcgaaccactttcttataataaatgaaaccagaaattaaagaaaggggacctctcacattatttcctttattttgtaaatataatgtacgaagccttctataatacttataatgggatttttatttatttatttattttcttgatgagatacaaaactatagtcgaaatctcgtaataattacatatttaatattgaagatttggttttgtgaaaacagaaaaaataaaattgtgtcaatgaatatcagtgtcgatctaaaaccatccttaatggattgaatgctatatttgacaagtgaatgggtaaggttcgacccaagagttgaacgagatgggccgtcgcccaagacctccaacctcgacccaaaattttttgttttgaaaagaaaatttattgaatttttaacacctcattaataataataattgtgattgctgcacatataattataaggataacttatataaatattgtaaaactagt

SEQ ID NO: 38236 - DNA, 3216 bp, Cannabis sativa
attataatacactaaaatagtaattatagactttaaattttaaaaaaaaaacataaaaattcatttacaataaagattattaatttactttgaataagatatttttgaatttgggggtggtactggtggtggtggtcggtcgtctccttccttgaccggtcaccggcggtggttgccggtggaggttgccgacggggactagcaaaatagttttggttggggtatgggtaggaggaagaagtaagtagaggaagaagacttgaattttaagaatatgtagttaaaatgctctgtagcagttaaaatgctctgtagcagttacttaaaggagtgtctgccagttatgctccaaggcagttttctttggtccattatggtctaattggtcagttttccttacgttttgatcatcacaagcattgaatttcaatttatcttgctgctacatcagatcttccttcccaaattctgttttcactactgctcacatggatccattgacgcacaaaatgaaaggtattgtcagtcttgatgatgaagatgaagttgttctttcttatactgatgaggaagcccaggactctaattcacccaacgatcacactctccttgctactgtccttaccaggaaaccggtatatttagtcacacttcaaaatcaaatgaaagttcactgggatggacgctatccagtacgtatctctgaaaaacaaactggactttttatgctctcttttggctgtgaaggggacaaagaaagagtactcattggagaaccatggcacttccaaaatcatcacattgttctctatgaaccaactgctcttcaaactgttactcctgctgatcttaaattttcaccattctgggtacaagtttacaggctccctttcttaagtaaaacaaaagggttagcaaaagctttggggaatatcattggagagttcatagatgttcatgaagattctttgcatgaagggtggggaccttttttgagaataagagtcaagcttgatgtcacaaagcctttgagaaggggtcgtaatattcggttacaacaaatcaaagacaagttttgggtggaatttcgatatgagcgtctccctgaatggtgtatggaatgtgggtgcttgggccatccttaccagaaatgtttagccttcttggaacttctggacaatggaatcgaaccagaattagcatatggtcctgcgattaaaggtgctgctttaccaacttcaggctacgacagatatcgaactgatttttcaaaggcaaatgcttggcctttgatgacaagattggctagaaatactttctcagcaactatatcaggccttacgctacgagatcagccacaaccaaggaagcttctctatggagaaagttccaacaagaaccaaactgaaaatctgtttaaggaaaaagccaatcgaaaccatgatgcaattcctatgaattcggcatcaacaatcccacacattgccttaccaaacagtgatctctggagcacacaagacaacaatattggaaacttttctgcctctaatatttgtcaccatgaacacaacaagctgatgcaacaatccattcacaagacaacaaataattgcatcaaaggttctcttaaaattgcagcagataaacaccccagtagcagtgttcaacctgctatttcatctccatcagactcggatttgactgaaattttcttgccgggtgttggactcccacaaggctacattgcaacataccctcctgatgttaaatctattgttatgcctgatctccccaatgtcaatgcttatcctaagcaacactacctaaacacatcagattccatggttacaactactgctgctcatgacataaacaaagaaaaccaatcaccgaatagagtttccaaaaggcattcagaacaaatgtcactgcgaaaggttcttaagcgagtgcggggaccaattccttctctctcaacttcagaattgtccactgatgctgagatcaacccgatggcttctactcctgctgcagatacatctggttccaaagacaaaaatgcgggtgctggtttccaggcccgcagccagccatgaaaattgttagttggaatgcacgtggtctggggaatccaagtgcattccgtcatcttcggttgcttgtaaaacagcaagatcctcatgttttatttcttatggaaactaaattagcttgtaatgtagtaaatcgctttcgtcaatctttacattttaataatggacttgaagtcccacgggtaggcttaggaggggggctgcttttgttatggaaggataatgttgatgtaactcttttgaattataatgcaaatctctttgactgctacatgatgtgtgacaatggaccaacttggcatttctctgccttctatggggcacctgaaactcataatcgtttacacacttggaagctcctagagcgttgtaaggatgttgcaccactgctgccttggctggtgattggagactttaatgaaatattatcaaaccagaataaaaatggtggagctcctcgatctgaaactcaaatggaaaactttcgaaaggtgctggatgtctataatctacatgagctaccttttgagggtgatcctttcacttggactcgaggaaggcgaaaactgaatgctctcaaggagcgcctcgactggtgtttcactaatgatcaatggcatgacgtttttgagcccattacaatatgccatttggattacttcaagtctgaccatcgagccatttctgtgaatgtcaatcaacgaacgggcaatcaaaatcaaattcaaaggcactctcgctttaggtttgaaaaaatgtggctcaatgacacagaagcttcagagctaatattgaaaaattggaggactaaccttactggttcgactgtggaaaatttctgctctaacatacaaggttgcacaacttctcttcaatcgtggcactctcaaaaatatggaaatatgaagaagaaaattaccaaggcacaaaagcatgttgctgatctcaacaataccaacccacattcagcagcaactatagcagaattggaaaaatctgaagacattttggatgaacttttagcgcaagaggagacctattggcaacaacgatcgagggttgattggttacaatgtggtgatgaaaatacaaaattctttcatgcatatgcctcaaataggaa

SEQ ID NO: 38237 - DNA, 1569 bp, Cannabis sativa
ttttaacgcggttgtgatgaacaacaagattaagggaagtacaagaaaggaagtagttagcaggagacaactcggtcgggaagaggaggatgttgataatttagcggaagctttacttaagaattttcacaacagcctaaacatggagcgtgaagaattgttgaaacgcctccacgaaaggaaagctcggggtgtttagcaagaaaagtaaatgattttctcttctacaattttgtgttttttcttttttggaaagtgtaatgtgctcagcatacttaagtttgttcaaaaaagtaattgaacataatgaaaggtccattagtacaatttgcctaaaatctaatacaaaatgagttatgacaaattcaatagagaaaaaaccatgtaatctaattttgatcacttataataataacaaaacatgaaacataaatatggaaattacatttacatctatattaacaagttgccaatttatcaaatttttactaatttttttcaaattcaaaatgataaaattttacttttatgaaatagaaaatattgctattcattacaactagtaacatatttagagtaattcttttagtattgaatctctctttgattgatcaatgtgtgtaataacattgtaaaccatatgtttttatcagacttaatactaatcggttaagaaaatttgtcaaattaattaacaacattgaaatataaaatttgtaaagtaactacattaattttacacttaattagcgaatttttagaaaaataaatatatgtcaatcctaaaattgaaaaatgaaaaataaaccataacattcacaaagggatccttcccatatatggtaaggttccgagcaatagagaaagctagagatactcgattgtattggttcgattttagaaagaatccttgaactttttttgtaaagcatacagaagatgctagggagagagtcgcgttagagagaagggaattttcaaatgattcagcatcaacactaagaaagaaaaaaatgaaagagaatatggaaggtggcaaattagaggggaataaaatgtcatgtctattttgagaactcattgaattttattttatataagaaataaggagaataggtggtgtagtgagagaattacttggtgttatagattctttctctactctttcgataacttaaataattttgaaaacgaaaatatagtaaattattagcatattttaaataagtaaaataatttttgataattatggtgctagtgtagtcatagaaactcaaatttctcaagacaaactacttagattaaggtccaattataattagtgggatggacatggaatattagtgaggacaacaataccatgaatattgggagacgtgatcaaattgactttttaaatgataagaataaagcatccaattgttaactgccatgtgtcctacaaattgagctgaacctcaaataagtggtgttgtacgaataattatcttaatttataataattattaagtatatatattgattgaatagttttataatacacccttttttcaagaatctattgatgta

SEQ ID NO: 38238 - DNA, 2031 bp, Cannabis sativa
tacagaatttagcctacaactcattagttcctaaatgaaacaacataaagttggcagagtatgcttcatcaacatattagcttacattcttcacatgtctggtaactcctggaacatgtcctggcacttatttcccaggagttacagcgacatgtgaagaagatattgtgcaaagaagaacagcaaaggaaagaaagaataatcacatgagtaatatgtgtatatgaattttgtttgtaacttaggcgggttcccgtgataaaagaaaaagggaaatgataatgactgtagaaatttgatattatcacaaaataataaattaaaaacacctgtcaagcttcgtagaaaggcttctgtttagcttctttctattataattattatttgggccattgggtgtgtgaacaattcagattgtacgataaataaaaaggattacttgtcagttatctttctctgtttcactcttcattgattcgtcatcactgagtcagaacatttacctcttctactgcttatatgcagtgaagatatcctttcaatttatatctgttgttcgttcaacaataaattccttccgaggcacaagagactagcgaaatgctaagttattcccacaagaaatagaactccaaacctcacaaggtcaaatcatgggcctaaccactgaccttaattatgcttactgatatggttttagtgttcaagatacaaatgaattgtatggacattgttaaattcgagcagagtcacgttagataatgttagctgttaggagttagttatagctttcaattatggttgttacattctgttacaacagctatactattagttagctctttctcttgttttctcaattgtatataattggtactggaacactattgctcaattaatgaagatcagtttctctcaatctattattctttctttcatggtatcagagtaatcctttaagttctctctctcaatctttgatcttcttcatcctcgtggttcgtctactctgtcttcttcctctgttttcatggcgaaaataaatccacaagcatagcaagcagctcctgctgcaatctttcaccctgtgttcttttctcacaaactttctgttaaactcgataacaacaactatctcctggcagccacaagtgatttctatcatttgaagccataatcttcaagactatatctcagatcagcctcctccggcaaaatttctctctgatcaagatcgtgcgttggatattgttaatcctctgtttacacagtggaaacaacaagatcagctcctttattcatggttcctttcttcaatgactgaatgagttcttaccttagtggttggcagtcaaaccacagctcaagtctggaacactctttaggtatacttctccacttaaacgtctgctaaaattgaccaattcactaatcaattgcagaatatcaagaaaggagccttgtccatcaatgactacttgttgcgtatcaagactgttgtggatcttcttggttcagtaggtcatcgtgtcactgtcaaagagcacatcgctgcaatcttcaagggtctaccagttgagtacgacaccttttttatctctgtgaactccaaaaatcaaccatacacagttgctgaaattgagtcacttcttttctctcaagaacatcgtatggacaatcatcatcgagatctttgctaatgtcaccatgaatagaaatcatcatagcaggccctcttatcctggtactgctgattccaaatctaacttcaatatacctcctggttttgggcgtggtcgatctgtttggaatccctatgctattcctcctcgtggtggttctttctcaccgccacctccttctgctactggtagaggtacaaatccaaatccttcaatgcctgctgcttcaaacaacactagttcacgcccaatctgtcaactgtgttcgaaacctggccatcttgttgcacgctgttatcagcgttttaatatggaatttccaagaattggagctgctaacatggatcat

SEQ ID NO: 38239 - DNA, 3376 bp, Cannabis sativa
aatacttctctgtcaatggattctcttacttctgcaactcagtccaaaccttctgctgcagtggtctgtctaagttccacacctcctgcaatatttagtattcctaacctcaattgctctttgccagcagccccaatcagtatggcttttgctctactgctaataaaggtaaagttgtcatgtcttttgaactccctagagttgttcattctcccactaacatttctggagtgaagaggtctttcaccaagcaaaatgttcaggtgggaaactctgtcagggagatgctgaaaagggctcgggctgaagctgaggatgaagatgttgctgtagttccttccatttcaactcctggtgaacaggcgagtgttgcgatgcaacccctcccagaaaaatgagtctcataagttggaatgctctgaggcttggggagtcctcaagcattctgaaacctctccctgttagttaaacaacatcaacctcaagtgttttttgtaatggagaccaaacttagggctggctccagtgatagatttaaggttaagttgtcttttaataatgcttttgaggtgcctaagaatgacttagggggagatatttttcttttttggaaagatgttgttaacattaatgttttatctttttctagtaactatatagactgttgtaaatattgatagtaatataaattttcacctttcttattactatggttctccttatttttctcataaattagtttgttggactcttcttactcggttatgtgatgttgctcctttatccccttggataataatcggtgactttaatggttatttaggtcgtaatgataaatccacatgttctaaacctccaccttatgccatgtccaattttcaatcttttattaataagtttaatctctctcccatgccttacattggcaatcattttacttggaagcatggtaatatttttgaaaggcttgattggagtattgttaataaagcttggttggacctttttcctaaagttactcttagacatctttcctattttggttttgaccatagggctttaaaaataattgttattgattcgaagaataaaagttctcacaccaacaagtttcattttgagaattattggctttcagagcttgatttttttagcattgttcagaataattggtctttggagagccttgatgtccatagtaatatcctgtcttcctttcttaattgtcaatccaactgtgtcaataaaattaaagaatggaagagtcaaaaatccatttcaggcataccattaagaatcttcagcttctttggaaaatatctattcttcctcagcagtcaatgatgctgatcttcagcatgctgaaaaacttcaatctactctggatgctgccctatataaggaagaagtctattggaaacaacgttctagaacttcttgacttaaggctggtgacaaaaataccaagtactttcataacaaagcctcttctagacgtaggactaataccattactcatatcacccttgataatagtacggttatccaagatttccatcttatttgtgacaatttttgtgctttttacacaaatcttttctcctctcaaggctgtgactctcactcattaaactatattcttcagggggttaatcattccctttctaccagtcaatatcagctcctcatccttcctttcactcctgatgaagtcagatcagcttcgttccaatttgctggggacaaagctcctggttctgatggtctaaatgcacatttttattagaagaattggtcaattatgggcagcagtttttgttccgcggttcttgatgtattgaataatcatgctgacatctctcctgttaatgaaaccattttagtttttagtccctaagaaaaataaggcttctttcattaaagactttagaccgattaatctttgttctaccatttataaagtaatctctaaagttattgcaaacaggcttaagttggttttaagtgatctgatttccaacaatcaaagtgcatttcttagtgatcgcatcattttttataatgttcttattgcgaatgaggtcattaatgctattaacaacattaaaggaggtaaagttggttgggctgccctaaaacttgatatggataaagcatatgatagggtggaatggaattttattgaaggcatcttaaccaagtttggcttcccttctagtttgtctccctgattcttaagtgtctttcctcagtatcctttagattatctataaataatgtccgtatgccttctttttctcttactagaggaattaggcagggtgatcctctatcaccctatctttttctccttgttgctgaaggtctttctgctgccattcgtgtaaaatccagagctagtggtttcagtggcatttccatttgtagatttgcacctccaatttctcatctactttttgtggatgacagccttatgttcactattgttactcatggtaattgtagagccattcagtatatccttctcctttataataaagctactggtcaatctgtaaatttttccaaatcttccattctttttctcctactactaatactcatgataggaatttattctataattctcttggtcttgataataaacctttcgtttataaataccttggtgtcctgcaatgctttggcaggtccaagaagtcttccttccattaccttctccaaaaagcaagtgcaaaattaaatgtttggaataataattttttctctaaggctggtaaagagactctaataaaagcgtttatcgaagcaattccttattatgctatgtcttgcttaaaaattctggtttctatttgtaaagaccttgatagacttattgttcaattttggtggggttctattggtgataaggctaaaactcattggaaaaattggacttccctttgtatttctaaattttatgggggattaggtttccggtctttcgtctttcacaatcaagcccttcttgcaaaacaagcctggtggatcttcatcaatccaaattcacttctctccagaattttaaaagcgaaatattttagaaataatgactttcttactgcttctaaatgccataatccttcttactcttggagtagtatcttgtggggtagggattttctcaaacaagggctcctatgaaaaatagggaatggtaaatcgatctccacccttcatagcaactaggtccttggttttaagattctcaattttaaagacaacattcatccccctgaaaacattgtatccttcttcataaataatcttggttgttgggatcttcataagcttaatactttttctttgaggatatcatgttggaattatttta

SEQ ID NO: 38240 - DNA, 1304 bp, Cannabis sativa
tcagcatagaaaaaaaagtaccatatattagtttataattccttctgtcctagttaccacaaattgctagtgcactatagcaatttataaaattctatggcaacccagatgcttatctccgcaagaatcttggctacttcttcagcgtatatattagttctttaatctatcgtggatttgtggggggacttcaatgagattttatctatgtacgaaaaaaagggagggacggatcgtgatggtacaatgataagtgaatttcaaaaagttcttgatgactgtatgttagatgatttggggtacgaagggccaaccttcacttgggtatatcatgcttggtctgagttgtatccttcaatccaagtgtctcatggtgattttctttgttttgatcatcgtcttatagtcgctaaactagagaatgtagtggtacagagtcagaggttgtctcccacgttagccatcgtacagagcatggatgtccttgtgtactagagccaatgatctaacgactaaggataagggaaattcaaaaagggaaagccctaagatgacacgtgtccgaggcctagctcgtacggtctaacacccttaaatgccatatgggaaatatgctacctaacaacccaacggtaggatttcatcccaacagtgatccatctaagactgcctatgcaaagaagctggccaataaatactccagaaaaagtacaagggacgaggaccttttttgtggagagagaagactgattcttcatcatctaaagcaaacacattttgtaaccctacaatcaactccagaatattcctaccaagcttcgtcttcttcaagaggaacacggtggaaatgagttctagtcaattgtatctctatttgtataaacagttaccggccgatgagcctaataaaatggatgtgtggactaaggataatcaacctgtgaaccacgttaaaatctattattttttattttgttatttactccattattactttcttaagctctaaaaatatttagttgccgaaaaactcgataaataatatcgataataaaaaataaggtgtccaccataacccattatttttttgcattaaacaatacagttttacaattttagaacaataaataatttaaagatgtgaaagtaaaatatttgcaaatactacatagtcaagttaatcaaaataagagagtgactatgccaaattgaacaagaagaaacccaaatttttttctatgatttacggatttcgaaaaatcatcaaataagatttttaattaactacataattatcattaaat

SEQ ID NO: 38241 - DNA, 2889 bp, Cannabis sativa
tctctctctctctctcgaaactcaccctaaggaatctacccacagcccccaacccaccacccacaacctcgattccttttctccacgaccaccgcaaccacagacccaacgatccacgaatccaacaaccatcgcagacgcaacgatccacagacccaacagcttctccatcggcaatgtcgtcaaaggtaagtattgttattctttttgtgcatgatttagggttaaaatatataaaattattgagatatttattaagatttaggattaatttttgagtttggattagatttaggattagatttgtcaggtatgtgttcagtgggaaaatttggatttttggcttggtcagatgcaggcccgatataggtctaatgtatttttgttgttagaaaggtataaaagttgaagaaaatagcccgatgtaggcccgttgctgggcccgatagtgtgcctaagtttatgctttctgtaaagcccaattgggccgatgtatggtctgatatgaggtctgatagtgtgtctatttttgtgctattttgttaggcctaataggtccgatatatggtcagatttatggctcgatagtgtgtctaatttatgtgtttttgtaggcccgatgggactgatatatggtctgatgttgggcctgattatgtatgtgggttttaaaattgtgagactgaacttcttcttgagtatttgtaggggaagatttcgttcatcgagttgatgaaaatttgcaataaagactttgcataaatgaaaaagaatttggatcaaaagattgtagcattgtagtattgggcttttaagtccatattagagctggctgatagttttgaagtcagaaagtcacatggctttctaagaatgattaactctaagagtaagaaaaatatgaacattaatgaggaggatgttataaaattgttcggcaaaaatgtaaattttttactccttcatcttggtttattttttcgactgtattacatttttttttttaaaatttacattcattacaataatatttttgttttcagttgacattatactttatcttatgtttccgatcccaccaagatgtgtttttgaggaccgtgagtggaggtgaggcgtcattgtttatcgacttggacgaactagtgattggcgaagatggacaaccaacacatgaagctcctcttagccaagcaaaaaatcttgtcgaacagttagaggagcagtggaggcacccaaatatttagagatgttacaccacttccatcatctttacaactggaggcacgttcagttcctccatcaacagtagcagagtctcaagaaccatattattctgccattttgactaggttagagagtgttgagagggagcatattgctatgaaggaagggcatatgtcactcatgaaagggcagaacaagattatgggtcacttgaagttcctaatgacactcatgaaacagagatgactgttagagttttcgagagagaataagtcattcttgttcatcttctcccaagtgaataaaacaaaaaagggagtaggctatattgccaattataattggtcgaatctttataaataagatgttgtctttactttatattatttacattctgttatttaattattttcaatcgctttaatttgactcattgtcgttggctaaaaacgagattaacaagtgacatatatttgttcactgttttattttattgtattatgaaacttatttttgtatgtaattgttgcttttgatattttacttaatttgttctaagatttaatttataattttgttaacctacataacttgtttctcagtgtcatatttttaactagctgataaatataattagtttctcagtctcagatttcaacgtccaatattggtgactctgatgtctatccaaaaactttcccgtaacaacgacaattccatatagtaaactaaaatacaaagcatgtaaaatttatatgagttttggtatttgtaactggtttcttcattgagaaactagttttgattacatgaaagtaactggtttcttatttcattaccttaacaaaattatttttaactggttttttatcaagaaactgatttttttcattaaaaaaacttattttttttttatcaagaaattattttgattatgtagaagtaaaatttaatatgaatttttaggttttttatattattccttcttatatatttttaaaggtttctttttttaactattatatttgatgcaattaaatttgtatgacatatatattaattttttttcttcatatgtttgtaaataatatattacaaagtacaaatattttattaacaaaatatcgctaaccaatcgtagagtgtgacatatggaagatgctggcaaggtcgacctaagttgtttgggagccttagacgaaaaattaaatgtaggtattttattaaaaaaaattaccgatcaactcatatatttagtttttttttttttttaaaaaaaataattcataaattttaaaatagtcaagaattttagaataatatgtattgggacctataaggttttattagttttttttaagtgcatatttttttgagaattgctaaaaattttttcgtgttaaactgctattggtgtaattaagttgcgggtcctatataatttaagaaaattacttttagggaatatcgctaaccaatcgtaagatgacacttataaaaactgctgcacataatagcaatgttctattttttttataatcatttattatgtatattatattaaaaaatatttattatattatatataaggatgatagaaaaatgtcttgttgtgtaatggttcaaactatttaatttttaaagagcttataccactcatat

SEQ ID NO: 38242 - DNA, 2092 bp, Cannabis sativa
gtttgatgtctgtttaggggagatacagatgtatgttaacttgagaaaataggtgtagtagctggttgtttcaaagcagcaaggggtggttcagcaaatgatgatgatgcattagttggtggtgcatcggtttgttatagatggtaaaacattagttggtgtagaagcaggttgtaatgcatcaaattatgctacaatagacggtatgtttccctctgaatttctcacaattgtggtgtcattagaatctggatcctgaattggtataactttagcatccgatgtatttgtagtgagaataggtcccaaaccagttgagcagcctagaacaggctgttcagtgggcaatgttacagcatcaaaattgggagtattgcttgtgagattcggtgcattttgagttgcatgagcatgattctcacaagtaggagattgggattccatatgcagaacaggttgaggaattccattagaagatgacataaaaaatattgctgtaggattcgtagttgagttgacagttggtacctgattatttgaagaggatgaatgagcagggaagcatgattcattgaacaccacatgcctggcaattaaaagtctgccatctttattctcaaacagataccccttatgattgttggaataccccaagaaagtgcacagttgagatctatactccatcttgtggtgattgtaaggtcttaagtaagggaaacaagcacacctaaatgacttcaaaatagtataattaggtgtgttgccaaacaaacattcaatgggagaaatgtgacatataacaggtgtgggcaacctattaatagtgaacacaacacactaaaatgcaaaccaccagtaagagaagtccaaaccagattgtgttaggatggttaaacctgtttcagtaatattcctgtgctttctcttagcacgaccataatgttcatgtgtgtgtggacacgagtgagtgaaaagaataccttgatcactcagaaatctagtaaaagtcctgtactctccaccccagtcagcctgtaaattctttataggtaaattaaattgcttttcaaccatgcttttgaacctaacaaaggtatcaaaggcttgatttttctcaactaagggaaatatccaagtgtacctactatagtcatctacgaagtggacataatacctatagccatctttagcagtaatgtgagagggacctcaaagatctatgtgaattatttcaaggggtttagaggctctgttaagtgatatacggaagggctgcttatggttctttcctagttgacaagcagtgcaaaattgtaattgtttgagggagcctgtatgaggaaccagaggtgaaattttggataaaacatttggagagggatgtccaagttttaagtgccatgtattaacatggttaagttgaaatgtatgaaaaatagaggtattattgtcaaaagagaaattgtcaatgttatttatttcaaacttggtataattgtgagattgcataacattgcatttacaagaattggaaatataagattcagacttaacaattgtactagatgtattatgacaccgaggtgattcctggtaacttggacctagtgtggtgtctcctagctggtacaacttgctcttaagtttctctttgagaagaactctcttcgtttacttgtcattaacaaaatagcaagttttgtgaaattcaaggaaaacattattatcattagtcaattgagaaacactaacaaagttctttgtaatggtaggcacttgaagaacataattcaattttaatggaaaattagtagaaaagggtagagaagttgtaccaatgtgagaaataaccagcttcttaccatctccaacaacaagagagtgaggaccatggtaagaggctgagctttcaagattttatggattatttgccacatgatgagtagcatccgtgtccacaaaccaacaattatcatccctaaagtctagaacaaaggattttgagaatacttatcgatcatactcccaatcttgtacaataacaaaggcacgaggtgcgatagttcctggtttgggagtgacccaagatttc

SEQ ID NO: 38243 - DNA, 1697 bp, Cannabis sativa
  modified_base (1284)..(1298): a, c, t, g, unknown or other
  modified_base (1489)..(1490): a, c, t, g, unknown or other
attattttcatttttgattacattataattaaagtagatactccctcaatttataaattttgtaaatattttataaatggaaatcaaatttgaaatcatttatttattgctaagtacagtatgcatccaagattctcccattattattgatgccttatgaatgaagcttagttaactaactttttgcctattataaagtattgtcgatgcctagcctagctttttgccggaacaaaaaaggtggcacaagttttggtatatagtttaggataatgaggtattgaaaataattttacatagagttatttttttttaataagtgtaattgttttatgttatgtttatatttaattttatttacttatttattctttttataatcatttgtcaaaattactcgtatctactaaaaaaaataattttggtggatatgatctgagagagaaatatgtacaatttttttttacattgttcttcgacttcgctattagaaaatttttgagtctcagtctttattttactttaaaaaaaatatatcaaacttcttagttttggttatagttaaattttttgataagcaacttttaaaaaaagaagagaaaaaaaaagtgaatgatagtttttttttaagagaatgatagtgtatttaactaatataattatatgtgtaaaaaaaaaaatactatttaatgaacataaaataaaataatgatacatattaaaaagaatgactctttcatttttaaaatgtaaaaaaaagatgactctacataatcgtttttaatactactgaagcattatcttatattattttaatctatcctttttctcttaattaaataatattaatcacccgtttattctttttcttcttcacaattttaatagttttggtataaattcttgacaatttttttttgtaataaaagtttattgtactggattattaaatatttcaaatatatataattaagtaaatacatttacaattataaaataaacaagacgatataaaattataaatttttatgacactaataatatatatatatttatgtgtgtgcattatgatagggtaaagaaaataaaactttaagctatagagttgatgttataaaaaatattgaccaaaaaattagactgatcaagatattatatgttatgtttcattttgtaaaatatttagtaaggattcaaaaatgtatataatagtatatagataattataaatatatgcaaaacaaaaaattttatttttaatcacaataaaatttgtgattaaannnnnnnnnnnnnnnactaattataaattatgattcttatgttgtgactaaaaaattcatgactaaaaatattaggcacaaaaatcataatttattgtgactaaatatacttttagtcacaattattgtaactaaaattaaattaataacaatttgtatctaaatactatgttttactcacaaataactttttattgtgactaaanntcacatttaatcacaaaaaaatttatgttgtaactaaaaagttatacccacataccacatggaatattgatcaaaaaatatataaaatttgttgaatgaatggataccattaatcattaacgtgtttttttttcaaataatttttgtaaggtttaatcattaacgtgttgattacctcacctaacctaactatatatttatagtttt

SEQ ID NO: 38244 - DNA, 1510 bp, Cannabis sativa
ccttctttactttggcagaaaaaatgaaaatgaaggttgtttggatatgttttgcattggctgctatttatagaatatgctatattgtcagttaaccttgaaaatggatttttatgtttaataagaaccttcattccaagctcatgcatttccaactccaacccggaataataaagcagaacctacactataatatctttaaaaatgtgtcattttattcctgagtccttagtatgttggaaaatacagagtatccaataaaattttgttttacaagactaacaacagggcagtttggttgttcgcagcgttagacttgggaagagcattggtccaccccatggaaacggtttcatattaattacttttctgttctcaaaataaattacaataatttgcattggcccagataaaataaagctacaaataaactcagtaacttgtcgaaaaagactaaaattatatgtatccaaagatatggatttctcacttacctatgtttagtctacttttactacattctaaagttctaattcctttggatacttcttttgattctttttccagagggggctggattagtggcaaacttttgcttcttaaatttctgaaccattgtgtaaacctgcattcatgtgacaatttgaagcatattcagacccaagtaagctgcatgtattaattaactgttgtattttactaaaaagcccacagaacagaaaatagacttgaaagcaggataagattaaagcaaggttactaatccatgcaatggccaacagcccaaaatttcatgatgtcagtcaacaagagctaattcccaaaactaaaacgatgccatggttccatcttattcatattcacttctcttattaaatatttgtttcttcaatttgacctttaaccttttcttctgatgttgttttcacattacctttcttacactagatgtcagtcccatgtttgttatgccatttttgtccacagatttccaatgcagagcttctctctcctgcttccgaagcacatccttcatcccaccttcatcccaaaataatataacatcaaaacatacaagaagtcatccagtatagaaacataatggggagatatgagtatgacattatatttcattggttgttttcatgtgcttgtctcacaaagctgcctttggcaatggaattgtgtacaagatcaagtgagatggttaaattcccaaacatattgccgcagacaatagaagttacttcaattaaacaatatggaagctcctaacttgattgggttgttgcattgttctcgtgatataagggtttatatcccgaagccccagatattcttttcatgtaaatctgcatttaaaaggttgaacttgccaatctctgatgatgagagggattggagaaaagttctgtgcaaaagtaaggttttgggtggctccttgttgtgggaaggttaaagtaaggttaaataattataaatatatatctgatgcctaaagtgcatatca

SEQ ID NO: 38245 - DNA, 3088 bp, Cannabis sativa
attaatctaagcgtacagatttacatatgagttaacaaagtaacatcaatgttctggctgtccctctagcttgattaattaactgaaattaatttatatgtgcactactatataattattatggttttattgttgataagcataattagtgatcatttcacatgtacacccgaaatttgagccccatcctcaataaaaaaaaaaagaagaagaaagaatatctacacacttgtacatactatctacacataattaatttttgtcacagtattaaaacaattgattcactttttatatataattattcactgtagaaattaaatacacatgattagttatacccatcgatgggtatttgataaaaatttgatttctaaaaattaatattatctaaaattaatatttaattataattttctttttgtaaccatcaatgggtataagtgttccataaatatacatattattttgtgtagaaaatgtacagtttacattaattacacgttgttgtgtgtaaaaaaatatgtataatctaaatgtatcttaattattattcatataaatataataagtagattttacaaaaaatacaaattgaagtaaaaaaaaaatcgtttaaatggaagtatggagaaaaatatattttgttcttatcattggatattttttcctttaaacacaaacataagtttaggaaaatattgtggtgcacctcgagaaagaagtgtaatgatacagtgccccttttgtatttttgataactaagttataatttcatttttttatacattataattattaaagagattttgtaaattttaaaaaatttagaatatataatttactgtattgaaaataaatttcaaacaatttatcgcatacatatctattttgttttatagcatgtaaaatagattatttgaatcatatattttatatggttaattattttaaatttctcaaatatttgaaaaaattattttaaatagggcgaatatttaaattaagaatgataggaaaaatgttatcatttcaatcatttttttaactccatgataattttaattttaaagcatataaataatttttcaatagaaaataatttttttattcttattatcttttgaatagaataattaaaatatttttacaaatgcatttttaattctgtacaaataaattaaatttttaacgatttcaataaaactatttatgcaaaaatgggtaaaaaaacaaaaattaaggaatttttgttttattattgctaaatattattgaaataattacaaatttgatgcattatatccttcaaaatcgaacattactaatcaattattttaggtgatatatataattaatattaaattttagttagtaaatagtatagagaatattttatatgatatatcatcaaagaatagagagtggaagggcaagatagcaatccccaccattttgtctccgcccaactcctgtgggcagatggaaaccacgtagcctttggaaaaaaaaaaaagaactcgttaggccttcagaacaaaggtaattttgttcattctttagacaatctagctaattatatatatacttctatctaaatatattcttcttctattagaaaggcagactgaataaaagtaaagtataaggcaacgtactggtagaggaaaagatctttacatagaaatgaaagaatttggtgtaattaatgaacaaaatattgtcgaatcaaaaatggcgcctctaatctatgataagatgaatgaaccatcaagggctcattagtatattattagtgagaattaatgctaaaaaaaagtattattggtgtaatatctttctctgtattatatgttattggtgtaattaagtacgtatcaggtaccgtaaaatttaataaaatagtttttagaaaatatcgttaactaatcataaagtaccactaataaaaaatattaaacactactaatgcctaatataactaagctcgggacagttgctccatccggctacatctgacttcgtcaatgattgtaattagtatacactattatataaaaatattaaaattatttcaactatatctgaatattgataatcaaagctatgttaaagatagggggtggaccgttgcccaaggccccaaagaggcctcccaatatttttcttcttaacataatataattagtccatttttaaaatcttattttctaccaagagattttgagtatgtagtgtttatcacctttaagtgtcccttaacaatatatatatactacatctacaagtctgcaatgaaagttcaatctctatatttgtcatgttaagttttatttcgttataaagacaggaaaaaataaaactagaattgatgaataatttattatttttccatgtgtctctcttaaattataattttattatataatttggttttccacgtactaaaggtgaagattattgttcgattaaaatgatattttgttctggaattcttggtaagtcagttttattttctttattatattactacactcgatattaattattaggttagattcatttacccaatattctatatatagaatttttttttttcctatagcaaaactttgtggaaagtttcgcaaataactatttgaaaataatgtaaccattaatgagagtttctctaaatattttatattgtcaattagaatttttttttttctaaattcttagctaattgaggttgttttttctccgactaggcccgcgggcactctcagggattaggtgtgacttggtcgaggtctgtagttttactattacgataattagtcttgtctctatgatgtggttttgagtgccttttgtttagataattactacgattagtcttgtgtctttgacacgattttgttttatttttttcattgttggttcgtttttttattcttcgatgtctcaccgtcaaattactgttagtggttgagaataacaagttctctgagactaattagtggtgcaattacgtaccttgcacaatactggaatgctcaagctataaggggttgaataatattgttgtgtcttttgggtggtggag

SEQ ID NO: 38246 - DNA, 4856 bp, Cannabis sativa
attatttctccaaatgtcaaatattgagagatagggaaaaaagtagtccctactatagaacttttctatatttttattttttgattgatttataaattatctttgaatacataagaatatttttccttatttttttatttgttaaaagaaaaaaaaaaggttcttaaagtttagacaaaagtggtgccctactatagaattttctaaatttttatatttttaatttaatttttaaattatttttacatacataaaaattttagattttttaaaaattaaaaaagaatatcagagttcagactttcttcatagaaaaacatcacaaattagtgaaaaatcgaataatataattttctctaaatgtcaaacataaaaattatatttagtatgggatccttaaaccctaaactctaaatcttatacttgagttctttgaactgttctgccattcatataaatgatgatatactataaacatgactctctcttgacataattttttaaagttttttaattttaaaaacaataaaataaaaataaatcttttgtttttaaaattttatttttaaaaaaataaaaaatatgttctatagctaattttatttttaaattttaaaattagaacacaacactctgttcgcgctgagtgttggggaaagattagaaaaatttataggaccgaatttcaagaggtggcagcaaaagatgttcatttatttgactacaatgattcttgcaaaattagccactgatgacaaatcatagctcaaagaagataagaaagacaccaaagtcatcaatgttgctaaaacttgaaacaaacctaaatttttttctcgtaattatattataaatagcttagacaatgtatgaagtgtatcataaaaggaatacgattaaaaaattgtagaagtctttggattgaaactataaaattgaaggtgctagctctaataaatttatggttggtcgattctttaattttaaaattgtaacgtccccgtttcaagtttctagtggaccttcccccacagactaatgactcttatacacgagtacgttactcttggctacttcatgaaatgacgactgatcttgcagaataacacgagtctttccagcatgctttgtccttactcgcctgcttcttaaaaaaatttcccaagaggtcaaccatccagaaattaccccaagtcaagcatactgaactttaaagtcctttcatgatgggctactaaaaagaagatatatcttgttgatatagatagtatcaatcaatctatttaaatccttttcaactgtgtagtctcatacctacgcagtttcagaatcatcacacttaaccttccccaggcaatgtaaatttcacagtacccggtctttccccttgcggatcacaactctctcacaatcaccccttttgggagtctgacgtcctcgacgaccacacttccgactggggcaaggctctgatactatttgtaaaatcctcacttctagccttcattgggccttctcccatagactaatgactcttatacacgggtacgtcactcttgactgcttcatggaatgacgattagccctgcagactaacacgagttttttcaacatgttttgtccttactcgcctgcttcttaagaaaactttcaaggaggtcactcatcctgaaattaccccaggtcaagcatgcataactttagatctctttcatgatgagctactgaaaagaagatacatttttttgatacaggtagtaccaatcaatccatttaaactatttttaactgtgtagtctcatacatacacagtcttaaaatcatcacagttaacctttcgatgtgggattgaacaactcctagtctttctccttgtagatcacaggactctgactgtcacagaaaaggtatattctaaaactgtgataagttaggttcagaaaattctgtcaatcttgcataagatacattctgagggaatgatttttagggagaccttccaaatagctgttatggttaagaagttgcccttgcctggaaggaatacaaaagttatcttaagcacaagtaaaaacagatgattattgtagatttaattgttagacttcgtatcgaagaagacaacaaaagttctaataagaaaaattataatcaagatatggtgaaggacaatttaacagagcaaggtttaatctccaaaggaaagaacaactttaaacctaataataaaagggtaaaattgggaccaaaaggtgatgtcaccaaaaagtagttccaatcacttggtaagtacttaaacttcaataagccaggtcacaagccagtggattgtagactgccaaagagaatatataattttgaagccagtatggtaaatgacatgtccaaagatgttggtaatatacatctattgacattggtttcaaagataaacttagttaaatctaatcaaagagaagggctcattgaaattgattttatttgatatatatgtcctgaaaagagtatgtttaaatcttttgaagaaatagataatagagagaaaatatttatgaaaattttgctacgtttgagatagtggattaaggtaaagtgatcataaaaataaattctgaaaaggagttcactctcaacaatgtgttgtatgtaccggagatctgtaagaaccttgtaactagttcactgttgagtaaacatgaatttttcctagtatatgagtcagacaaggttgtgttgtccaaaagtgaaatatatgtgggaagaaattatataacaaatgggttgtttaatttcaatgtaatggttttttaaaccaattatcaatgaagttaataacgcttctatttattcggttgaatttttcaatgtatgaaatggaagactaggacatgttaattgtgatactatgtgtacattaattaatttgaatcacatacctaaatctcgcattgatataaatcataattgtatgacctgtgttgaggcaaaactaactagatcattcttcaaaaatattaaaaggaataatgaacccctagatttaatacgttgtgatatatgtaacttgaaatttattcaaagaaaaatgggaggaaataaatattttattacttttgtcgaagatagtacaaaatatttttgctaaaaagcaaaaagaaggttatagataaatttataatctataaaagtgaagttgagaatcaactcaacaaaaaggtcaatgtgttaataaatgaccaatgtagtgagtatggattaccgtttggtgaattttttgctataaaactacgacactttatttgcctcaaaaaaatagagttgttgaacagaagatttgcatgttaaaagaaacgatgaatgcaatgttaatcagttatggcgctgcttagaacaagtgggggaagttatcgtgtcagctaatcatattttaaataaattactaaaaaaaagagaaaagaccccttatgaattatgaaaaggacaacaaagtcttccttcaaatacttaagagtgtagggtgtcttgccaaagtggttgtaactttacctaaaatggtgaagataattcttaaaattattgattgtattttcactggttatacacataataatactatcaatttttttgtgtatgagtcgtaaattttttatttttttttcacataatgtgaccgacttagaatgagtccatcaattattcttgagatttgaatagccaaaataacatctgctaaattcatatttttcatttcaaatttagatttcaacatactttatatagatttgaccatcttatcgttgcttgctttctataatgaacatgtcatcaacataaagacataaaatgatagtcatgatttctttctttaaatgaacatagtcgtcatattatcatatggtcaaattttttatgccattattttggtgcttgttttagtccatataaagacttcaccaatttacaaatttttccttgtcgtcgggtagaaaaattctcatgttgtttcatataaattttctcatttaaattccctttggaaaagttgttttcacattcattagatatacatcgagaatgtgtattgctgtaataaaaaatatcattctaataaaatttattctcgtcataggagaatatgtatcaattcttgttgtttataactttaattataagtctcgtgatattcttgtcaatttatttatatgctttcattctcttcttaaaaacccacgtagaccctaaaggcttacatcccggaagaagatctaccaactcccaagcatgattttgtagtatggactcaattttactattaatggcttcttttacaaagaaccttcaggaaagtatatgaattcttcaaaactttgagattcactttctagtaaataggtcaaaaaatctaaacaaaaaagatttcttttataattgttttttaacgtctagtttgatcctaactattttcatcaatagtgtcatgtgttcattttaataaacatgaattatctttgaatctacatggaaatacatctttaaagaaagaggcattcctaaatcatcaatatcagagatttgcgaatcatgtacaaaaaactaataagcagtattattatgtgcatacgtaatgaaaatgcaattaataatttttagatttatgtttaccattttaggtaagtttacaaccactttgataagacacgtatttgaaggaaggctttgttctttttctatgactcataaggggtcttatcctctttgttttttggtaccttgtttaaaagatgattagctgacatgacaatttttattacactgagctaatttagaactgattaaaatcgcattcatcatttttt

SEQ ID NO: 38247 - DNA, 4010 bp, Cannabis sativa
ataataaactaattcatccaagaccaattgaaactagaattaacatcgatagttgctagagtccacaatcataaccaaataaaaacaatgatttcgaacaaattgctaatgataaatttacaacaaaaaatgagagggagggaaaacgcacattacaatttgaaccgagtcgagaccttagatatggaagcagctttttccattccttccctgtcctgccatttgcacctgctccaaattccatgtaagaaaccagtaagaactcgaacccaccatgagagagagagagagagagacctcactaacctcgaggattaacgatgaaaacaaggtcgcggcggcgagaaaaggaggacccacttcctaaaatggaacgttcagtagagagatcaggaactgtgggttgctcggcgttcatgaggcaagatttggccattgaaacaccaactccatgtactcctccacctcccaatgctatctgataaaaacccatcatcttattcttctttcagaatcagggtcacttttggatttttgtggtttgccgactaaaccagagatttctcagaagataatcaaattcaaaggttacgcctccaaagtcatgtcttctttaataaaaataaggtagttaattacctgtcatctcgtcaaaatattagatttgagtattagcagatttttgcaatgcatttgttatcggtaatctttagaatttaacaaataattatttaatattattatttggaatgactagacctttcccttagtttgactatttgtgttcaatttatatacaattatactatctaagtagaaactaaatccaagcacttcaatgcacttgtcatgtataatagaatgaaaaacacatatttatacttttttttattttgaattataatatttttgatgttgttttgtagatttacaatttaaagcttggcaaagactattattcgtggttggtaaaattcaatcatgggttattttaaatcgacgccttaacgttggcctaactatgtacaaaattatcttaaaaattatgaaataataaaaattggaaaataacatttcgaatagcatgttaagaagatttttttaaaaaaaaaaattccattgaaaaataaaaggtaagatttttaaatctagttttaaattccatattttattagaatagtttgtgacaaataacaccattgatcacagcaacggaggttgtttggtacttcgccccatgagatgaggcctactaaaaaatgacgtagattatataatttccccaaaataataataatatgcaaaaagaatttgtctaacaataacgcaattacaaaatttaacatcagcaacaacgccataatttacacaaccgaagccatattttatctttaacccatgtgcttaagagaattgagaacagagcaaaatgcatcaacaaaccctcaagtagaaaatggcaacctttgttttcatttccgggctcttcctctagatttggaatcgaagtggtgagccctgagcttcttcttgcgcaccagtgatgtggcacctccaccctctctgaagggcatgcccatgagagctaatagtctttggccttctttatctgttttagcagttgtgacaatgcaaacatccattcccatgggcttaccaagggcatcaaacctgatttccgggaacacactctgttcacgaattccgacagagtaattcccatgtccatcaaagctatttggattcacaccttggaaatcccttgtcctaggaaacgccaagttaacaaggcgatcgaggaatgagtacatcaccttcaaaatttgagaagcagcaatgagtcacagcataagattcattttgttaggctctaacataaatgatattgaaagcaatagcagaatgatacactttctagtttcttgaatgtaactttacaaaagcttcatcagatacgaaatgagatgagcaatgcatgtaaatgaattggttaagctagccattacaactttctactcgtttccattttgtcactttgaccataatactagtgtgatcctgtcgtgtagccacttaatcagctagagttccatatgattagtcaacaatgaaagttcagtaccattttaagtaattctagacactcaaaagacactgtcatgaaaggaaaatgaaagagctatcaagctcctcgtgctgacaccatttatgacttatatttgttcactggcttgtaactaactgttaccaaagacataattccattgcaaatgaaaatataaaatggttattgtataaggctagcaaagaggattccatatcactaaacatttctagtactaccgagtctgcaacatcagggtattccttcaataatgaaatgcaaaaacaatggatgtttatgacatacaaaacaggccaaattgtttctgacagataagtagataacaatgataaaataaaacacggccaaactaaaactcaatacttaatagacaaaatactcacatttcctctaagtgtgacagcaattcctagtggttgaccttctctgattttgaaggtagcaatggaattccttgctcgtgtccttacaggtctctgcgcggtaatgagtgccatatcattcattgcagcttcaagcccttttgcattttgctgagcatctccaataccagaattcaccacaatcttttctacctttggaacctagacagtggcgatagcaaacatttgtggtgaacacaggaaaataacaattgctaagtacccaagtccaaatcctaccttcaaatattgagctgctaaaaaaacagaagaatggtacggcaggcattatatctagagagcttcaaaaactagttactggaatgctaaaggccaaacttgttgaatttaaagctcaactatttagcattctaattttcttagcaaccaatgaaaaacccaaaaaatataattttgtaaacaatcaaactctctctctctaaaggggattttttaaaagaaaaggttagttacacttattgaataaacctttcttttagactacaccatactctacaacaaagttgacgacactaacaccatactcaatcaaccacgcataatatactatttcacaaaatagtttttcagcattttgtttcaattttaatattgcaaacaataaactaaagtaattaattatcctaattttcctccatacaaacaagcgaaaaagtgcacccaaataatcatgtcttcaatattagtccaatttttatttttttccaacccaaatgcaaaaatgaagtatgccattgcacaaacaatcaaaagaacaaacgaattaacatcacgatagcaaatgttcgtttcacctcgaggatgttcttgtaggaaaactcttccatgagcagaggaacaattttctcgaggtaagtggttttcagccgttggaccttctctgactcggacttctcaaccaacacaggcctcgccatggctctcaccgagacaatcccacatccatttccgtaaggaattcgtgcggaaagcaatggaggttgaatggccgggaactggccgtgaaacgacgacgtagtggaccctaagagcgagggggacgccatggaaatgaagcttcgttatctatattttctcactatatgaatttgagttgaaaggccttttcagtgtagagattgggtttagcgaggaaaaggctggctaaagggcctcgaatttgactttatttactacaaatgccaatatgagtctcttttaattggtttttccgtaaataaacttaagctgaggggtttctgtttgttgttatctttgcaaatggaatgagataaggttaaggtattgccgtattggccatccgggtgaatttaattgatgaaacaaccctttttttattattatttttcacatattttttagagggtaaatattattgggatattctacaatacaccccttaaaatagatatattgatgcaccattatctgttttagcaccc

SEQ ID NO: 38248 - DNA, 1077 bp, Cannabis sativa
ctaggactgcatctacataaaaatcacgcaagaatgcaataacagtaattaataaatccaagcatactagattcttttaaaggaacaaacaaaagacaaaaagctaatattgtatagccaaaaaataaagaggtatcaaccaatttcaatgtaacaacacaataggatataataaaaattaaaagaaagaatcaataaaaactaattaaaaatatagtgagaattcagctcccaattactcaaaatataaagaaaattctaagagatcattatcactataaatgtgcgctagagattttgcgaggagaaggattagatatagaataagagggaaaattggagtggccattgattctctatgcatactcataggactcatctatatataattatatatattgttttatatattgataacactactcatatacatataaaacttgtatatggagtagttgtatatgaaaaatagatttacaaacaagcaggcaacaaatccatttttgggacataaactacttgaaccagtaatttactaagtgtagagccaaaatttattaaattattaaaggaaaaaaaatacctgtagtttgacaagagcagcctgaagtgaggaggtatagccaagcttcttagcaaaggcatcagcttgcaaaaatgatagataaaatcatcaaaatgaagaagtaaaaggccactctgacaatgtaaccttctcacaagaacaaacctgaaattcaaaagattgattgaccaggttgtgttgaatttgcaatttcattaacttaaagatccatggttgtgctgaagaatggaacaagtttcaaaaaaataagtaaatgatgagctcaacgtgtggtactaaattggtaatcctacaaagataatgacaacctatcctcccaattcttacctccacgaccatcataaacagcaaagaaggaagtgtacgcatccagatcagaataagcggcatgctaaataaaaaataaaatcaaatcacactaacttaagaataatctttgacaagaaaaagacacagaatgagacttatcgatacacaacttgaaagcgggc

SEQ ID NO: 38249 - DNA, 2305 bp, Cannabis sativa
tttaattattagtgaaatttttatatatatatatatagtattttttagaccaacttgaaactcttatcttgttaacattccattgttaaaaacaacttaaaattttgtattattttttttttttagtggtagggtatcaataaggatctcaacaagtttttttttttttttaattaaaaaatcaagggcaggtattatcaatagattctgtcccatttgtataatatttacataatcagtaatgattcttgtataatgaaaatatacctgtattttacattttctattatctatattttctttccttaaagggttgatcttgtttaaataatttgtggatctcatatccaataatatatattcatttttggagttttatccgtacagtacactgtgggatacataaggggaaaaatgcttcattaggaatcggatccaagtgtggtacttttttaaaaagaacaatataattatgaaaatatttaattatttataattctatatatattttgaatattttatagaataattagtatttttgtcatctaaattttcgacactatctaatttcactcactaaaatataatagttacataattatagcccttctgttaagttctgtttattttagtatttttacccctgaacttttaccaataaattttgtttgctccctttattaaaaaaaaataatttaaaaaattataatattctatctttttaaagaaattataatattctattaatttaaaaaataataataaaaattattaaaaattagataaaaatgttaaattaattaaaaaaattaattttacttaaaaaattactatcaaactttattctatttatcaacacatatttaaaaaatcaaaccaaagttattgagagtctaatgaataatttaaatgaactaaaattttttgaagaaaaatcaaacttatttatatttattaaactcataccttaacaaataaaaaaaattaaaaattcaataaaaatataaaattattttgaaaaaaataatataaattaaattaaaaaatattatatttacttaaaaaaatttagattttttgataaaaacaaaatatattccaatttattcctgtaaaatttagtttgtaatatatttttacaaattaaatttttaatatctaaataaattttctactaaaaaataaataattttttatatcacttaaatttctagtataattcaaaagattaataatcataaaccaaatgggttaagacagaatctacctacaaacaaatcattggatttgataatattaagagtaataactaaaattagatatccctctagaatcctaatctaaacctaatcctaatccaaaataataaaacccttaaagaaacatgtgaatatggctttatagtattatgaaaggttgcttgtttggatatttttatgtatataaatacaatgcacacatggcatggcaacttggtaatttcaattcaattcatatttggaattatgtatttaggagatatattctacacaaacaacaataataaattaataataattgaagtttgagttaatgatattagccattaaattgttgtggaccaaaagtagagtttgactaatggattgaatttgatttgagtaggcattaagtttggttgaaattaaaaggttttagacaataacttaaaagagaattataagagtggattattgcaaaccaatatgtgtttttggtggggagaccacagcttttaatttttttgatttggacaacatgagttcttccaattttgtgggtcattggatttacaataataataataacaaacaagaccttgtacggatgttccaaaccaaagcataaatattactagttaatataatcttagatttaactaattatggccccaaacaaaggatgatctcctcaagaaagaaaccaagtaactaactatacaaactaacttgttggattttggtttcttttggaaaaaataatttggtattaagaaaaattgaacaagaaattgaaatatttggattaaattattataagtatctttttatattagtaaaattagaaaattatgtttgaattcctaaattaaatcagggttcttatttttaaccaaattgatttggattctatatattattatcacatcttttataataaattccataataaatccctcaaatattatgtagtttacaaaatcaccttaattcttttgtgtttaaacccacttacaaacttagctattttatatagttgtgcttatctagtggtttagctcctacta

SEQ ID NO: 38250 - DNA, 3213 bp, Cannabis sativa
gtatgaggtttatttatttgtgtttgctactgacgttttctattttaagccaatcattctcaattttttatttatttttaccaccaataaacgacaagatttttacgttttagtttcgcttctaacaatgttatgtaccactatttatccattcttcaatctacaatcaaacattcttgtcttctcaccacttattaaaaaagataaataattttcaaatggcagtgggaatgggataataagaatgaggtttcttcttaaaattaattggtaatgaaaagagtagttattcattttatatatgataatttatttttatccataaataatataggactaactctaatacactatcctcacgtttgggtttagaaaatgtgagtataacgaacaacttttaagaaatcacaagaccctttaagaaaccacaatgctgaacgtgacattttaaagaattctacaagaccaaatatcgagaatttgtaagtgtacatgtcgtaaaatttgtgaattttgaaacaagtcaaagactccaatactggaaattagtatacattagtcgaaaagtcccaaatggaagttaaaggggagaccgaggaaatatcttttcggaccagcaatactttggctcacaaacggatcacaaatgactttttggactagtgacactttaggctcacaacggatcacaagtggctctaataccatgttataatttgggataaggtaaatgagattttatctcaaaatcaattcacaaggagtagctcattcttcttatatatgttaattttttttctacccataaacaatgtaagactaactctaatatatatttacatcaattttttttgacatatattttcatcaattttttgtattgtgttgaatatataattataaaaattgatacaaaatttaatactaaaaatataaaaataataacttattatctaaaataataaaaaataaatgtaaaaatttatagcttaatgcaataactaaatttagtaataaaatattaaaaataataaaattaaatataaaaatagtgtattcattataatgtaaactttgtatcatgaaatattgtaattcaaatttagatcaatttttattatgtgacaaatttagataaacttttaacaccccatttaagcaaatttttttaaagaatgtattatattttagtaataaatcataaacttgcatctccaatcttagtcttatttgtggtataatttttcaacatcatgtttagaaaataggatagaattagattagattcaatattttttaatgaaaggatttgcttaagtaattaaattgaaattaattaatttaatcctatatcaaattctcattggcctataacaaaaaaaatggcaactttgtatgaaatctactttattataatttattaacaaataattattcttatatcgtttaattcaatgacaaatgagtcagtaggtataataaaaaattaaaaataaaactattattgattaaaagcccacaagtgtgtcacattacaaatacttatcagtatcacttttgtagtgtaaactcttataaatttgcgactgccagctatactaatactataccagagattctatgaggtctaattttagtaatttataaaacgctaatttttttttttttttttttaaaaatacgagataggatttagctgaggcaggaagcttataaaaaggccactaaggtggctagaaaaatagaactggaaaaaaagagatcaaatctgtcccatttaagttttcaaagtaaatttttttttcctttacattatccatagcttgattactgatcaacaaacaataaacattctacttattgattactaatctgcttattgattattgaccttcaacaataagcattattaaccttccacaaatacatcccacttactgttcttcaataatctatctaccccttacacaattataccacataatatcctggttttgttcattaaatacccatttacgaactaatttaatctgagccactatgcctaaggtcaaattttctactcactaagagggacattatcttgtaatctctacctattaataatgagaatgcaatattttttgaaacaaaaattgcaacttttattaaaacaaatcagctaacaaaatagcttccaaatcaaaagggacagacccctactggaaatactatcagcaatttctgccaaactacttaatatgtcatgtttgcttatatattataaacatttcttttgttgggttatatacattttaagctatatattgtattaatacttatgtattatattattttgttcctattattaaatatttagctagaaaccaagaagaatattacattcaaccgaatgagaatatgagattgaagaagacagatattccttaaatattttcgtcaagttaaatatttcagtttttttgttgttggtgtgcttgacatgggtaagacggcaagctaaaggtagtttgtctttttgctaagatgttttctatggataatgtttttttatttattaacttctatgataatgttgagcttaaatttaatggacataaaaataaacaatacagctagctaatacagtaaatacaaaattcacatttagatctatacaacctatgcgatatatgtttgtaaatgtacaatatttttatttaatttatttgagatgcatggtatatgaagtaagataaataaatatataatatatgtacatacagagcatacatattgtttatgttaaaaataaagtgctgctaagaactgaaaacatcagaccacataaggtgtaaattggaagaaagaggtggatcagtgaaatttccagtcaatatttgtgatgaaacatactgatttgcagcttcggtgtaatgattcccatcccaattaacatactctgttgtattactacatggtgttgctgtcaccatgctcccatttaggctcttgcttacgccacaagcaatcctgctgtcaaaattcaatggcaaaccgccatagccacagcaagctgctataggttgtttgaatcctgtacccaattcaaattcagaacacaatagatagcttaatccaaacaaaattattaaaaatacagttctaaaaaagtatgtacattataagggttccttgttcagcaattttcataaggctaattaggatttttac

SEQ ID NO: 38251 - DNA, 1267 bp, Cannabis sativa
  modified_base (1224)..(1226): a, c, t, g, unknown or other
cgtaatttttaccaaaatatgtgggaattgaagaatcagccacgtgtccacaagatccacatgagcatgtggatgatcagtattaacataataaatgtttagtattctcttcaaggcatgaaagcatccgagagctcacaactagccccaaaggaaccctgaagtcaaagtttaacattgctcttcgaaaagatgcaagcctcccagatcacatagcagcaagaattttagatgtgttccatacgatttcgaaggcaaaacattataggtgaatgcttcaagacaggcaataaattaaacctacactccaaatgaagatatcattcactattcggacattacgtttccctatgaatactaattgacaactaattcttgtgttgtcccatcagccacatacaaggcaagtcttgtctcaccaagctcctacttcagagcttatcattggtatacacgacaaacatcatttcctacacctattaaaaagtccatgtagaacctagaagtaaaaatatatatgtatatatatatatactcatcgtccaaagaatatcctatatattcagcttataaatacaaacagaatgtaatggaaaaggggattcgagggattcgaaatataaagagaaaaaaaaaactttaaaattgtaataaagaatatactctcaagcaaaaaaaaaattgctcattaataaaagtgattcctgaactacggttaattaatacctgaactatgtaatgatatttttcaatactcatacttaatttttttaaatctaaaatttaagaattaccaaaaattcgcatcaacaaatatatatattgtgtgtgtaggacttaaagatataaaaatcaataatatatactcaaattatttatcaacctaacactctgaattaattcctcatgtacaatttatactaataatagaatgttgtattaattcatgctaataagccaaaaaaatatatttatgaaacctatacttacgtatattaatcatcaataatatatatagcatagggtttgcatttttcatattatttatttaaggctaatttagatttttagagcttctccaaggaagcggcattttatataaatgtcattcctttttgttccaaagagacatcattcaacacagcattttgaggttaatgctacagtgcacggtatatatactgtgcactgtaaacacggtatatgtttttctttttttttttnnnaaaaaaataatatttatattatttgatttatttattaaatt

SEQ ID NO: 38252 - DNA, 1387 bp, Cannabis sativa
  modified_base (836)..(849): a, c, t, g, unknown or other
aaaaaggaggggccggaaatgagcaaacttgttttgtttttttttactttggtctaacaaagcattatcaacaaacaaagctactctgcaattaaggccacaatattaattaattaattaatttctagctgcacttattataattattattttctgaaaatggtttatttttttttttttttaatgagttggggtaaccaacaaaaaagcaagattcacatgggtgttttgagattcatgaagactactactgatcaggctggattaatggatatttatttggtgggaaaaattatgtgtgaacatataaaaaaaattaaaatataaaccaagattggatcacttgatggagcagatttagttgaccctaattagtcctagttttttttaaacgtaatataattattaattagttagggttatattttgatccattaaaccaaaccattagactaattaaggtaaaggaaacctcctctcctcctatagttttgtgtaccaattcattgaactatatatttattttaataacattacataaatataattaatacacttgttgtactatatatgtgtgtgacaataactttgtgccacaccttggaaacaaccatagtatttctaaatgatatttgccagttttttttttttttgatgaattaatttatttatttaaataaacaaaaagaaagcattgtgatctctattagtgaatctatatagagagatatattactaacaaaaatagtataattcatcgagtcaatacacacataaccagccactctggagcagagagaggctttgaatggtgagctatattattattattattnnnnnnnnnnnnnntattattattattattatgattcaatttactattattgatgtgtcctttttatttgaatcaacttgttttggccttgcatcttctgaattctgatatatgcaactgaattgtgcatggggtttggggcagcatatatcacaataaagtcatgagattattaatttaattttgttgagaaattattattattattattgaactataatatttatatatatatatcctttcttttcttgtcatttgggccaaaaaaaaaaaacgtaggttttactactacaacttcctatatatatgtatatatattactttcttgtgtgttcatctaatcttaatagcgaaagagtactggagaatcatattgtttttactttttatcaatgcatgggcatttgggcacaacagacaatgcagcatgcaaatatatataatattaattaagcaaattaggttttttacctccgaacttttacatgtaccaaatcatgtctctgaacttttaaggtcgttaaaaatatcccctgaactattaagattgtt

SEQ ID NO: 38253 - DNA, 1566 bp, Cannabis sativa
acaaataaaaatatatataataaaatatacttaccacaaaattgtagtgagttgaagcttgagtacaattcatgaacataaacattagaaagaataagcatgttaatctctggccaaacatcattttttgagcttagaataaatatatatatctataatattagtccataaatataagcaccatatagttttgctacttcttttgagaatttatagaagtttcaaagttaagagattaagtagttgtaatgaattaattaagtgtaatgagtaattaaattaattaaaatagtaatagttttttaatgagacaattatatatatgtaatgctatgtcccatttatgcatctcttttaagaaacaaatttgtgaaagttatttatcatagttgatcataattatattattatatatattataaattaattaatattttctttcttaccaataataatgcatgtgatttaatttattcgtttctttttctttttcttttgtctatttagggaaaaaagtaaacaattatagttaatgtgtcaaagttttccttaggtacacagcataactatatatatgtttaaattaaattctatcacatatatgtgtttgtaataattatagaataggaaaaagataacatatttttctttttttatatctctgtgtcttaatagtaaacatttttttctacacatttaatgctagaataattattgaacgacttagttagttaacatatatatatatataagtaattattatatatttttttaatatataagtaattagagatagacaattggagtaaagataagttaattaggtgagctaattacattgttcattttagttaaggtacaaatcaaccaaattaaacatgatcaatatatatatttatataaatgaagagctcaatttgatatttcccctaattaaaggaaactttttttactcaaaaaactataacggtgccaattttgacctatatttttaggacaaaatttttggtgattaatttggttttgttaaggacatttaattagattaattcaaagctaattatctataaagtttttttttttttaaaaaaaaagattagttaattatttcgtcattttcttacgtacggtacacaatatgctgtatatgtgtatatatacactcacacacgtatcctaaaatttaatttattgcatttaattatgtttttttagcttgtagttatataattttttttgcttgtaattgtattaattagaataaaaaaaaaaacaaaatgaaatatatgtttcttctctcattttctctctcttacgttattttccaacttctacgtaatatttataaaagtaccaataattatatgtgaattattatatgtacgtgtgttttgaatttaaattaattaatcatatccaaaataattgtaatgatcatgataattggaatgatttcaataatttcaacatgagaatatatatagtacgttatgggtaattattttcaatcattatatattgaaataaattgattgaagacttatatatcatcagtctttttttttt

SEQ ID NO: 38254 - DNA, 4748 bp, Cannabis sativa
agtcatagaggataaatgtcgttgtatacaagaagcaacttggcctgagtagcctaaattagtaaatatacccttagcaaggccattgtttttttcataagtcattgttgcttttgcaccaggtgacttggaatttaaactcatgcaacctaaagctcgtaaatttaagatgccccaaaatcctaccgttacattcaaggaagaatcgatcgaatctagagttagatcaatttccccttatgtagggaaagttctaagatcttgtggcattagaaacgagaaaggatgacgcatcaactcaattgcgcctagaatgggtcttaaaacacaacggttgcaacactagcgattcttcaaagatcggggcttggagcatggaacatattagagcaggagctgtactcccccttagggactattttaaagacttctacaactatcttgcagttgcaccatttcagctcgccccaaactctttaagattcttgccatgtataagtcgctctatcatatcttaaaatgggagtgcccaacgctcctcaagatcctttagttttactcatcaaagcttgttctacaagaaagcatggtgcaagaggcttttacgactcggggacccataccaatgatcgcaagatcatagtaaggcttcctaaaaagaaggagttcaaggaagaattcttttggatgacaggtttccatccaattaacatcgccaaatttagaattttacgtaactattaaccattcccaaaatcttggttttgagtttaagtttcctatgatttaatacttatactgattctgatctttcacattttcaactactacaaagagaccaatccctacaccaaaagtccaaaggaggcccaagatcctggcaaaccttccttatggattacgagttgctgactctatattacatgacaagtcatgtgctcttctttgcaaggtccaatgaaaaatggattataaggaccctaagcaccctacttggtagcagcttccaatgcccgaggatgaggaagattgcaactatgtcgctcacatccactatctcaaaaatgtaaccactcgggaagccagcgaggttgaaaataggcttcccaaggtaataattcttgtgtttatggattgtctcctacaatcgttagggccaaacgtacatctttagtacaatttaaggatagtaaatattagttcttcatttggaattgaagaaaggtttgagttatttgattttatgctgttccagacaagctttaatcaaacacctatcttttgcattttttaatttctaggccttattggacctatttctaagcatcaacgacctagttatttctaggcatcaaagacctagttatttctagggattaacgaacctagttatttctaagcattaatgagcctagtaataattgaaaatatacttctaggcaaacccacgatatgatatattcatatgcttccaagtaattttaaacaaattaagactttatgattacttaaaatatatatttttattaaaataaagaacttctttacagtataaagaaatgaaatataacagaatatgttactggtaataaggtcttaaatgttcgctattccaagtgttttttattagggagccattgagccagaccaatttataagctcctgttcccacgacaacttcaaaatgtaaggaccttcccagtttgggttaaatactattgctgctagatctcgcgtattagcaaacacacatcttaataccaaattgcctgcattgaagagtctcttttgaactcttttgttgaagttgtgatttgatgttgataagcgtcatttttgacttgcgacttagtgcacttttcatcgagcagatccaagaacattttgagttgttcttggttttgttcctagtcatagtattcaagcctacgggccacaatattcacttccactagtaacattgcttctgagccaaatgccagtgaaaatggagtatgtcccgtagcagttttttctattgtcctatgggcccagagctcatgttgttgctcatcaaccaatcttcctttgccgcatttagcttcttttttatagtgtttattaaggttttattaacatcctcaacttgtccattgtcctgtggcctagatagtgacgagaaaatcttaataattttattattttcacagaacttagtaaatgaatctccatcaaactgaatacctttgtcagacactatttttgtgggaaacctaaacctgcaaacaatgttcttaattacaaagtcaagaactttcttgcaagtgatggataccaaagggtcgatttcagtccactttgtaaacaagtcaactgcaactacaacatattttgcgccacctcatcctgtcggtaaagatccaatcaagtcaattccccatactaccaatgggtatggcgagattatcatttgtagtttagtaagaggtattctcagtatatgcaagaacttttggcacttatcacacattttaaaaaactcatggtgtctttattgatggttggcaaataataaccctgtcggattatctttttggacagactttgccatcctgcatcatctccacaaaagcccttgtgaatttctctaatgatataattggcttctgtgggaagtacacattgcagtaaggggatggaatatcctcttctttaatgttttccatcataattgagtctcaaacgataataatcgttccatatcatcaccctgatcttaatcgagtcataaacaataataatcgttcctcaatattacctcgatcagattcgagtcacaacaaacatataacgggatcttgatcataatcgagactatcacaactataatcattaaccgtaaatggtgcataaaacttttcttacctcagtccactagttaagtgtgcggttcgatctgagtggaactacgctcgacgatcccgggtcctatgtcaggaaaacaaaattcgataaatgacttaattgaatttttgggaataaacctaactgccgcaacctgacaaactttatttcttactagttcaaactaactcaaatatccctaaaaatactctgaattaaacttcggaaaacaccccgagccaaaactagattcaaggaaaaaaacccaaggtttccccctcctagcaatcggttgaccggtttgataggtgcctgcaaaaccggtcgaccggttttctgggtagccatggggaaatctggtttttcaccccagaacccaatctaagctccaccaaacctgctaaactcttccagaacagttcaaaaacataaaaacaatgtatacaattaaacaattctcaaaaattcatcactataatccaattcaccatgttagaataaaaaattaggtttttaaactaaaatttctaatttccaaccaagtagccataaaattcaacaacttaaaacctaaacaatccttaaactaaatctagaaaaagctccatacttaaaccaactacacaaccctaaaatcaccaaatttctcacccaaaactcaatctaaaccttgtaaaatcaccataaactagaaaagaaacttacctcaaggtttcggacaacacttagtataaatttctaaaaaaatatgaactgaaatttgagatgaacagctgacctcattggtttccttctagggccgaaaagaggagaggagagagagagcttgatagatttctttcttagtttaactattatcctgctaatgaaataaaattaaaagtaaaagaattcctttattatgtcacttaacctaatataatattcagccataaatcaaagtccataaaagccaatattctaacttagtaaatgactaaattgcccctccaataaaacacttacataaattaaggcatagggataatttggtaatttcaaactaatccgccaaactgacaacttagaattttaaactagtccggtctaattccaattcaactcatcttttaatgtcgtgacttttctgaccactctgttgggtttccacggctgccgaacctgaaaatattttatgttgaaaatggtatccacaatacccccataatctgataaaatctccgtaattaataaattacggtttatttgttcatttactcaaattccactaattaactcgtaattagcttaagtaagattataatcttactctaatatctaaataattacatatttaataaaatatgtccaaataaatatcattatatttttccaagatattacatcgtgtttccacctggctatggtactcgaaaaccaaatgacaaccacatcacaaatgcaagaaaactgacactggtattcaaaccagaaatccccaagcctcacaagtctcaaccacttctgatgcattcaacccacaagtcacccctactgtaaagaccgcttagctaaaatttagaaattagcagttaattagggtttaattacaaaaattattaattaattctaaattattaatttaagatattttatttgaatttagaatgcattttatatgtcatatatagaaatttcataattttgcatgttcagtgcccagcaatattggaacgcggtgtatggcttagtagaatcacatctcagtattttagtatagcggggtgatatagttagacattgaaaatttcaggattagtcgggattttagaatttcccaaaataccccttagtgatttagaatggttttgtgaggacaagggcat

SEQ ID NO: 38255 - DNA, 4588 bp, Cannabis sativa
aaataaaaaaatatattaattttgttgtagttttcaagagttaatttgagccattagattaaatcaatggctataaattactatccctattgataggtaaaaattacaatacctaatacaaagctcccaataaataaatggcttatttgtgtggcaggtccttaaactatgtaagctttggcaaattagtccccaaactcttttttttggcaaattggtccccaaacttatactctactagcatttatgatcctctgccgttaacaagcttgttcagtgttagttttactgccttttctatttccctccatttaatgaagggtagtgattggaattataaaaaatttgaagtaaattttaaaaaatcaaatattattatatattatgttttcactttaaataaaatataataaattgtttaaaatatgatgtaattacatatgggttaatttttttttttaagatgtaattattttataaatttttaaaacaaaataaaattaatacatatagaataaaaaagtttagaatatatgtacattttaaattaaaacagttatataaaaaaaatattactaaaatatagttgttgaaacatgtatatataaaacacaacagaatgctcatccaaaataataggtaagagaacctattgaatgtcttgacatcaatcatactaaacaaacaataatgataattttaagcaaaataaaagaaatctagccaaacatgcatagactgaatcaagttttcatacaacaaaatattaatgcatactcataagtcataataaactaacattgaattggatccccacttttaaagctcaactttggtgagatttatccttgtctactctttttagtaacttttgaatttggcttgccacatgtcttgctgttatgaccaggctttccacattttttgcagtgtattatagtgccaaactttctcactttattactagcaggaacctcaccagcttcacggtttctagctttcttgggacgtccaggtcttttctttactagaggaggttgcaaaggatgtgttcttggatttggccatgattctgggccatttgtacctttgattatttcagcataggtcttctcatacgcctgcttggagtagtaagcatcaacaaaagaaattggatttaaatttaccttgagtatgcaagccaaagcatgtacacaaggaatcccagttaattcccattttctacatgcacatgttttagcattcaaatcaaccacatactgctcatttgtatgagtaactccaacttgaaaatgtagttcacctgaccatttaattctacaaaatcgagcccattcttgattcttagctatgatttccatggctttgggtgaaattggatacttccacttctccattgactttcttttatctaccattcgctccatcatatagttcttgatcctctcaagcataactattataggactatctctagctggaagtatagacttattgaacgcctcacacaagttgttaagtagaatatcacacttgggacgagttcgaaagtgtgatctactccatgcagatgttggcttatcactaaaccatgctaaggcagtagcatcagtgccacccaatgtggccatgtgttgttgaaatcttggtatagttgttgttcttgctgcagcccaaaccatttctttaagtgtcaagctaggatgtttagtcttgaagttattgtacatgtgccttacacagaaacgatgttcagcgtcttccgcatgcttcttaacagcttccaaaaggcccttttgtctatcactgatgaatgtgaaagataagctattgttcatttgaaggtcttctttcaaaatctctacaaaccattcccagtttgctttattctcagaatctaccacagcatatgctatgggaaacatgcaattattagcatctataccaactgcggaaagtaggattccttcataataccctttcaaaaaacacccatctaacccgattagaggcctacaaccagcattaaacccatttttgcatgctgaaaaacaacaatacaacctccaaaattcgttgactcccctactatgaagcacaatagtactgcctggattacttctcttcaattcttcacaataatcccataacaaagcatattgatctttgatatctccttcaatcattttcattgctgtagcccttgttctgtagaatttccatcgggagacctcactttcaaagtcatcctttacttggtcaatgaagccattgcaggttgttccaggttctgatctaaatctttctttgtacctttcagctaaccactttgcatctattcttttattgttgtacacccgctggcagtcatgttcatcaataagttttttgatttggtagccaattttgtcctccattacactagcatagaacaaaaatgggcaactctcttggcaaattactctaattcttctcttgtcattcttcacaaatctaatctgtctaccattctttatggcatattctctcaaagcttccttaacaactttcttagacgcaaacaccatacgtaaatgaaatattggattcttcatatcaattgcaggattaaatacagggtagccatcatcttcaagatcatttatattactctcaacatcaacttcatcagtggccccatctaagagcaaatcactatcctcaatcaattcaggccatgtgataggttgtcctagtgtcatacagtaatcctcaattggttgttcataatcctcatctcgtatttcttcttcagtactattttcttcatctgaattttgaccactctcatcatcaccctcatcaacatccttaccaccaccctcatcaatactcgcattaacaaggaagtcaacacttttcttattctcttcacttggacttggacctatgaaattcaaaatgtcatcccattctccataattagtttcaatatttgggtttgtgtttaaagtgtttggagttgagtttgaaatgtttgggattgtatttgaaatacttaaagttaggtcatcactctcacctgacatataattataatttttaactcaatatacaattacacatataatacataataaacacaaaatgtaattaaaataaaaaaaaatgactcactgtatataggctgcaattcatattgttcttgtatagccaccataattgagtgaataaataaccttgtatgtcaaatatagatatttgattataatcacaagtattaatatttatcaaaaagaaaaaggatatggtagtatgtatagataaatatagataccttatatttgaagaaattttttccttcctcacgttggttgtaaaggagcgattttacagttgttgattggagttcatcaatgtttagctacccacagtgctcctctagacaatggcattttctctcttgtaccttgtcttttcttcttcctcaagctggttggggtttttaacttgtgttaatatgtgtcttttcttcttctatacacttaagattcatgtttcaagcataccaattatgcccataatttattgttttgaaaattcctatcatacccttattaaaaagagaggaaaacatgaaatatatcatttaatataatagaggagctaaaactaacgggaataaagtttgttaacggcaaaagatcatggatgctagtagaatagaagtttagggaccaatttgccaagaaaaaaaaattggggatcaattcgccaaaacttacatagtttgaggacctgccacacaaataagcctaataataataataataattgaatcgaaataccaatggtcagttcactcggtagtcatcaccgatatatgtcactcacaagtttaaattaagaaaaatgatataatataacccattaaccccaaagtcagacatgtatttcgttatccttaattaacaaaaaaaacttttaataataaggaagagaagtcaactttaacaaggtagcaaaactgaatgttgtaataagttagttgcagcaaatacactcatgaatggagattgaaatattatgaattgaacatttaaaaatatgtcatcaagatttacatttagacttagtccctttatatcttgtcggagaggaaagcctcgcaatagtaaagctttcattgatgcagatatcccaggtccaataacttctctaagacttagctaattgagaaagaaaagtttttacaagaaagtatctaaagatgaagttaaagtcatgggaacaatggttttattccaacactcaaggacaaagttactttcttcacaagagtggctagagaaaagagaaaggtggacaatgatcatggtattttaccaaagtatgcagcttctgaatatgttggagtttttggcatatggacataaagaaactttcttagtctcccaagctttatcaattgtctgcttaaggactgaagcacatttcagtactctccatccgatcagtaccaataagtgataatttatcattataaagttccatatatccaaaggcatcatttcctggagggcactcaagggcagcttcaagaact

SEQ ID NO: 38256 - DNA, 3675 bp, Cannabis sativa
gatatggttctgataccatgttgagaatcatgggattttatctcaaaactaattggtgatgagtagagtaacccatgttcttacatatggctcaatatttttattgatctatataggacaatattgtccaagtaagttcttagtatatagttttatgactaatataaggattaaactgaggaagaaagaagtcggtgatacactataaagtaattgataagaatccaaaccaagtgatatataatgcatcttggactcaccaaataaagtgacaatttttatccctttttaattaattttttataaatctttatatatacaaatttatatttgtttataatttagtgaggaaaagccaagataaggccacccaatggcctagagggtcgagcttgatgctgaggaatcagcagacatagtcaaagaagataacattatatatcctaacaaacacaaacacatagtactaaatattgtgtttatttagaaatttatttgtgtactttataatataaaaaaaaataatgtgttgaaattagaaggttcaaaattttgcaaggcatggtcggtgctgtcttcttcttcttatgatcttcttctttagtctttatatatgtatatatctctttcattagtattcgcccataaacaaaagtagagattttgaattatatcaaccaaaaagtacaacaatgagattccaaatccaaagattagctatactcttggttctcttcttttgcatggcttttcttgtgcatgggaaagtggacccaactagtaataataatagtactactgtggcttctgaaaactctctcaatgtggtgagttggtttccctctcttttctttgtatgtatatgtgtagtgtacattataaatgtatatgtatgtgttttgacaatcgatacgtatataaatacaaatgcagggtagagcagagtgtgggaaggaacaaaatgttgagtgcaaaaaaaggtcagatcaagaagatgatgtgtttgaggatgaagattacatctacaccaactcactcccttaaattagattttgcttgtaatattgtacaaatttggtacctacttttgttaaaatgtgtattagattaagtcttttcctactaagttaggcaccagcaaatcttctttagtattgtactaattaataatatgaagacagtcgaattcaagtagtgatacctttcatttgctatataagcaagccaacattctgcaaacttcaattggtcatttttttactaatttaataaattttgtaagtaaaatatatatgttggatcaagtaaaagatccattatagtaggtatacttgagtttaaagtcaaaagattaaaaatcatatcgcaagttatatacctgaacagctagcctgtgtgtaataaaaactaacagtagtccagttcattaaaaatgattttagtcatgagatttgttcacctttcaaagccaaatagtttaaattaattatttgcataagtttattttcacaacaaaatgcatattatgtctaacttgatcatcttgaagttaatgttgctctaaagttgaccaaagcgtgtaaactaatatcgaattgagaaaaatataaaatattataagctgctgcacagataaggttctaagttctatttatataatatataataattgaaaaaataaataaataagattatatttatgagttgtccgacatgctatatttgaggtatagtgataattaaaaaatgaaacaaataagtatacattattattagtagtagtagtatttgagctggcctatttgaatttgagaatgaccatgtcaatatgagttactgtatccttgaagggttcataaaatagtaatgtgagtgaggaagaagagaagagaagatcatatcttgacagtctgtcgaatctcttaattaaatgtttgggagccaatattcttgaggatgacaccattaagagcctttgaactaattcttatattctctctattatctacttgcattgtttaatcatactagtattattatttttaattcttttgctgaaaaagtaatattaataaaattgattttggtgctttacatgtgtccttgtaatgttatatgaatacagcatattagtttaatagggaaaagtatctatttttattgtacaaaacaaaagcaataaaattaatttgtgaaagatataattgctatatctttgctagctgtcagttttcattaatgaatttcgtgtatacgcttttaccacattactgtattaaaattagaataatattgagacacacccagattggagacactttttgagctagttgtgctgttgaaaaaaataagtgtagttgtactgtgagaaaaaataattgtaggagaactgtgaaaaaaaaaattaactaagtatttagtaaattataaattataaaatgacgtgagttgttaaaattttattataataataatattatattttaatttattataatcacaaatatataaaaagttatattaaatatgtaataggaacatgtagtgtattttttttttttttttgaatggagtaatgtctattaatatgcctagctttttttgttccacgagcggcttttatttatttttatatttttcattaccttttaccttatattttttatttttattttggagaattggataaaaatactttagtgatgaatttgctccaaatctacaaaggattcccacttttaaagaattgaaaatgaagaggaaaagtacaagttaagtatgaagccaaattatagttgtcaatttcagcaaaaggcactaccagctgaccctccataaaatattaatgacaaaaaactgataaattggcagcatctatcaattacatttatggaagatcattgtcttataagctaacgttaataaaattaaattggcctcacaagaaaaaaaaaaagaatatcagataatgtttgaatggtaatgtgacaccattgaaaatgctctaatattttcatagtacaacttaaaatatcaattgtattttttttttttagaaaataggtcttttcaatcctaataaaattgtgtaactgataatgcaattagtatttagggcattagctattaaaaaatattagggtaaatttgaaaattcatagtgtaattagagataattacactatttgacatattttgtgtgaccatttaataaaatagaggtaattgaggaatttcaactacactctctaatttttttagccccataaaaattgagtttaattaaggaattatttcataaatatataaaaataacaaatgttttacatttttacggattttactttatttttttttacaaaaatgtagagtgttatttttattgttttcaaaacaacattattttgacgttgtgttgcttttgaggaatttacacaaaatattaattttttctaaactttaaatttatgttgtgacttggaatttttttacatttatactatcctacttaatttttttttctttttttctgttttttatttattaaagtttttataaagattttttttcctttatatctcttgttgtccttgaattcgcccaatatacgtggaccagtcgaaaagggacacgtggatcagataacttgtaaatatttgataagtctttgtatgc

SEQ ID NO: 38257 - DNA, 2684 bp, Cannabis sativa
  modified_base (1895)..(1911): a, c, t, g, unknown or other
tgggtgtcccaatccccatcttcttctgctattagttcaactactttagtataactaaaagtggaggatccattagatttcgggagaaaatacttcccatgggccacccatggatcctcccaaatactagtatctttaccacctgacaccactttacaggttcctttccttaagacttcatttgtttttaccacatttttttggaaccaagaatctgaatccttatatctacactttaggattcccttccctttaaaaaaatcaataactgcatcataaaaatcttcacccacctcgtcctaataatgtttaaaaaataggactgacattccatctggacctagcgctttgttactatacatggcaaagagagtttttcgaatttctttactattagggaactggactagctcctcctgatccctggaagagagcctatcatggatgagatagttacagttaagaggctgtccagaattagtccctgaaaagataccacttaagagatcagtaaattctttcccaatcaagtcccgtctcgtgagccaaatgccattcttgtctagaatggactcaatgacattacgtctccctctaatagtggttgtaaggaaaaagaactttaagcacttgtctccttccttaagccacgagatgcgtgctctttgtttccagtataacactttcctttctagcatctcattcaaggtttgtcggacttcactttccacattccaatctctagtgcccgtatgtaatttttgcatattatccagcttttgttccagatctttgatgatggagtcaaatttttcaaactggtgcctattccaatgacgaagggccacccgtgcgagtagcaccaattttcttaaagattctaacaagggcccaatgatgaaccaaggagttctagacttgagccaccaccaatttactcctttcatcacgagtccaaccttcctcaaatttaagactccttttaaatcttggttctaaaccaccaaagtaaagacaaaggggcctatggtcagaattactcgtccgggatgaacataagacaactctcgaaaataaattgatctacttctaatttactaattcattgtctaaaacagacttaacatgaccccttcccgagcgatggttattcccttgaattgacaagctaatatatatagttaacaaaatcagaaaaagtttgcattatttgatagcgtagccaatataattgtgatattatttgagattaattataactatatgttttgttaagtagtgttaggtgatagattagattgtactgggtgggtggctagattgcaagaacaaaagtgcatggtacatagcggcccagtctgagtacgtacgtaagtccaacaccaaacatcttaaccctacaaacactgcctacccaccttgtccaatgtccaataccatcaccaaccctataaatataagtaattgctctcagtctcagtaccctctttaattgaccagaaaaagaaaaagaaatgatcataatcaattaattcttaatttaagtgaaattatatgtagaacgtatacgtcaaaatagattgataactacagcaacaaccacaccaaataggtgattatagatgattaatatcatccatgcatggaacaaacatgtttatgatcattcaattaaaagtggactctcactgtttcctctcttataaatttataataaatcagctgctatatatagtggtggttgtcctttagatttcactgctcacaattttttcctatactcacatttgttaacggtgttaaattttatctctctttcatattattttttgacacattttgttctaaaatatttcaataataaatattactaaaaattattaaaataatattannnnnnnnnnnnnnnnntattaaataattaaattttcttattttattttaaataataataaaaaattaaaaaagaaaagatataaaagataatattctttcttggcattatttttcaatccagaagtaagaattcattaaaaaatataaaaactatatctatatcatcaaacattctttaaatcatctgcaatttgattttgaaatcatatacacaaaatatttttcctatgtaatctctaataattcatttttgcaattacactatattcatgattaacatgaccatatttctattagaaaagaaaaatcaggacaaaactttaaggaatgttctatattgaaaagaagtagcttctagcgttttatgtataaaaactaaaaatatagaggaagttacaaatatactctaaataaggggaagtttacttttatactgccacaccaacaaatatacaaaaatcaaaaatactgtcctaaacttaaattctttcttttatattgtatagaggccaaaacaaagagaaagacttcgttctcaagacctaccataggaacgactagagcaacatcagaatagccgcaaaacaaccattaattcctgtgagatgaaacaaaaacattaaaatcgacgtcaaaacaaaactcaaaagcttcatcaataccaaaaatcaatagatcaaaaaggtaagaagctcaaacccacacaaattatttatttgaatctgaaaatattaacaatgctcatacatgatctcgaattcaattataaaaacaatttgtcgcttctg

SEQ ID NO: 38258 - DNA, 1002 bp, Cannabis sativa
tcgcaatacaaaaatctaaagaaagggtcagaaccctcttcaacaagaaactcgtggtgaaaaaccaatagtccctgaagttgtgagtgtactttagggtgctggttggatatattaaggacttgaagatcttctcaagctagtaaaagcctatttttctcttgttctttcgcataggttgaggcttaacttgataaaactagaaaacatcattcggagtagggacctccatcttcttggctttgtagagcgtaaaccaacccacaaccagtctataaacttagggaatgaattggaacgggacgttgcgtagtaccgcacaaaagttggttaggtagctcctgagcagaagatgagcccccatctcaatatgggcccagctccagacgctgaagccatctgcacatttacagggtgactccccgaagacggagagcctattcgagaagaaacctagagcactttggaggccatgttttgtctcatacttctagagattaccataattctggaacttattggttagctaatccatctcccaaggagaggaattgtacaccactttgggagctgcaacttcatgctccaaaacttcaacttcatcatgttgctcaacctataccatggtagaagctagaaaagaataagaaataaaacaaccaagccgttagatacccatactaaagaagatagtagtgacacgagagagtcctcccctaaaactgcatggcgaagtccccacctgaacctacatctaaaaataaaactctcaaagagtatgaattccaaacaatcaaattgggaacatagatagccaatcgaaagtataaaaacttatcacccacaaccataagggtcctggacagaggaagcaattttagttgtccctatagctaaaacttgcctattttgatcaaatattcaaaaataaagggaaattttttgctgaaactagtcaagactacaaacgatatgtgctaaatgtcttatttctacaaaaca

SEQ ID NO: 38259 - DNA, 3611 bp, Cannabis sativa
tcgcaaaatggaggcagagaacaagatagtctttccctattttatttcagcttccagcagttggttcaggtcgggttgggtcgttccaacccgattaaagatcgaataccctccaaaaagaaaaatgctattaatcccaagccatgtggatggaatttttaactatccacatgtcatttgcagcttatgtcatctcattcataaaaatgacttgtattttttttaaagtattgctattggacatgagtggtgccaagcaccttatatagatgttgcgattggttaacgatattcgtcaaaagttattttcttaagttatatgagattcgatatacttaattatatcaatagcagtataacaccgagaatgatactaaacaccaacatcttttagcaattctcttttttattattatattattttactttattgaaagatttaaatggataaaaactaaaagtaataaaaactatactatgcatgtgtcagaagttacgacgtgacttaggaaattaattttaatatttttttttgttatattttttgacagtccaatgtttacttcctatccttaagtaatagaattttatttccttttttctttttaaatcttcaattacttccaaaatgtttttcttcaatattttgtgtttaataaagcatttcaccctctatttctagcattcatcagttttcaaagttgtttttctttcaaaatttttgatctcaaccacaatattaaattttgaatctatttttgttttcaaatgttttgaggtcacaaaaaatttaagttcttgtatttgttgatctaccccccatatatgttgtatctttccaatggaggaagaagaacaatacaaaataaaaaaaaaaaaagacctcataagtttcttaaatgtaaataattattaatatactaagtgtttattcaaaaaaaaaaattaatatactaagtgaaaaacataaactgtactaaaaaatataagtaagaaaaaatttatagtttaatacacatcttatttgtagcaacatctaagataattttttaatttttttttttcataattatttgtgatcgttgttgttatttaatacatactacttataatttttttttagaaaaatcgaaaaagttaaagtactaaaatgaagtttaaatattttgttgtatttttttttttatatgtgtagtatgttgttgaataaattccacttataatcagtccttttacataatatccacatcagcacacaacaacaattacataacacgaaataagactcaatatcctaggtggctttgcctctacaagaccaagaaccaggagttagttacaactaattcttgtaactaacttccagctctgatcaaccgactcaagcattataacgcacagtaaattaaaagcaaaacatagagttgaacagaaaaagtgagaagagagaagagtaaaccctagatcgagacttctgctccaagatccagtgaagaaaaccaagcagagagttagctctcgtggtgaggagatagaagggaaggaagtacatgcacaaaaagaggaaacagatgagtttgatcgagaaataaatagagaaggaaaaacaaatcaaaaattgtaaaaaggaagaatcgagtcttacttggtcgattttgtgacaggaagctccacaaagttgtaaataaccattatcgatagtggatatcaagctagatctctaagatgagcttgacagagacgtagccctaatttttggatgaactctaaaatatttttggtgttttctctccttttctctcctgattttttttatttatctaacatgttttgtgtgtgaaggtgaagatcctaaggtttctacttaggatcgagccagttcttcgagcaagttcttctgctagggtttttatttttcgaattagagtggtgtgtgtgtgtgtgtgttgtgtttgattgttaggacttctagacttttcttgaaaagtctttaagccttgggttaaacgaaataaagattgttgtcgtgtgggttcaaatctttgtcgtttggtcttatttcacttagactgaggaaaggtcatttttgaccttgaatactggtaacatatatattttgttggtgtaggttaaaatagtaaaattcctacatatgtaattgtttgaatcttattttcgacattataaactatttagaattttcgaaaaatttactttgtcctaaagaactacaagtatgtatataatcataaaaaaaagtattagactaaaaagctttatagaatttcgaaccataataagagtgtaccgaaatagtcattttataaagtgtattgtaatcttataccttataaaaggaaaacttgcccaaatttaaaaagtataaaaaaaatcagcaaaacattatttggaaaaatatatataacaaaaaaattggaagattaatatttttgaaaaaaattgtatttatcttttagaacaaatttgtaggctctaaaaatatcatttttatacttgttattatctgttttggcatctaacaaagcttgtgagtctaatttttttatcataatcatatacgttatagttatttaagactagttatcaatttttagaaaattctaaatagtttacagtgtagaaaataaagtttaaacaattatttaccatgataataaaacaaatcacatatgaaacaaaatatttgaaccttatactcagtatatgttgtagctattttggaccacatgtaaatttttcagaaaattttaaatagtttacaatgtcgaaaataaggtttaaacaattacttaccacgcgtataaaaaaatagtcacgcatacaacaaaatatttaaacattattttcaacaatgtaaattattcagaattttttaaaaatttacaagtagtagtaaataattataatgtacgcgatcatgaaaaattaaaagctctcctaaataccgaaataaataaagagtctactaaaatattttttaagacgatgtattacagacttaccctttaattacaataatgtacacagtatttatacaattattaaaattccatcaaaatttagttacaagtaaaaaacaatacctactaaagactctctctctctctctctctttaatttaggtgatgtttggtttggtgttgtaataaccaaaatattgactattatgctatatagtacatagttttagtaatttcgatgtggagatagtaatttcatagaatatattagacttttttttaaagctgccaaagttatgtcctttttggcctaaagatatattgggttaggaagtaatactattgctattagtgatagttatttatttggtaaatgggatactgcttgatgttatatacggtaccataattatagtatttaaataatggtggtatagtaacatttttaggtatgatatggggttgacttgttttataaaataatagtagcattatagtagaattccttaaacttgtgcaattgtatagtattatttgataataaaagaaataatagtaggagttttatagttagttagtatgattaagttagctaattattaagaaataattaagggtaatattgagtat

SEQ ID NO: 38260 - DNA, 3271 bp, Cannabis sativa
  modified_base (2783)..(2792): a, c, t, g, unknown or other
tttagttgctagaaggctgcttcacattctgttgtccgttggaatttgttatttcctcgaagtatgttgaagaatggtatgcacttatccatggttttagagacagatctactaagtgctgctattcttcttgtcaacttctggacatctttgtgttttatagtcaaaggcatgtcaagaaaagctttaattttctttgagtttgcctcaattccttgagaactcactaagaaactcaagaacttccctaaagaaacttcgaaagtgcatttctttgggttcaacttcattccatactcccagattaatacaaaggcctcttctagatctttgtgatggctctcaaaggttttcgattttaccagcatgacattgatgtaaacctccatattcttacccataacattcttgaacattttattcacatttactggttagagtctttcgaatttttcaatcccaatggcatgaccttatagtagtagattccttttttaatttagaaactagtatgctcctgattagccacatacatttttatttggttgtagccagagtatgcatccatgaaggttaagagttgatatcttgatgtagcatcaaccatttgatcaatgcacggaagtggaaaatagtcttttggacaagctttatttagatctatgtattctatacacattctccatgtcccattaggctttgggaccaaagccagattggaaagccatatgggatacagagcttccctaaggtagtcaatgttcgccaacttgtctacctctataattattgcatctgacctccctggatccagaggtctccattttgtcgtactagttcagcgttgggatctatgtttactacatggaaaataatatgggcactaatgccagtcatatcgaaatgactctaggctaacacgtcattgtttgctttgaccgtagaaataattttttccttcactaccaaatgcaggttcttccctacttggatacccttcgtgggatctccatcatctatacatacttcttctacttcctccattggttcgatgacatgttcctcacaaattcatgggttaagctcatcttcttggaccaccccccaatgatggttgggaaaattttctagcttcagatttatttccttcttagaccacgagtacaattttggttgaaatactgtaacaacttcgtgcacttctttgatctcctctatttgtccttatgtttttggtatcgtttgggaattttaagaacgatgccagatggatgtcactactccaaaatcaattaaaaatggtcttcccaggatatcattataagcagtagggcaattgaatattacaaacgtgttgtacttaaacgatgatactacattgctttcgggaacatccccatttatagtcatcaaaagttttattttgcccatggggatcaatgtgtctccattaaaaccttgcaattggattaggcatggttgcttattggcttccagaagaccaatggcatggaaggctcttataaaaattatgttcacagagcttccattatctatgaggattctagaaactcttttatttgttatttgagccgctatcaccaacgggtcattatgagggaagtgcacatgtctggcgtcatcttctgtaaaagtcattggtaaattcatcatacttggacgttgggcaggtgattataccaagtggcaagcttcacatttattcaactcataaaggtaccactactatgcattctgagtgtttttggcaatatgaggtccacctaaaatagttgctacatgaccatctaagactggcaatgcagctcctaaagggtatggattttcgagactgggggctatagttactgccgctgctagagcattctgtgccccttgaaggacttgtggatttagagtgtgtgttccaagaccttgcgaatgacctactccctgaggaggatttatgactccatgctctcccggaatgaaaagttgtctgtgtgcaactgcttatcctggatatttaactaggatccttacccaattgctaagtatccgttctgcactaatccctcaatttcatcttttatatagtcatattcatttgacaaatatcaccatgatattaacattttttgctcgaatctcttctttgttttcagcctttatacattggtggacgcttcctgaatgtaccatcttagagatttccttgtatacattatcccgagtatctatgagacttttatactaggtgtatcttgattcttgggtttttcctttcttcaaagactcattctagtttggacctttcaaactcttttttactctgtgagtgggctatattggactctagaacttttgcttttggttcgtttgtctaggagcggtactgtacttagtttgtgcagctttgaactcgaaaaaactagcctgtgcagctggctgcatagaagtacttggtccatataccgtggaagtagtaaaagtagatgatagagggtaaatggatggagttttcatctacaaacattgagcatttgttattttggtggaaggtgcgggagtactccatatgcttgagcgtaagcatcttctagatttataaatccttgagctcttgttaagaactcaatcaatgtgtaaagaccgcttagtttaacttggaaattagcagttaattatgatttaattctggaaattatttatagatatttaaataattatttatgctgttattcttgaattcaaaatgcatttttatgtcatatagtgaaatnnnnnnnnnntgcatttccggtgcccggcaacatggaacttggtgtttggctcagtggaatcacaacttagcatgttagtatattgggacagtttattaaacattggaaatgtcgggattggtcgggaatttagaattttccaaaataccctttagtaaccttgtttgttattgtagtgtgcatgggcaaaatggtcattttgccccaatgatattttgtcctttagtggacttagtgtaatgtgaatatgtgattatgttgtgttattgtggctgaaacaaaagaattaaaattgcattttcttcattttattcaaagttagaaaaaattgagaaaaaacaaaatttttcaaagctctctctctctctcggtttgcttggggctgcaagggctggggtttttactttgtaattcttgctaattcaacgagttggtagtgatcctaagctaatgtaaggttctttaacttgttcttggtagtttcttga

SEQ ID NO: 38261 - DNA, 1286 bp, Cannabis sativa
agaaaacaagactcccatgaaaattttgcagtcatataatttattaaaataaatttttcttgtttttttatggtatacaatttacattcattttttagttattacaaaaaccgcgcgagagatagcaagatttagacaaaaacaaagtccaaaacaccactaaggatgaacaacaaactgaaatgggcacagaagatcaaagacgggatcaacatcctgctagagagatcttgatatacatgtttcttaataaggctgcaacctcccactgatttccagaaggatataagaggatatactaagcaatttgatcttattggaaatccttacagaaaataaaaataaaaaataaagttaagtgattgacctaatttggagagttagatttatgatggttataatttttatatgcatattatatgatggaatattatagatctttgagacaactatatccagttattgatggtttggttcttagtgagattcatttaacggttggaaggaaaatatcaaaataaattaccacaaaacaacacatgccatcaaatatatacttgcagatcgtatatattaaatatataaatattggtaagtgggctggctcatctctaagtgagtctaacactatacattgctttaacaaatttacatatttataattttttttctcttgataagtaaaataaaaatcataaaaagggaacataatgaaaaggggtgccactagcaatactaccacactcacatgaatggtgacttttttttttttattattattctatatctctccccatatatatgtataattgattaaaaaaggaaataagaattgaaaagaataatttctagtatggggttactttaggttctgttttcctttttggtactataattgtgtaaataattgaggtgaataaaaaacctttttggtacgtgtaaattaacaaatattaacattcaacatccactaataacacttttgcttaacttcaaccactcacacggaatatttgattagatatacatgaaataattattatttatacaattattagaaaggaaaagaaagacaaactggaagatgtgaaaatacgacaaccttagctggtcatgttatcagcaagtaccaaaatgtgcaaaaaaaaaattataaacacaattaagattaaaataaaaatgaaaagcaatttcaaacacaattatttctatgaaaatgcaataagctaatctttcgaaactcttaaagtgtgtaaacatacactagaatatttgaattttgacta

SEQ ID NO: 38262 - DNA, 4394 bp, Cannabis sativa
  modified_base (4036)..(4037): a, c, t, g, unknown or other
  modified_base (4063)..(4085): a, c, t, g, unknown or other
aagatgctagcgaacacaaaaataaatgaagcggaatattttatttttccacacttttttatttttagcaccccaaattacccaacaaagagtggctatcaaacacctcttctcataatgcttgaattcttaaaaagagagaatgcactagtgtaaaaaagacatagcagctgaaacaggagtgacaacactagccttttcccaacaagaagcaacaagactgcaagaaactagagcatgcaagatcatctcattatgaaggccacacctccactctttttgcaaggactgtatatggtcaaagtagtataacgttcccgtttcaagcctccatagtccttacacccacaaaataatggctcttatacacgagtacgtcagtctggctgcttcatgaactgatgacttgccctacaaaccaacgcaagtgtttctagcgtgtgttttttttttttcactcgtacgcttcttgagaaaagttcccaagagatcatccatcctgaaattaccccaagccaagcacgcttaactgtggagttctttcatgatgggctaccatgaaaaaagattcatcttgttgacatatataggtagcaccaatcaatccatttaagcccactttaactatgtagtctcctacctacatagtctcaggatcatcacacttgaccttccccaggcgatgtggaattgcacagcctactcggtatttttccttacagatcacgggactattgactgtcacaagtaggaaggaagttggtacccccacgccacataaaattttatcattaggtggtatttttaacctcaacaaatcatttcaaaaatttgcagcatcaactacagtccagtaatcattagttttctaaagtaactattgtgcacttttcacagtgagtataccagatatcacgtgaccaatacatatgatcaccacctgtagcaaggtaggggaaattgaaagaataatctctttgtccttgctattaaacaaatcagttagcaactaaaaatctcatcccagaccattgatcatcaaattagacactttttgcattcaaaagaactaggtgaaaagaagtcacatagggttttcatcattttccagtcatggcacctccaatgtagcaatactggatccattccccacacgtcaacgagctctttttttcactaatgattgagcttctagaatgctacgccaaataaaactagggttatttcccaattgggcaaaggtaagtgccatttagaaaatatctagctttcaaaatatttgagaccaacaaatctggacgaacaagaaacctccatccttgcttttctagtagcgatcgattatgatcacgaagctttctaaaacccaagccccctacacttttatgcttacttaatttctcccaagacatccaatggatacccttatctctagaattagatgtcttccaccaaaacttcaccataagttgttccatgtctctgttgatttccaaaggaagaaggaagacactcatagcattgcttagaacacttgcactaaagttttaataagaacttattttcttgccttagagagaaactttgaattgtaattttggacccttttctgtactcggtcctttaaatatcccaaaattgagtttttatttctccccatcgtacttggaagaccaaggtatgtactattagcatcaaccatggtcatctaaagagagttgcatgctcgagtcctcaagtaactgttagcattaacattgaaaaaaattgaaggcctctttgaattgacttgttggcctgaggcttgttcaaatagacaaagaagttatactaaacatgaactaccacagacatggtgcctttgcaatataggtagctatcatctgcaaatagcatatgcgagattctaatagccccattcgccaatttacaaccatgaagccattccttggtctcaaattttccaagtaatgttgaaaggccatcaacacataagataaagatgtttacatcaaaagtaggctaatgatgtggatatcaatgtttgacatgtagaacgaaagataacatctcagagttgagtagtccctaaccataacggtcgacctgggagcggtcccaagccctatgcccaagttgacttcatgaactctgaaatgggtgtttggattctgataagttgtttccaacttatatctttcaatattctgtaccatgaagatatgacactacatgaaatgtcacatttgccagcatatttttgtgttggcaaaagtttagtattgcgctggtaaaatgaaatttacttctgatgtgttggcaaaagggattggcaaatcaacgttggtattagaatttttggcaacacaaaatgaaaagtgctggcaaaaatagcttttcttagcgcataaatacgctggtaaaaattagtttttagccattgcaaatgtgcgctagtaagactttgacctttttcccattgcagtttgcgaattacgctggtaaaagtttttaccagcgcagtagcgaactatcctggtaaaagtgacaaatttcttgtagtgtgaagcattaaagactaggccctgatagttgaaaacacaggaattaacacctcaaatttcaacttggccacctagggtttcaaccggcacccaggttgaaaacaccaactagggttttagttttcgggatcgtcttagggaaaacgtgaccaactttacattgggacatgaactagacataccacgaatatatttgagacatcaaaataatattcagagaactttcatttttaagcacccactttgataatatatcagcttgggccaattccaagtatcaaaacaaaaatcagactcatgcatctacttcatcttcataaaaaatggggagataagtgctttcaagtaagaaacaacccaaccattgttgaaaaacaagggaccagcgcctaggttaggttaacacttgtcccagcatccaggttgatattttgtcaacctgggccaattctaaggagtttttccaaaaaagtcttctgtgcatattctatgttttcatcaaagattaagattcaactatttttagggaccaaacggaacttccaggtgatatcatggaatccaatcgggaatatatggagacacaactaggaatggaactcccaaattgttaaacaaaaaaactaaaattgaattcatatgacaaaaattgcaacatcatagttaattttaacacttatattcagtttcatctactgctcaagagacacaacagtagaaactgttgcaacaaattcattcaaccttgtagcttgagccctcaaatattatacaaagtacgtaattgcactactattaacaacctcttaagtcgcagaaaatattttattctcaacaactaacagtgatctgatggtaaaccatcaaagaataaagaaccaacaacgaatcaaaacaaaataaaatgcatgtcacaaagactgactaaaacactcagaatcatgtcacagagataagactaattgcaatagtaaaattgaatcacaatagcaaaatacaaccctgaccaagccgcgcctatgtctagggaaggccaaagaaaaaaaaacctcctgtagctataaatttaagaacaagaaatcctaataatttttttgagataaacattaaatataacatagatatatgagtttttatcatagtaatcttttcgggatgaatttatgtacttatttatttttaattctagaaaacatcttctattacaaaaagaaaagaaaaaacttctagaaaacatgcactacaaaaaaatttacttttagtcataacaagatttgtgactaaaagtgaaaaaattgtaactaattataaattattatttttatgtggtgactaaaaagtccgaggtgaaaagtattagtcacaaatattacaatttgttgtgactaaatgtatttttaatcacaatacttgttgcgactaaaactaaataaataacaatttgtagctaaatattatgttttagtcacaannaattttttattgtgactaaaagtcannnnnnnnnnnnnnnnnnnnnnnttgtgactaaaaaattgtcactacaagtagctattttttgtagtgatgctagagtattcttttaaactatatcactaatttcttcattgatgaaatatcaaaaatataatcaagcactttcatttaaaaaaacaaaaaaaaaactactatatttaaagaaattattccattttatcgtaacaaatgtttctcgatcgatagaatttagtgtagcttttaatcataaattaaatacatcaataatatttgttaaactaataagctttcaataattttttttataaagactttgaataaaatttacgtaac

SEQ ID NO: 38263 - DNA, 2395 bp, Cannabis sativa
atttagacagcttgtcatatctctacaatctgatcccgaagttatagggatttctttgatgactcacaatgcgaaagtttaattcgctaagtgttggtcgcgctggacggattgctgattgctttgcctagagcatgcatatgaagtatcctgtttggattatatcctgcgagtagatactctgagtcgactccatgtgtcaccatcatgtgatgccacgtcacagtacaaaaattgtgataagagtttcaaaactcaattttgaacaaatatatatttaatattgaatatattaaatgattaattaaacaaagtgaacttaatagaaataaatggacaaataaactaaatatactagaatctaattctatatatttatctaatgataatgttgttttctttgagatttggtactacattatgtggagggtctcgttcacacgacttagcttgaatagtcgaatgagatacattgtccataagagttacagaatgagctgcacttacatttaatgcaaatgagaaattattggaatttataccctaaaagaaagtaattaatgggtattatattagagaatatatgaaatataattataagataagtaattataagataactgatatattaattataagactataattattcaatatttaaaatcttgttattcatatggagaagatataaaattttgtaaggatgtacaagagaattaagattatacaatatgaattaaacaagttggtagtgtattaaagttctaagagtctataatatgcacttgctaagtacggtttactatacattgtacttttaatgtgtgtgattttgatttagatcaaatatatagatggacatgtagtaaaggtactgtgattagattacgcatgattggactgataggtattaaacttctttcatcaacttgtcgtttacaatgaaaatatagtttatcagatcacaatgatgattattagtagatcagccagaatcctgagtgtaaaggaactcctatttgtgttcattcaattctttgattgactcgttaaagtttctttaagaagatgattcttacaacttctgttttgggagcttaataacatgagtggctgggaacatgttatactataatagaatccaagctttcctaatagatcaaatattagttcccttatagtgttaattttgtgaatgctaactgttagatccaaatctataattagtaatagattaatttttcacataaaattaatggtacataaggaatcaagagataattagaagggtaaaattatattttgaccaactctaacgatgaactaataattggagggtgagctacttatattgattatatcaatagactacaagtaagcattctctaaatataattctatattgtcaaagagtgcaattccatatttatagtggagtaataatgaaattaataaaccagattattctattgatgagattgattgtaatcttgagtttattagagctttgaaataaaggttcatgattcccgactcacctccatacaacactgtacaagggaatgttttattttatgaatgaatttcgagtgagagttaatttccatgggatataaatttttaaggacaaaatagtaatttgtgaaattattgtttgattaattatgaaaattatgaattgtataattaatagtatttaactatttaattttttagataaaactatattaagtagttaaatataatattatgattaaataatattaaagagagagatatataatattttagaggaaataatattcattttaatctttgtaaaagaagacattaatgagaattaattaattattaattattggtagaataaataataaatcttatttgcggtaaaattgagaaatcaattttggaccttaaaatatgacccatacatgtaggtccattctatacatgtatgtcgatatataaaggctcatgattaatttggtttaattattttattaatttaaaataatttaaattaattatgttttatttattaattaaacacattattagataattatttaattaaaaaataattattaaaataaaagatctactaatatttttatattcgactattagatatttatatttgaatttaaatcaaatgagatatttatcttttattttaaataaaagattaaaagactttatttataacaatatatatatatagggacatatataatcatagataacaacagtaaataaagaaaataaacacagaatattagagagaaaatagaattaatttttttcaatcctactctctctctctctctctctttctctcttcaattcgtaccctatagtgattagagtaagttcctacacacatcaagtggta

SEQ ID NO: 38264 - DNA, 1700 bp, Cannabis sativa
atgacaaataaaaaacatgtcatcagccaaatgaaatttaattagtcaagtaaacgttgagaccaaattggatcaaaatgccaagattctaaatttgaattcatcttttttaaaggaaaaaattaaaaattgaacattatttataataatatttgtcctcgtattgttgttatacaattaaagataatattaaacatcgtgtaaaaaatatacaatacctcttcataaatttacaatgaataatacagaatattattgctggatatatataattatctgaaaactaatgtctcatatacagttaaatgcaatggccaataatgatttagttagtataaaaagtatgtacttatcaattaataaaatatatgaccctaaaaaaagttctcatttcttaaaaaattagtagaaactaattaacaaaaacaataatgggacacaatatgagtgaaagtaagaatcacaatataagaactaagatgattccaaaggtgattggtaagctcaactcactcaaaggcctcaatttttctcataacaagcttgttggtaaatctaaatggttagatctctcctcaaatgagcttaagggaatgattccatggcaattggctgcaaatctaaatcagcttgaatttttaaacctttcagtgaacaaatgggtggggccaatacctcacggcccacaattcaatacattcaatgaagattcatataatgaaaattcgggcttatgtggatttccactaatctctaaatcatgcaacgaagtcaaaacatcatcatcaactacttttcaccaagaagagaagggattatttaattggaaaattgtgttgatgggatatggaagcggaatggttatcggtatttcagtgggatacaatcattgatgggttaattgaaacggtgaaaggagaacagtactggttttgtttggcaaaaagatcaaagcggaatgctcgtcaaaatggtagaattcgaagaagacattagtttacattttttgtatcattatgttgaaatgtctgtaataagttttgtgtgtattctaaataaatcatgtttttgtttgcaagctgtttattgtagtttattactatgtatgttttttttttcaaaataaattataatcaactttattatgtagttcagtaaatatagctagcattaatttcgtatttatactttcaacattactttaacttaaatgaaaaataaaactaaaattaaagaaatgttgtgctttaaaatgaaaagagaattagactgctataaaatgcaataataattgcttgatacaaatatttggaatttgtgttcttgtcgttatattatttgatataatataatatagattaaaatatttaaatgtgacaaattatatagtaataagagattaatatatattatgtgttgaaggttatattattatatcatatatagtataataatgcacataaaagttgtaacatatgaggagttacaaatctcaaaatagattgtaacttaaggatcacgtgtaattaagtgagatattacatatggaagttatgaaattaataggataagtttctagctgttagaaactgttacaatactcaattatattatttaaatgagtgttgggacgttgggaaaagatttaattcggagacgagttataaaaactaattaattttaagttttctagaaacagt

SEQ ID NO: 38265 - DNA, 3884 bp, Cannabis sativa
  modified_base (204)..(207): a, c, t, g, unknown or other
  modified_base (3829)..(3832): a, c, t, g, unknown or other
atactgttccatagtataagtcactcgcacaggtaaaaagtgcactgacttggtgaatttatccactatcacccatatggaatcatataacccagtagtcctaatcaaccccactacgaagtccattgttatatcttccatttccattaaggtattctcgagggctgaagtaaacttgccggcctttgatgttcagccttcacnnnntgacaggttaaacactttgaaacgtattcaacaatatcactcttcatttccagccaccaatatattgccttggtgtcatgatacatcttcgttgtccccaggtgtgaggaataaggagtagtatggaactcatcaaggatttccttcctgatctagtcatcttttggaacataaattctatcgttatatctcagtagtccacttggagccacagtgaaattctttgtagcgccaatctcaactttctttctaagtttgatcaattcgggatcattcttgtaataccctaagattaaggaatcagattagcaaactctaactagttaaatgtgtattaatgtggaattatattgttatttaatatataggaattatactgataaatgacatgttaagaccccgttggtgagccaggagaatttttgtaattttgttccgagaagggtaacactgtactttttaatattatagcattcttatggactatattattatatagtatatttgttttgtttttctgcaggtattttctgacaagtcggggtagtatagtcacaatcgggtattttagaccgaaccgggttcggggcccaaaatacattttcgggattttattttggaattttataaatgattgaataatctaaaatttatttaagtttggtgtgtgatgaaatgacaattttgcccttgttgtatgcatatatactttattggccctaggagtattttggtcatttgaccatttgactttattgacaacaaagtggatttttttttttttagaaaaatgaaaaaaaaaaacattttctggatttttctcatagcccagcagacccctctctctcaccctttttcatctctttaatctttgagatttagccttgaatcaaagcttagatttttagactggtggtgctaggattgtgaagagcttgaggtagtttttcccacctctttattttgagttttgatgctgaataatatgttaatatttaggtatttttgatattgttagttgttggttgcatggttgtttgaattgaagagtttgttgatgataatttgttgtttgagcttgtaatgttatgagagatgtatcttgagttggttagtgagtttttggagttgtgatttagatttgaatgctattttgaaccttaattttctggatattcttgtgggttgccttgaagttttggtgttcaagattttgttaggggattatgttggttttggtgtaaacttatgttgcttgcttcaattcttgtggaccttgtaatagttacatttattgttttaggttaaagcttgattttgtgttcttaatcccctattggtgatggttataatctgtgaataatgagtttgagtttgagcatatttttgttgagttttggtatgtttgggcttgaatttcggttactgaaaattggtattttctgggtttggaacctaggtgtcgtgaccctctctatgagcgtcgcggcctgcccacttgaatcctgggtttttttttaacccaggtgttgcggcatgcctagggagtgtcacgacccgcctagggatttctgggcagtttgaatgttaaatttgtttcgttcataacttttcgatccggactccgtttggggtgttccatatatcattgaaaagctcgtttcaagctctatatatttatttgtatttgaattcaaattttataattatgtaaaagtggatttagggattaaccctatttgtgaattccaggaattgtgactaggattaccggcacttgtttaggagcactcggagatttagaatctccacgtacttgggacattaggtaagacaatagttagcacataaagttaagtgcggtggcgctcatgtttaatattataattgtgattaattgagaaccaggattaaagttattaccctaaagtgagtgggtatatggcctagggttattaccctagtgattaaatgattttaaatgctatgtcatgctatatatgttgaagtaaagaattatgtgttcagtgaataatttggttagactcagtaattagaactgagataaaccatcctaaggccttattgtaaatagacgtgtgagcgtaatacgtggatctatgccacatagacataaataggcgtgtgagcgtaacacgcaagtctatgtcaaatagacaataagtgtaatgacattaatatatatgtgatatgtcttattatgtatattgatatttatacttttttactgggcttggctcacaggtgctgtactgtgcaggaaagggtaaatctgtctgtaatcagccattagttcgagagcttggcgatggactgtacatgttcgagccatactagaccaagcgagttagttgggtctaccaaaaaatgtatttgaaatctcggtttttgccgcataagtcagcatgtaaattaacttgtaatatttttcgaaaaattttgtgggatcccgaaacatgttgtctttttggatttcttgtaatattttaaactttattccattataattaaagtttaaaatttcccgcttttattttctagtaatctcggattagcgagattaagttataatactggttgtcgtagcgtgcctatttgttagggtgttacaattctgttggccaatctttatcctttccagtaaattagaatgcaacgtaatgtttgccaacttcctgactacgaactcaatctcgaccttggccatatcctcgaccaatcttggagagatttccttcaacttgtagacttgccctggacctttcaggctaagtgcatctgccactacgtttactttgccgggatggtagaggatttcacagtcgtaatccttgactaactctagccatcgtcgttgtctcatattcagatccttttgagtgaaaaaatatttcaaacttttatggtcgatgtaaatctcacacttttcaccatataaatagtgacacaaaacctttagggcaaaaaccacagcttctagttctagatcatgagtggggtaacgttgttcaaaagccttcaattgcctagaggcataggcaatgaccttccctgattgcattaacacacagcccaaaccttgtcttgaggcatcacagtatatcacaaacatttcatcactaactggtagactcaagactggtgcggtcatcaatctcttctttaattcttgaaagctattcttgcatttatcagtccacgtaaacttataactctttcgggtcaactcgatcaaaggagtagcaatattggcaaaaccttctacaaatctcctatagtgcacagccaatcctaagaaacttctaacatcagttgttgtcttaggtcgtcgccaatctcgaacaatttcaatcttcactagatctaccagaatcccatccttacttaccacatgtcctaagaaactcacttgggacaaccagaattcacacttcttaaactttgcataaagcttgtgttctcggagacgctgtaataccatatgaaggtgttgttcatgagcttcttttgattcagaatagactacattgtcatcaataaatacaatcacaaagttatcaaggaagtccttaaacactcgattcattaagtccataaatgnnnntggtgcattagtcaagccgaaggacatcactagaaactcgtagtgcccatat

SEQ ID NO: 38266 - DNA, 2383 bp, Cannabis sativa
  modified_base (2218)..(2218): a, c, t, g, unknown or other
aagaagactcctcaaggcagccttgacgtcgtaatagaagatgtaaaccctctctctccagagcacttccaaccgagcaatgcgagagaaggggatgcatcagaagctgacaaccgagagggtaacttagacaagcatcgcaaacagggtgaagaagactgtgaaactgaagacgaggaggaagatgatgatggatacgtcaaggacgagtactataaatatgggtattattatgaacaagacctaaaagtagttcgagtgtccaaagagctgcatgagacccaggaaaagttagcccgtcaagagaagttttctcaaaagatggagagtatgatgacacgcctccaagaaaagctcgaagatttggaagaggactctgaagaagatgcctcggtggaactcttcaatggaaacaacagggaaaaccctactaacgctgaaacctcagctcctgcaaaggacaaggggaaggtgaaggtgggtgaccctcaaaacttgacagctcccgaacctcctagaaaaagcgtgaattcaaccaataaacctttgcaggcgctgaaggccatcgatgcctctgggcttggacgtccttctgctctgaaaggtcctgttgcgcaaaaaaggcctggtgcgaaaggacagtactctgatgatagttggtccaccgtggaccttcgaaggcgtctcgatgctaagtatgaaaaagctaaaggagaaaaggcgacgccacgtggaaatgacctcaggtgaacgataaggctcgcgagtgcgaccttccaaatagtgacacaaagaggttggaggagcagattgttgccttaaccaaacttgtctggaaatagagtggggccttttcggattcaattgatgaagatcctgatgagtcagtcacggaactgccagtctagaaggtctacgttgacggagcgtcaaataaaaaggaagtcgaagcaggaattgtactaatctttcctcaaggacatcagctcgaaggcgccattcgctttgaattttcagcctccaacaacgaatcagaatatgaggctatgctagttggcttgcaattggctaaagtaggagcctacgttattgaagtgtacaacgattcccagctggtggtgaatcaaatattcggggaatatcaaaccaagagtgagaagatggttgcctatgtaacacggtcccgggaattgctacatggattcaaaagctacaacatccaccaagttccaagggaccaaaattcattcgcggacatgttggctaaacttgcaacacacttggagatcgtacaatatagagtagtgtttgtaggccatctgaaagctccaagtatggctggattgtgaacagtgtcagagatacgcgaaggttccgcgtgcatcacctattgagattattctcatgcagagtccatggccatctgcggtgtggggaatagacctattgggatcactaccaactggacaagaggaggaccaacttataaatacaggctgatcccaaaagccacttgcgaggcgagagctagatagctcgagcgacggttatacattttttgacacaggatcagatcttgtccccaatgttagatcatggtagtgcatgcacctcacctttgaatatacctttttgtctaatggcttgtctaggcgtcttattttcaaggtgcaaccttttggcgacgcgtgtcctgtacatacaatggtccccattgtacagttgcctcaatgcacgagaatgaactttcttgggggtccaatagtcagtattttatgtgaattttactccaatagtgggctcttttatagaaaccctaaatgggtcatggggttactagtacttataaatacccttttattcccacatagaaggggatcacaaaaaagacagccgaaactctgttaaaattcctctaagcttttttcttcttcaagagaaatcaagagagcagagttgaggttttatgtaaacaccactgtaaaatattagaccagtcatttaaggccaaaatactgactcgtagattaaggttcattaacgcctgaatatgtaaaactctttgtctattttgcttactgcatttaatatttcttaggctctattttaattagtttccaaaaatctcggtaaacatcttcaaattcatataatggaaaacgattttggttgatatgttggaatgaaatataacacacttttattattattattattnttattattattattattattgacgtttatttctttcactagaactctataaaaattcttgctaatttgagcatgacaagagttgattaagattgtatgcttgtgcactatgagtgtgccaattcttgccaagccgtgacacaatgtatctcctggaggtcctagg

SEQ ID NO: 38267 - DNA, 2515 bp, Cannabis sativa
  modified_base (50)..(58): a, c, t, g, unknown or other
tgtaactaaatactgtgttttagttacaagtaacattttgttgtgactannnnnnnnntttagtcacaaaaaaattatgttgagactaaacattgttactaaaagtaacaattttttgtagtgtttattttagttatattaatattttttggttatttaaatatttttttctaatgtaattctattaagttatagtataatctttcaaataaaatataatttagttggtgttgtattcttagatatagtggttctactatataaagattataaaatttatgcaacacttagttccctagtttcttgataaacgaaagtgatagggattacaaaatgcaagtcaatcaaaacttaggtacattaattgaaaaagaaaatcaacttcttacgaattaatgattactcttgtacaatattaaatattgttaaacaacccgagacagacatgatcatggataaactacttggataaccaaactctgccaaaccatatcaccatatataacgtaaccctcacacaaaatataaccttttacaatattcttggtttggtctaacccctccaacaaattcacatgctatattctagtcctcagcagctgttaatcttcattccaattataattatatcaaaactccatttaccatcatcttaattattccagaaaaaacataggcaatctattaatatggcaacttgttttcagcaaggaaacaacgttgttaacaatggtgacacagattccgtcatactcttttccaactcagatgatcattactctcatgaagatcagacgtcaaccgctagtccttcctctttcaacaattctccaccgtctgatcatcatgaatattaccaccgatacaagaagaccaattacaatctcacagtaacaaacctttcctattctacacagttaccatctacttccttctttccccttttctctaagcccaagattgttcccatactcaagtctatctccttcacagccaaaaactctgaaattatcgccattgttggccctagcggcacaggaaaatccacccttttgaggatactatccgggagagtagtaaaccacgaaaactataccaactttgatcccaaaagtatttccattaatgatcatccaacaggccattcttctcagttgaagaaaatatgcggttttgtagctcaagaagataatttacttcctctactcacagtaaaagaaacactaatgttcagtgctaagttcagtctcaaacaattgagttggaaagagagagaatccagagtttcatgcttattaaaagagttaggcctttggaatgtggctgaaagctttgtaggagacgaagagcatcgaggaatttcagggggagagcggaaaagggtttcgataggagtagaaatgattcaagacccaccaattctgctcctcgatgaaccaacttcaggcctagatagtacttctgctcttcaagttattgagcttctctcaattgtggctagaacaaagaaactaactgttgttctttcaatccaccaaccaagttatcgaatccttcaatacatctcaagctacttggttctttctcgtggctctgtagtccataatggaagccttgaatctcttgaagaaaccataaggagtaaactcggaatccaaattcctgttcagctaaatgctctggagttcgccatggaaattgtacggacactcgaggattacacatgttcaaaagagagtaataacattaataataatcatcgtgaccatatggaagtagtgatgtggccagatcgagaagattttggaggcagctatgaagtacatgatcaaaatactgctacttatcattggtttttctcaaactttctattcgagattatgtttctgtgctcaagattttggaaaatcatttacaggacaaaacagctttttcttgctcgaacgatgcaggccctagttggaggatttggcttaggaagtgtatacataaagatgagaagagacgaaggaggagtagctgaaaggctaggcctattcgctttcagtctcagctttcttctctcttccacagtcgaagcacttccaatattcctccaagaacgacaagttttgatgaaggaatcctctagaggagcatacagaatatcatcctacatgatagccaacactctcgttttcatgccattcctttttgttgtggctattctctttgctgttcctctttactggatagtaggcctcaacccatcctctgcagcgttcttgtttttcattcttgtcgtttggctcatcctcttgatggctagctctctcgtactcttcctcagcgctgtgtccccggatttcatatccggcaactccctcatttgtactgttcttggagctttttttctcttctccggttactttattcctaaggaaagcatacccagatattggatttttatgtattatgtttctctttatagatacccgcttgactctttgctcgccaatgagtattggagcttgag

SEQ ID NO: 38268 - DNA, 2644 bp, Cannabis sativa
gaatatttgaattgaatgaacttccattataatttcttggagtttaaatcatcatttattcgatatgtgttatcatttattgtgtttttttgcaatgcaattggattaatatttactatagttgtatgttcgtacgtcgtgaacaatgttgcgttttcattttacgattgaaaggatcaatgtgtatggttcgctcctctgcacttttgttcttaatgttctaagcccgcgtagtctaatgccttgagtttcagttctatggttttacctttggtcgaatttataagtatgggtatacaataattgttcatgtacaattgatgagtcattatgtttgctgaatgaattgattgttttctgggaatgttgatacattataaattgtattggaagattttatagttatctcagtctggcattgtgctgacaacttgtactctgatacagttcgatctctttttctctttttgctctttttcccctttcccaattgttgatattttgtttctcgttattgtgtctgattaaaaacggttgttggtgaatagtgaaattaggaagtaccagaagagcactgagctcttgatccggaaattgccattccagcgccttgttcgggaaattgctcaggacttcaaggtatgcagctttctttgctgagttatttatcagttcagtttgaagttgttattgggtggtgttgtttcaggcttaaactaatattgtatttgttgaacggtgtgttgtagactgatttgaggtttcagagccacgctgttcttgccgtacaggaggctgcagaagcttatttggtgggtttgttcgaggacaccaatctgtgtgccatccatgccaagagagtgacgatcatgcctaaggacattcaattggctcgtcgtatccgcggtgagcgtgcatagaattggtgctagttcctgtaggattttataatagtttttaggggaagtacctacatgtttggggatatctgttactgtacagattttatggaatagttaaatcgttttggtttacgatacatatttggatcattttgattttgattacaggatagttgaatactatattcttttgttgttttggaaccattagtggcccaattatattgtttcaaacagttggatgtcgttttctttgctctttcatgtgcttttcttattgggtttctctttagtaacttcttcggctcaattaatccaattaggtcagcgtttcgtttggttttttaatgttctttccgagtaaattcatatcgattaaactgaggagataatcttgctgagagcacatttggtttggatgtagctttcaaacttaaagactaatacaaattagggtggttcgtaataatattttttctcagttaaaaaatataataaaacaaacaatgactttttttatctacgacaacgaaatgaattaacaaattcaaacaaaatttatatgtttaattttatcttaaattgtatataaaaaaatgatatataataatagagtatatatttaatttattaaattttaaaatatatttttattatatttattaaattttatcagctgcacagtagaatcaaatttctattatttaacataattttttgtggtagttcaatgatatatactgttcttgactacaaagttgaggattttcttgtaagttattgtagtcagtggctcaatatttgtctactttgtgaagtagtcaactgcaattataacatttcattttgtatactttttttttttcttaggaagttgaccaatggggtcgattccttaaacaataaagggctaaggagattgcatcagtatgagcttgttttgtgaagttcttgagatctttgaaaatctttggcacttggcacaattgctagagtagtctccatgacttctccttgagaaaaagaatacactacaaccaaagaatcctgaggatggatagtttttttagaagattgagccttaataacatcctcatggcccttgactgaaggtgctggctttttggatccagcattagaaggttgcacgacattctccttaactctgccagccttggcaatctctctagtaccatctaatttcttggcaatagtgcccaagaagtcatctaataaacccatctagagtgtgtgaattctctacaaaatacaacccaaatgttaaaggtacagaagaataaaatgaaaaataatgcacaagtactatttatcttagtatactgggggttccccctaataaattaaaaaaaaatcttccctttctaaaaagcttccatattggaagaaacttggatacttcatttcactaaagatttccaaattaacattatgtgttggcagaatgaagtgatttgggatcctaactatttcatccactctatatatatacctaatacctgggtacttatggcgatctaaatgtaaaacataacggtcaaatttgccttggttaaaattagggttgtacaaaaaaattcgtaaaccgctcaaaccaaataatccactcaaaccaaactgaaaaaaccgataaaaattgcaaatcgaaataattcgaaaaaattacaaaccgcctaatctgttaattgggcgggttgaacataggtccaacctgcccaattaaa

SEQ ID NO: 38269 - DNA, 4449 bp, Cannabis sativa
  modified_base (2280)..(2282): a, c, t, g, unknown or other
actacatctatgtataatatacaacagcgttccttcacatactgagagtgagagctattaaaacacaaatcattcctcgcagattcttctctgaagttttaagggtgcaacacgaggacttccgaggagctcatctaatgattgatgggatctggtgcatacattcctctcagattctcaatatacataaagcctgccaagacaaagtgaataatgaattaagaattttaaccataacaaaccagacaaaaatgagaccatttctcataaaattggactgagttcatcgtttctatttctcttttaagaactctattagttctccatttactgtacaaggttgggaagcttgtgatgataatgatgtattattataaaagaaacttgtttaacattagctctaatctaaattctaaaccttttgacttttaaaagcagttttaatcaaagttgaaaaattgctctgatctactgagttttgtataacaactaaaatcacttccttagaaaagtcagtgtgtctaaatggcagtacaacagagttttctttatatagagagagagttattaaaacataaaaattttaaaaaaattaacacataaaataactagctaacagactcctacaatcatcagtgcttaaaaatactgataaatctaaattttatatataattagcatttagtattgctattccatgcctttcaaacatgttttttctttaacataaaagctaagaaaaaatacaatagcccaactaaacaagcctaaataaagagaacaaacacatatgaagagcttaaatacttcaataaatcaatcaaagatcaaaaagtaaagaaaatctaaaagtaagaaatggtctatacatacatacatgaagaaatgaagtttacttattttctaataagaaattcaagtgatgaacattttgaacatttataaacaactttaaaataaagctacaaacttcagtaatcaatgtaaccttattaggaaaaaaaccagagaatttcgaaatcaaatcatttcccaacggaggattaaacgaaaaaggcgagcaaatgaaggaaccaaatgcatttccaagccacaaaaaaacgcttgaagaagctgttcagaccaaggcctagttcaattcagtgttgttatgatatgactcatcttctgatcacaaaacttactgaactcttcactgtaatacttagtacctttcctcgacactttattccaactcaagtttcttgataagggtcaagaatctttggtgagccattcttcggaaacacaattctcaaaattcatcgtttctatttctcttttaagaactctattagttctccatttattgtacaaggttggtaagcttgtgaaacagccaatctcaaccgaggagccatctcaaaggaaatctagattttatattaagtaacatgatcaaactttaaattattcaatgtaatttatacgaaggatgattgatgaatccaatttaatgggaatcatttgatgataatgatgtattattataaaagaaacttgtttaacatttctaaaccttttgacttttaaaagcagttttaattaaagttgaaaaattgctctgagttttgtataacaaccaaaatcacttccttagaaaagtcagtgtgtctaaatggcagtacaacagagttctctttacatatagagagagttattaaagcataaaaaactatctcctggtcctgtaaaagtaaaatctagaaaagtaaaaatgctttaactgggaaaaaatggtgtaaattgtaatatttaaaagaaaaacatgaaaaacatatattgagataaataaaagaattgtgaagttggaacatggatgaaataaacaaatcatcaactaataaaaccaaacaaaataaaataaaataaaataaacacactcagatgagctacttcatcttatgtctccctcattataaacactgactaatcagttacatgtttttattgtagtgaaattacttcaccctaatgcagttgttatgtcactaacaacaatcatgagaatcaaacttattgatttgagtcagcactatacaattcgagatttaagtcccaattccgcaacaatggtgatcaacaccatgggagtactgtataatcaaacacacatgcattatgctatatggtacatatttttcataaccataatttatatttatacaaaagctttggatccatatggtacataattacagaagcttagttcccatgttctgatatatatatatatatatnnntatatatatatgtatgtatatttctttacgaaacaaatttcgaaataatgaggaaaaccatgtcccctcattaaaaaatgcagtgattatttgttaaaatgaggaaaatgctacatgttactaatgagttagtaaaagaagtaacagaaagtaactaactagaacacatataggacctaacttgctaattctgagttaagtaactaatacaaatacatcagctaaaccagtcttaatattactattatatatgctcatttcttctctttaaacaccttcaactgagctgcaaacaatggccttgtcaggatatcaccaagttgctcaactttcaactctttgaggacagataagagccaaacaatttcagaagcagtaagtattggccaagatatcatgacagactttgcaaggataatattaaattgggtatgtgactaatcttgttccagtattatacatacataaataaaaaagaaaatggaagaacaataagttaatcaaaacaatctgagattatatgtcgtaaatgcaagctcgtcatacaaatctaacatttggtatgtgactaatcttgttccagtactcctcattcccactctccttctgagagtacttttctgaaaccaaaggacaattggagatctccaaagaggtgagggaggttggaaatccttcttctgacaatgtctccaactcaaggcagccccagacttgaagtctttgcaatgaggttagttgtgtaagcccatttttgtctaatccactaagttttgaaaatctccatattttgagatgggtaatggtggtagggagtagcccttcctctggaaatgattccatatcttcttcattaccaataataccaagaaaggcaagatggggtaatgtttgccaattccatttcatcctcaaaactgcatcataggatatccaaagtgaagacaaactaaccagctgaccaccttcaccttcagggagaggctctatcaaaggacaatcatcgattatcaaggtctctaaagatgagagggaagtcatcttctctggcaaccacttcaattgagggcatccactaatccttaagttactcaacttgggagcaataagtccaccatttgggaaagatacaaaattaccacaactctcgatagaaaaagatgttagttcctcaagagatttcccatcggacgctgagacagtttcaaaatagtcgctgcgaacaatacgaagagttttgagattgggaaataaatccatatggagggatctaaaggatgatccacaataccacaaattaaggtattgaagggaatggtaatggcaaagtggagtgggagaggtaggattacttggatttattgccttgtacaatgactctgaattatccaagttattaattcttatgtttgtgacacatggtaatcttgggagacttaatagtggacacaacttgtaacctgtaatttcaatgcttatcaatgaaggaagcaagcgaggataatctccaatgagctcaggacatccatgaatctcaagtgttttgagcttcccataagttgtagcctcttcagtttgcattgaatgccattccttccatgatgacatctccctgaatcttaatgtttccaatgatgaaaatggctttctcccagaacaattcccataaaacatagcacccactgtcacaaccgaatagcatcttgagatggaaagatcttttagcaaaggaagttgcccaaagggtggcaagtaggagcaatgcttacactcattaagacatactttagcaatgttgcaaaacgaatcattcccaacccaatttggaaattttgtgcttgggtaattgaaaatctcgagttgcttcaacattgtgtttggtgaaagcatttcaagcacactctctccatgttttggatcatcaacatcatcaacactccatcccaacctcaatttctcaagttgcttcttctccagtacattcatttgatccgatgcttttgtaatattgaccacattttctaacttcttaatggaaagctctccgtgtaaactttgaaactctgccaactcttctattttagcaccactatccttccccacaacaaaagttgtcaacatttggagattcctcaatttacttatttgacatggcatctcaactagg

SEQ ID NO: 38270 - DNA, 1790 bp, Cannabis sativa
agcaagctcataagatttacacataaaaggaataccatacacttgcacccaaaaaggcacatagtgtaaagtatcaggagtgatagggaaggaagtgtcaggagcagccaaaacagtaatgctttgtgcaaagtgccccaaggctctggccctcaaaagaactctacccttattcccttcacacccaaaagtaaacataaacatgccatcagcatgctcagaaacacaaacaaggaatctacacagcgatgaccacattccaaagagggttttcataagggaaggcttattgaagggtcggacagtgtgtaatttgagcaataagctaataggggtcgggatatcactagaggggttagcatggtaagtgaagacagtgttttcatcagcaggtaaacacaagagcactagaaacattactcagaaattcttccattatactgaacaacaaagaaggcaacaagagaaataaaggaaacaagcaagggatagataggaataaagaatgatacctggatcttgccttatatagataaaaccagtatcctctagggatgtctcttgaaaaatccataatcataaccctagtattagccggagtagcctccattatggaaagatcttgatgatcttcatcccctccatcttacggtttccaatggcaaaatagaagatgaaaagatagtttttaacggtaaaatgccagaaacttaatgagaaatgactatcggagaagaagaaaaggaaataatgataccaagggcaataaatgtgccaagtaaaacaaataggattggagagagaaacaaccagagaccaagagaaattaatactctcattaattactataagatacctaatagacaggaaatgagaaggaaaaccaccacatgaacagtatgggtggacacaaatctccatagcagggaccatagttcgatcaaacaagaggagggttcgcacgcttaccagagtgttccagagagaaaaagactacttgattgattacacatacaatataatttatgtttacattttatgctctatttttcaatatctgctttagtgtattaaaatttataaaagcaaaagctataaataatagattagaaaatatactaaagaaaggaatccaaaaactttttctaaaatcaatagatacattggatgggtaatccacttttgagtttgagcttttggtgtaagaatgtacataccaaacccatccaaatatttagtgaatttatactgggttcgggtgccactcaaattcgttccaacccaaatataagtcacgtgacacctgaatttgatctgcttcatctggattacatagaattataaaatattacatatatattttcctatgctaattatttaatattgtcttataatttttatcattttttattttattttgtctgttttaagtattttttattctatattatattataaatattgtattacttttcaaaagtttttaaaaaactaattgtgtattttgtaatatttattgtttaaattattgactaaaaaatacatacacaaattaaaataaatatttttcaatcttaattttttcatatatttatttttcaatacatgattaatatttatactaatcataaaaatagaaaaaaatgatattttttataattacgtaaaattttatactttataatatataatgaatttgggtgactattcaatggttacatttttattgtaactatattgtaacaccctaactaacataggcgtaatacgtgatttttaaacatgctgtg

SEQ ID NO: 38271 - DNA, 3705 bp, Cannabis sativa
atcagcaacaccaggaaaaattcgtcggctgctataagtaactgtatgttggctgcaacagtgtatgatcagatttggaaaaatcaaaataagtgtgtgtttgaagggtgctcgaatagtttctgagataaaaaaaaagtgttgttttttagattggtcaatgttgttaaagggaagatgaacacaaatgatcaacattatttacttaaaatgtttagtttattaagaggctgattgcaggagctggcctgttgctcgtctccagtactattttgtttgatgttgtaattttgtttgttgtgattaatgaaaaaatttattttctttataaaaaaatatatttataaatattaattgtaaaaaaatatcttattaaatattgtaatttaaaaaataatttattttaaatatataactaatttgagtttaaaaacaaaatgtttacatgttacaaaccttttatagcatgtcattacaaaatttaagttaaccattgaatagtttttagtaaattaattaaaattttatatatatatatatatttttttatcaatattggcgactaatattatacgatttgtgacataaattgtttttttttttttttatagtaaaatcctccaaattatcattctgtttttgtctctactattctgatttatatcaattatttttttaagaaaaaatgtatcaaaattattgtttcactagctaatattatttatatacataaaaatgttttctctaatattataatgataatatgtacgaaagtataatatcatttctcaatttggtcctttaactaattaactatgattaattccacctagctataataaaagtaaatattttacacatcatattaagtactttttttataacaaattaagcatcaaaatcatgattttcatgggtgtaatttttgaccatataattaaattaggaaactaaaattgatcatgatgacatatatatatctataagatttttgtaatgggtattggagtatagggtttcaacataattaaacacattaattttttcttataattaaattcaaaggttaggcatgaattatttgaagtttgatgatgaacacagtagaacacactagtaattaataaataaaaattaattagtgtatatttatttatttatatattttgatgttataaatagtcaacaatagtcaatgatttctggataaggtagctaagacaatatgtgaattttgggcataattttctccttaatttctctgtatgttcactgtagaatttgacttattcttcattagttatattttttttatttttaatttatataatagttgccaaatatatagtaacaattaattcacacaatcaaacaattttatctacatatatgatgtccaaaaaagtaacattctttaataattatactttggtaaaaagtaggtttaattacgagatgttttggtaaatctcctaattattttttcatacaaaagagtcttaatcttttttataattatatatgttatatttatttatttattaccacatataaatttttaaaaaattttaagtaatttatattgtcgaaaataaaatttaaatattttgttgcatgcacaactaatttttttttatacgagtaggtaattgtttaaagtttattttcagtattgaaaactattcagaattttttgaaaaatttatatttaatgttaaatagttataacgtatacatttataaaaaaattaaaaaaaaaaactaaaaattataatgtgtgccaaaataaataaagaatctactaaaaaaattcatgtaaattcattcaaaactaatatgaaattatagtataataattaagtatgtatatatataatatatatttagagagagacgtacgtaaactatgcatgtgtatatatttaaatcatgtgtatatatttaaatcgtaggaaaaaaaacctaataatgcaattctttattactaaatagaaaaattagtatttttatcctttaaattttttatattatcaagttttacaccttgtagtatataattttataacagtatctttccaaatataacttctatagtaatataatctttttatcacattttatttaattttatgtgaaataagtgaagttataaatggcaattgataaatatataaatacaaattaaatatccttcactatttttacgtgaatgaatataatagaataaatattttattataataatatatattttatatttttaattttttaatcattaaattaaaacatggtacccaaaggtattacattcatttgtcaattatctacgatcaatccatcatgttactcgttcacgaaaatattataatatgataaaaaaatcatgtcattgtaaaagttaaatttcgaaaagtattatttaggaatcttatattatggggcacaacttaattttgtaaaacatttaagcctagacaaaatacaaataatttatgaacacttaaattacataattttataattaattttagttttttgagtaaagtgcaccaccattggggatggtcaaataaatttttaattagataatttcttcacaaattttcttataaaaatttggtattttcacgatatttttttattcatatatgtatggatttaactttaagaataaatgtaaataataagtgtaccaaacatacttttacaacaaatatttcaaaaaactatcatttgttgcaaaaaaatgtgtatatatttataatttaagaaaattctacaatttactgtgaaataggtgtactgatgcacttttatctattttgttaattaaaaaatatttagtccaattttttttataaccgtaagcattgtaattaattaagacgtcccgataaatttttaagtaattcagaaaaatttaacagtcgaaaaaaagattcaaagagactattttgcacgaatgatttttttttttttattttatacacgtgtgaaatagacggtttgaatattgatttttatatagtaaattattctgaatttttcaaaattttataagatgtcttaataaatataacgtacacgactttaaaaaaatttagattaaaaaattcttatagatgtcgaaatataattagttagggattgcatcacatatattttttttttgtaaaaatattaaattaagtggaaatatttgttatatttttattttttttaatatatataaaaattgttatatatatatatatttagtttaaaagaattgttatatatatatatatgacattaattatgagtatgatcgagaaatatatacgtgcaatccacaatcatatcacgggactccaaaagtcaattatataactaataataatatatttattttgcttatcatttaagtaaaatcagctattaataatattattaggaaaatcaaaattaatatggatttttattttcttttaaaaaaatatattatgtcgacttgatatttttatacaataatttatttattttagtggggtaataagatatatatatatatatatatgtagataataactaaatgatgtgtgtatatatattattatattatataaagaatatgcttacaacacgcattaacgaattatatatataacaattaggaaggtgatgatgaagattgaagaataaaataaattttattaccaaaaaaaa

SEQ ID NO: 38272 - DNA, 1144 bp, Cannabis sativa
catcaattcaactattgagatgcaaagcttacttctcttttttccatctcatctcattttaattatatataacaaatacttgttgtggcatcatatgcaatgacaatttcaaaaaaaaaaaaaagatagtcaacagtagcattaattaaaaaagtgaagaaccccacaataactgggtttgatttttgttagacgagatcgacctctcaatacagcttcttctacccaaaaaatctctctatatttataaatatgtcctggaaaatataatggtatggctaaaaaaatattattcgttctcagtgtcatactgttagtagtataattaaatattaaattttatttaatttaaaaaaatagatttaaaaaatatcgtcaactaattatgaaaaattatttataaaaaaatactaagcattactgatacttaatagcaatattttattatcaaatacacaatgtactaataagtattactaataagcatttgatgatgaatatccataaatgaatggtcaagatcaatgagttggcagatcacatgcacgctttcaaattgtatgggtttgtgggtacgttgcaaatgacgtttgaactgatcacatcattctctaatcaccattttatctattgtggtgcctatcacactgtatcaacttaacactttatagatatagatattaatttagagtaagtttatggtatatcacaattgtttcagtaaaatttctatctatttcggtaaataatcatgatcacatatatatatattatatagttatttagaattatttgtaaattttcaaaattttttaagtactttacaatattaaaaataaaatttacatatttttgttgaatgggtgattatttttttttaaaatacacgtagtaagtaactatttaaatttaatttttgatactgtaaattatttagaattttaaaaaaatttacagataatcttaaatgaatatagcgtatacgatcattaaaaaaaaaataactaaaatatttttcttaataccaaaatagataaaggatttactagaatgaccccttaagggtctactacaaaagtttcctataatttattagaaatttcttattatattgtaatttattaaataaaaatattttaaaatc

SEQ ID NO: 38273 - DNA, 3828 bp, Cannabis sativa
atatttaagatattaatcaaacatacatggtagtaaatctagatcctggtaaaatagtcccaagacttatcacactttttaataaactcataggtgtctttgtggattgttggccaataataaccatgtcagattatctttttagatagactttgccatcctgcgtgatctccgcaaaagccctcgtgaatttctttgatagtatcataggattctgtgggaagtacacatgacaataaagtcatggagtatccttttctataaagtgttccatcaactattgtgtatctcaggatcgtgtaaaaaagtttgcatgcctccgttttatctgttggatgttctctatttggtaagtatttaacaataggggtcatccatgtggggctcgcatctatcatttccacatcttgcttttctattttgcatatacttaactagcttaacacctctactagggctgattcaatttgtctaagtcaaactgtgatgcatatttcgctaaggcatgagcattagagtttcattctcttgaactttttaaattttaaagtaatcaaaccttttcatgttcttccaaactttttctagatacttcgccatctctgtgccttttacctgatctttcccaaaaacttgatttatgaccagctgtgaatcgttgaaatatagaactgacttgacttttaaggttttggcaatttgtaagccagtcaacaaggcttcgtattcatttttatttctcaaaaaaaaaactaatgaggcgtgcaagctctccctttcctctcccatggtgaagatgaaacgggttggccgaaagcctgccatttctaacccagtgaacaaagaagttgaagcggacctaccttcgatccaagaaaagaatgtccatccttaagctaaagaagaatttcatgattcttgcaagaatttgatcatcgagaccgaacctggaactgaacctgaaggagtcgaagcagaatacgctgagctcgagacaacgagacaagctagctgggctgaggaagttgaacaagcagatttccaaaccagtgctagggatatttggagtaaattcaagacaaaccaggtactttccccttcatctaaacttacttacacagaaccgattattgttggtaatcaacgtgtggccaaaattgatctagaggaggctgaggtagaggcttcatattggaaaaatgccatagtttgtattgttttaggttctcattccccattcaaggtgtttgaagaattcatcaagagaatctagggtaacttgggcattgagaaggttgtgcgaatgcactctgggtttagtcttgtgaactttcgagatgaagctactcgagatctcattttagaggttggagttattcatttcgataagaaatcggtggtgttacggccttggactacagaccttgattcgataaggatggtcaattcagttccagtttgggtccgattgaatggcttggggctgcaatattggggaaaaaagaattagattgctttagttagcaccattggcaaacctatcatgatagacaaggtaactcaagaaagaattatgatcaaatttgtccgtgttcttgttgatatagagatttcgaatgaccctccaaaaataatctcttatattaataaaaagaaacaattggtggaacaaggggtggagtatgaatggttgccattgaagtgttcagcgtgcgataaattggggcatattgtggaaaattgtaacaaggaaacgaaagtagtttggaagaaaaaaccagcagctgaaaaaggggccaagaaggtgcaagagatgatagttagagacacaggggaagcggctgttgtgacagtagacaaacctgaaaatatgactattactcaagaggctcctgaactgggaaaagagataaagatgaggggaaaagatgatgttgatgatggtaatgagtggatcactcctaagaggaaagcaataaagcagacagaattcaaagaggcaaaggagtatgcgaatgactcttattccagcaatggctatgctgcgttacaagcagcgactaatgaagaggtaatggtccctaaatccacactaatcctgatggaagttaataatatattagggtggaatgttagaggtatgaataaaaaagaaaagaaaaacaaaaggctattcttgatgcttttaggttgaataaaattagtttttgagctttggttgagaccaaaataaaacatgctaaggttcaaagcatgatggcagagagctttcctaattggaattatcactctagtgagatcacttctgggagaatcttgctaatttggcaagacaaatttgttcaatttgatattttagaagagactcaatagctggtgcattgtaaaatcagattcagtgggcaaaagcagggcatagtggtcacgacagtttatggtagtaacacaatggaaactcgtaaagagctttgggacagtctagcaagcatcggtcagctaaatcagccttgggttattcttggagacttcaacgcaatgtttagttttcaagattgaagtggtggaaagcctattcagaataaagatattgtggatgctcagaattggcttgctttgagttaggttgaggagcttaaaagctcgggatcgtttttcacctggacgaataagcatgaagtggggggtagaatttattctaagctagatagagttttcataaataatatctagctgaatgagtttcctaattctgatgcctgctttaaatgggaggtcatttcagatcactgttactacttaatctgttgccatgttcagaataatgtaggtgtaaaaccttttcggtttgggaacattggccttcctacccttgttatcatcaactggtgatggattgctggaatataaaggatgctggtaccggtcttgatagcttaatgaagaggttgtttcgtgtcaagcatgctctaaaagtctttcgtaggtatgaagtgggagatgttgcaacggagtacagggaagctaaggaagcttactgtggtagtcttgaggaagcagctttgaaccctacagatcaagccctgcaacttctggttaatgacaagcagcaattatttttgacagctaaggaaagaatggatctgaatcttcgtcaacaaagtaagatcagctggattaagtttaatgacgaaaattctacctatttccatgctagtatgaggaaaagaagactggaaaataggatcactacgttcatgaagggggatgctataatagatgattttgaggaagtggtgaaacactttgtcaagcactttgaaattttcatggggagcaagagttcagcggttagcactattgatgtgacttgtttgaagcaggctaattgtctgaacttggaacaacgagtaagattgattcacccgttcaataagggggatgtgaagaaggctctcttcagcattcattcttctaaaagtccagcgttagacgggtttagcttgggattctataaggacctttggagcaaaattggtgatgatgtttcttctgcagtcctgagtttctttgccaatggctggctgcccaacaccttaaatgagactctcatctctttgattccgaaggtgacaaatccttcttcagctaaggactatagatccattgcttgttgcaacactgtctataaatgcatctcgaaaatgatttgttccagattatgtaaagttctgccatccatagtcaacaacaatcaaggtgcgtttatcaaaaacagacttctagctcataacataatgatatttcaagatctcttgaagggttatacta

SEQ ID NO: 38274 - DNA, 2562 bp, Cannabis sativa
atccaatatatataattagattagatttagatagatttaaaaatattgaatattattcaataaacactatgttatatgtagagtgtataatttagtggggtttaattaaaattttatttctttatttatttatttttttttgagaaaatttatttatttatttaaatataaatatgggaggtggtgattgcccttgttgggttagttatttttatatatttattaatttttggtaaatgtaaatgtaaggttggtttgaggtccacgatataaaaaagtccaaaatcggtgactaatgtcgtttagtgagatgacacgtggcgtagatgtaaggatagataaggataatgagtgtgcgtgatgtgttgacacgtcaaagggtcccacctactacgtatgattgtggttttaaacaacaattgaatctggttgtattttgatacagttatgtgggacccacatctcaatcaactaacatttggatttgcttacgtggccttatgttctccaatataaaatttacacaataataataataatagtaataagaaaaaaagccttaaaaaatttgtgggatatttcctcttgatccttttcttatccattttgtgtggtagaagatcattttaaattttttaaattttttaaattttaaggttttatttagtttatgaaaaaaatttaaaataaaaagaactacaatagtattcttgtccacaaactatatttgtgaattgtaataacaaaaatggccttttctaaaaaaagaaaaagaaaaaaaattattctcgtgccctcttaacatactccctttattattattattattattattatataggtattttgtgattatattttttaaattttaaaatttagcacgagcaattcttaaattaaaaaattaaagttaaactctctaacatctacaatcatttctgcatttcttctattggtctggctccattatgtgcccgatggctcctcagtgtaaaattttttttaaaaaaaaaatctaattaatttttattattagataaaaattaaaaaataaatgaaaataataaaaaaataaaaataaaaaaacaaaaaacaaagaatgaagaaggtcgaaaggaggtaaagaaactaggcaccattgtggtgcgaagaagaagaaaatggtgacggtcagaaggaggaattgtgattgcgagtagcctaaaatcccaaaattttacacctcgtggacgagttcgaacccaggaagaagatctgcaaagtaccatctgagtcccgtgagttctcttcttctcttttttttttttctttttttttttaggtttttcttcgctgcactatgccaatttttcttgattggcagcgtcgtggtgggtgtgagttttgggaatggatcgatcctcctatgtgtgatcgtgccactgttgtgattcctagcctgttgaagaagattcgtcggttggaacaagaaatatcaataatttttaggtcgtaagtgagagaaataaatgagcaaccttaacttaaaaagctacctgaaagtgagagcctacatgataacagtccaagtattcgagttcctcagtgttcgagctgccataaaaatagtaaaaatgccttttgtagaaatattgtcatttgcgttgttatttcttttgtattattttggtttaagatcctactttaactttgttatttaataggatcttgaacaagtgttcctattaattttgcatgtaatacttgatattttgaaatgaaaatggttattttgacaagtttagatcttctactgccaacataaagtatacatattccaagaggatttgtccaaaaataaatctatcacaaaagttaaaaactcaatttcctagccattctaaaaagatctgttccaaaataaacttatcacaaaaattatctattccaaaataaaagctttgtattttagaggcagcagcagtaatgtttaacactaacaattacataacaaaacttatattataacatttaacttcattgttgagtagactgtgaggtcgatcctttttctgctaccctttatgttgccgttccaactcactgcttctcctttcacatcctcctttttaatgtttaaggggctgagttttgaacaagtagcttccctcctttattttttgaagcccaatataataacatagtcaatactaactgaaattgtattaaaatatgagcaagttaagtgatataaaaatatacctgtagtggttatagtgttctagattttttgcattttctagctgtgtagcaatgcatttttatatctactttgctacttttaaatgttgcatttggtagaagtgactcatcaattctttcgttcctttttttctttaataagaagtaatattggattataactttagtcttgccacttatctggactaggcaaagggaaaataattccttcataaactacttcaaaaactttctcgtggtagtatttatgatagtagtctcaccatttatttccacaaaacgggatcacagctaaaaatgcccccaagagattcctcaaag

SEQ ID NO: 38275 - DNA, 1935 bp, Cannabis sativa
ggtgttcaaattgggctaccgaatttctgaataaaaagaaaaaaataattaagtagcctttacagtataataatttgacattttttcctttttttgttaaatattcaaagcttgcattttttttttgaaacacccatcttcatttttatctatttttgttaagctcataaagatccaatctttgattggtcttgggctcttagaatctgtaacaatttcttgctcttagtttttttggtcttggtcaaactcacaaatcttgtatatagaaatacatattccttactagtgactagttatattttaatgtgttgtgcatgaacacatctcagaaaagtttatatctgtccaaccttgcttgttttttctcttttttgtttgatttaattatgagcattttggtaagtcttgttgagttttatatatacaggtaagatttctttatatatgaaaaaaattagctgacatatttcaatccccacaactctactgctgggtggtgagatttctttcaatctaactgggtttccaatatttacttcctttagatttggaacagttttcacagaaagaaagattcaaatcttcaaactaattagtttacatctttcatggacgatgacatacttgattcatctctaaatttagaagaagcccatttgaaagaaggcttcaatgagggctacaaagatggtcttgactctggtaaagaagacggtaaacaagtgggtctgaaaactgggtttgagatcggtgaagagctgggattctacaggggatgtgtggatatatggaactcagttatccatgttgacccgacccagttttcttctcgggttcaaaaaggtattaagcaaatggaagagttgattgagaagtacccagatatggaacctgagaatgagagtgttcatgagattatggatggtttgaggttgaagttcaaggctgtatgtgcttcaatgggtgtgaaattggagtataatgggtacccaaaatcttcttcagatgcaaatgagatgggattttaacagtagaaaagaaaaatggtgatggagttttggtaatgtttaagaatcagttgtgtcaaactagcttttgagcttgtaatcaaaactacagtgtttgttctaattagattattgtctttgtttggaaaatgttatcttctttggtttatctaaatataaggttgttgtgaagattgccacttttggttggacttaattgggttctttcgtgcggaatcttaattaaaaaggtttgttcagattcgttgtctttggccacagctattaacaaatgaaggatgttctttaatgagttaggtgtattgcataggatgttatagctttattttctaaactttcgggggcaattttgtcttatgtagttcggaataagaattctacagcgcatggtttggtaaagcatgctcttcggttagacgaggagctatcctagtttgaggaggtgtcgctgccaattataaattgttactttattaatcatgtgtgatttgatcagtgcgtcaaaaataagtttgtgctgggcaattgaagttgagcggcttgcaaaggaagagagggtgtaagtgtgggtaaaggctacttcactgatttttcccaagagaaaatcattcaaagttacttgaagttggactttgaggatttattttaattttttattttgaatcacacataaaaaagaaagcattattctatgtaatgaaaacatccatggaatgaaatgttagagaatttcgctttgttatttatcatgaacacaaacatggagctctactctctcatgagtataaaccatacttgaaaacttcaattcaactcattttcaatctacatatttggtttcaatcaaatacaagtcctttttggaaatttattcatagaaaattcaaatttagttcatccactt

SEQ ID NO: 38276 - DNA, 3908 bp, Cannabis sativa
aaaaaaaaaaaaaaagaggagtgtcacttttttttttctctcccaatccaatgtacattaaatttatggttgaagcctttctggtacatagtttgatcctttttaaaataaacaaataaataattaaaatattttgagtgtaataaataattaaattagttcaccaatcttctataataagtgaatatatacacccaccatttataaatcatttacaaggttaattagcatatagtggtaaagattaattttatatccccatactattagatgttgggttaaaactcatttcaatataattagatttactaattaataaaagatgagaaactattttatgttccataattcacatgatttatttgatgattatgtacttaatgtataaattctattaagtccagaacatatatttattcttaattatagtgttgtcaacacagtggagtataatcatgattatatgttcaaaagtttgagtctcatgatttgttagtacactagatttagactgatgtgattatcagcgataagatatacttacaccttgaataagtgctatgtcctttccagggcattgaaaaagtattctagtattggatgtatggagtatatattggattggaccgatattgaactttgatgagtgtacatatgtacactcattcctagtccattattagttaaattagtatttatttcttaaattttatataaatttgatgtgttttctatagtgtgcagttttatgcataaagtgataaaattaagataaattagaagtgaatcgtgcatatttgagcgaagtgccgaaattaaggagcaaccgagtcgaggaagaagttgaattatgaaaaattggtgttaggcgctatagcgcacgactggaaaaaagatgttacaatgagaaaaaaagataatttcagcacgtggttatttcgagatttttttctcttaggcgttataccgcagcacttatcatttttttgaaataaatcctaattctaagaggattgatctatctttgttggcctatataaagaaggatgtaaatcagattgaggtacgactggagagatagaaacaagcaactttgagattagaaaatacattgaagagtgagagaaaagagatttgaagcaatcatcatcaactttcatcattaagagttcttttcttcttcttctttattctttgtttagttatttaattatgaacatgatgattgtggttactgtgtttgtgattatgaactaaacactcattctagagtgttgatggaactattttagattatgaatttaattttttagattattctcatattttttcttattatttgtttatgaaattttgtgctaattatcatcttcttaatgcttgatcactattaattagcatagagattttaggttttacacttgagagaggtaatctaaaatcagacttagaattgcatgacatagaaaaagtgtgagattgagagattccactaattctatgagttttatttaaagagaatcatattgctagttcctttttacttgtaggggctctaatagtggacattggtagttgttactagcaatcctttcaaaaatctcaaaagcttcattgtaagacttagaaagaatggccccattagctgaagtgtccagcaccatgcgagtagtagaattgagcccattatagaatgtctttatctctattcaatgtggaataccgtgatgtgggcactttctcaatagttccttgaatcgttcccaagcttcagaagtagattcatcttccaactgttgaaaggacatgatctcactacaaaatcttgtatttctaattgggggaatactttctcataaatttttcagtcaagtcattccaagttgccaccaagtcgggaggaagggtattgagccaagctctagctcgatcctttaaagagaatgggaataacttcagccttagagcctcttcacccattcctttcagcttgaaagagtcgatcacctctaaaaatgagcaaatatggagatgagaatcttctgttggcactaaattgaccaacggcttggagcatttggaatatgacgggcataagctcaaatttaggtgctagaatttcgggtctaataatacatggattgagctcgttgaacatatgggcaacatactcacttattgctcttgttctatcatgtcccaaagtaatgggattatcaatattatgggcacccccaacctgtccaagctcatcgaccatattatagtgtttcttagccctttatttctttctcctttgtctaaaaatatgctcaattttgggatcatgagcaagttcaaggtcttcgttcatgcagagtaatcctaaaaaaacacaacccaaacaaacaagtttagaatctcaaaacacaaaaatagtgaaatagttgataataaacaatttttatctcaacccttggcaacaacactaaaaacttatcgtgaaaattgatatacgcaagtatacacagtcacaaaagtaatataatgataagtaagatcgtctccacaaggattgtaagtaaaatttattgtaaaaccaactatttaacaacttaaagtttaaagaaaagtaatttgattgaataatgaaactaaaataaaatgatagaaatggaagtaggactaaaatattgccacaaacataggaaaattaatcgcaagaaaaattatcaatggaaaaaaaaacttggatagctaaattctcctatgtctaaaattgtccaggatgttgtaacattcacaattcagcaaaatacacagagttaactagaattacttacaagctcatgagattttttcaaaactcatgaaataagttctatcatctaatttaacatattcctctgttaaaagaagatctaagaacacaatccaagcataaattcccaagttatgcaaggtagtaaatattcatattctactcactaagaacaacctagaaatgggtattctcttccatcattcaagtacaaactactagatctaatccttccaaaacctgatttggctcaaataattgccatttctggccaaacaataacaattaataatcataaaactcacttgaatgaacaatggtaatttacactaaaatgatacaataaaagttaacataccaaaacataggattattagtcattcaagtctcaaagagattagcttatatctagcttaataacaagtatccaaaatagagaaaaaaatatcaatgagtactagaatagccatacaaaataagaaaatacaaaatagagaagaaagaaaggattgagaaaaaaaatcctagcttgattatgttgtaggtataatctttttgtccttatcttcctctttcaattcctcgtgttttcttcttttccttctttctcttctttttcttcttcttcttcttcttcatcttactttgataatttcaacaacttttctttaacaatggaagctttcttttggtaatggtggctagtactttgttcaatatgccaacatagaaaaagggttctttccaaagttagaaagtccacatctattttcctccactttggcccattaaaatggaccacctttctacacaaaacattcagctggcatcacttaaagtcccatgccacctaggcactaattaaatgagaaaactccagctttcttttacttgtcatgtcaacaaataattcttaggatgctacaacactctcttctttggtaatttgggaattatttcagctttttctttcattttgaacttttaaatttccttcttcaaccttcccatgcatcacttggattctctttttacataaaaaaactagtacaaaataaccatttaaatttaaattagcatctaaaatactgtgacagtcagtagtccc

SEQ ID NO: 38277 - DNA, 2614 bp, Cannabis sativa
  modified_base (43)..(60): a, c, t, g, unknown or other
caatataaaaataataatttatagtcacaacttttttactttnnnnnnnnnnnnnnnnnntgactaaaagtaaaatttttgtagtgccatgtacccgatgaaaaatgatgacgtgtttaataatatagctctcgcagagccatcctcacatgattcaaacttgcaacaagatgcgatcgagatagggtctagtcgcatactatgcccaacatagttatttgataagcatgatcgagagaagttaatattggttgtgcatatcgattatatgcgatgagcaagtaagtctctccagcgacaagtaaagatcgcttctttacataagtatggtttgaatgattgatgtgttcgatgattcattaagaactcgaatgttctaagtcatcaacacatggaatgtccgaatatgcgatcaaggatggtcatagaaattcatgaactaaaccaaatgggcccaaaagcccattatgcgagtacaacgctatagatcatatgagtttgtatgtttgaaatatgaaaggacagagtgcgacttagtaagttggatatgttgttgtcattaagttaagaatggacgaaaatgttcctatatttattcttcaaatatttatcttaattaaattgtgcaattattgtaataacagtcagaccagttgtgtaattttaatggacacttactttccacataaagaggtggtccaaaattaataaactaaattgaaattattgcacaaaatagattaagcagatcgagctctgactgaaccactataattttcttgtctactttatatatctatttttgtttttttttttgttcattttgtagctaaaattatgagtactcgctattctaggtgagtacttgcataactgctggtgagtgtttttatttcactcgaatattcacactttttagtgttgtctaaattcttccgataatatttgatgcttgtgggaatcattttgtataaactcttttgagatttgagaggagaatcgaaatggctacaaaatagacaaacacaaacaacaacaatgaaactatcaacattggcactatcaatgttcttatcactatagcagaagaaccactccagttgacaccgttattggggagtagggcgtactgctaccatctccctcaatgtatttcctctattttcaggccatgctggagaaatctcaatgttgccactgtgggcaagtttccactaataacacttgcccatgcttctaactgtatcattcaactaacaaccgcacaatacacagaaataccataatagatgcagacattgcaggcaaggaagagatcagactcgtgcttagtgtcaactgcgagtcccaacacaatatcacacaagtaatcatgtaactaacgataaaaggcgtcatagtgatcgtactaatattcctcgtaaccgtatggaatgctcagatgaaatcaaccctgatgggcttgacttggatcagcctattcgcaaccttccacgtggcaaaggacctattgatcctaactctaaccagtgatctagttggagggaagaaaggtcacatgaagaggaggataacgaccagcgcaacccacgcagtcgtgcacagttgcgtcttgaggtaaatgatcacaagatcttcatcctcgagatctgacagttgtaaccctagcatttataccaagttaggtttggtgtgaatgcatcatagttaaaaatttgcttgaagcttcaattttgattttcgatcacaaacaaagcgtgttgagcatcagaaacttagaattttttaccaattgtatcctagttgtccaaattctatgataattcaccatattcatctcatttaacatatttattctcattttcaattcacattatgaattttcccatttaaacttgaaacaaatagaaaacaagcgtaattctgcacaaaataaatataattaattgaaacacatctctaaaatactttataaaatgtacataaaactaatctatcaatgttaaaatttcattatataaatatgatatttttacgttattgtcaagttttatttacgctgttctcaattacacttgcatttgccccatccctaaagttgagaatgcagaccgtgtgaaaagttttcaaccaataaatctttgtaattttggctataaaatcatcacaaggattctctctcacatgattaagggagttttggataaaatcatctctccttaccaatatgctttcatccctggcaaatggatagtcgattcttctatccccattcaggagattgtccgcaagatcaaaacaaatcaggggaaaggagtgttgatggctgtaaagatggatcttaataaggcctttgacataaatgagtggtgcttcctggaaaaggttctgcaaactcatggttttcacaaacattttattcatcttgttatgaaatgtgttctctctctctctcttttttttttcttttgataaaatctaaaagcaaatataaaaaaaatacatatatagaaacacacatacatatatgtataaacatatatataaatatacaaatattcatactttctacaaatctaatatttgggtcatttttaatcttatgagctgcaaa

SEQ ID NO: 38278 - DNA, 2054 bp, Cannabis sativa
aaagaaccggaaagattgggaagagtttttttcaaaaatagattgagggcaacagggaggatgtggtgataagccctctaggagaaaaatttgactttcggagggagattcagggtccgaagggtagtccaccattttttgacgagggatgagttagaggaaggaggtagggaagcaccattaactaagtggtaagcggttttaacagagaaaagacccgagggatgctgattccaaataaaaaaatcatccttatttgagccaccaattgggacctaaagaatggaagaaacactattggtgtcaaagtaaaagtcgagtttggtacggttccaatgaccatcctggttgatgaagaaactgacattatcagagggaggctgaacactaggtttgtaccgaaggtatctgacccttggaatccaataatcatctaaggttgagatagaattcccatcacccaccttccacaacaaacccctcctaagaaaatccctaccccaaataagactaaaccaagtaaaagagggggaatgaccatgactagccttaaggaaactgttatgtagaaaatatttggctttaagaacagctgcaagcaaggagttaggattagaatggacatgacaagcctatttagcaagcatggcttgattgtaatgaaccagggatctaaaacctaacccaccaaagaatttagatgtgcaaaggtgatgccaagctttccaatggattttagatcctttccccatcgaaccccaccagaattgggccattaattttttaattttgtgacagatggatataggaagctttaaacacgacataacatacaaagggatggcctggataacatcttttaaaagcacctccttacctgctctggaaaataatttaccattctaaacattaagatgggtactaacacgctgatgaataaaatcaacgctagcttttttagaacagccaaaacattgaaggacccccaaatatttattgatgaacggcttagaatccatgcccaaagtttcaaagaaatatatggagatagaagggtgcgtgttgggagaaaacaggatggaagacttcccatagttgatagtttggccagaagcttgattatagagggtgagggcttccgtaatggcattggaggatgaaatagaagcaatggtgaagagaagagattcatcagcaaacaacaaatgggaaataacaggtgcagttcgagtagtagagatacctctaaagagaactaaccattcctggtgcctaagagcatcagtgaggccctcagaacaaagtaaagaaaggtaggggaaagagggtcaccttgcctaatgccacgagtagggtgcattttgtcaagaatatggccattaatgttaaaatgaatggagacagaggatataccttgttgtataaggttgacaaacttcctaggaaagtggaaatgatgaagaatggcagtgagaaagtctcattcgggacgatctccttttccatatcaagcttaaggccaacccaccccaccgtaccctgttttctatggttgatagcatgaacaatttcctgagatataaagatattatcaaaaatgatacgctcagagagaaaggccccctgattgggtgaaatagtgttgccaagcacacctttaagcctattagcaatggtcttggccacaattttataaagggtagaacatagggtaataggcctaaaatatttaagggaagaggcatgcgaccttttaggaataagaacaatgagggtgctattgatggatgaaagggcagcattaccattgaggatatcaaggatagtaagagtaagttcctgaccaatgacatgccatttcttttggtaaaagaacggattgagaccgtcgagaccaggggctttatctcctgagagttggaagagagcttgttgaacctcagttttagagtagggagcatcaaggaagctaatctgcttagtactcaaagaattatcaatggcagaaagaaactggcgagtagcatccctattagaagtttgagttttgaaaa

SEQ ID NO: 38279 - DNA, 3683 bp, Cannabis sativa
atataattcataacatagaaaagtgtacattaatcataattagattctttctctccttttgttattaagggatatcaaagaagcaagaattactaaaggtcattatatagaggtcagcatcaaaactagcacaatcttaagtttaaaggttctgcagcttctttttcggtttcttctacaccacttttgattgatggttagtgtttaacacatcataatgacaagaaatgtacccttttgcaatacttttcaacacagtttcatgtatatttatataagtgcaaataatcataatagtttagcatataacttaaggcttaaggtacccatgttttaatattacaaccatattgattattggatgttaaaagcatacccccaaggaacatctccaacaagcatccaatccccgtctttgtcttcgtatgtaagagcatactcggatgatgcatccaacagctttgaaagtccagctcctcctactcgtttatcgtggtccttcccacttgatcctaattcaagataacaccaccataagatcaaaaagaaaaggaaaaaaaaaaacaaatcccatgtagtactaaaccgagcaaattcttcaacctagttacaatttattaaagcacttccctaaaaaaatctttctctcccattgtaaaaagactagatctatagttgattcaagttattcattcatgttgtgagataaacaagtcaaaacacacttacgcagtttaacagctgcggtcggctcattgaacatgtcttccaatgtccgcgccaaggcttcatagctcttatgagcactcagatcaaccttcctaccaattggacttccatccatattcaccttcacaaacatagaactcctgagattattaccattctccttagaaattccattcttcttgtcatctccattatcagccttcccagtcactttattcatacatctattctcttcatcaatggagctgaatccttcattgagtggcgatttcgcatggttgttaaccaagctattcattctgtaagttctgattggaggccaccccacaacttgactgcttcaacatacaacataacaatgaaaaagatcataaatgtaagctttgaaactcaattatacacagatttcaaacacagtcaatatggtgatcacatactagaatatacacaaatcaataatggaaattgaacaatcaataaacataacaaatcaaagaaaggttttttatacaaaacttttggaaagatcataaagggtttctcatttcttaattatcataacttttggaaactaattatacagagattcaaacacaaaaacacactaaatacacaaatatggaaattgaacaatgaattaacataacaaatcaaagcctaacaatcaaagaaaggttttttatacaaaacccaaatcatacctggcgccattagcaacagaatcagcacttctcttggtaccagcagaaacattagctctgctcaaagaggaaggagatgatgatgaagaagaagatgatgaagataacgatgatggagaagaagaagaagaagctgaaggaaaatccttagcagtcaagatcctagcatattgacctctcaaattttgttgagctttcacaccactacaactacttccaaggctcaacccaagacccaattcgagctcagactcatctgggcaagaagaatcctcagaagagaaaaccaaattgtcatctttagacacagtagagatcgacccacttgcagatgaagctctagaaagagctccaccaccaccatcacccaaaacaacaccctgcattgaaaaagcttgtgactttcttattttttccgaaagcccagaagagaaaagaggggtttaagagagggttaattgaaaagaaagggtatggcgaaagaatcagataggggagatacagaaatggaaattgaaggaaatgggaaagaaattttgtgtttgagataaaaagagtaaaggaaagaaagttaggtttggtggtggtggtgaaattagggaaagaaagagaaagagagagaagccatggatggagtcatggaccccattgattgaagctctgaccctacctgtctgtagtatgcgcctccatcaatgtctttgtttcctctttcatcttctctcatttcattttctcacctctaacacccccgagatattcaaattctcgtttaatttttttaaataatacacacattctcaaatatttttttgaaaaaataaaataatttttttaacacttttttaattaattttttatttttaaaattaaaaaaatagaaatattttttaaaaacatgtttatgttttatatgtagtgttaattaatgaattattgttagtggagatgatgagtaataagtcttggtcacaaatatagggtttattctattagtttgattctaattatccaaaatagtttcttattggggatcgatgtatctcccatcttttttgatatttaagaaaaaaaattaatataattttttcattgtcgtttacgttgtagttatttaagacaattagcaaaattttgagagatttaaaaaaatttaacacgctcaaaacaatgttcaaataatttgttgcatacgagactattttattttaggggcacgtgaaattgaatgtttgaatcttattttacagaaatctacatagcaactcacatagaaattacctgagcaacttaaaccgtaaatttataaaaaaaaatggtatataaagtaattaccttttattttatacgcacgtgaaattgaatgtttgaatcctgtttttaacgtgttaaatcttttatagggtgtcctaaataagtacaatatagataattatgaaaaaaattagattaattttttttttaatattaaaacaaataagaagtatatcgatgaatcctttagtagtggatgtattgtatatttttaatagtacgtatttaccaataaatcattttgtatattttaccatttaaatttaattagctagtattatttcttatgtgtacttttattttctaattttgatatataaacatgtggaaatcacatcacagccaactctaatatgatagaaaagtcacttctcaaactttatttatttatttatttatttatttattgaatcatctcatactttatttatttgttgtgagagaccagattactctatcaatcacttctcacttcccataagaaaaaacagttcactaatggtaatttagtatttttctatttatatactatttcttatatataatatttatatactaattttaataagactatattgcacgatctgagctgcattattgggaaaaataattcttcgttactatttttgtcaacattttattacttaactctcttaattttttgcaacaaaagaaaacatctctcttaatttttattttttattttttaaaaaactatgtatatattatattatgtctaattatgtgtcttgatttttgcaatgggatatacaaatatgaataattgaagaatgaaagaataaaatggttcaaaatcacgtgagtcatcaccaaaatataaaaataaataatcaatgctcttttttactattttaaacatttaacactattctataaaagtaattaattatatgagtatttacctttttaataagtatc

SEQ ID NO: 38280 - DNA, 2003 bp, Cannabis sativa
atagtatttttgtaaaaaaaaatctgtgtggcagtaaaattgtaagtttttgcctaaaattcagtatttttgtataaaccctttaaaggattgattgaaattttggggaaagtttgggctagaagtctcatctagggctgaaactaggccagatatcagcctgcctgatctgttcggcccatatcttagcgttgccctattgaatagcccagtagtacattttcattgtcactgaagaaagagcctacgcaaattaataaggaaaagaaaaaaaaacatttcacaatttttaagaaataattcataattaccagttaatgaagtaaattacaaatataaaaattactataggtaacagattataataattttctcttagtaaatattgttaaattgtaatatattgttacaaacttgtaaattttagttacaaatttgtaaacttgagataaaaaaaattacaaaaaataaactcagaactcacactatgagtttttatacaatgtatgcagtacaataatataacttttttttcaaaaaaaaaaatatatattttttatgagaaaaactaaaaattataataaaaccaaaaaatatgagaagaattgttaagggtaaccagttacctcctgaataaccaattaccttttcttccccataattaaatttgttgaagaaaaatactcatatttttgcaaacttgtgcatttaaaaccataaaaataaaaaattccccttataattatgcctattttttctttccaaaaaaaaaaaaaaaataaatattgtgcctatttttataatttttttcctaatgttaagcattttctcaaattcctccaaaatttactattcaattcctcgtgagccaagataatcaaaaaactggagttcctttcgagcttcaaacattttagattcattttcaaagatgccgtaataaatcaaccttcagttttttttttttttttcaaaggatacagggtatttttggaaagctattttctcagtattacctatttatatattctttgcagctctctcatttggaaaagatcaaaattataatccgggaaacacagaaaaaggtctgtcgaaaaaagtgaattttttgacttgatttgtgtattcaagatggatagtgtgacaattcttgtagtgacttttgttttagagcttttgttcacttgctaggttgtaacatatcagatttttaagtagaaccccatgatgaaactgggtatatatagatcaatctttatgctggtcaaaccagtataaaatctattttgtgttctcgttttcaacttttactttacattacttagtttgtgctgtttgttacaacaaacagtgaactagcaaccaactaaaatattgatgcagcaaagttcaaaccaggaaaatcagtttagaaaataaagaaattttacagctcaaaattaatatagcaaaatatagagagtagttgtataagtacattgttcttccatagttaagagtctcaacagttcagtgaagcaatattgcattcttgacaaaataatttccatgaaggaattacagactcgtactattactaacagcaaaacactcatcaaccagaccaatattaagtgcgacaattgatcaaatagagcaatctatgaagggtgtgtcaaagggagcccatgatttcattggctcctataaagtatttttgagttttccaattctcataataatgtcttccaaagttggtaaagttcagcagatgaaatggtctataaccaaaataaaataaagttaaacttatgactgatagcactccatccccaaaattctccatactaaccaaaggatctatcagcttatataacaaatagtagtctaggaaaatctaagctatggtacgagagaaactccttgagtaattcaaaattcagactctgataagattaagagttatgtacatttatgtgtgtatctaaaaatagtactgtgatttttagttgagatatcta

SEQ ID NO: 38281 - DNA, 3681 bp, Cannabis sativa
tattaattaaatttcaaaatattcatcatcattaattggttttaaattatttatcaaaaagacttgtttacacaataaatagctaataatttatttacttttgtgacaggatggaaatcatgatattgaagaaaattttaaggagttgggttgtccattttcagatgtaaaattgtttagggtttcaggagtatttccaactttttctaaagatggctctaagcttgcattcgtcgataatgatttcaagaatttgtggttagctgatagacaaggactgcataaaatttatacagtacgtacctatatatagaacaagtacgagtattatttttttaaaaaaaaaaaacaagtacaagtataaatgatatattttttcgacatctcaaattatattgttagaaatttaaaaaaaaatgtggaaaacctcttcaagatataatcaacaccatcataaaatggaaaatgataacaatgcctataaataagaataaaaaccaactacatccaacaatatctatacatgtaaagttatttgttattgttttttcttaatgtaggcagaaaataatagcatcttcaaaccagtttggaaccaaaatccaggaaaaaatacattgtatttctgtctgggtgaacctttcaatcctaaagcaaccgtaaccatttgggccatgcaacatgtacgaacatgtaaccaaagtaccaaacaacttactacatgtggcacaaataatgcttttccatcatccaatccacaaggtaattacttcttttcatctaatttatttttagaaaattctagtgtattcaggcccgactctgggcataggtaggcctgtacctagggcctacttagcccaggggcccaaaaaaataacttttttgctgattttaaaaaatactatatttttttttctaaataagggtccaaaaatttattttttcctacgacccattatatttcagggctagccctatgtgtactattttattcgcgttctttttaacacttaaattatagctgaactgctcttatattttgtgtacacttaaattaatttcacctaaaattttttataaaaattagaatgatttattgtatcaaaaatagggttcaaacattcaactgcatattttttttttcatacatattcgactattttaaattctatttttattatcgtaaattatacggatagtaacatgcataatataactataatgtagaccattatatagaaaaataaattcaaatactaaaaatatagatacccttaggacaaaaatgacatacttattatagtttctcccaatacatgaacgaaaatataatattttatagtatgttatttgcttcagaatcaattattaataatacactatttgatacaataaatattgtgtaattacaataaaagcatgtttaaacaaattttgtaacggatttggaaaatggtaacaggaacaaaattagtatttcgatctacaagaaatggaggagaaaaaggatacaagaatctatacataatggaaaatgcagaatgtggtgaggttggaggaacaataacaaggctaacagaagggaattggactgacacacattgtagttggtcaccaaataatgattggatagtattctcttcatctagagaaaagtcaaatgaagcaccagaaactgataatggtcttgacccaggatatttctgtgtgtatctagtgaatgcaaatgatccatgtgttgtggtaagagtatttggaagcggggatgatcttcgagggcatgtaaatcatccatttttcagtcctgatggtaggagtattgttgtgacttctgattttgctggtgtgtctgctgatccagtctctatgcctattcttccccactctgttagaccttatggagacatattcactatacaaatttatccaaataacattgcaagcaaccaagatgcaatgcatgtcaaacgtattacacatagtaggtatgagaatactactgctagttggacaaagttctcaactcaagacccacatgcagcatggaatattcaattagaatctaacaaagatcaccactatatgctcaaatgcccttatgcacatcctaaaacaggttgatattgctttctttagtacttgaattattacaattatagtacttacatttgtatctaacttattctttaactgtcaaaagtacaaaagtattagagtagtaaaacttaagtacctaaattattttttatttggagcaaaaatactaagattattatgtttgttaaacataagtacctacctaaattatttttttggtacttaagtttgtcaacgtaataattttaatatttttgctgtcaaaaattaatttagataattaagtgctacaaacataataataaagtacttttgccactaaaataataatttaaatacttgaatactataaatataataatttaaatacttcttgcagcaaatatcactatttttattacatgcgcctttcttaattttgtcattttcatttcatcttcttaattccaataataattaatatatgtttatttccaatgtaagctcttgatcatcgtttcttgttttcaatatggtgataataagaactacccaatcactaaaattgtcgtggtttaattaaatgtgctttttatcagaaaaatggttgtgtgaaaaactaatttagttacacattgtacttaaataccactgtaaaattgcaagaaatttttggttataactaaaataaaagtgattgattaatgcttaaatttatatattttaagattttaattgtatatataaatgtatataaaatcatttaaattgaatattttcatagttttagttggaaaattattttagttgaaaatatttaatttattttgattttgtgtaatttttttaaatgtgagcaaaattctataaatgaaaatgatgtcttaaaattggaagttgaatagaatgtctagcatcatttaccttaggaattattttagaaatacctcaaaataacaaaaaatttacgtaaaaatggaatacaatatattgttttttatactttttttttcttacacaccgttgcttcaagttgttctaaaaaagatattgattacacgtttatttttacgttacgaaaatacaatataatattatggtaacatgaaaaataccaatccttaaaaatgttaaaaaaacaaagagttcgattttagatactttgggtgtaaattaggatatatctacattatatacccattttattttatattttctaatttttacctttatttttatattctttaagatacacccacttttatagatgatgttccctattaccctttaggttaatataaaatatgtgctagacttaaatggagactaaggatatattgtgcaatccacttaaaaagtaggtatattttaatgatatataatatgagagtattttttattaatagataaaaaaaaaagtattcatcaagttgtgtatgtcttcacgaatgaagattaggttcgtagcccaaaatgaaataactctttagtagtaggcctaatttactgtcagtttctcataggaaattagactctataccatttttatattgtcctcttttatttttattctattttttaaagtctatcatttttacctct

SEQ ID NO: 38282 - DNA, 4774 bp, Cannabis sativa
tcagtcaatttcgcactcaactacgtcgaacaaagctcactggtaatctcaatgattacttactcaagatcaaacacatagtcgactctcttgcttctattggtcactctttatctactcagcaccatatcgaagctatcttcaatggcctcactcgtgattattcagtctttgtcacatctctttccactcgtaaagatgaatattctgtagctgaagtcgagtccttacttatggctcaagaagtgcgaaatgactctgctgaaattgatcttgatatatcaaaatctgaggcgaatcttgcaactcagccaaatcaatcaagagctcctgctcctcgtggtgcacatcaaaatttttctccaattcagtttggtacttatacaggtggtcgtggttcatatcgtgcacataatccttcttactaccctggaaatgctggtttttcacataatactgctggttatggtaacttctatccccctttctttccatctttttctaatggtcctcgtgctcctagaggaggttttcgtggtggttacacaggttcaggcagaggctcttctaattctaaaatacagtgtcagctgtgtcacaaacaaggacatacagtcaaacaatgcttctatcggtttgacaaatcgctcacaggccctgaatcatttcagtccttcaatggcactgctgccactgcagagatgcatgctgcaattgctacacctgatactgttagtgatcagtcctgttatcctgattcaggtgccacaaatcacttgacaccagatctgcacaaccttatggctcctcaagagtttccaggattagaccaaattcacatgggaaatggctcaggtttgcaaatctctcatactggttataacactttcacttctcctttcacttcccaacccttgattttacaaaatcttcttcatgtacctgatatcacaaaaaaccttatgagtgtctctcaatttgcaaaagataatgctgtgtattttgagtttcacccttacttttgttttgtgaaagatcaggctactgtgaggactttattggttgggaagattgacaaagggctttacaagtttgaccagcctcttcaattcaactctcccttcaatcacagcaacatcacttctgctggtgtttcctcatctaaaattgcttttcaatgttagcaatctacttccaatgtacctatttcgagttttaatctttggcataatagattaggacatccttccaaacatgttgtgcaatctataatgacaaaatgtaatatctcttccattaataaaaatgcatttgatttgtgtaatgcttgttgtcttggaaaacatcataagctgccctatcccaactctcaaacagtttacacagctccattacaaatgctacacacagatctatggggccctgcctccatggtctcatctaatggatatagatattacataagctttgttgatgcgtattctaggtatacttggatctacttgcttagaaccaaagatgaggctttacccacttttattaagttcaaaacccaaattgaactgcaactaaatcttcctatcaaatccttacaatctgattggggaggggagttcagagctttcacttcactagttgagtcatgtggcatagtacatagagtgtcatgtcctcattcccatgaacaaaatggtgttgtagaacgaaaacatagacatattgtagagtcgggtctcaccttgttagctcatgcatctatgcctcttaaatactgggatgaggcatatagaacctctgtgtatctcataaatcgaatgccaacaaaagttctcaatgattttactccccatgaaactttgtttcactcaaaaccagattattcagctcttaaaacattcgggtgtctatgttttcccaatcttagaccttacaataggcataaaatggattatagatccaccccttgcacgtttattggctatagtctaactcagaaaggctataagtgtttagctaaggatggtcgaatttacatgtctcgtgatgttttattcaatgaaaatgtcttcccatttcataacttcactactgttattcctcatgttgttcatccttccttttctactactgctactcctccttcttcatccctacagtagccttcatcattacccatctccacatcatcctcatcttcacctacaccagccctcaccacatcacctctcacatcatcaacacctcctgactcttctaattcacctgccccaaatcaaccttgtatcaccccagctgttattaaccaacaccccatgcaaaccagagcaaaagatggaattcgaaaaccaaaagtcctcactgcctcttttgttccagctactgtcaagacagctttacaagatcctaagtggcacaaggctatggacactgagtattatgcattaaagaaaaacaatacctaggttttagtgagattaccacctcgccaacagtgtataggctgcaagtgggtgttgcgtgttaaagaaaatgctgatggaagtaccacacaatacaaagcccgacttgttgcaaaaggattccatcaacaaagtggttttgattttaatgagacattcagccccgttgttaaaccagaaaccattcgagttttactcaccattgctatttccaaaggttggaaattgagacaattggattttaataatgcatttttaaatggagatttacaataagaggtttacatgtgtcaacctcctggatttgtggatcctcaacatccagatttggtatgcaaactacaaaaagcgttgtatgggttgaagcaagcccctcgggcctggtttgacaagttatctacagctcttattaacctcggatttcagcatactaaatcagatacttctttatttctcagaattcatcctcatcacactacttatattcttgtatatgtagatgacattattgtcattggtagcaatgatttagaagtgtccaatctcatttccaaactcaacactcactttgctctaaaagatcttggtgatctcaactactttctgggaattcagatcactcacacctctacagggctccatctctctcaaacaaagtacttgcaagatcttttgtgcagaacacagatgcaaggtgccaaatccagcagcacacccatgaccaatggccttaaactctctaagtttggcagtgactctgtcttggaccctactctatatcggtctgttgttggagcattgcagtatgctacaataacaagacctgaaattgcctattctgtgaacaaagtgtcccagtttatgcaagctccattagagtctcactggattgcagtgaaacgaattttaagatacctttcaggcactcttgactacggtctaaacctccagaaatcatctcactttgatatctcagtattttgtgatgctgattgggcttcagaccctgacgataggaggtctaccagtggagactgtgtgctatttggttcaaatcttattgcctggaagtccaagaaacagcagaccatatcaaggtcatcgacagaggctgagtttcacagtcttgctacagttgtagctgagattacatggctgcaatctcttctctctgaattacaacaggttgtttcctcctcaacaccaacagtttggtgtgacaacttgagcgctgtcatgcttgctgcaaacccagttctgcacgctcgaacgaaacatattgagatagacttttactttgttcgtgacaaagtcctacaaaatcagcttcgagtttgtcatgtccctgctcaagatcaattggttgatactctcaccaaggctatttctagcagcaggtttcctttttttaagggacaaactcagtgtggtttctctatccacacttagtttgaggggggctgttaatgatagcatttagcaactgttaatagttagttactgtctgttattaagttggttagttttctattttgctagctatcagtctaaccaattctgtaactaattgctttgttcttcttgctgtatataaattcttttttgttctgatgtaaagtaattcattcaacaataaagaatatctttcttctctctcgttctctcttcctctctaaactcaacagtaccttcgagccacatgttgcagaggcaatgaccttgtttacattgcacattttacatttataaagtttgaattttggtacctacgaggcttatggttgcgtaggcaatggccctatttcatggcctatccctttgccttcggttggagtttaggattgttacagctttctccgattatctccgtatggatcttattattaatggtaaagatgtttattatgcttaatgatatttttgatgtttgaaaatcctttcgaaatatatctttatctcattataagaggtctaagaatattattgtccattctcttgtaaaaatggcgcttaatttaaatgggtctcgtttttggtggctggagcttccttccaaaaaaaaaaaaaaaaaggtaataataatacaaatgtaaaatccatataaataagaacatgatggtaatctgtatatggtgcctatacatttaacaaatggtcagcttgaaacaaagaaaaagtgcattgtcttgttgttggtgtaatggaaatttcaagatcggtcaatactttttcttagattgatatcaatgtaaagagggatctttgagacggcggttttgaccttcaatctctgactaagactagactatgatgat

SEQ ID NO: 38283 - DNA, 1435 bp, Cannabis sativa
gcaccaaaggtcaagactacattaaaacgttttcatatataaacatttatttatatattgttgtggcactctttcagttatcgtttataattatgtacttttactttaattatattatttacgactgaaaggcactatacgtatgtatatatatataactatagatatataacctatagaaaaacacatccacaaattctagtgaccaagggattaatattattatagatataagcattagggtttataacagccattcgtttataacaataaggtcaatataatggcattcttcatatataataaacttttgtaagctaaactacaaatattaatgttactacttttttcccttttgaaataaataaataaattactcatttttgttttccgccacttccactatcaaagaacgttaaatatgaactaatatatgaccagacttaattatatatataataatggcgcacgtagaaacttttgaaaaaatgtttgtttttaaaaaatattaaaagaagaagaggaaaaatgcttccgtaccttacattatcttaattattttattgaatttttttatgcactatatttatatatttttatatataagtttcatatatatccaaaaaatggagcagttgtgtactgtgtacatacatgtacatgcatgtaattgcttatgcaatttataactaattaatgagtaatatatagtacatgattatatatattaatttgattccttagttttaagtaattaagttaaatatataatctaagaagtagtctcatctcgattaaaacctaataatattcatattattcctttcaaataagatcaaaaaaaatatatgatagaaaaaaactaattaatatgcatattaagtggacaagtgttcaatatctttataatatcatttatgatctcttactcagttttgaagaaaagtctttcaaatcatttgattacgaaccatgcagttatatatgaaatatataattaagcatcatacctctcttattaattatagttcttttaaagatatggaaagcttatgtgtttttcctataatactttttttggagggactgtttcctataatactttatagcaaatgtatgacaaaatgttaaaaaattaaaaactgtttaagaaattaatgatgtagctacttctagcatattggtgccgcccaatatattatcacatcacaaatttgttataaattaatttctttttaaaaatactatattcaacaataacctctaatttgttataaaaaaaatcaagtcccaatttgaactagttataaataagaatataacctctaaattgtattagttatacattttttaagtcttgtattaacaaagtatacctctatataaatataattatatcgtaataaaatatacatatattttgtaaatttattta

SEQ ID NO: 38284 - DNA, 2433 bp, Cannabis sativa
  modified_base (44)..(65): a, c, t, g, unknown or other
  modified_base (474)..(474): a, c, t, g, unknown or other
  modified_base (1818)..(1825): a, c, t, g, unknown or other
cgttttagaaagttcatatctagggtgttaataaacatacttgnnnnnnnnnnnnnnnnnnnnnnaaaataatttccaacacttagttcagttttgggttcaggtgccaagtccctattcgcgtttggattcagatttgggatgcaatcctagggtagatctatgtctgagttcgggtgctggtcctgttacagttttgggtttcggtctgggtccagtaacctggtcttattcctgggacccgatcaacttctagtttcagttctagtttcaagtcacctggtctgggatcgggttgagtttgggtccgagtttcagttcgggtgtttaatttcggtccaaggcgaggattaggtccgagtttcagtctttgttagggttcgaggttgggtcaagttccaggttcaagtctgggtcttgatctcggtcccgttctaatatcccggtccagttccagttcaagtttcggttttngttcccgagtgtgggtctgggtcaagatatgtgttcgggtccttgtttgagttcgagtttgggttcgggttcttgtctaagtcgaagatccaaacaccgactacaggtcagctccaagcatcgagtccccgatcccaagttctgaggtgggtcctaggtccaagtttgggtctagggtcgggtcccggatcccgatccaagttccgaggcccaagttctggtccctatttgggggcccaattccaaggtttgggtcccacatttatgttcaagtcttaggtcccggtctgggttgaagttcgtgtttctgttcgggtttgggtctcgagtcctggtctgagtccacatccctatttgggttcaggtccgagttggggtccctatcctaaggtgggtccgagtttcgggtcccaggcctgtgtctggttcttagatcctggttccagcctcggttttcgggtttgggtttgggtcttattactgtcccaggtttgtgttctagtcccagacatggtccgatcatgtctggatctcggttttggatcctgtctggatctcggtctgggttcgagtctaggtcttggtacagattcgtgtaagggtcctagactcaaacactaactacgggtctggtcgaagcctcaggtccaaattcagatctcggtcttggatcttggtcttgttctagttcaggtcccgtgtcctgggctgggtcctaagtttaggtttgggtacgggttcggggttgtgtctcggtagttaggtcttgggttccaggtctagggtcaggtctcgtgtctcgagtctagtagggttttaggtcttggtcctgattctgaggccaagtttcgagtttaagtcccccatctaggtccggatccttggtccaggtctgggtccaagtttgggtttggggcacaggtccccaatctaggtttggatcctaggtcccggtctggttcccagttcagttttgggtttggatcatgagtttgggtccgagtctaggtcccaatacgggttcaggtttaagtctgggtctgggtcacggtctaagtctaggtccctgttcgggtctaggtcggggtccctattcgggtcccagtcaaggtctaggtcccagaccaggtgcgtgtttgggtttgggtgcgggttcaggtcctgagtctagctctatgttcgggtctagattcgggtttgggtttgggtactgggtttcaatctcggtatgggtacgggtgtaggttttgggtttgggtttaaggtttagggttttgggttgagtttttagggatttagcgtttagggtttagggcttagggtttaggggtaagtgtaaagagnnnnnnnnttaaggtttaaggtttagggtttagggttgaagggtccgcttctagttcctgttctaatttcaggtcatatggtatgatttaaggttcgagtgtgggtcaaagtccgagtctcagtcccaaatccaaacaccaaacacatgtcgagttttgtttgtgttttggtaccggttagggttctggtctgggtttgggttttggtctaggtcaaattccaaaatttagaaaccgactatgggtcgggtccaagcctcgggtcttgggtcctgggtcctgtgtccaaatctagatattggtctagttctagctcatgtcttggttccttgttcggatctcacatccaggtttgggtgtttatttgggtcttgggtcttgagtcatgggtctaggtccccgattcaggtcagggtcctaggtctcggcctgggttaggtccccgtccgtgtttggtacttgtccatgtctcgagtgcctagtctgggtttgggtcacatttcagttctcaggtcccaagtgttgggttttatgtcgtaaataaaactcatttcaatataatcaaatttacttattaatatagatcagaaacaaaatttaatgttgcatggttcac

SEQ ID NO: 38285 - DNA, 3032 bp, Cannabis sativa
tatatatataacaaaatatataattaacaatatatttgagttcgaaaccgcttggaaattaaaaggtgagaagataaaactagtctaatatatattaatctttagtgcgtagtgccgatcatgataactaaatgaaaatggatcgatcaccaaaagaattatatatatccatgtatgcttatttatacatccgaagttacagctagctagctcctttgacaattaagtaagaacgaaatttcaatttgccattcgtagtctttgtatgtatgtatatatacatataggtaaattggacgtttcgttaaattatctaactgttttgtaataatattgttagtacaaatatgaaaatgtatatatgtgattagaactagtttatatatagacatgcatgtacaaattaattaaagaaaaatgtatacaataataagttcagtagttaaaatattaatgtagttttaatttgcaacgaagataaacttattaatattttaagtatatataggtataaataagtattgacagagagaaacattatcattaatatattgatatcaacatatgatattttcttgtcttttatttccttaacagtaccatattaactgacaagatatacatagagaacttgaaatattagaattacaaatctcaatatcccaagtataatctttgcgcagtattagggtagtattaattccattgactgaatcaagctagtatttagttaaaaaaacaaaaagtagtactattgctataatttgatatatatagcctaactaagctagctattattaataaggctatgtatcaaatatatataatcagatagtactgcaccctaatcttgtacaagatgctttatatgtattgatatatatagtttgcaataaatagatagatcttgacttatgatgactcaagtttatttgctaatttttctgggtgcatgattaatatatgtattaactttattccaagaatatatataaattttcctataaaattatatagaattgattctctctgaacacaagaatatacataacactaacaatttatataaaaagggaattgaaagatcgagctcatgaagaagcaatatatataaaggcgcgtaacttagattattttggcaggccaacataaaaaattgacacgagatatatcatatataattagagagagaaaaagattacatgtataattaattagggttaaattaatccaaacaagccagaagtataataattactaaggaaaataatttagatctacatatatatatatatatatattaagaagaaaccagaaataggaaaacaattcgccggaggagatagtctggataaaaacagaataatacaaagaaacaataattaataaataataaagctcaaatcttctgattcacgtatatatataaagcatattaatttgctaatttaatttaatttctccttcttccttttagaatattattaatagagaaagccaaataaaagttgaaagaaggaacttataagaacataagtgtatgaaaaaaattcaatatattatatatatataaaatttttaacattagtacaaagagttacatagagatataaaaatatatatatatgtgtgtgtaaaaacatatataaaaatggattgtaattacgaaattaaagaagaaggtaaagaaagttataattctaaagctagaattaatgcctggctccattctgtctgccttctacttctaaaaacaaggaatagatcagtagttgtgagtagtagtttttgatcttcttctactttggagaagatcttcatttatttgtagaactatatatataatatatagatatataataggtatactaccctgcaatatcattcattcattcatctttgctatatctgacaataataataatatataatatataatagtagtagtaataataatgagcctttgatctgatttaaagacaagtattgttgtcttcatatcttcaataggtagtactactacttctttggtgtaaggacagtttggtcattacgtacccataaacaatatggatttataatcatgatcagtaccgtggaagagaatgaaagaaagtgcttctcctcttgatgagccatttaataccttttcctttttttttttttttggtaaaactcaaagccaatggggatattactacccccaccaagattattctctttctgatctcttgtgtatatgtctctcttatataggatgtacttgagaatgagagagagagaaagatagttggggtgttatatagatgaagaggacccagataaggggatatatagagttatttgtccgtatgagatcttaaattggtaaaatattattatttatgggattgagtagtggccggtgagaagctcttttcaacttacgtttggtccgttttctggtaagacacaatattatgtgcctttcctggtcccattttaattaacatctcttcattattattattatttctatatattaataataaactgaccatataacaacttattattaaataatgaattaataatattttgtatcactaattaaattctctattactttgttaaatgataaattaaacttgtgttttcaaaatagtacaaaatattactttaactgaaatttcattcaaataaaacttaataataatctcaccgaagtgtttatgatcaaaatatcctatattttttttaccgaaaatagtatatagttgttaagaattaatctttggagctttcttaaggattatgatggtcctggtcaagtctcttgggctgaaacttgtaaggctaaaaaagcatggctaggtttttacaaattgtgtacttgaaagaggagtggtgtactaaagcctctcaccagaagcagctagtactggagtaaagttgttcagatcaaaaaagagctcaaaaatgtgtttattgcagcagagtttcagatgaaaaattatagtattgccggaatgtatcataatttcaagatttct

SEQ ID NO: 38286 - DNA, 1871 bp, Cannabis sativa
atttagttttggcttttttaaaagagggttggttgggatcaattaaggatttttttaggaacattggctttaagagaatgggactgaactttttcttttcctttggattgaactgagacctttgaggacggatgacgtggtcctattgggtttgatttaggtcgactgagtggttcaacatcaaacataggtgacaccaaacttttagaagaacggttgacacgttttggcgatgacttagagacagaaattgaaccttaccaaactttttagagagatgaggagccttaccttgaaatattcgtagtttttgattgactataggtgacgaaggagatgccgacattgatgggacgacgaacaacttatatgatacctggccagacatggagaaggctcacaaatacactcctcataggttccaggtgagacttctagggcaacagggggctcataaggtggaggaatcaagacagctatagaagacaacatgggaagaacattctccatgatagattgagacatatacaacttggaagagatgaggtactttgaactcatcagggtttagggtttcttggtagagaagtggaaacaaattcactgtcccttggcttttaaaagatatgtaccttgacaaacgttgaccatgtaaagaaaaaatgttatttaaaaaaactttgcttaaatgagtagtacaaatctatagaaactatttttcacctcaagaaacagcacaaaaaaataaaatttattgacatgagttaatatgatcatagtaaatcaataaatgaaaatatgcttacttgagaacaaaaatatcctagaccttaccaatagagattgaaagaatgcaagcttagagatgctcgaaacctatcagtgagaataagagagttaacatctgatcaaataagctgaatcaaaacacttagaaaaaaatagaatatggatgacatggacaaaatttccttgaaaataagtgcacaatttgctacaatgaagacacccattttacttaattgagtcattatcttcgtatcattgtgtgcaaagtatgctcttatggtccaagattagaatgacaattcagatattgcactctggctttttctattgtatttagtcacaattttcactttctttcggagatgtagccatcctctattggcaagatatattaatataaaaggagtagactacttattagtatatgggattaagagagctcttctcattacatcgaaaagaggtagcctttttaacacacaagctcaatttaacataataacaaaagctaagcaaactgtaacacaaaatagaaattttatgcacatgtcatatatattccaattaaaatccccttgcattgtattcctggttccgccgctgagtgtagccttagcggctactctcatcaaatagcatacaaaaataaaataaagtaaatgagttttattaagtggaactcaattttttttaacttgtgaagttgtgaatggtgtattttattaacctagctatcgtaagagcatggtcatattccttgttaagtatacaattaaaatctacttttttttttataagacaattagtaaattaagtggcacttttcgtggttatgtaagagtaaatttagcagtagttctctttcctccatagaataccttatttttcttcgtctaaatagcccacatgatgcaaacaataatctcaaactcagtttggaaatgcaaagttgaaagatgaataagataatcaccgctatacatatgttgagcttttcgaaaatctatggtaatgttagtattttttcaaactgattttgcgtgtcgacatgagaaaagagaatgcccaattgtacacaaaga

SEQ ID NO: 38287 - DNA, 2243 bp, Cannabis sativa
atggaatcagttcgaaaagaccggcttaagggtggggcagcaggaacctacactcaaggctcccacccaagtctaaaaaatactttaacaaacaatgtcaaatttattttttagaaataccatattctatattcttaccattatttattaaaacatataactgtaacatcctactaagaagaatgtcacgttcgtgattacaatatactaatctgttaataaggtctataaactaagtaatttaaaataaatattaaacttatttaataaataacttgtaataatacacactttctttcaaagtaaaacatttaaagttatatattcaggatcccgtaaaattttgtaaccatttgcatggagagtttgtgctttatttatacacattattgctaatgaattgagttgacccatacccattaaagtttatcaagaggaaaaattcactgatgctagctcgaggtaaatacaaataaaaattgattattttgcatgtgttgattttgagagagagaataatgtaaggataggagacgctggacaaaaaggtagtttctcttttgtcgtgagcttttttgtggtttgatacgagggacaagctatctgattgagattgtaccacatgggtcgatttcgcaagcctaaattatcgttgcataatgataatgtgaacctcacgtggttcttctggatgcgtgaatctctcagggttcgcattgatgcacaaacatcacggagtttttatcggtggatgaacctcttggggttctcattggtgtattgcgagtttcaaattgatgcatgaacttcttggagttcgcatttatgtatgaacctctcggggtgcttcttaatccacaaaatgcatgtgaatatacgggtcgcgtatttggtattcatgtatgaactttacagggttcgaataaacacatgaacctcttagggttcctattaatacgcgaacatctcgggaatcttattaattcgtggaacacacctgcgactatacgggtcccgtatcgagcattcatgtatgaacctttcagggttcgataaaacgcatgaacctctcgaggttcttaatccacagaacgcctgtgactaaacaggtcggcattcgtgtatgaacctcttgaggttctaataaaatgcatgaagggttctaataaaatatttgaacctcttggggttcttaatccacggaatgcatgtgactaaacgggtcgcgtattaggcattcatgtactgacaacataaaactcgcgggttctgggcgagttattgcacacattagtcattcagactaattaatgttggtaaagatgcagtctttacatagggcacgggagagaaacaccgagtcattgcatataatctatatatgttgcgactatactaacttttctctatgttccgcttttattttattactatatgatgcatattaaattttgtctcgatcatacgttctcacaaatttcgatcatgtgaagaaatattttgggaattattctcttatatcatactcttagtttttgcaatgacaaaccattatttaaacgttaaactctacttgttagaatttagaaataagatgaatgagattccattttaagataattggtaatggaatgagtagtccatttatcttatatattacaatttatttttacacattaataatgtgagactaactcttaatactagatttaaattgtatgaactattacataactacaatataaacataacatataacaaatggataaaaatataatatgtataggtagttttatttcttaaaaacattattaattaattaggtagttttaatatttgtcccacgtgatgtttgttagttagtgtcgggcgcctagagtacattggtcttaatatcaacatgagtcctcatatcactggcaatcccatatgcatatacatatacatatacatatacatacaaatataaatgcttttttttttttttttttgaataattacaaatataaatgatcagttccacacatttagtttaaataaataatataaaaaaatattaattatttttaagggactatatattaatacaatattgaatactataaaatgcctaattgtttaaataccaataatacttaatactttctaaaaataatgcttataattggttagcgatattttttaaaggaattatttcacaaaaacataaaaacaacaagaaaattacaaaaatacggtttcac

SEQ ID NO: 38288 - DNA, 2541 bp, Cannabis sativa
gcgcgtggaacattaccaccatgtttggtattgtttcgaatataccatatttgccaagatagcacaataaaatattcaaacatttccttctgccaaacctgagagagttgcattagaaaagaaagaacatcttcttttcccaccctttgaatattgtttttcatcccacttagtttctacactgaacgaatagatggacaatgccatagagcatgaaacactctctttctcattcatagaacatcgttgacaacatggattaatgtctattcctcggccacgctccttgagtagggatccaaaaatgagttatatttcaagtaaaatgtttcaattttgggagagcttttaatttccataagtatttccaccaagcaaccacctgactatcatttgattgttgaactgttttgcataagtcagttgccattttatatccactttgaattgaatattcgtcgttcttactataatgccaaagggctttatcatcgaaataggtagtaccaatcaatccatttaagccatcttcaattgtgtagttccatacctacacagtcttagaatcatcacagttgaccttccccaggtgatgtgggattacacaacttacttgatattttcctttacggatcacagacaactgactgtcacaatcacccccttacggggtttaacgtcctcatcaactacacttccgattgggtcaaggctttgataccattttgtaatgttcctacttcaactgtgtagtcccatatctatacaatctaagaatcatcacacttgacctttcccaggtgatgtgggattgcacaacttacccagtattttcttttacgaatcatgggacaactgactatcacatttttcttggcagatttcttctaattgaatacccactaagaaaaatctcattaatcatggtcttttgaatgatggtgtgtacctagtatgtgatgatcaattagagactacacatcatattttatggagttgttcttctcttgctcaatgtcgtaagctttgtgattttcaactcagtgaccctcttgcttcttgtacaaatttttttggtttcattcacatctttattgactctcttctcaagcattaaattgaattgattttgtttgtcttatggagagtctggtttcaaagaaataaatgtgtttataataataaacgcatcccttttgacctagtggtaacatgggcttatgatttcttggttgcctatcaaaggaaagtcgttgttttttcttgttgagaggagtcgattgttattgttcagcatctctcttcgtcgacgtggttggggagggctatctgttggacgcctcctccttctggcttcgtaaaagccaatgttgatgctgcgttgcacttgactaatgggtgttgtgggttgagcatgattgttaggaatgatcacggagaggtattggcttcgacatcttgatttgtggatggagagttcttacctaaaattgctgaagctttggcccttagaaatgcagttgcacaatgttgtttatttagttttaataatgttatttttgagtctgattgtcttaattcggtgtccaaatttaataatcatttattgttggagtcttctttaggacttattttgaacgattttagtttgtcttttaataattttagtgtgacaagtctagtgcattgtctacgaactcgtaatatggcaactcacagcttaactaagtatgctttattgattactgttagcaaagtttggtggcccgattatcctctttgtattcaatttcttgtattgcatgaagcaaataatgaatgagtacatgtttttgtgtcctcctccccttcctagaggtcttcttttgttggtgggctgggaccgtttcaaaagaaaaggtcatgagtttttaaattaagagacacgtatcaaatggcgattaatgggatagaaaggagacacaattggtgacagaagatttcattctgagaatggctagcgatgaccatatccttccctttctttttttttttttctattaatttgttgtagattggtaaagacatttttttgggatctgttggcaactaatgcagatttttctttgagtttgctgttaaattagtacaaactactttgtttgggatatgttgtacaaatagtggattgtggggatattttttaagtatttgttatgtgttggggtagattacttttgttttggatctgttgtacaatataaggggtatttacatatttggaaaaataaaattagtttacattaatatggtaagaaaatttaataggaaaaaaatatgttatttgatataaaaatataacatatatggaatgtacaactttaaattcacataaaaaaatattaaaattttcttcatatattttttttttaaataaaacaaacgaaactacagtgatcgtcggagttgtcactggtgccaaaaaacttgctggagtttgctgtcggcgttgaaaaaattgctggagtagttgtcggcattagaaaagtcgccggagttact

SEQ ID NO: 38289 - DNA, 3048 bp, Cannabis sativa
gaatcaatttgtacaaattataaaagggtataaattttaatatggattatattattaagggcaaataatgaaatttcccaactaattttgctaactgatgtatgaaataaaatatcaacaaactcattacacaccttaatatcaaataacatttaattacacactttcttttttcctaattttatattgtgataaatagtgcaaaaatcgagttaattgctaaaattataatatatcttcatatgtttaaatctttttcttttaataataataataataattttagattttaaatcaatttgatttaaacaatacttatcattgtcttagacgcatcccccaataataattactagacacatcttaattagaagccttattatatcatagatagacattgtttatttatttatttcctttttttaaggggaatgtagacatgatttttttctttttttttttttaaaaaaaaaagaaatgtggacataattacactattatgtttgaagtaatttttggtgattatcttaacatcttattgaagaaaacaataataaaaaatggcatgaccttttataaaatatatatttactttttaataaaaaagaaagtacattccattccatctgtacccgccatcgctttcactctttaaaataatttgcaagagagagagtcaaccatgcctatgttgtactgcaaattttttgtattgtagtacatgcaatgcaatatcatgtttgttaaaagtattattaaaacataaatttctatatatttaattatttttctctgtatataaataaatcatacatttttctcaaaatattgtcgtggggattttgtctgtcttgttatttgtgtgtgtgtatgttgtttgatcattctgtttcgaagaaaatagcaagattgtggtaaggtcgtatctgggttttgtttacatttgcttaaagttcaaacctttggtgattttgattaatttttttttctttcacggtcaggtataaattttaaaatggagaatgggactacacataaggaagggcctttttcttcttcagagattgagaagtttgaaagagaggacatggaagaggttggatatgaggcagaggatattaacgcaattgcaccatggaccaaacagctcacccttcgtggactggtgaccagcatactgattggaataatttactgtgtcatagtaatgaagctcaatctcaccactggtttggtcccaaatctcaatgtctcagctgctcttcttgcttttgtgttcgtaaagacatggactaaggttctcagcaaggctggaattatgtcatctcctttcactagacaagagaatactgtaatccaaacatgtgcaactgcatgttatagtatagctgttggaggttagaaattaattacaccaagagtttgttattatgttttctttattattgttttgagtcttggttgtttattgtcgttttttgggtgaactgcaggtggatttgggtcttatctgttggctttgaactacaaaacgtatgaacaagcaggagttgatacaaaaggcaatgctcctggtagtacaaaagagcctggtattggttggatgactggttttctctttgctacttcttttgttgggctattggctttggtgcctcttagaaaggtcttttaactttcttttctttgtttgctttttttatttctttctttaaattcattgagtactgatgtagttacgttatgactttttctttagattttggttatagactacaaactagcttatccaagtggaacagctactgctgttcttatcaatggttttcacacaactaagggtgacaaaatggctaagtaagtaatggggtttttttttttcttaatctttctcttgatattcaacccaacagaattgactaaggataagaagtctaacaaattgaggctctttttttcaggaaacaggtacatgggttcacgaaattcttctccattagtttcctatggggtttctttcagtggttttattcagctggagatcaatgtggttttactcagttccccacttttgggttacaagcttggaaaaacacgtaagtgctttgtatgttacattttaaaagactctactccactatgatttacttatttcatcaccatcatcatcattgactgaaaagatatcattaccattttgcagattttactttgattttagtgccacttacgttggggcaggtatgatctgttcccatctagtgaacttgtctttgcttcttggtgctgtgctctcatacggtgtaatgtggccattgataaggggtcttaaaggagagtggtttcctcaaagtttatcagaaagcagcatgaaaagtctaaatggttacaaggtcaaaagatttgagttcattagtttaaattaattaggtaaataattatcttttcaatgaaatttttctgaaaaattattttctttactcaactacaggttttcatctccatcgctttgatacttggagatgggctctataactttctcaagataattgttttcacttccacaagcatccataccaaaatgaagaacaataccctcaaaacatgtaattaacaatacacatgtgttcattcatactctaaaccacttactagtttcagtgtccggaatcataatagtgactagtgtcacacttcaaccattgtccatatgaaataatatagtaaaaagtaaaaagggttttgtgtcttccttaaatattgtccatatagagaaagaaaattttgaatagtttggagtgcagtccttttgaaagagtttactttataaatagtagtatcttttactgatgtgactatgtatccttaattgcagcttccgacaatcaagatgagaccattgatgatcttaatagaaatgagttgtttgtaagagatggcattcctctttggatagcatgcgttggttatggtttctttacccttatttccgtcattattgtcccaataatgttccctcagctaaaatggtactacgtagttgttgcc

SEQ ID NO: 38290 - DNA, 3141 bp, Cannabis sativa
  modified_base (1471)..(1476): a, c, t, g, unknown or other
caaaaactatcttgaacgtttgatcgattttttatcctagcttttgcatgtgtaactctcgaaccactttatttaattcattttacacctaattaagagcctataataacaaccatgggtgtaaagactcggtcaaactgagtcaaaaatgaagaaaaaaaaataaactaaaaggagaacctctccctctctctagaccacaaaagaaaaactcacaaatataattgccggtgtaactccggcgaccacccttcggccactgtccgaccccacgtatcggaccattcaaatccccaggcaccgacgacctcaatcaccaagtggcaccaccccttttgtcgtcgttagcctgggatattcgcaagtcaaagtttgaatgtttaaactttgaacggatttttcgaccacctctaatgtccgtttggcgagtcttcttcaccactacactcaactcgtcgaggagaacaatctacattaagttgttttgcccagtctgctaatttttttggtaacgattttgtagctcgcccctttctgacaaatttctagcgatattgtgtatcgttttgataaacagttggcatgggtgtgatctactcatcgaggatgtcgttttggtatatattactcttattttcggcgacttttctagtacaccaatttctaccgcaactgatagttaatgtgtaccgtttaggtgaagttttggaacaccaaactttaaatatatttatgttatatgtcgttggactcagttttaaatgtataatataatgatgataattatttagccatttgacatggtataggtgggagtgatatctaagagtggactaaaaattagagtttagaacttgagagcttaggatagtttaacgaattgggagaggtagggactcaacttgattattgaacgtgattttatatgtgttgaataatattagagatattctaatttttatgatttgttaattatttaaaaaattaaaaacttaatctgtatatttttcaagactgttttggaacactgagtgccacacatatttttgtataaatatttatgtagtttataatttttgagtttattcaaatacagtcgctatgctgccaaattttctagaaaataaaagagaatatgttattttgttattcttattatttgcctacttttagttatactgatgggagccatgttgatcatgatttgtgcatattgttgtttcacatgatttgaaacttgctgctattgtgtttgttttgaaaattcggcgacattatttgtatggagaaaaatatgatatttatattgacacaaagagtctcaagtacttctttactcagaaagatttgaatatgagacatttaaaggaagtggttagtgggggtgtacgtcagtcataatatatttttactcagtttagtcgggttataatatatttttaccaatccaatataaatatcgggttgcaannnnnnaattgtaacccacccaattaaaaattagaaaaaatttaacccgtccaatgattttgtcgatttggtcgggttaacccgtccaaaccgttcttcactttttttatataattattattcttagtttctaattcaaaaaattagatttaaaaaaataaaaataaattatatatatttgaagttaaaaaatgatatagtctaaataaattttaactttaatttaacataaatataattgagtaaacatgaaataattgaataaaataataaaaaaagtaataatattatataaattttaagcttcaacttctttatccaaatacaataaaaattgttaactataaagtctagattttaagttaaaatattaaaatgtccaaaaactttaaatacaaaatagtttgactaataaatataatttatgtaatatattatatacacttttatttaaaaaaatttaaaaatcagtttgattcgggttaattgggcggtttagaataatttgtaaaccacccaatatattcattgggccgtttagatttttattgtattatttcgggttgtattttttgtcgatttattcagtttggtttgggcgatttattcgtgttgggtggtttgtaaattttgttgaacacccctagtggttagaactagtcaaggacaatgactgttagattttgtatcatcctggaaaagccaatgtggtggctggcactttgagcaaaaaaggtctcaagcatgtttttagtaccatagtgatctcaactcagttggctttggatatcgttaaaactagtattgaatttgtagttgggagaattcataacccaacgcttcaatccgatttattagaaagaatcatatgggtacagttagaagattctgagttagtcaaagtttgagtggatgtattagttggtcaggctaattaaggaattctcaatctcaaacaatggaatgttactgtataagaatcgagtttgtgtcatgaacagttgtgagctcaagaaagagatattgaatgaggctcatactacaccttattcattggacccgagtaccacgaaaaatgtaccaaaatctaaaatcctattatttatggtgtagaatgaagaaagatgtagcggaatacgtgttctagtgtttaacatgtcagcaaattaagacaaaacatcagaaaccggcagggttactgcaacctatatcatttctcgagtggaagtggggaggatgtgagaatggactttgtggttgatttacctagaaccacatgaatgtaagatttgatatgggtcatagtggattgtttcacaaagttagcacactttgtgtcggtaaagacaatttacatagtggacaaatatgcaaagttgtatgtaaaagagatattttgtcttcatagaactccaaaatctattgtttcagatagagatccgaagtttacttcaaagtttttggtaagtctacaaagggctatgggtacaaagctgaaattcaatacagatttttaccctcagactgatggacagtttaagaggatgatacagatactagaagatttgttacgagcctgtgtcatggactttaaggattcatggagtaaatatttggcttaaatagaattttcttacagcaacagctatcagagtacaatatgaatggctc

SEQ ID NO: 38291 - DNA, 1597 bp, Cannabis sativa
taaaataaataatgagttatgacaatctttttcttatatccaattcaaaaaattctattctcatgtttgaatgtggaccgtaggatctgaaatcaaacgtcttaaattacagtgcgtgggccccacttttgagaaaaatagaaacgcgctcgccgaaaagcatgcaagagctgtgattcggtagggccaaatttatttatttaattatcaaaaaaatatatatttacttttatttgttaaaggaaggaaaataaaaataaaaattatagttattggtgtgagaaaataaaataagaagattaattggaatttttaaaatttggattaaattggatgctgacatatgtgcttatctgctttattggttcttatcggcttataatatttggaattatctaatttgatattacaataattaatatgaaacacacaaatgtgaattaggaaattaataaaataaaataaaaagtgttatgatttggatttttttttgaacatttaagcaaacaagtggtcggcactatactattactatataaaccttcatttggttaagtggggacacctaaatggctaaacttcatccctaaaggtttccacgtctgtgattatgaaatttttgccaaataataaagacaaaagtatctttttttttaaaaaaaaaaaaaaaaaaattatgtattataattttagtttaaaattaaatagtttcgttatagataatcacaaaaatgattaagcatcctttgtaatgtccaatgattattagggatattaaacaagtacttaaagttttttaataaccttaaccgatgtctaattatgacttatttttaggtgtgacatataataatatagccaatgttataataataatattgttaacaaattttatggaatcaacagacagaaattaagagaaaatggattaacttatttgataaattcaatggatgatttttttattatcactctaacaaagactaattgttgaataaataattgaaatttcaagtaaactatttcataattttgcaccatattgaattgaggagggagcaagtttggtcttcttctccatacaaaaaaaagtttggtcttcttcttattattatttatatatatgtaattattattatttttatatattttagttttagctgagccagcactattcactaacctcttttaactttttcaggtaaagtggcccctgatttggatagactacgggcctaggcccactctccattctctaagagaagcttaccaacaaccaaccctgatacgtgtgcactacttcatattttaaatgattttgggcttgagattatgaggcccataattagatgccactataatatactatttttagtaaattttttacattcaatttttttttttttaatttttacggtatttaataaaagtaaaataaaaataataaaaaaatgacatgtaagtaacaggaaaataacattaaacacaacataaaaataatatataaatagcaataaaataaaaaaataataataaaaatacaatataaaaataatatgaaaacatcaaaaagttatattttctgtaaataaaatct

SEQ ID NO: 38292 - DNA, 1626 bp, Cannabis sativa
atagtttaatttttattttaatgttatgttctgggttcgaattatatttctttgtttggttaatgaataattatgtaaatatttttatcttttctctaactattaactattaataataatttatgatagtaaaatagaatttagtttggttacagataaattaacatgtttagtttctcaaataaatttacatgtttagtttgggttggttgagtgacactgtctattagatagatagagatattatatataaccataaaagtttaaattgtataatgaaaaataatgaaaatatgtttggtacaaatttatttctcaaggtagccttaattattctagttacaaaatttaaaaataaataaatggatacataaacattatacatgtatctacaaatttttgaatcctgggtatatatttactgtagcaagataatagattgatagttggatattactacacattcatattcagataaaatatacatacccaaacttatgttagttaagactcatcatccacctgccataaacatgagaaagatattgagattttagctataaaattaacttataatattcttagggctcgtttggaacgtcgtattaagtcgtcagtgacggacccagaaatttttttttgtgggggctttttattattaaaaaatatttgtacatatattataatcatttttactagatttatttaattttgtgggggcttttttattattttagtctataattatcaaattaaaaaaaaataatttaatttttaaaaggcaatatttttgctagtgggggctatagcccccacattaaaacaattgggtccgtccctgtaagtcataatatattgtattgtattatattgaattatattatatatcatatgtttttttatataatactatgttaaactttaatttatattaaaacattatatatttaggtgttataaaaattaataccacatatagttttacataaaaatattagatgaaatacaattcaatataatattatacaatacaatgcggtataatacgacgtaccaaacgaacctattcataaacatatataagatgaaaagagaacaaaaaagaaaaaatgcacggatgaacataatgtagattcaactgtaaaataatagatagttaggagtgaggccaagatgagatagtgagttgagaatcttgagatcgttaaaaaaaggaaaataaaagattagctatatgcttataaatgatataaatagattttagttaaataataaataaaaaaaataattggtttatgctagatatttttataaaaaaatctattaaaacaataataaaatatcaatttgtagatttatggtctaataaaatattaaaaattagagaattaaagagagaagagaaaaataatttttgagagattttatagtcatttgaaaccaatagcttcactcaatagcttcttaaacttagaaaccaaattttttcgtattgttgcatgcattagattttcctgtaggaaaaattgtataattgataaataattaaaaaaaaaagtaatagagggaaaatatgaataaaataataatcaccttctcatcaataaaaatcatatcaagacttat

SEQ ID NO: 38293 - DNA, 2722 bp, Cannabis sativa
acccatctaggacttcaatttttgtggccatcttagtgaaaatggatcaaactttgtactgggacatgaattagacatgtcactaatatatttgaggcatcagaatcaaattcggagcactttcgtttttgagcacccagagcaccaggtaccccaagcacccagcacccatgttgacattttgtcaacctggggtgcttccaagcatcaaactgaagaactatcctgtgcattttctttgtcttcataaaaaatgaggaaataagtacttttagagaagaaacagactgtcttgggagccagaaagagggccagcgcccaggtcgatattttgtcaacctgagccaattctaagaagtttttttttagaattatttccggaatattctccttgtttttcaaagattaagatacaagttttttgggaattgaacggaaccattttggtggcctgaaactgatccagtgcccaagttgacacctagtggttgggcctagcacccaggttgacattttatcaacctgggctgttaccaatcatgtttctaaaaaaatgttccgggccttttttttcgtcatcagaattaatgtagatacaagtaatctcggggagaaaacgagaattctaggggcatgaaaattgagccaagtgcctaggttgacctagtgcgctggtttcgataatccaaatgcaaattttactccgagcattctctttgtcatggtcgaaaatagggtaggagaccccatcctcaatttcaataacctttgaagtatttaaacggcttcccagaagctccaaaaagagcacccaatgcccaagttaacaggtgacctagtgctttgggttttgcttattcgattctaattttgtatcaagcattcgtctagtttttcatagtaactgagagctatgaagtcagacaaatcaaattcacaacttcatatttttactttttcggcaaagtgacttactggtaaatcgagcaatttcgagtctctcaattccgtgaaacaacgacatccccgagaatcgaatgacttcaccaaaacacaaaaattagctaagtaatgtcaaaatatcatttaggcatcaaaaaatatattcccaacacgttttcccactcacctagcgtttaggttgacgtcatatgtcaacctgagcattagatgtcaacctaggcgcttaatgttaacctgagagctggatgtcaacctgggcgctagtccgagaatatcattcagtaaaatggtcataactcactcaatattgatctaattcacacgattcagcttgacttttaattttattttaatactctatcaagtcttgtctcacactccaatgacaattttgaaattataaactccacattttgtcctcaagagagttacgaatttaaactacaacttacccgaagtgggtcctgcgaacgcgacttaggtttcaaaaattgacgaccgaccttcgaattcaatttcaccatcagatcatcatcaacagtcacaaataacataaatatattttttcatatttattgaaatatttattattatttcaataacacatctttccctataaaagaagagctcctctccatcaagcgagagcatctctctagtttctctctttagaaattagagctttcagacttagccaattttcttataattcacagcaagatggtcaaacctctagctaagaaactccaattcactcaaacatgtagtctctgccatgtaactctactcctgagattccccttaaacaaaaactcaaatcccctatttatatgaattcgactgtaccctcaatttctcagacaaaatcctcttcatttttttggcctctcgagacttggagaggccatccgtggcctccattttggtcttcaattacacaactgagaaagagagagggagaaagacagacaatgagggggctcgagggtggaaggtcgatatttgagttttgagttttcggggttcattttgaccttggtgatcgagaatagtcgtcattggtcgggcctagccatggctgtttgacagagaaaagagaaagaaatgagagagggggtgagctcgagtggtcaagtaaaggagggaggaccgagttttgggtttcgagacctggggattccaaatatatgctttgcttggaccactgtcgtcggagatgtttggcccccaactaagtcagcaccacacgagagaagacagagatagtgtggtagagagagagtgtgtgtgggtggataaaattagagtttttcccatgtttagtttttttatattattttaattttttgaagaattttaaattatttttaattgaaattatatgatttgaactaataaaaaactgacatgtagcattttattagtatttaacgaatttgttaaaattgggcactaacagacaaacacaaatatatgatttttgacattattcctgtcaattttttagattagaattttttttgcattaaaatcaactttttggcacttatgtcacaatatattctttattattttataattatatttaaaaatattaattaaatattacatcacttttgtttttgagtacaattacatcactttttttaagttaatattacaccaggtttataatagtgctacgaccataactaggggtgttcattggatcacatcttatgtatttggacccatacgatccaatccaattatttattgg

SEQ ID NO: 38294 - DNA, 1653 bp, Cannabis sativa
agggcataaaacccaacatgtcttcattcgcattctctccgttcgtggtctgcatttgtggtctctattagtagtgttgatctcttcgttcgcggttgaggaaaagattggcgagatttcggtcaaattgaaatgtagccctctcagtcggtcgaattggcgtggtttcgatcaaatggtggcgatggtcatggtcttggatcttttagtggggttttggtgggtatttcagtaagagggaaagagagagagaaaacgagcaagagggaaatagagagaagttagaaagttttgaaatgatggggtattttggggtacacataaaagttgggctatttcacaaatattgggtagtttaagttttagttattagttttaattagggctatacataaatttttataaactgcccaacctgaacaacccgccaaaaccaaactaagataacccgacgaaaaaagcaaactgaaaaacccaacgaaaatataacccattcattctttatattgggtaggttaaaaataatatcaactcgcccaatcaacttgaactaatctgaccaaccctattaaaatggttttttttatatatgtttttaatgtatataatctctatattatataatttatatacatatttataaaaaatagaaagtttaaactactatatttcttttatggtggttgatttgaactttgaattcaatctatatatttgtcttattatcacaattaattaaaatctaacaattgaatgtgaagaaaaatattagtgctttgtttgggcgggttaacctgaccaaaccgacctatttttattggacgggttgaattttttttgttaattaagcgggttgcacttagaattttgcaatccgatctttacattgggttgaataaattataacgtaaattgaccaaatcgactgacgtacacccctagttttaacctacaatatccatataaagtcaaatttcccatctgaaatgagaagaatatgtgtctttgtataggccaatgaacataacatgcttgttgttatttttgactaattaacaaatcgaatcttgattagggatttaaagaataatacaaattcttaaaattatcgaggaaaatctatatagtacacctcttaagtgagtattttagtactctctatttgttctgtcattcaagaatactttttagtgtatttgttcttatgatcgtgtacgttgtacttacttaagactacttgtaaattttaaaaaaaaaatagaataatttacagtgctgaaattaaagtttaaatattttattgcatgcgtaattattttttttttttatacatttgaactttattttaaacactataaactatctgcaattttataaaattttacagatggtccaaaataacaataacatacatgattgtaaaataatatgaaaaaaattaaactaaaaagccctcgtagatgctaaaacatatatcaatgtctagaaatccataaaataactaacaaaacaacctaaatcacaatccaaattcacataataactcacaaaaaaaaccaacatagcaacctaaactgtaaaaaaaaaattaaaaaataatatataaaattaatttccttttattttttaaaaaaaatgataaatactatttta

SEQ ID NO: 38295 - DNA, 2103 bp, Cannabis sativa
ccaagcactaaccatgttatcagaaaggagtttgtgatcatgcacaaaggtattatgcctgttacagatacgccagtcaagggttataaactgctcaagttcttgttgtttcaagatatctatacaccctaataacaactcatagcaaggggaccattatagattttgtatttttttttttttacatatttttaattgtgatctagaaggaactgtttatttaaaaatttggtaagatcatatgcaaattgcttgacaaatttccaaatatcatatgaatttgaatggaatccaacagacatacatagctttttcatgactcaatatatatataattttatttatttatttttacaaattttctcttaattgtataatctgaaattgaaatctcccataactaatgatggtaagctaaacactcaaaaagcacttatttggttgactgaaaatagagacacaccatgtgattatttgcagccttttgggtggggaaaacaataataataaatgtttgtgaaattttaattattgggtttaattagtatataaattggaaaaaaaatatatattaatttgtacatttttataaaatattaattaataactatgagctttcatgactttttgtcaacaattgataggctattcacactgtcactgcatatatatttaatgttaagtacgtatatatattaattacagagctacatgacatacctctgaaaatgatgttttttttttctaaaaataaaaaaattcagaagtgaagaagataagataattataagattaaaataataaataaataaataagcaaaaattgaatggaataacagagttgaagcatgaagtttgagcaataatttataagataagcttatcactaagctcatttgaaaagactcttcctttatttcccatccacttattattaaaacatctttattaattcaatttttgttataaaaataaaattttgaaaaataccatattttcacttcaataattttgatgagtgccaaaatacctacaatattcaatattgtacaaataaaaaaaaacaactaccattgaaaaagctttatatatatatatcttcggattgtggccttaaagcttatcatatatacagttgtgtcgtttttagggaaaccaaatatgataaatatatataaatatatataatctcccacgtaaagactcaccttcactttacaactataaatttactgagttttacttattcgaaacagtcaatctgtgccgtggtccgtggaccatattgggaggtcaaaggattcaggtagcactaaaaaaaatatggactgaagtaagacatgatatgttgttgtaaattgatatgacatgatatgaaaaaatatagacttaaacgacacagaaaaatataaatttaaacatgatacagtatgtaaatataaaataaattaatttgaaagcataatacattaaaagcatgatcacttattaataataataataataataataatatattttatttgtcaattaaaatgataataatattcaaattttaataattataattattttttttataattgtgtgtaattattattgaaaaaatatgcgtaaaagtaatttaaattataaaatacacatatattttagtaataagctcatcagttacaataaatatataaaattatagagtatgaatttaaacccctataaaaaatgagttggtttatttaaaataaacgaattgacccaaataaaatacgacacaaatttgagcatcacactaaattattggaattgtgggtcgtttgggactacgtacgtcccttgtaaaattattatagtatagcaccacgtaatttatattttttttatgacatataatataacacgatccatattttttttgacccaatacaagatgacccgtattttaaaaactcaaaatggaccgttcttgcaggagatacacatatttctagctctatatctgtcataatatgtgtgtgtgtttatacaaatatacaataattaatctctattgaaattaggttaaatccacacacacaattatatataataatgttataatattattat

SEQ ID NO: 38296 - DNA, 1778 bp, Cannabis sativa
aaacattagttgtgaaaattaatatcgcattaaatattttaattaaaaaattaatttattttaagtatataattaattattattaatttaaagttaaaaataaacttattataacaggtcataaaaaaaatataaccgttataattacattttatatatataaatggtaaactgaaagcccatgcatttatatatttatatatatatattataatatataatttcagtactcaattttgaaacaaagaaccaagttgcgtaaaattggtaagtcttatttaatacaatgaggtctaaagtttgaacaatatatataatatatatagtaattttaaaagatttgatgatcatcaactttccaaatatagtataataaacagtagagacaacctccttccaaacaatatatccttaacgaaatatataaataaagattaaaaataaaataaagatgagaagcaatatatattaaccatatgatcagtatgggagaagttagctagcttaacatatatgcatgaaatgaaataatagtcatggtttataatcatatgacatcatcaagaaataagatactatgtatttagatgcattttaatatatattactatatcttaatttaattattaagggattaataattatatctgttgtcgtttaaggatattattaaaatctatatttagcagagtttttcttacaaatttttatttaacgtgtgcatgtgggatatattatatatcatcaatttatagttggctagggtttgccttttccacgtttgaaaggcaatttaacaaattaactctgaggattgctattaggtattatatagtacctaacaccgtatcgatcgatgtacatagcagattacaattaattagcagttttttatattattatatattacgattggttagcgaatctgtaatgatatttatgctctctattaattattaattcttttttagtttaatgtctaatttttttaaagcgttttttattcatgtaacttgttcggtcaatatggttacgcatgaattaactatacacacacttaaagtaaatggtaagctaatttggatggaagattttccattttttctttatgatgtactgatcaacagcgattttttctcaatgaaagtttatttattttttttttaaaaaaaatgtgtgaaactcgatattaatttgcagtaaccacgcgaacttgtggtgtttgatagttgacattggcaccataaaataccccttagcattctcattaactatataccgtggatataattaggcactaacatattttcttctttatattcttaaaataatttgaacaaaaattataaaccaaacataccaaaatattaaggcaatacatatagctgaggagaccctgaaagctaatgggggatttcgtgacattataataataacaattttattattgaaataattaatgtaaaatatattatttagaaaagaaagaaaggatctttttaagttaaataagttaaataattaatgtagtgcaactaattttcaaattagggttattttacatattcaccctatgctatatataacataaatatttggaagcccttttataagacatgcagatatactatatagtactatgttagttttaattcattgatcattttattttatttattgataataggctgtactatgttaatttatgtagtatgaaatatacataaatgcttaaattaaaaaaaaaaaaaagggaaaagaaaaattagttaatgttt

SEQ ID NO: 38297 - DNA, 1455 bp, Cannabis sativa
gcttctcagcgatcctacgtgcatgctctctcaggctggctccttaggtgtgtacgatcagaccctgacacctcgaagatccccttctcgccacgccgctcagctggagcccttcccatatttggactatgcatacaatggtcgaggtccatggacgcttccagggaagctcctgtactggatggccttgatttctttgctgctgggatgggatcactttacgctcagcagcaacaaagagaagattcctcacgacgtgtacatcttggctccaagagattttctgaggaaattatcacagggaacaatatggaggttgtggagatcggaggtggggaggtggaagatgtcatgactgcagagaaaatggctgaggttgccataagggtgctttgtgctgggatgtcagttgccatgagctcactaagtgagttttctaatggttctgccaaggcctatgctgagctcatcaaccaatgggagaccgcccagtggccacctcaaaatctacaaggcagggttggagtgtagtagtattttttggggggtgtaaaaaaatttaacttatttacagaaggtagtaggtgatgagtttttagccagcagcaccttttttatttaactaaagagggggtagtagcttagaatttttttcttctttttcttttcagggggtgggggcgttgttttttggctgatgataatgataatcggcaaatagaataggggattagaagacattgaaagtacaactgtatgatgttggaaaatgttgtaaacagaaaaagagaacaaattttcgtaattgtttcaatatgcaacttaactaacgagaacagagcaaaaatttaacctcgtttgttcagtcaaattgatcaaaatcagagaaagcaataggaatgaacattcaaacattctcgttgcctccctctaaaagtttcatattcctactcagcccaaagtacaatccgcaaagaagttctctgtatatcgtttttgcaataaatatctcttctaaaccaccaaaaaaaaagtaacttttatctattgtgcaaaaatttttgctccatgaggatttattctccaaaatcttcatttgggttacaaaaaattgaaagcacagacacaaataacattcatcaggtggtaaccttggatgaattaaagatatgaaggtattttaaatgttaaatgagctggtcagattgtagattgtctcagtcgtagccttcatcatcgtcatcaagatcaacttcaacatcatccggtcttcccataagtgtaaggaaaagtaaaactgcaaccagttgtgttgccaggaagtacttggctcttcttttaaaagtcttttcttcctttgttttttcctttttcggtttgcttttgggcttggaacctaaaatgaattagaacattatgaataaagataacaatcaccaccttacaaaaaaaaaa

SEQ ID NO: 38298 - DNA, 2265 bp, Cannabis sativa
  modified_base (2021)..(2029): a, c, t, g, unknown or other
tttagtttttggccaaaagtttgtgctgcagaaatgaaaactttatcttagtgaatagtttatcataatttctttacaaaaaaaaaatagtttatcataatttaattatgaaaggctacttacatgaaactgagagacgcaaacgactatatttactatggacctcaacaagcccacaatttatccggattccaagtttaggcccaacaactaagcccaacaacaaatgttctttgggtttcagtttcttttttcaatttttatttttgatacttatttgaggaaatttcaattttttagggtttttattcaatcttttcaaaaatatgcttttttttttcaaaaaattattatatagggaaaattttagagaaagtttaaaaatatgtggaaaatagattaaggtaatctaagggggtaacgtaaccaggtaattatactgttttctcatattttttttacttttgatttccaaaaaaaaaaaaaaatccatacaataacttctttgaaaaacattatatttttgcaaacttttaccttaaaaccaataaaataaaaagaatttttggcaactcacccgctaaactcaaattttagtggataaaatatataaatgtcgtttgagaacacttttattttctaatttttcaatcacaaaataaaaataaatttttgtttatttatttggtttgcagaccactatagagaaaatgaggaagtggagaggatatatggctatgtagtaggaaagatggagatggtgaaaggagaaaagaaagaaaaggaagagagtggaaagtgagaatgggattaaataacctcatcttctcaactaagtaagtagtggtagtagaactagtgcttctctgcttggttggcgcactactcatttagatttgtaagtcaaacgttgactgactggtgtggagctcaatggcctttacttactcttcttcctatgctactaatcacacatagtggaagttatacttatacatagtggttaatggttatgctattacacaagagtttctcaattcacattttaagctatttagttacatttttgggatttcttttcttcatactaattactagctaggaaaagttttatactaggggtactatttgaaacaaatcttcactttttgtgtttgaagaaattataccttgaacaattttatgtctatattataattataagatacaatttaccaatttttagaaattttgaataatggataatgtcaaaaatgtacttcaagtatcaatgcacttatgcatatcatttttgttaacccctaaaattgattattttaaacattgtttttcgacgattgatttagaatttttgaaaaacaaatagaatgtgcgctataattacaactagagttgaaagttaggcaggtttgccgaatttcaagttgacgtgtttaaaaaatagtatcccacccgttacgagtttgcaaattcgcaggttgacctggtcaacccgatcaactcttcttttcttaacccaaattttatatgcttattttttttccgttttatttatttatgaaattgaacacataacaccttagtctatattctttagagaaaaataaaatattaattccaaatccaaagtacaaaaggcaatccgaaaccaaataagtcattcattaaactttatatttatgatagtaaaaactaaaaagtttcaaaataaaatgtgaacaaaaattcaaaatctataatccatagtctatactacatatataatgtaatatatatctatatatataatttcaccgagtttgcgcgcaggcctgaatccaacccgaaaccccatcacctaaaaatcaaatacaaaacccgcccgaaaggtctactgggttgaactcgacccgttcgcacttaacaggttttttaatttttgtgttgggttaggtctatgcgagttggtcgaatccaggtcaaacctggtacaagtgttcagtcctaattacattgtaaaatgcagagagagagagagagannnnnnnnnagagagagagagagagagactacactatgtttggtaggagggagagatgggtgaatcaagaggggtggatggagagtaatgtaaagagagaatgagtctctgtctcgcaagagggagagaagagatggaagaagcattctccctccaaattttaaagattttaatttctccaattttaggaggattgtagacaaagacaaattttatttattaaatacaataatatctttttaaaa

SEQ ID NO: 38299 - DNA, 1728 bp, Cannabis sativa
ttgcactttaaccatccttcctctggcttctttttcctgctggtgtagagatggatcaagtggttgtaactgcaacttactttgaatggtttctagatccttcctggcaactaaaacctggctttgtagctctaaaaaaccatccttgtttaacacttttaacctgcatttgagaatacctacagtgaacctacaagggttccaagcaatagctatcttcccacctgcatgccacgctatattggacgagaaacaccaaccatcaaagatattcatacaaggctccaagctttggagcctttactctagtctcaaggaggccaacaaagtcaatcttttgtgtattaataaattgctttattaattgttgtttggattggctttggctcctcagacattccaacacaatagtttatccattggaaagagagggaacccccctcctgtattgatcacagaatccatctttatttggtcttcacagtctgcaatttcagtagaaaaaccctctgtattctccatgcttaaggcttgaaacgtgttctgtatttgtgttgcagtagtgatgtattggcctctttctttcctgctttcttgccattagacaccttggtaaagccctcctcatctgtcactatagtcttcctactatcttttttaataacccactgctgcttaccacttgtgtgtttcttgcagtcagttacagcatgaccaatacccgaacagtgtgaacaagtaattggtttccactcatatctaattccaactgatgtgttcgaaccatattcattctcgaattcaagcatatcaggcagttcctgatccataataacctcaactagcactctagcataactcagcctctccctctccttagtaatcgaatccaccattagaggcttcccaagctgacctacgatcttaaacaacgatctttggccccagtatttcagttccaattcctcaagctgaacccatattggcacacttttcacatcctctcttttgaaattgacattgggatcccatggtttcataatgacaggcctacgattgaagaaaatgtatcccccattcaggatttgatccctatattccagtaaattgaaccttatgagaaaaatgccataagataacattttcacacagtccactttatccttccatatacgattgacaaacccctcaagtatgtgcaatggaggattcactccaagacatagcacacaatcgagggcttccagaacatgatctcctcctcaatatcatccaaagtgattttcaccttcctgttagtttgttctgaatttctaaaggaattatctagatttcgaataacaaagttggatcgcaagatagggggaatcgagttcataccttgttgaaggttactgttacattgatcattcgctttaaggaattgcacaaaatcagtccgaacatcatcttgtctctgtatcacctcaagagaggatttaggggaaagaggagattgaaagacatctttgagcacaagatcgtcctcctccgaaacaatcagcggctcaatctcaataacttgttccagcatctcaaattggtccgtatcagcgactttcttcccagctttcttcttcagaatcttagtagcagacttagatcttccatggttcttcgaccttgttttagccatggcaccgactattgcagccgcaagaccttgttttatctattattattattatt

SEQ ID NO: 38300 - DNA, 4005 bp, Cannabis sativa
tactactttaaacgatacgtacacttgcgtgtgcaaaaatatcgcaacaaaatacatctaagaactcttgtaccaccttaatgtccttaggtcggactgactctggttgggtggtatccaacactactgctaaaaaccctacgcatccttcatgcaacaagtctttagccttcaacattaagattattggaattcaagagcctttaactgaccccaaaaatacaaatagttcttcaccctcaagttgaaaggttaccatcttccacttacaattgatactagcagcgtacttggacaagaaattcattccaagtataatatcaaactctgctatactcaattccactaggtaagcactcaactccctatcctcaatcctaatcagcgtagacctaatccacattttaaagataactaattctttgccatgcatcagggttccaaaccctatatcataattgccacataacctatccaacttatcatttctggctgccacataggaatgtatggctccagaatcaaacaatacagagtaaaaaaagttgttgactaaaagctaacttgtcaccactaaagggctagctttagcatcgacttgagtaagggtaaacaccctagctagagcgggtttgcctctattttctactcttctttctttaactttaggcaatctcttttataatgtccaggtataccgcactggaaacatgcttggtgcttacactcacccaaataatgcttcttacaactagcgcattccaggtaagtgtaacagctctcagaaccaccctgttgattaccatggccttagttttctcagaacttcttattttgactcgagccaccaaacacaaatggaactttcctcttttgatcagtggttaagtcgctaccacctactgaaaccagaggtaggagaagtagtggcctcaccaacactttatgtcccagggactcctaaatccattctattgtgccctcagcttatggtgccttctctaccatagcatcataagtaatcatgtcatcagtggtaatcatcaaatcatgtttgatttcatgttcaatcccgctaaatacttttccttcttgctgaaattgattagcataattctcgaggctaatcaaggcaatctactaaactgggtcatgtactctgtaaccgacatattgactcctcaagccaactaggtgaattatttcgtttttgtactatgaagtgcttcattatagtacttagcgttaaacaaatcttggcactctttccaggtaattttagtaatgtcacgagtaagggacactatatcccaccacaccagggcatcctcttggaattgaaaggtggcataggtcacctgatttttgccagtgacacccagtattctgttgataactgttaaccattgctcgactttcatagcatctggacctcccaaaaagactggaggtgcttgcttacaaaacttttcatataatggttccatacaattaccaacaacaacctactccacttgcacaacaggagcaagagctatttgcacctcaggagcatgcatcacagaagcacccttctgccttaggcatcagatttcttcgtcttgatcattaattttgccttgaatttctacaaacctctactcccaattctaggcagcctatggtgggttaacgttattcgaccattagctacacctcttcgacctctgcctcgaccatgaacattagggggaatatgaactccctaaccaccacttgatcggatcaaatttccttggcttctcgtgtttttcctagcatccattctattgaactagcctgcaaaatcataagttagcctggtcagaccgcaatcaaggttaaaatctaattaccgcttacttgggaatttaaaaaatgtgcatattcagctatcgggctactaacatgcttcctaacaaacttttcttatttcatattgataacccaatctactaaaccatttaaaagcttactaaatcgtaagttgagcttatctctaatgatgattgtacatatcgtgacgatctttgaaagataacatggcggctttgataccaaagtgtcctattataggcacattatcatgattttaaattactttgcgctccattgttaatcaaagagtttacaaaaaacatgaataattaaaagtttcttaattaaacttaatcttaaatatataagtactaaacgcattttgggatcttgtttacaaagttacattagtgttcaaaatacagttacaaaagttgttgtctagcgactatcaaaataaaacttgttgtcccgtatatctaaacactctaggtttaactgccttcatatgtacaatctttatctagcctggcctcacttttgttcagcctttgctttgcctttacctacacatgtaaataatatctgtgagtctacaaactcagtaagaaaagcatgaacataaactggactataaccaagtgccatacacccaatcacaatcctattatgcatccaacacgtactaggtctagtatgttcgttcgatagtatgattgaccgcaatattaacttatacttggtactctaatcgttatcgatgtgatagcgtcaatccgtagtttgccaaatatatatttgtcggtattcactacaactctacgtacactaatattgctcttattgatatgatatctactaggcaatcataaaacatgtaagctaaatatataaatatggatgcaactattatactaatcttaccttaattctgatttcaggtatgtcggtcagcttgagtggaaacagttgcttgaagatttagaggcctttaagtcacaacatataaaaactggtaagtgacttgttaaatcacttttcgagaacataaactcaaagctaaaactttctctatcgattgatagcgtgacaataccctaaacatcgataaaaggctgattaatgaaacttggggaaaaatactccaaaaaatagcaagttgtatcttaaaaaacgacgggctatttttcctgggtccctgcctgctaaaaatgatagaccacgatctgtcgttttctattacaaattttccaaaattctctttctcaacacaaaagcccaaaaacttttataaacctctagaatacatatttcagccataactaacttaattcaaccaataaattcatcatcaaagctcagaatcagcttctaccattcaaggaccaagtttgagcttaaaagctcaaactttgtccaaactcattaataggcaataaaacccacttaaaacaacacaaacaacttagaattagcatcaggattaaccctaaacactttaagctcatgtagaaactaaactctcaaaactacaagaaaaacctagctttttcacttagaaaacaaagagaaaaaggagtagaagcttaccttgggttattcttttactaactactcaaattcttgctacaagcactcaatattttggtctgaattagaagagaaaaactgattttctctttggttctatagtggccaaaggtgaaaagtaagagaatgagataggttttgatttttcttatcgttggataagtataacttatctaatttaattcaccttatgatgtaattgataaacttaggaattaccaaacactcccttcaaaattaaataataacaatcgagagtaaaatgacaattttacttttacttaaccataaagtaatccaaataatcttagagtaaaatagtctaaaattacaatcctgaatactcttgacatttcaatgtctaactatcatatgccctgctacttaataggggtgagcataaaatctgaaaaactgaaaaaaaaaaaccgttcaaaccgacttaccgaacaccattggaaccgaaaccgacaaaaccgaaaatcgaaaaaaccgttaacagtttaaaccgccattgaacgatcgatttttttttttgtaataaaccgaccgaaaaaactgaaaccgaccgttatacat

SEQ ID NO: 38301 - DNA, 2653 bp, Cannabis sativa
atttacactgacatgataatcatcgatagagcttacttacaccttggataagtattatgtcatttctaggatattggaaatgtatgctaggatcagatgtttggccgcccactaagttgatttaagccatttttttaatcttttctttaattcatataattaaatcctaaaccatagaaaaaatactataaaaagaatatgaagctctcattttcatccaactataaaaatgtagttttcattctctatcagactagtagtaaatgagagacacattcatagtgatttcgacccttcttgtttttcatcattaaattcaagcctttagtgatagaataccatgcccactcaaagcaagtcaagtactcaatcatagtgtagaagacgatggttaaccaaactgagagagagagagagagagatccaggttcagatcttgataatgctctcctacagaaaggaatcaagggcttgaaatctgaacgaaatgagacattatattatgttgccatcaatctaaggttttctaacctttatatgtgtttatttaatcatattaggaaattcatatttaaaatgttagattataaattctaattaacatacatgttagtaaatctagatcctggtaaaataagttccaaccgatacaatctcccaccatatttgggcatcatctctcaacatgtttacataacatcaaactcaatcattctcctcaacccgcataaagtcaaagatagaggtaatcatactcatcaagtgctctgcctttagtggatctaggccagactcaaacacaagtaggttttgtttccacacttactcataaataaggtccttacggtctcctatattcttttgcactacctaaggtgccaaaggtgccaaaataggtctaggacaagcctatttctgtctcgattcaagaatatgctccacttgctatctaactgtatcttgcatagcagcaaaaacttgttcccaattctgaggcactggtggattctctttctcaccacctagtttgagcccatcccgcggtttaatcatcttcatcgtcacggttgcatgacttattgcacctgtgatctccaagttccaaccatttagaactcaaatatatatcaatgctaataagcatatcccacacatataatcatatcataattatactaaattacttttctagcatgcttcataaaaaatagaacaaaaaaaaaatacaaaacacttaatatatcacgagttgacctttcttcataccaaatgtacatatttgacaagtttttaggacctttaaatcatggctgctctaatatcatgttgtaacaccctaatacctagggacgcacatgtgttgttttaaagcatatttttgtaatagtagattagtgatttaatcaaatctgtgataataataaaaatttcacaaaaattaaaacatagaaatgaacaagatgacatcactaaaaatttgattccgggatctcctattacaaaagtttttcaatacacatcaggtacaactcaaaacaacacctaaaaccttagccatgaaagtcgagtaagtcgatatgtactttttctggagaagattgtcatctaatggctggcctagtttcctcttgcctttacctgcacctcaaaacacctgtgactcacaaagagttagcaaaaaaataattaacatcataaatcaaatagatcatcatccatgttaagacaagaataaatcttaaaatgattatcataagtatacaacaatcaataaggaagaactaattgcctcatgacgcaagccataaacactaatttaaaggataaatactctggatgcaatctagtaaaacatccctaatagctaaacttgtattcaaatattaatttcgttgtcaaaccagacaacccatatacgtagccaccagtatcccccatatgtcattgtcgttatctaatgagataatcgacaagtaagaaacctaacaatggttttagtttggggtcatgactcttctttcatagcggtcatgtgtgctttctcattttcataacaataatgatattctcattggtttcataacagtaatgactatctcattagtttcataatggtaacgaccatcaccttactttcataatgataatgactgttttgttgttttcataagagtaaagcctgtctcattactttcatattcaacaagttttaaaacaatcttcatcgtatcttgacatgctatgtggtgcagatgtacttttcttacctcgagttttgattcagaggtgtcgactgacatgaatggagaaagattaacgatcctgggccctatgtcacaacaacaaaaaagaacgattaatcagttgacctaactcgttcaaggtccttaattcatcacaataagtccccctatacgtcactagggtaccaataccctaaacattgagaaaacatgaaaatgggggttctaaacaccaacaaaatggtaagccgattagaaaacagaaagtcctttttagtggttcatggcagggaaaaatggtagaccatttttctaaaaatggtctctcattttctataggaaacgtgaaatcccgagttttaacttcttaaaatcccacaaaaacctaacaaattgattccaaagttcat

SEQ ID NO: 38302 - DNA, 2044 bp, Cannabis sativa
aataatttttatagagtatcgctagccaattgcaagttgacacatttagaaggtgctaggcaccactagtgcccaatagcaatgctctttatataagttatagatgaatatataaatatatgattataatattattatttattattttatgtgcaggaagcggtgaatatatctttaaagaatcttcattcttatccctttgttcaaagaggagttgaagagaaaacaataacacttagaggtggatactacgactttgtgggtggatcttttaagctatgggaacttgagtagcaaaatattaattatgatttcaaattgcatttaataatatctattttgtcacagtaagttatttgtttcataattaataatgtgtgtttaattgtctgtattgtgttgcttattaattacttaagcaacatcttttttatttattatattccagctaatagaataataataattaaaataaaaatgttcatctttgtttgatattcttttttactacaatatttttgagaaattattccatatactatttttttaaccttttttttttttttttttccaaatatacgatttggatttctaaaatgattgcaacgctagtgcaataggagtttctgtacgactttttattataattaataagattgcaatgctagttgcaataaaatttctatgtagaattccgtaaaaatgctcaaatagctccaatatttttttagaaaaatttactacataaatgctcattttatttaatttgttgctattaaatactcaaaacttaaaaataacagtaaaaatacccaaaactctatttcatattttcttaattataagtactctttttaatagatttgttaaatatttttagaatttcacgtgttaatctgtaattagtttaatctaaaaagttaccaaaaaatatttataataacagtaataaaattaaattagaaaattaatttgggattttttctattttaagctaaaattacttaaaataaacttttatactactataataaaaaatagatatttataggatttaatgtttactaaaatactatttttaaaatttcttatttacaaaaatacagtagagacaaaaaaaataaaattgatagtgattaggcgagcaagtgaaagacacgctcgacttgggaaaagtgctcaaacaaattaatacatgcaaattattaatctgccacgtgtaaaattaattgacaagatctattatttaatttcattggttttgacaaacactatggagactacttctataaaaaagaattaattttataaaaatgtacataaaaaatatattttatttaaattgagataaaatgtagtgtgagggacttttttgtttttaaaagattggtgtcaaaaactttattcaccatagattttattaaatactttttattttataacatgcaaaaaataatattatattcaattttttttttataaattggattgaaattacttttcatgtatactattgttactattatattattattttgatatgtatttttgtacgatgattataattaaataaattaattaaaatagaataaaaaaaatagtaatcataatatagtcatatatatatatatataatttaagaggattattttagaaatacccaaaaacaacaaaaattttacgtttttacaattttttttttacattttatcgacttttttttcccttacaaactgttgtttttaggttgttctagaaaagaccgttgtttacaaattgtgaaaatatagcataattttacagcaacatgaaaacaacgttgttttccctctaaaaaattacaaattcgtaaatataaaaaaaaaaaaaaatcgtaaacttttttgttgcttttttgtagttgttttattgttgttttacacagttatttttatgttgttgtcttagtgttgaataattattttgtagttgctttagttgttcttttttttgttttactgaacatagtatttattatagttgtcatgaggttatttttttagtt

SEQ ID NO: 38303 - DNA, 3768 bp, Cannabis sativa
ttttagatctagtattttttggatgagctcggctccatctaatattttgattcggtatgtattggattgaattaaatccatcaaatctaaaaagaaaaaaaatatatagcaaatttttaatgttaatctttatatattacttataaaaatataaaatttaattactattaattaaaaatactaattagttcgattgaatgctagatgatttggatatttaaatactctattcaacatctgatctgatttaattagatatttaaaaatgacatctaatctgatccgatcacaattaaatatctaatatttaacagatcgatttatgcacagaaagtaacccacataattcaatttacacttattttatttattttaaaatttataaatatattattaatattttaaaataattaaacaaaactcacacaaatatttttcaaaactttatctatcaaatgtatatatttatttgaaaattgaaaatatatatatatatttatatatataaaaaaggataatctaaagttattaaccaatttttcctttctacatacaattttttattttgttattttttgtttatttaaattaatttcttgttaaatacatagaacaacaacttatttaatttgttgttggaaaatttaagagaaatattttatgttttatatttaagtgatcttagtaatgtgaaaaaaataataattaatattaaaaaataatcaatccaaaataactaattcaattcgtactattacagattaaattggatttgaagtatcctaatgaatggattgaatcctgttgattcaaaagatggtcaattgacgtggagtcaagtaaacgataataaaaacaataaattaaacaacagcaaagacgataataataacaacactaaatttttatagaggttcaaccataatttctacggtaataatttactcatcttttagttgtattatctttagttctacactcaagattacaagaatagtttaagaaactcatgagggcaaagagaattacaaataatttctgcagaattttctacctacaaatgaaactgtgaaccccttccaaggagatggaaggctcatacttgtaatgaaaaaggaatcaatcaccattttatcgtctcaatctgcaccctaatctgtatccttaatcggtgagatttaattgatttagattctctagtgatctttagcatgaaatgaagatctcgacttggacttcacaatcccagaggggagctcaggtgtatgtcgctcagggtatacttgtactcctaaatcaatgttttgttgtcttatttccttctttcaaggcatctcttgtctttcgagtaaaccctatgcacaagagttgttctactgggttacgagtgtattaagataattcttcctctataacctgatggtatactgcctaggtgtaaacctggaaagggaatcttgatgttattaaaatacttagttaaattcccatgcttaatcttctttcaaaggtcttgaatcgttgagtgcgaaagataactcgatatcaaaaaattgcaccctaaaatctactctggaagcatgagcatgccacccaagttataaagccacatacttgtgtggaatagtgcatgctgctcaggtgtgtactctccaccttggcaccccgaacttcacttttcttcctgcggagcgtatcataccacttttttgcataaggtgaattggaattgacgaattgcaccccaaaaactagttgggagggaaaggcatgtcgctcagattttggaatactacctgggcggcatagtgtatgctgcccacggtttgaagctccaacttaagcaccagagacttcactttttcttcccacggagcatattagaccacttttctgcgaaaggtgacttggaattgacaaattgcatcttgaaaacgacttgagaggcaaaggcttgtcacccagggtttgaattaccacctaggcgtcgtagtttatgttgctcacggtttgaagctcctactttggcgacatagcccagactgtgcaggttattcgtcctgagcttctcagattttgcttcttgtcttttgcggggtgcacttcgtagtcctccttcatgatgatgtgtcctctctttagttacgtgtcacaccacttagataaaatattgagtaacatattcaaaatatgaaatctgcacttagtacgaattaaatgtgttataagcaaaataatatgaattggatcacataaacacccttaagtaacattataaatcaccaaatccctatactttgtaaactagtatttttatatgataatatcgataattatgaataattttataaaggctaattaagattgttttccatgattttttaagccgttaaaatttttcgttgaattattgagattgttaaatttaagaatttttgtctaactctgttcaattttactaatgggaagcctagcatgaatggaagttcagataacacgatttgactcatattaaagttcggaggaacaatttagtagatatcaaaatttgagagtacgatttagtccataaagaaattattagtaaataattgaagcttataaaaatacacgatttaatacacaatttttatggttttaaataattcaaaaataaattttacataatgcatccagagtgtttccaaaacaatttttttttgtttctttgacaaaataaaaaagtgtacagagtttctgaatgtcgtgttctttctgtagatagtggtcatagtagatactgaggtgtagttcggcccattttagctttattgggccaaaaactgccaaatattgggccgtacatgtgtgagatattacaagtccaagtccaaagatcatattccaatcacaaccttgctcagaatcgaccagtaaccgaagaagattcacgaaaaagtcgttcagagcatcgaagggaaaatggcggtgatggagaggttgaagatgttcgtagttcaagagcctgtggtcgctgcttcttgcctaattgctggttttggtactcgcttctgaaatacttcttcttttttgtctccattgcgtttctatttgttttaatttcttggtaatagagaactaaaattttggaaacctaatatttattttgtgtatgaaataatgtatttttgtttctgtagatttttgtgcaatagtttattaggaagaaggcgaattttgaggttttctcaagtttgattcaataataggaataaccccgtttgtgttcataaatcgtttttgcttgaactgataataatcttagtattttgagtctgacctgattgcttgcaagtagacttaatcgtgaatggtttatttgctgagtaaacattacttcagtaccccttgggatcgaacttaactgggaatttattattttttccattgacgcatgtggtttgcttgaacttgaggttaataatttgccttatggtgtggataatggcgatcgaaattcattacatttggaaatctattggtcattttaatatttatgttgttcttgaaacttataagtgctttattaatatacattaatacgggatgcattatttaatctgggtcatcacagaaataattttatcgttaaactgacatgatgagaaaggaaaggtgagaactgattgtctgaagttgtgaggattgagtttgttgaggttgaagagatcagacttttttagtatacgaggtctcacgctattatcaaggaagcatgaaaatattaga

SEQ ID NO: 38304 - DNA, 3198 bp, Cannabis sativa
attattattattataccaaactttgaaaacaaaagattaacaaattaaaaagacctttaaaacttaatttacaagttacaattttataattaattcatggtgaaaatgacatgagtgttaggaaactattaaaatattagatatcaaaatcaaattacacatgacataatctagaaagcaatagttaggagattaatttaattttgatgattgagaattaatagtcaatttaatttaattttttaataatgagaaagaaccaggaaattattaaactaattcaaacattttttttcatatataaaatattattatatattatccatacaataattttgttttacatctttacaattattccttgtgaatagaactttagaagaagacataaattttacataattaaactttattaaaatttacacagtattacttgtgattcttatttttttccgaaatcgtactatttaagagggttttctttcacttgagttggttgccattatcttatggctaatttttcaatttaataaaagctaatattttatttcaaaaaataaaaataaaaattacatgtttaataagtaattttcttaaatatatattaattataatgagttaattttttaatacatattattattttatattgacacaaagattgactgaacggccgtacaactatgcaattcgaattgcaaatttcaatgaagaagaaaacttttttacataaatagttggtacatgaagtagctatggctaatgggtttattagtcaagactattaggttggctcttgactaggcaaaattagaagatttaaatattattacaacataaatatcaagagaaaactatctaactaaattttaaaatattaaattaattactaaaggaaaggaagtcaaatccccaaatttatattggctagctactcaaggttgattagtaatagtattattgccttattcatgatataagtatataaaaattagcattcactccactaattatgatcataggattaaatttcatttttagagctaaaaattatatggtcaattaattaatgatattggattgcatttaacttattactcaaataaattatatatgcaaaattgtatcataattcactagctatcacatgttatacatgttatttcaacaagaatattagtattttttatattgctaatataattaaaaaatctaatcattaaaaaaatttaactatattagcaaataattttgatataaaaaatcttattcaaaattaatataataatatatatatttttttttcacaaactagaaaagagatcatgtggtgttgatctcttctccatcatttcagtcttagacaattaaaagaccacaagccgactatagggaattcattcctcagtattcctccttgattattaggttatcaacgggaatagagcttcatatagaaggttaaggggtaatgtttagttcccgaaaattttcatctcattaaaaatgacactgctataataggcttactttttaaagaagcctatatatataatcgctctcaagaggagttttggtaaatttgaagtataagaatattattatatagtcacatgaattatacatgatatatctagtatgttatattctaaaatctcataaataaatgaatgtgaaacaataaatttaatagtataatatatattttttttgttaatagattgaagatttatattttaatactttgttcttgctttattttttatttttttaaaaaaatacttaaaatccatgctctcttttctcatgtttgtatgctaataattaaccaaaacgaaaattaaacaaggaaaaaatttggaaattagaataaccacaaataacaatggtgttttacatatgaataataaaagtttaatttaattatcaaaagtagtagtaaaaatagtcaatagtcaaaaatttaaaggtgaaaattaaccaaccaataattaaagggagtgttaagtcaacaacagattaataagaagaataatatacctatagtttataaagccaacacagatgaaaattattatatttatatatttaatttcttactgcaaatcatgccaaaccaatatctttcattagtaaataataatagtataaagtcctaatttaccttttaaaaaaaattataattaaagtcctaacgattcacaaggatttgactttttacaaatttgtattttgtggtagtgattatttaactgttaagcaaaaaatatctaaaaaaagttatagacaagaaatcaaaaatattgttgacattaaaattataatcgaaaattaattagtttgttagtacagaagttataaattgaaaattaattagtggaggcttgaatttttttttcaatatatatattttgaattgtaagtattcaaataattaatttgagtgtttatataggttgacttataatattgataaaattgagtagaattcaaataattaataaccacgttccttttttttttcttgtcaaataagtattaaaacaccccaaaaattttcttcattttatttgcttattatttttcaaaaaagaaaaataaagtttcttaaaaattatgctgcttttatttatttattcatttaaagagacatatataatggaatattataattagacaaagacattttaagttgataaacatgaattgaccaataagttcactttttatatgttaatattgacatctctcattgtcaggacttggcacttgttacataaagatagtttaattaattaattgcattaaaaaatatgaaaataatgtggtaatttattaattattttccaaaaaaaattatgttaattaatatcataaaaaattcaataataacgccattggttcctaaacaccacgcaagtaaatgtataataaaattatgattttaattaggagatttccactcccaattagggatgcaaatggggtagaaattggaggggagtgctttctttattttccatttgtgttaagaattttaatttccactttatccctgcttattttttttttttatcgggaatgaaattaagtggggatgggaccgggaacccctaatggggcaagaggagcggaaaatgccctaatataaaaataaagtttatattaaaaaactaaaagtataaaaatattaaaata

SEQ ID NO: 38305 - DNA, 2053 bp, Cannabis sativa
tcatgccatttggtctgacaaatgcgccgtcaactttccaagcagccatgaattaagcctttaggccacttttaagaggatgcattattgtatttttttgatgatattcttgtctatagctccaatgaggatgcacatgtagaacacttgaggcaagtactacagttgctacgacaacacaaattctttgcaaaggcaagtaagtgcagttttttcagcacacggttgagtatttgggacatttggtatcttctcatggggttcaagccgatccttcgaatattacagccatgactcaatggccgcaaccacaatctatgaaacaactacatggtttccttagtttaacagggtattatcgccgttttatgcaacattatgctaccattgctgcccctttgacggagctgttgaaaaaggataattttcaatggtcacttgctaaagccacggcgtttgaaaaactcaaaaagtctatgactgagactcatgttctcaaacttcctgactttactaaagaatttgttgtagagacactactacaaaaatgatttttctcaatatttttaaacattcgtttaaagtattcccgtcggtttctataatcatcgcctatacgaccgtcgtaaaattggcaaaataggcgacgattaaaaaccgtcgctaatgtagacttctcgacggtttaaaactgtcgcctataacaaggcgatggttttaaaccgtgccctataccgtggcctatagtatagggcacggtttaaaacataacattataagatcatcaacaaaacataagctaataatctttaatcttttacacaaagggttgaaccaaaagtcttggtgttgtgctccaagttgaagaagtctagtaagatactccacgactagaacaaagagcatgggtgagatatgatctccttgcctcagcacttttgcacctttaaagtctccttgaattctcccattaagtattagagtataagaggtaccttttagacaaatcatcacccatttaatgaagcgagaggcaaagtacaaggatgtcatgaacttttccaaaaaacactaatccagcgtatcgtacgctttacttaaatcaatgtttacaggacaatgaggggaggcattcttcctattgtaacttttgcttaagtcctgaaaaattagaatgttatgagccaaaactatattcttgataaaaaatactttggttttgactaattaaacaaggaagcatttcagacaacctgctacaaagaatttcagaaatgcatttgtacaacatattacaacaggcaatgggatagtattatacaaccctcgaaggatgatcagtcttaggcactagagcaattgttggtatgttaagctgtgtaggaatgttttaaaaaattcaagaatagaacaagctatttaatcacccaattctaaccacatttgcttgtaaaaagccgagccatagccatctgaaccaggactcttattgtcaaggatgctgaaaagagatttcttcacatcctcctatgtaaaacgtttcatcagccctaactgtctatccaagtcaagtttaggccccatatttaataattcagcattgaggctaaaagttgttgtacttctactgcccatataccctttgaaatggttaagaaagtgatgaaccacttcaggaaagtcctcaatcacaaagccttgttcattaacatacgaaacaattcgattttcttcccttatcttcttgatactagcatgaaagaatttcatattctcatctttgtgatgtaaccaagttattttgcttctttgaacaagataactatgatattatttagcatgaaaatcaaactttgaagaggctaacctctcaacttcaagcaaatcagcattcccaggcttcaattaagccaacaattgagaagtttgaaactctcccttagtcatatgatagttgagctccacatttcccacttcatacctattattcttgagaacatgcttaagccacatcatcttttttatgattatgttcatgttggaaattatttta

SEQ ID NO: 38306 - DNA, 2702 bp, Cannabis sativa
actcccaaccatcatatcttacaagagttgtaccagaaatgcaattctttgaaactaatcaatcaacgtaagctttcacaataccagtagccacaactgtttaagttaaatgttcttgttgttttgtggttttaccaattctgtttgtgttatttattcacttgctgaggctgtaattaagatgatgaatgatgattacagggaaattttctatatggatgaggttaattatgactaaatttagtgtatagagatttgatttactataacttcagactcgattgtatttaatgaataaatgttttggagaagaaaaaccaatcatataaactacaaaggtcgccatggcccaagttacaacaacataagaacagttgacatatacattcactctgctgcttagtgcttatttgataacatctttgaaaaaacaaaagtcagaaaaacatgacacaatcttaaaaacaagaataacaatgaaaagtcttatgacactgcaatatcaaggtgcagaagatttaagggcatattctctgatatacttgaggaaagcaacaagcttatcatgaggagggagtgcctctttcaccaaaggaatatcacccagagctgttatccatgctgataccagtggaatcttctcatgatcgatcacatttatgccaaggacttcttcttggacctttctacctccaaacatacacaccataaccaaatctacaagtcccacgcttgcggcatcgacttgtgcacaatcaggatagaagcttttcaagccctcttcaagtacctctagtttatgggacacttccatgaaagcgttctgttgtgcttctccttgaatgcttttgagtgcgttaagcatactcccaaacagctgcatgtgtgtgccaaacataacaaaaaagccttaaatatctttcatttcacttaaacatcaaaatcaatataactcattatatgatgatctatcatcctaattctcacctgatcaagataattggcccagaatctgacttgggctcttttgtatggatcctcaggcaagagtttaggaccagttttccatgtttcatcaatgtattcaacgatgacaagtgactctgatagggctttaccattgtggacaagtacaggaaccttcttgtaaacagggttatatttgattagttctgagcttttgctgggtaaattttcctccacatattcatagggtatgcccttaagaataagggccagttccaccctttttgcataaggacttgcccaaaacccatgtagtgtcaccttgtcttctcctgccatatttttgtgtggaaatgttttgatgactagatctagatggtgagtgtgtttggctagcaggtagtagcttaatatatagatgcacacacaaaattttaacttgtttctgaagcccttcttttttccttggttttttattaaaaataatgatctgtagatcttatttgcaatgtgaatacattctggttgattgatccaattaacatgttgataagctcattgacttgatcagagaagtttgactttttcttcatcttcctcgaataagccataagccatgatccaactctattattttctctagccttagtttagttgaagagacttggccactggggtagaaagtactattattaattaagaaaaaaaaaagtattattaatattgttgcactaataaaacaatacccacaacaataaaaaaaaaaagggagattctataatgtgactgacacattctttttctgcagtgatacgatacagtagcaaacattgatcgcacattacatatgcaagaaataccaacgtaatttgggctttcaaccaccaaatcgatatttctaaattaaattatttgaaaaagaaaaaaaataaaatcaaattaaaattgtcacgttaatatgtcagttgggtcagaatttgtcagatgggtcagaataaatgatgtcaggcactctttgcaccctctttttcatcgtatcttcttcacattttaccctcctttccatccttcaattttcctctgttcttttattcctttttttctatggtctcttcttcattggttttagaagcaatactttctttattactcattgatattttgtgttatgaatcggagttaaatttaacactataaaatcaaaatctaattattttttggccgattgtccatttcgtttctatgaatattgttaagaaaaaatttcacatttagaatattaaaaataaatacaaaacacaatttcacctatgctaaatttatagcataagagtttatttgtttagactcgacccatccaatattataagaataatctcttaattacaattcttttgtttaaaggaaacaccctttgattccaattacgatgatactaaataattgaggtaaactttggaaaaattggagtcagtttggaattgctattgaactcggtaattttgaataactgagctgcctatatactttctatgtgaaggatcaagtcacttgtagtttgaaatgaggtagtttaggatttgaatagaagaattccggtatatgaccacttttaggaattctttgctctttgaaaacttagaaaaaaattcctaggtgtatggctttttatacaattttgaaatttgtgttttatgttattttacggtattggcgattgcacttagtcttagcaa

SEQ ID NO: 38307 - DNA, 3020 bp, Cannabis sativa
aaatatatctagagaaatcatcaataaaagtcacaaaccatcttttacctccaagtgaagcattcttggaaggtccccaaacgactgtgtagatataatccagagttcccttagtgcgaagaacaataatgtcgaacttgacccttgttttctttcccagcacacaatgctcaccgaaatgaagctttttgttcttaacacctttcagtagatcatgcttcactaagccttgcaaagccttgtctctagcatgccctacgcacatgtgccaaaggcgggaagagtcagatgtcttttcttcaaaaattgtacagataactgctcttcttgtaatagtactcccatttaggaagtataaatttgccttttgagtacctttcatcgctacaaatgcacctcgtacaacttttaagtttccatcttctaatgttatcttgtaacaatcaaaatcaagaacacctaaataaataagatttttctttagatcagtaatgtacctcacattcgtaagtactttgattgtaccatcgtgcatctttagtcatattgttccaatcccttttgtctgacaagcattgtcgtttcccattagcacaactccaccattaagttcttcaaaactagagaaccaatgtctatttggacacatatgatagaacttcaaaatcaagaatccatctgtctgaatacaattttaatgaaactgaaaaggctggatcttctttgatgtcgaccttctgtgcaacatttgcaattgacttgtccttgtttggacaatctttcttccactgccctttctgatgatagtaggcacactcatcttttgcaaaatttcttcttgatgactcccctctagtctttgatctagatcgcccctattattcgctcaacctgatttcctattatatccaatgcttctggtgttgagtctctacgatcatgttgatccttctaccgatactcattatttacgaaagcgttagaaacacctataaacttaacctcatctttaccatataacggggttatggttaaatgttcatagcttttaggtaatgaatttagcaacaataaagctttatcttcatcattaattttaacatcttaattttgcaaatctgccaaaatttgttaaatttatctaaatgttcaatcataggggtacctttcttgaactagaaacgaaaaagtttcttcttaaggtagagacgattctctacactttttttcatgtacttgtcctttagctttttccaaaggactacagctacactttctttcatgaaaaagtactttcgatcttttcccagacacagatagattgcgccagaagcttaacaattgataaaattccaatcttcaaggtaatattaaatccttctcaaaacaatagatctaatactccacattaccacatgccaaagttatttgtacagtcaaattcctccacctcaaacttttcaattgacaacattgttcttcccatagagcctcttgacttgctagaattttttacatcagcttgtgcatctttttaagatctctgttcttagccataagtgcaagcaaataacaaacttttcagcttatgactttaggcaattttttctaaaatttcaatgacttagtttaaaaatgaatgtctcggttgaatttagaatagtccaaatagctaggaataagtttaactcaattaaaaataggtgaaaatgggctgactcaatcccaaaatcacaatttgactgagttaactcggttgctggcagcaacactctaacagctactggcgagcgtcagacctccaattgaggtggttcttacggtgtttaattcatcttgtcaagagcttcaatctaatatatatatataatataattatatttggctctgagactaatttattgtgcgtagaagtaataaataacaaaaaataacgatgaatatatatcagagcagtaaacaataaaacacacagaattatgtgatttgacaatttgcctactccacagaagtcaagtgatattattgatctgaatagaaaatataaagaatacagataacaaattttctactaataatatctctcaggtattttctaatgtatttcccaaactcaccaaagtctttcccaaagcctaaagtctcatagatcaatcatcgcaattgtacaaagttgtacccgaatagttgcttttaattgagatacaaatgctcttctaaaagctccatatttttagaagaaaaacctcaactaccaatcatatgtaataaatgaggtagctcattttttaaccataaataataagtgagtgagcatacttcttgataaataacaaatagtaagtcccaaaactcttaaaatttaaaccatatcttcgcaattccaaaacaagttgacttttgagccaaatccaaccataaatatatacactacaagaataatggtttataccaacgccactattaccaacgccaaaaaatcctcattaaaaatgatagtatcaataacgacacttacctgtcgttgggaaaattattcatttttttttaaaaaaaaaatacttcatcaataacaacatttccttcaataacgacaatgttgttattgaaaaaacttcaatagcgacattgtcgttgggagtttttttaatcattttttgaaaaatacctgttgggaaggcggcaaaattccccccattttcaactaccaacgacaatgtcgttggtggcagactgacacgttgcagtgatcagtctgccacaaacgatattgtcgttagtggctgtcgttggggactggcataatatataaaaaataaaataagtaaaaccatttcatttaacacaatcctttagccaaaaggaaaccctaagcctccgcctgaagcttcctcagccccttcaaccttcaaaaaacccatttcctccgcctgaagcttcgtcagcccaccaccttcctccgcctgaagcttcgtcagcccaccaccttcctccgcctgaagcttcgtcagcccaccacc

SEQ ID NO: 38308 - DNA, 2837 bp, Cannabis sativa
ttttttttttttttttgagaggtacgagttgtttacatcctctcttatgagtgctctaaagtatcctagaaaaaaatctaatgaaaaataacataatttggaaaatctacccaaaaataataataataaaaaaaatatcatttggaattttttttaaataataaaagtagaaacaaaatatgaatttatagatgagtggaatttttaaaaatatatataagtggaatttttaaaaatatatataagtggaatttttaaaaatatatatttttatttttatgttttatttacaattagtttaaattagcaagtcaattacatacacagattttatattgttcacgacataaatattagatcaaaaaattagtaagtcaattacatataaatttattaagaaaaatgctaataaactaggcgttcaatttacatataattttattatctaatttgactaagtataatcttaaattagactacaaaaataataactaatattagtcacattttaaacaatgcactccataatttgactaagtataatcttaaattagactacaaaattgttttggttggactaccaaattactaatttcttagtaatgtttataactgtattgctatttctttttaaagaaaaatatatattaacacaataaatcatgtttcccaatttacttatttttagattagtgaaatgttaataaatttcaactcaagaattcaaactacgtgacatggttgcttggctttgcaagatttaaaaattaagcataagtgaaataaaaaactaataacaaatataacggtataaaaacgtaagtcaaactaacatacgtaacatagttaaaacgtaaataaaactaaaatttaattacaaaaataacggtataaaatcgtaagtcaaaccgaaaattaataacttataatagttacaaagaaaaaacacaagattcatgatgtataaggatttaagaattcaaatttggacatttcaattatatttattttgtaatttgtaattgtaactttaattggattataaactagatatgtatgaacttacttctctttttcaacctaatgttaatttctatttcaaagtacacgttggaagaattcttagccgttagtcatacattaaattaaatgaaataatttaaacaaataaaaataaaaaatcctaaaggataggatagaatttatttttcaaaagtagatgtggaaagttttatttatttatttgaaatcacgtggaaagttaatttgaaaaataggatcttttttcaaggtttgaaaaatcatcgagaataataggttagaatttatttttgaataatttgtggtataaatatttaaatttaactcccgttataaataaatacttaaatttaatttttaacggtaataatactcaatttagtgttgagtaaattaccacgtgtcaatctttaattggtcaaagtcgttaaatttttatttttttaaaaaataatttaaatatactaataaaaactaacacgtagataatgatttaatatttaacatgtatattagaaatataatttaagtattattacccaaaaattaaacttagatatttatttacaatagaaattaattttaggtatttatgttgcaaattactctatatttttcaagtaaaaatagaaagttaattaaaaaaaagtaggatttttttcattattgatgtgccctttattttttaatttttattattctttttttattttccgatgtaatattaatgtgattttaaatttaaatctaatgcaattcaaaaaagaatccgtttattttctcttgtaagagtttcaaagctaatatatgaagaagaaactagattgtataccaactttattttatatgttttaatttttatttttattttcatattttttaaaatatatcaacttttataaatgatgtctccattatagctcataagttaatataaattatgaaaaatatggatccactcaaaaaaaaaaataagtacattttaataaaatataatataagagtatttttaattaataattatagaagaaaaaaaatgcattcttcaatttatcacatatagattaatgtcgatcctgcaatatttcatcaagacaactcgtatggctacgatttagtggcgagagatcatttgggtaagttcattgaggacaaaagatgtcaccatgatggtttttaccctgctgaggtgctattatttggatcaagaacaaaaactggcataatgtagagcttgaatctggcagtctgttatttgtacaaacaatcaaaagtaaccaaaaaatgtctttcacttttggctagggtgaaaatcggtcggttatagtcgggtgttacaattttataaccgaccggtctacgaaaatcgtaaccgaccgtttagaaattataaccgtataaaaccgactgtatggtttttggtgatttttggcgattttattgcggtttttgtagttttttggtttaaccatttttttatttcaaaaatcgaaactgaccgccatgtcaaaaaaaccaaaacagaaaccgactgccaaattcggtgatgacgtggaaccaaaaatttgattacggtctggtcggtttcggtttatcgatttttatgaacacccctacttttggcttgattattcagaattgtcattatttttttatcttccctacatgatataagattacgttttattaagcgatcaacaaatcaagttgttcatgctattgctagacatgttcaaattaggggtgtacgtcggtcggtttagtcgggttatagcatatttttatcaacccaatat

SEQ ID NO: 38309 - DNA, 5485 bp, Cannabis sativa
  modified_base (57)..(60): a, c, t, g, unknown or other
gtattagaagttcatatttaggatgttaataacatacttgttaataaatctagatcnnnntaaaataattccaacagttctgaccccactgcatctggatctgtagctggaaacaaaggttcacacactggtaacaacaatggggcatttgcttttgtggccacacctgaaatggttgaagatggagcttggtacatggacccaggaactagcagcaacatcactgctgacaccaacaatatgactcagaaaactgattacaactgtgaggatactcttactgtgggaaatggtaatctgtaaattactcatgttggtaaaagctccttactcagtattgataacaaccacttagttttgaataatgtcctacatgttccagatattactaagagtttgctaagtatttctcaactgacatctgaaaataatgtgtttgttgaattctttgccaaatgttgttttgtgaaggacctgaacacaaagaaggtgattctccaagggactcttagagatggattgtatcaagttgctagccaacaaggaagtttgagtactggttcctctagtttttctaattctatgtctgtgaaaccgtttactggtgtagtgtctaaatcaagtgatcagcatgttgctgaacacagttttcgttccctaaaggataagtggcacaagagattgggccacccttccagacgtgtcttgagtcaagtgttaagcactcttaatgtaaaatatgttgttaatgaaaaagaacatttctgtgaagcttgccaatatggtaaatcgcatgccttacctttttaataccaactttgatcaagcccaaaatatactagatttaatacacacagacctatggggtcctgcaccagtcacatctaacacaaattacaaattatatattcattttgttgatgatcacactctctacacttggatttaccccttaaaaccaaaaatgaggctctttcagcctttgttcaattcaaaaggctggtggaaaatcagtttgagaggaaaatcaaggctctcaaaactgattggggagatgaatttcagccttttagtgacggtggtattcaaaatggaatagactttcaacattcttgcccccatacctctgctcaaaatggtcgagcagagaggaaacataggcatattgttgagatgtgtttgacacttcttgcacaagctcaaatgcctttaaaattctagtgggatgcttttcaaacggctgtctacttaataaatagacttcctacacttgttgtgcaaaatcagtcaccttatgaagttgtttacaaaaagaaacttgattataaatttctcaaggtctttggagttgcttgctatccttgcattagacactatcaaactcacaagtttcaattccactctattaaatgtgtaaatttagggtatagtgattcccataaaggctataaatgtcttagttccacaggaagattgtatatttctagaaatgtaatattcaatgaggaagattttccatttaagacaggttttctaaacaactatcaatctgaacaagaagtctatgtaagtgtccctttctggtcagccttatttcagtcacagaaacctttcttttcatcaaactcacaacaacctgaggattgagcaacaacatctcaagttcctgaagaagctactgcaatacaatcaggttctcatgatcaaaaccaggtatcacaaactgatatatctttagattcttctggttctgttgacatgactactgctagttttcagcacagtccaggcagtcatactttggacagaagtaaatcaaatagttcatagttgtaaggtgacattcctactgaagtttcagatcaggttgctgctcccaaaatctcatctcatccgatggtataaccagatcgaaggctggaatattcaagcctaaggtctacactggccaaacaaaatggagttgcaatgatgaagaaccaactacggttgaagaagctcttagacacagtggctggaatggagctatgtcaaccgaaatggtcgcacttaaaagaaagggaacttggattctggtgccaagagttgctggaatgaatgttatagggaacaaatgggtgtacaatgtgaagagaaatgctgataattcttttcagatgtataaagcgagactagttgccaagggattcaagcaaaggtcgggaattgattttggagaaacctacagccctgttataaaagcttccacttatattgactattgcagtttcgagatcatgggagattagacaacttgacattaataatgcttttcttaatggcaagttggaagaagatatttttatggaacaacctcaagggtttgtggatgcatccaaactagattatgtttgcaaactcacaaaatccctttatggattgaaacaagctccaagagcttggtatgacaggctcaaaaatactcttgttaactggcatttcaagaactcaaaggctgattcctccttattcttttacaaagcatctggtttggttgttatggtgctcatatacgtggatgatatcattgtgacaagcaacaatactggtaagctaaatcagtttattaacaaagtgcatactatgtttgccttgaaggatctgggtcccctaattatttccttggtattgaagttcacagagatgagaccggtttgtatctaaaccaaggaaaatatgtgaaagaactcctactcaggtctggaatgatgcacctaaaaccttgctccacaccaatgacagttggtaagccactgtcacaatcggatggggatccactgtagaatcctactgaatataggagcatcataggagggctttaatacctcactcacactagacctgatctttcttttgccgtcaacaagttaagtcagttccttcaagcccccactatagctcactggagtgctgctaagagagtacttggatacctacagggcactgtgtatcatggactacacatcaaaaactcagatagactcgccattacaggatactctgatgccgattgggcatgttgtcctgatgatcgaaggtgtgtagccggttattgtgtatttcttataaatacacttgtttcttggtctttaaagaaacaagttgtagtttcgagatctagtacaaaatcagagtatcgagcacttaatcatgtttcagcagagatttcgtggatttagtctcttctcaaagaattcaacttcccacttcaatatacaccaataacatggtgtgacagtatgggagcaagcaccttggtaactaatcctgtgtatcatgctcgaacaaaacacatagagcttgatgttcgttttgttcgagataaggttttcaacaagtgtttggaagttcgttatgttccctctagtgatcaagtggcagactgcttaaccaaaagcctcaccaatcacatatttcatttcttagttgataaactcggtgtagttgaaacaccaccaagtttgagatggactgtcaagaaattaaattcttcacatgtttttttattcactgctgaggtggcataactaatttgtacaaatccctaaagaatttgtttgtacataattctgttatttttattcgttttgctttgtaattatgaggtcatgattggtacgaccttttttagatgattctcttataataaccctagtcaatataaatgaaatagcaaccagccaattgtttgttgagttgagcattttcttctcttttcgtgtcttttctttttctggttttcaaactcctctccctcttaccaaacatagtgtaagaataatatctagaatattaactgtaacgcttatcctcgaaaaagaacaatgcaatatagattagtacaaataataatagaagaaaaaaaatcacatgtcccaattaccctatcccaaccatgtccctccaataaataaatgccacatgtttttatattctcagtcaattaattcacaactacttccgtttcttgctactctgttagctccattaccccataaaaataatttttttttatttaaaaactatattcatctacatcatataataaataatgctcacttttgtttgtttgtgctaaagtcactaaaatcattcctattccatatatttgctattttttttttttgaaatggttattattataaatcattatgatctacaccttatttaacatgtaataatgaaaataaatataaatttatttatattttcatttgaaattatacgtccttattttgttaatgtgtgtaatctattttttcgttacaaatatttattacatatattggtaatgaaatttatttttccactctattttattaggttatctttttttttattatttttatattatatttttattttttaatatgtgtaataatatttacacctctatattaattatgtcatgtttgattcataagattgaatactatagtccaaatctacatttgaatttttttgaatttcgaagaattggataaaattatttttgtacatatggtatttgaagttttccgcattagactctttgaagggaattttagtagacttgaaagaatttaaacatttatagctaatattttcactaattaaaaatacatacataatgataatataatgaaatgatatattggacactatcataatgtggtcgaactaggtagcaatatttcttgtttaagctataaatttgcatgttctttctgtctttattttgattattgcttactacgtacaacacctaagtaacaattagacaagacaaaatctgttttcttgcctgtcataccaaagaatgataaattgtaaggtacaagaaaacagaagacaaaatctgaaccgaaaatccatgctaggaataagtgaagttaaaataaacctgagattcgcaatacagcccggcatacaaagaagcatagaaatattcattctctgatcggccatttgtaaatacattctcttgtgtatccattaacaatattatccaattttatccatatgtacaaaaataattttatccaattcttcgaaattcaaaaaatttcaaatgtagatttggactatagtattcaatctcatgaatcaaacatgacataattaatatagaggcgtaaatattattacacatattaaaaaataaaaatataatttaaaaataataataaaaaaaagataacctaataaaatagagtggaaaaataaatttcattaccaatatatataatataaatatttgtaacaaaaaataaattacacattaacaaaataaggatgtataatttcaaatgaaaacataaataaatttatatttattttcattattacatgttaaataaagtgtagatcattttcaaagggaaatttgaatttatatccatcttttatacttaaattaattttttaaactaataattataactattaaaaaaatatgatcactttt

SEQ ID NO: 38310 - DNA, 2765 bp, Cannabis sativa
acaatctcaatagttcagggggaatttttaacggcaaaaaaaattcgggggcataatttggtatatgtcaaagttcgggagaaaaaaattgttaattagcctcttttttatttattttttttttcataaagtaagaaaatgtaatcatttaatatatattaattaataatatatattattttaatagaatatttttagaacaagaattgttacaaataatgtggatgaaatagaaaataaaatattgtattgtgggattatgtgaacattttaagcaatatttttttatgattgctaccattaattagagatgttttacggggtactttaaagtgtgaagcaccacaagatataaaatactctaatttgtacaatttaatgttagatgcttcattttaatttatttaataatataaaaaataacaaactaatcactatgtaccatatgtgatattgatatggatcgagttaccaaaagacaattttatattaatgtaaagatatctagtttaaaggcatccaatatttattaatgtgatgaactgtagaattttgattgtacataaggtttaataaatgttaatggatattatgtgaagtgtaatattattattaattgtacaagattcggcctcaattattttactttataaaaatcatggaaaattgctagctaacttaattataaaatgtcattttatagtaatgggaggtactttggtatcccataataatataatattctttagtatatatattatcaatgtgatattttataattcgttagtaatttttaatatcatttattaaattctaatgtataagatattaaaatataatatgtcatctgttttacggtgcacattatgcagaacttatataattgctttgactgtgcaaaacgatgaagaaaagcagtaaaatcacaaagaaaactacaacgatacatgttgaaatgaagcttttattataacaaaacaatctaagcatgtgaatatatttattacaaataatattacttgtaaaatgatttgtgctaatattataatcctattttcaactaccaataatgtttaataacagctctatccaccacgcaatgccggatttaagacgtcatgcactgccggatatatggggatacgcaaaaatacatatattatatttaaacagaaaaaataaaacatggcaaagggatataatatatttaatcatatatatatgtgtgttctccatcatagacaaggcaaatatcgaagtttcacacactattgatattgatcatgaatatgaaagtaaatatagtctcgaaggagataatcaaacctactagcccaactccaaatcacctttgctcttatcaactctcctttcttgatcaaatatctcccccagtgtacaaccattttgttatgttctattataaccatgaaaaacatgatactagtaatggtgctgagctcatgagtattgttgaaatatcaaacaagctcaagacatccttgtctcatgcacttacactattttatccactggcaggacgactcaaggaggatgcttcttgcgtagaatgcaatgacatgggaatccctttcattgaagcaaatgtcagttctcaactatctgacttcctaacccaaagccccatcattccaagtgatcttaacaagttcattccattcgaaaccgataaagtgtccgaaatactcttcggcatccaactcaacatctttaactgtggctccatagctattggatcatgcatctctcacaaaattgcagatggattatcatttttcatgttcctcaagaaatgggcagccatagctcgaggagatgatgatgaacacaaccaagctgcatgccggccgcaattcgaagccgcttcactctttcctcccaagaacatatccgggttcaaccctagagttggcattaaaaataagagtgattttatctctaaaaggtttgttttcaatgcctcaactatacaaaatcttaaacagaaatatgctgtgaacaataaaggtactgtttctcgtgttgaggcgttgtcagctttcatatggagtcgttttgtggctgttactcatgtagagtccgaaagtacatcttataaagccatagttcatgcagtgaatcttcgcactaggtttgagccacagctctctgaatactcatttggaaatctttacagaattgtagtaattaatgtggttggatcagaaaacaacgactgtgagattgtaaaacaaatgagagaacagttgagtcatattgatgacaagtacctgaaaaatctacaagaaggaaccgaacatttggattatattaagaatggtggtaaagagttgttaaaaagagaaacgacggttcttcttaatttcagtagttggtgtagatttcctatttacgaatcaaattttggttgggggaagcctgcttgggttggactgcctccgttgccgttcaacaatgtggttgtgtttatagacacaaaatcaggtgagggaatagaagcttatatcaacttacaccaaaatgacatggctaagcttgaaactgacaaagaattccttgcgtttgtgtctgtttgaaattttactattatgaatttattttcagtctattattaatttgtttcaaggttatttcgtcaagtgttgtacttaagttgcaaaatcagtacgtatcccaatatatgtatatatatatatgggttaatcaaaaataattggcaatatagattgtcatatatatatata

SEQ ID NO: 38311 - DNA, 1426 bp, Cannabis sativa
  modified_base (809)..(819): a, c, t, g, unknown or other
caaacctttaacccgactagaattccaagcttggaccaagaccagaaaaccccaacttaaaaaatcaattttgaccctaaccttgcctttaccacaatagaacataatgtggcgtttgattaaaaataattgttggctttagctcaaaagtcaaattacattagagttgcaaatatatagttcaacttttaagagatttgggacttgtatttgtcacatttgttctgaagctatgcaatagcttttgacttatgctcccccatatattacatatggtttgaattacctctcattaattacatatagttgggagatgatatatttctcattattaaatatggttaagaggtgagattttccttctatatatatgaaactctttaaagagcatttgtaatttggagtagataattcgaggtgtacaatccgagtgcaacttagtgtaatcaggttcagtgggaaaccttgagataaagcatctgtaaattaaaactttgggaaacacttgagagatataattagtaggaaatttgtatttgtattctgtatatttccttctcaggttaataatattagctacctcccgcagcgtaggcaaattgtcgaaccgcgtaatgttttattattgaccgctttgatatatatttatcgctatcttttgctatttatagcttccgagcacaacagtaatgaaatagaatcaaatagaaatgaaataatttttattttattcttttatttggctacattttaaaatgcaaccaaaatggtagagaagaatgcataagaatagaataaaatttaaaatnnnnnnnnnnnattaataaaaaaatatttaaaatttttctcatattatgttgaaattgtctttacttctatttcaaataaaatattcattctaccaaaatagtagagaagacattccattagaataagattctaatactttaaaatgcaattaaataaaagaataaaatgaaaattattttcttctcgagttattttatttcattacctccaaccaaacaccacattagagtgaattgagcaaaataataggacaaagtaaggagcgattaatagcaatataagaaaaccaaatatcatcacggaccctctgagaacccacaactaagaaaaagcttacaagtgttacagacggatgattgagattttcttttacttaagttgtgataacctcctcaactccaatagaagatgataatagcatcattattttaacttgaattttgtttagttctttcttcttcctaacattacttgtagtttgaacttagaacacaggttttgtatgcgactccaatttccttccgagtcaaccatcacgaacaaaactaaaattgtgtacactcaaccttaaccttaaatacaatacacctaaacctttagattaatgatctaccga

SEQ ID NO: 38312 - DNA, 2504 bp, Cannabis sativa
aatttcttacaattttgtgtaaaaatttagaaatatctgactatattcctgtgcagagatgttggccacaacacatttcatggggcagtaccaaaggagcttggcaaccttaagaatctaaatatgctgtaagctatcaaaccagatgtaacatcaactttttgtttggagctcagttttgaaaatcttttgatctgttaagataaatttaactttcaattttgataagagatatggacgaaatgctattagcaagttcttctgtatatctggcatgttcaggaaagtgaacttaaaagactttcaggatcattaaaatggataggagaagttatttttggagaaacgtaggtgctttctatctaccttatttctaaattgtgttgaaactctatgctgtcaaaacactaaggcgctcttgcaatatacttgcaatgtgcttggtaatataccaatatgagtaaattcatgttctttaacttagtgaatgtagttgtagcttcagtcgtgtgctaagctctcttcattttaaatgttagttgtggtttgcatattgtttgttaataatgcattgttgccaaatatattgtcaaaattacttaagactgtgtcaatgtaagtgcaagtgattgctttcaaatatttattcccattttctctatgctttgcagtgccttggggtcaaataatttttctggaccacttcccccagaaattggtaatttgttgaaacttgagcaaatgtaagtcccttgtcttattttaagataaaggccaatatatttactttctgcaattttctccttgtttaagtatttgcatttgaacttagtgttaatttttctgtataatgaaacaactgaaaggttctataataataaactagagagttgagaacttgagaagtacttttcactcctaaactacatcctaactcaattactctatgcttatcttgttattatgatactaaatgttttgtttctgtagttacatagacagttctggaataagtggtgaatttccccccacattcgccaacctaaaaaatatgcaaatcttgtaaggataagatattgaaatctcttctgcacctacttttatttggctcaaatcaaacttactattgttacttgctgaattccagggatacactagatacccctctctctgggaagataccagacttcataggaaactggacacgtctaactaatttgtaagtattaaaattgctggtttatttataaagttatcaacactgttaatgttaaccatcatttttctgatgagatcttaagttttaaacctcttaaatgttattgtaggacatttgtagggaactctcttcaaggtcccataccatctagtttttctcaattgacctcgttgacatctatgtgagtatataaaatttccaaagttctcttgatttctgtacatgtataattctactttggacaagagtaggttaatatatgtttttcacttatattgtagaaagattggggatttatcaaatgggagcagttcccttgattttgtcaaaaatttgaagaacttgactgagttgtaagtttactactttttttttaattaaaatcatttgattctttctcgcctatactaactattttattaccttttatcttttgttacaacagaattctgagaaatgcattgatttccggttcaattccaccttttattggagaattgaaaggtcttaaaacagtgtatgtacaataaacttagaatacattacaaagtatattttaaaatagcttctaatatttttgtctgttgtaactttgttcatgaatatttccagggatttgagtttcaacaacttaaccggaaagatccctcctgagttgtttgccatgggtaatctaacaaacctgtaagtagtttagtacttttatttactttatgtctttcctagagaagattcaaactttcaagtattaaccttagtgtgtcatttctattgtaccctaaattcccttggtgcattgtttaaatgttcagatttcttggaaataatagtctgacaggaggtattcccaatgattggcgtgacaatctcgtgaatatgtaagttatttattttgacaacattttgggtccaatcaagtgtcaattggacatttcgaagaggctacaagtgttatacttctggcacttaatctagagcaatcattgtatcttccatttgatttattcaaatatgtagttgctaattaatcaaggaaaataaaagaaatatttacagtagaattatctaaaaactaagcattttttacttttgccaattctgcattttttgagaattatttttcaactgattattatttatatactgcaatgtcttcagagatctgtcttacaatttcttatcagggcgtttaccgagatggttaggctcaatatcacaactgtatgtcttcttatgttttttctacatttctaatgtttatattattagttaccgaataggatat

SEQ ID NO: 38313 - DNA, 1218 bp, Cannabis sativa
attattattattattatttgtaaggatgaacattattaataaatattaaatagctgcgttttaatatattactatgaggtgataatttattagtatctcgatttaaattttatcaataatagtatgatatttgtagctgatattgggtactaaaatggtgccctttaagatttatcgttataatagagataaaatttcaaatttaaattttttattaaaagatatgttaaatttcttaattataaaataacatatttagcatagtacaatttttatttattttttttttagagaaattaggttttttttttattattatctaccattaatggaacaaaatattgcttaaatttcccaactttaactaaagtcatgttccttcaagtggaagttacacatttatgggtttatatacaatgtatgccaactataaatttttttaatcaaaaaagtaattttataagaaaaaaaaaataaaaaatattgggaacagtttagagtaatcagctacctcttaggtaggtaaccaattacctttgtacgataacaagttactttatgtattgctctctctaattttaactttttttttttttttttttttgaatttttcctataaattaacctttttggaaaagaaaagaaaaattctcattcattcagtatagggaagaagaaaaaaggttatgcaaagaggatgaggatagaacataaacaaatggcataatttattaaaaaaaaaaaaaaagatggcaatattgtaaataataaattagaaacatgatagaattattagagacaatccatgcaactttgattaaaaaaaatcagtaaattaaataaataaaacttggtgaagtggctgttttgtctagacatgattcaagtcaacctagttcatagagtaagatgaatttttgaatctcaatacaataaaaatatctatataaacttgtgtatcatcattccctatgataaatctttaaaacattataataatgtaggaaaattcatcccccaaaaaagagtgtacggatgcactatgtacattgtaattatttaaaataatttaatatgttaaaaataagattcaaatagtacgttacacgttttatattttatacgtgtgaaaaatacgctttttaaaccctactttctgtattgtaaattattcaaaatttctcaagcaacaagtataataccatatataaaaaaaaa

SEQ ID NO: 38314 - DNA, 2038 bp, Cannabis sativa
  modified_base (82)..(84): a, c, t, g, unknown or other
aagaggatagcattgcctacttatcgtgtttagcactataatgaagtgttattttataattggttaataattttttataatnnntattaaaataaaataagtgagacccgatattgagttacacctcacaagtgtgcttaacaccataggtgtcttttagtagttttctttgagaaaggaactttgaatgagaatggcaatttagcctatttaagtgagaaaatgcatacttttgacacaattatcaagaacattcttatgagatacttatagtgtgtattactataataaattgtcgtcttataattagttagcaatttttataatatttattaaaataaaacaagtagaaacgactattaagttgcaccaatagcgatatcacacttcacaagagtattagatatcattggtgttctttaacatttctccattatgttattggaattattagtatgtaatattattattttgactttttatataagttatgttcatgtttattttgtgtgtgcatatgtcattattatttttttcaaacaaacctttcattttattccaaaattagaatgttttaatagaattttattttcatattaatatttaatgtattattatttttttttttttgagaaaaagacctcaagaaaccacctttcaagcacgaaaggggaggagacgctaactatattaatgaatcttactaacaatgagattgtgaatacaagaaggataaccaaactaccaaatattttttttttgaacaaactgaaatttattaaactaaccaaaccagtacaaaccagcccagccaaaccggctgcacaaaaacacaacacaacagggtcaccacctctctaccatggtccttacataatgccatgccttgttgtcacttctatctataaagcataaaattctatatttaattatttaacactacccacactcatacatttggattcaaacacaaaagatttctattccaccacacaaagtataacattgctgccaaaacagcattctgaagttgatttctcaaattgaaagcagcttttggggtccctttttgcagctctgagatgtccttcggccattggaagttaccaaaccaactgttagttgcagcagcgagcctctttgtgtaaaggcagtccacaaacagatggttatgtgtctcaatctcattttcacaaactggacaaagattcgaatcaatactcatcaatttcctcaagttatctctagttaagagatgattgttacaaacttgccagtagatgaatctatgcttgggcataatcaatctatgccaaacattccttgcataatcaactctaggaactgtcagaaggtttgaataaaatagtttagcccgaaacttacctttttttacagcttgttggaggatttgctcgttagttctatgtctgagtctcaacagtttttcaaagtaccagctcatgtcatttttgataggcatagtccagagattgttgtctttgatattatagtaccaaacattgctactataatattttattcttaccatatactaatatatttaaatgtttagtagttttgatttttcaaatatatttaatataatttatggagtatatttttttctaaaattagggagtagtattgtttataggaattattacatggaaaatacaaattgacactttatttacaaaaatacctccataaagtgtggacaatatttatattttttatgtgcttttaattaccaaaatacctcttacattatcacttatacaattagacaatggttgctggatggttcgccgaaggttgcatcacacgaatgttttaatcaaataaaggttgctgggtagtttgccgaaggttgcatcagatgaaagtttcttttagacaaaggtttctgggtggttggccgaagattgtatcagactaggactgagcataaaatccagaaaaccgaaaaaaccgttcaaaccgacctaccgaacaccattggaaccgaaaccgacgaaaccgaaaactgaaaaaa

SEQ ID NO: 38315 - DNA, 3110 bp, Cannabis sativa
gcataaaacccaacatatatatgctttaaaaatagaattcaagatccccggttttgtaaataatttgtatttacaatttatgtttagtgatgttttatcatttcaaaaatttatcaacgacactttattttaaaatgcctttgattagaaaaggttagcatagtaatgaagaaaataccttagggagcctaagttattaggaccttaaaatttggtatcagagacgttaagttattctccaaagactgtcaagatatatacaatcatcattagagacaaggttaactcacagtttagtaagccttaatatgttttagtagtttaaataagataagactgattaaaaaagcatgataggaaccatgttagtagtatgatagcaaaataagtgcatgtttaaatttccatgttatgtggtaatcaatattcaattatgataattgcctgactgacctgacttatgaatttattagctcgtgctatagaatggacaccaaatgaaacaatagaaatcagggtaatatgttcgaggcaagaggtggttagagaattgataatcccctaatcctcattgctgaggtagaggttgtagccagggtgatagcagtggtaatgaaaatccaccacaggatctgccagattgagagtagaggtttgtaaatatgtaagcaaaacttcagagataatatgaggacaaccagagacttaggcagcatggtcctcctattgcacctccttctcaggcacacttacctactattctagtgttgcatgttgagaaacctagtgttggtaaccaaatgaaaccattgtatgaaaggtcttggagttacaagtaatgatttgggtgacttgtgcgacattttaacttaggaagaggccttggtatggtgggaacttataatgactgcttagctttaatatgagaattagcagataattagggtttaatttttagaattatacttttaattattatttacgcaattaatatagatatattagtattataggtgtactaattatgatgtatgtgaaattttatgtttttcatgttgttatgcctggtaacgatagaatgcgatgtatggcttgtctagtcacatagatatgagttagtaccttagaaatagtgtgcaaaaatagttagacattcaaaatgtcagatgtgtccgggttatggattaggaccattttatccctaagtgtagtggttaatttttagtaaataaagggcaaaaaggtcattttaccctaggtttatattattgactttatgagttgaattgaatttaatttcaagattatgtttagaaaagaataagctgaattaaaataagtctttattccacattatcgttaagtttcaaaataaaaataaaaaattagaaagaaaactcccaagctcttctctctcataggtttgaccacaccaaaagaaaaagggattcaagttttcttagcaaattcaaaagggattagctaggaaattcgtagaattttgtagattgaagtttgaggtaagcttcctcttctttattccttgagtttcatgttttcagattaggtttccatgcataattcttagttagggctgtagtacgaattgtttaggtctaattctatttttttttttatgttagcaatgagtttattttaggctagattttatgtttattgttaagtttagacaatgtttgagcttcaaagttcaaactttgctctttaatggtgaatcttattttagaggcttatatctgctttaaatgtttgaagtatatttgttatggcataattaggtggtttggagagtttagtttgatttggggtaaatttgagatcatggtgaagattttagggtttcttccagtgaactagttaatcgtttccccgggtagatccctaaaaactggttttctattttgagaatatagtttaccagttctagcagttttagaacacttattttcatgttttagcaatatttagggtatttccatgctatccatcgatatggaaacttttagttttgatttaagtccttacaaagtgacttagcgtatcacttatcaactttatgaatgttgtgacttaggggcctataaattgtcaagcagcaatttctactcaggttgatcgacacgccttaattttaaattaaggtaagattagtacaacaattgcacatacgattacctatttagcgtacatgtttatgaattcttgtagataacatatcagtactcgcagtattagtgtacatatagttgcatttaatactgacataaatacatgtttggctaagtattgactgctgctatcacattgatatgactagagtattgagtataggctgatattatggtgaatagtattgtcatacgaatgttttagattcaatacgtgtgggatgtacaatatggttataattgggtgtatgggcgccaagttataatttggtttacgttatgttatgattatgcttttcttactaagtttgtcaactcactgttattatttgcatgtgtaggtatggtcaaggctatagctgagtaacagtgagtttgagctaataaagattctacatattggggtagttagatttggagtgtttaatctctaagatagcaggctgtattttgttagttactaaatgaaaacttttgtaaaaattgtgtagtatagttgtaacttttaaagatgggaactcggattatgtaaagtttatttatttaaagtttaaatgttaattatgaaaaaatttaattaaccatgttttctaataaatcctttgattagcaacggattgcacagttagtatttaaatcatgaaaacatgcctaatctagtatggtggtaaaatttggtattaaagctgtcaggttatctttcgaagatcgtcataatatgtataatcgtcattagagataagctcgactcatggttcagtaagttttttatgctttattagttcattttattagtatgctatgagaaaagccttttaggaagcatgttagtagcctgatagctgaatagccgcatgatttattttctcaaagtaagcatcaattagaattttattcttgattgcaatctagctaggctat

SEQ ID NO: 38316 - DNA, 1941 bp, Cannabis sativa
  modified_base (1505)..(1505): a, c, t, g, unknown or other
gttaggtctacatctagagttgaatttgggtccgagttaggggtcgggtcgagtttggatctggttcgggtctagtcagaatctaaaatattgattaaaaaaaatgtttaaaaaaaaaataaaaataatattatatttttttttttttaatctttaaaattttgattatcaattaaaaaattaaaaagtaaaatcaagtttagagaatataattttaaaaaatattttattttttaaattttttttaaaaaaattaattaaaaaaagttactaatgtacatttttgtcgtcgtctttatgacacttcttacactcaaaactcagtgttcaagtgttgataggataatgtgaatgttataacattttcgtttgaatattgcgataaaaatagtgtgtgaattgaatccttgttctcataattagttggaatttcacattgagtataagtattgactattgacattccagacccagttccagtgtgggtaatatatgatcaaatcaaaacagtccggtctatacaatatttattaacgcgtcaatttcccgtggaggaaactccatgctaagttttaatgaggtgcaaattagtgtgggtcctacgggtcattttttcttttagaaattatccggtactttgaaagtttgtttctacttttatgtttttattttttattttttttttataaaatatagagtgattctagaatgccttaatttagtagaaatgcactcatgtacatctatttatttcggcattcaaaagaattttttagtttaattttttttcattcatgtacaactattgaagatatcttacaaaatttagaaaaattttaaaataatttacaatataaaaaataatattcaaacactatatttcatacacgtataaaataaaataattacgcatgcaacatactgtttgaatgtagatttcgacgtgttaaacgtttttgaattttttaaaattttaccgaatgtcttaaataactataatttacatgacatgataaaaaaattgactaaaaaattatttatgatactaaaataaatagagatgtatcggtccattaaattatagaattttccaaaaatatatattatttttacgttttcttcttaaactttcagccttatatctttcctgccaactttctatagcttctttcatcttcattttctttacatcttgttctcagttccaatacggtaattacatattttagtataacactccaagccaaacacaatataaacaaaactattattcccatttaattatactaagtaggtagtttaaactaattttgatgacataattattttcaaaactgagtatgcttgaagaaatggagaagaaacatgtaaaatataggtcatgggaaggtgatcatggccttgattaagaagatggtgtctactcatattgtggacattgtcccacatgaaataaatggtagagaattgagtcatatataaaaacatgggctactccactcatntgtcaattgattttgagatggaacctcataattctcaacaactcaagttaactccaaattgaatacaataattatgggagctccattctttacactacacacaagactggtagttgtggagtctctattctctacactatcacaataatcagactggtagttgtctattctctaaaataatattcaatatcgaaaatagaactaattaaagatttccacaaccacatcactccattcccactgtttaacaatattgtttaagaaaactgcctataattcaaaaaatagaaaaattaataattaaaaataaaaaatttcaccaaccaataggcggtgaggaatagaaaaaaaataatttaaataatattattattgaaaaaatataataattctttgttaagaaaagaactgccagcaatattggatcttttgattt

SEQ ID NO: 38317 - DNA, 2738 bp, Cannabis sativa
gcatcccggtggatccaagtggcgcgcccacgccttcaatagtagatctaccattgatggctcccactgaaggaaggacccaggggcgacagcctcctaaaacaacaacaagacctcgaatctagttctatgctggagaaatacgaatgggagtgggcaagcaacaattggcgagcctcacctgaacctaggagaagaccttgagttggtcagactcggggaacctgtaggctgggtaggcctaacagaagaaccacacactgctaattgcgatgtatttgctcagtagaaacgcaaatttctgagatggatggatgaccaagagttcatccttcgatctcaccaggaaaaattagatagctgcaactgggaggccagtgatctaataagacagttcaattagagaaccgatagaagaggctaggatatccttagggatccacttcaagggagattaccgccaagctcctcaggaagtaggatggatcttcccctgctagagggaggaaaggcctttgatcaaaggtcaaacagggagaacagctagatctcagcaaccaacgacttggggggtcgaccaaggatccctggctcaacagcaacccccactgtacaaccactggccgactagccatcaacagagatcgatcgtcgacctatgaggaccaagactgggtggaaacacccaaaattgtgattcgagaagtgaagccaatcacttcaagcatcaagatccaccaaactctagcaactagtgtgatctacccctaatcaacacacaattgacaccagccagccatggaggcatcacgggcggccagaccctaccagctcaggcacggaggaataccgggcagctagaccctgctcaatgcaagtctggccggccaagcacagcaaccaagcataagcctagctggcctaggccaactcccgtacttgggaatggccgactagggactgtagggcatggctgatccttaccatacactctcccagagtatggctagcctacccctgtctctttagaattagcaacctccctaaggaagaccagtcaatgaagtcctcatagcaacagatccttttatccaagcacagttggacaaactcaaggacatgatccagggcataggaggcttgaagcctttagacctcaaacttgattggtcgaggggatcaccattctcggtatatataaattccctacctcaactgaagtttaagatgccagtatggaagagatgtatactagatgggaggaccggctggctcacatcaaatacttcaagatgaaactcaacctttagaaggtcactagtgatatgcgttgtcgtatattcccagctacattgttggagacggcccaacaatggtactttaagctcacctcgaggagattcaactcctaggttgagttctcacgagaattctaaacataattctcgtccttaagacttgtactatcacagctggaagaccttgtcaaagtcaaacagcaacaaggggaacctttgaaagactatattcaaagatttatggctgaggctaccaaagtcaaaaggcttactaaagaaggccgatatacaaccatactagggggcatactcccattgagcaacttttggaaggatatcagggggggcataccctgagcagttgttcatggtcgaaaagctctatgctgggcagtctctcaccgctcattctcccttgattggctagtgaagcatgtgtgttgatagggggttgatcacaccaattactcgggtttggatctaactatttgaagtgattgttcaatggtggaacaaaatcactttgattcttactccttcagttggtgttgtcttgggtgtttccatccactcatagtcctagtcgattaaagataggccttataatgacttgctcctaaatgttttaaagaggaatctcgctctgtaggccagccaaaggtgcaccactaagggactggtaggccaggggtttgccaagtgggggtgttattaagctagagatacatggctggcccccaatgccattgggtgtcagagtctggctgctcttgccactagatctatgagacaggacttgtctgccttccggcagggggaagtctatccttgttcaagaagaacttagttggactgtttgcctatagaccctgctcgatctgttgactagtctctcttggaaagaatctcaaatcagatcatgacatctcccgatagttctctcattgaactaccttatcaagtcactatcttccttagcaacggtccaactttgccttatgagatcaaaggatgtactcctagtcatccatccaactcagaaatttgcgtctctattgagtaaacacatcgtaaccaatagtgcatggttcttcagtttggctgacttggcatacaaccactctaagtctagccaattcaaagtcttctcctaagtccacgtgaggctcaccaattattggtttaacaatcctggccctattccctagtataatactagggaccagagttagtcgtggtgcacaggggttgctccacattgaaaaaaccctctattcgaggtgtcaatggcagatctaccctagccggtagaggttggtaattgggaacagttgagttagtagggttgacctaagcagttgcgttggtcgggtttgttgggcctaccaggttggcaagattggtaggatttgccacatccattgggttcatggaaattcg

SEQ ID NO: 38318 - DNA, 2431 bp, Cannabis sativa
ggttcgagccccacggtgggcgttctattttcttttacttaatttaataaaacgcatgtcgttttcacacgactactttcttattctttgacatttgtcgttttttttacacgagttgatattgataacgatagaagcggatatcccaaagcttaagtaagagttataataagtttaggtgtcacaatgagaaatgactcaaactcaaatacttaaacaaaagttgatacaattgcaaaattcttgcagaaaatggatgatgatattgtgatgttggacaagctcccaccccatttgaaacccttactggttggtactactactctctctttatgcctatgatttttctttttccttttctttatgccagagttgtgactagtttcaatttaatatatttttctactatgctagaaaatttagttactattttggtctggctaagtagtaaattagagatcaatgactttggcctaattgacatagttaaactagtctcaagcaacaaatatttgtaaattcttgacaaacaatgttcaagattttgttgttggtttatgtttgattaataagaaatagtaattatttgttaatgaattatttataggacacttttataaaagatgctaaatctgaagtgaagtacagctcaagattgatagttcttcttatcattgttggactattagtgatctttcttgttggaaacttcatactatacaagtatgctatgaagaatctccctccaagaaagaccaaaccgaaatcgaaatcgaaaaagaagatcaaaaaggagaggcttcttatgcagggagagtaaaaaatagagttgtgttgtacttgtttgtagtactttaatgttttcttttttagtttaatgtggctaagaaatagagagtatttaaacacttgttgttgttgttgttgttggttgtttaatatgtgtttcaaatgggactttttggtatatttatttatcatgctcttgaatgataaatagaatacttaaaacttttcttttggttaaaggatcatcatccttggctcttttacctcttattgggctcttttaccctcttagttggtagtgagaatggatattagaaagaagagaaagggtttaaatgaacaaggtaataaagtatattttaagatttaaatttatatcactattttgcgtagcaacataacaatatcaattttgcatccaaaagatacattaagtacataaaaataataattgtgctaataggcagggccggccctaggcataggcgggctaggcccgtgcttagggcccacaccttttgagaaaaacacttttatttaagtaaaattaagtgtattgtaagcaacaaatattaatagcttagttggctaagatttatgacatattatacaatggcttcgaatcccataacaataggtatagtctattgattctacatttctttttagaaagagaagtcctaaattcgatttttcttttcaaaagtaaataaaaattaattagatgtcatacaataattttaaaattgtgactgaattagataattagaaagaataaatagaattttttttcccgaactatcactcttgtaccgtttagctctttgattttttttagcaaaaattcctcttgaattataaaaattatcgcaaaaccccttgagttacatttcgctcattacttaaataatctgttaatgtaatactatattttcaaaattgtatgatttaaaccctaattatttatatgcatttagaaaaatacaaaatgaaaaataaacgtttgcattagcttaaataatattttgatttaaatgtatacattacaatattattaatttaaataatattttgatttaaatgtatacattacaatattattaattgtgttttgaagtagccctattagataacgtaattattagagtgataaaatataaagtatatttagatatgaaataataattacatataaatttaagaaaaataatattttacaatgtaattacactcaattcattagaattatagagggtaattaaaataagataattatatgaaatactaatttttataagaaaattatatttttgcgtttgaagtattttttttatatatatttttacgatattttataaaagtaataaaaaaaataatatgaaaataacaaaaaaaataacataaaaaataatatacaaataataaaaaaaaatcaaaatactacataaaaaaaaatacaccaaaagacagttttttatgcaaatattatctaaaaactataaaaaaaaatatttttattatttctatatttttgtaaaattatctctaattacacatttacaatataattaataatgttataatcactttcaataaattagacattgtgtttccaaaggagtaaatacatatatacttgaaa

SEQ ID NO: 38319 - DNA, 2813 bp, Cannabis sativa
tctcggttctgctcttgcagctgtctcagctgatgccatggctaaaacaagatccaagaaacttggaaaacctaaatctgcaatgaaactctcaaagaaagctggaaagaaggagatatcggaggcggtacaggctggttcgattgaaagacttgctgaaattgaagccctggagctttcggatgaagatgcgcgagaagatgatgatgctccaatcgacatatttcaaccactctctcccaaatcttctctggatgcgattaagaggcaggaagaggttcgttctgatttcgcccacttcattcaggcaaatcaccaatgtaacagtgatattgcagctggtaagaaatcaattccccctattctgcgttctaatactgtagtgaggaatcttgagaattcttttaagcatgttaatcagacagtgaacaaagttaggattaccatggaagacattgaagatgaaattcaattttggaaaacatccttagtgtgctatgttttaggagtaaatccccctcttcatgttttggatggatttgtgcatagaatttggcaggggaaagtcgatagagtgaaaatgttgtcttatggtatttttattatccgatttcactctcttgaggacagggatcaggtcttaaatggtggatacattttttttaatagaaggccagtgataatgaagccatggaatcctaatgaaaactataagaaagaagatgtacagaaggttccagtttgggtgcagctggaggaacttgatttgaaatattggggacagaaatcactcttcaagattgtagctcaggttggaaatccgataatggtggatagtgtaactagagatagagaaagattgaattacccgagaatattagttgaggttcaaatggatcagaagctgccagatttgctagaatttgagaatgagtttaatatgaatgtttcggtggggattaagtatgaatggaagcctatctcgtgcacacattgtgcaggagttgggcacgatgctacagagtgtaagaagactagccacgggaagcagaaatggatagttaaaaatgacaaaagacaacagcctcaggtagatgaggaaggctttaccaaagtgcaatctaagaagaacaatggtaatagagaaactacagtgaagaatactgctgggactgaggtgaatatacatgctgaagtgggaaacatgttccaagtgcttgaggaagagggattgatatctgatgctaatgagtttggtcaggggactaatttgtacaagacaggaggggggggagagccctctctgtctaatggataaactgttagcatggaatgttcggggagccaacagtcaacaaaaacaacaaatgataaagcaatttatcaattctcagaaagttgagtttgttggtcttctcgaaacaagagttaaggcttcgaaacttggagccttatactcgaatgtgtttgtaaattggtgtttttcatccaatatagcttggcatgctggaggtaagattgttattgcttggaatcctgatagatttactgttgacatccttaaatgcactagccagctaatgcatctgaggttgtcaacaactgaaggattcaatagtcttctgactatagtgtatgcatcaaacaataggaatgaaagaagagttttatggaaggatttatgtgaactgaatacaaatgagcagtgggtgttaatgggggatttcaatgatatacttgccaaagaggagagaatagggcatcgggttaagactcatccggacacagaattcttacaatgtgtcaatacttgccagatggaagatgtaaaagcaagtgggaacttcttcacttggtcaaacaagcaacatggggatgatcgaattttttcgaagatagatagaattatggccaaccaatcttggattaataaatatgatcttgctgaagcggtattccttaacgaaggcttatttgatcatacaccagcaattctaactctttatcctaatatggttagtgggaagaagccttttaaatacttcaagatgtggaaatcccatccgaagtatgaaactgagttaaaagaagtatggcaacaaccaggggaaggatcaaaaatgtatatagtagtggctaagatgaaacaattcaaaatgaggcttagagaaatcaacaaggaaggtttctcggacatccaagctgcggttttaagagccaagaatgatctggatatgattcaaaaccagttgcacatacagcctatgaatagtgaactacactttcaggagaaggaagctcggggaaaactgctcaaagttcagggtgactacacatccttcttgcaacagaaatctaaagctgattggattcagcatggggattgtaacactgcgctgttccatgcttgcattaagcaaaggcagaggcaaaatcgtattctatccattgaaagattggatggtaaacatgaaccagagctaatcacggaggcatttttggagtactatacaggattactggggacaaaaatggaacagagaaggagagtagatcctagaataatggcaaggggccctgtactcacaaagaagcagataactgatcttactctaagatttactagtgaagaagtaaagaaagcagcctttagtatacctggaaataaatcgccaggtccggatgggttctcaagtagcttctttcaagacaattgggatctcattggtggggaaatcagtgaagcagtgattgctttcttggagtcaggtaatattcttaaagaaatcaattctacgatcattactctggtt

SEQ ID NO: 38320 - DNA, 2394 bp, Cannabis sativa
tctgcatatgacgaattctggcgtgcttcttttttgttggattgagaaaattcggtattttttttttttttttttaatgtttggctttgatttggttcatgacatttgtgctatatctaataggggctatggtttgagaatttaaatgaaatctttcatgctttgatcaaagggtttgcagttgtttgtcttacaatatttcttgggctaccagaattatgccccatacagtttataaatgatttgtgtggtcagttgtatggtgctttggcaatgtcacgagttataggaaactttgaagttttttatgaaataatgtgaaacatgaaatagtttcttaagtaaaggggaattgggaatgaaaaccccttcatttataatactaacgattatgaacttggataagggtgaatgcactatttggatagttgcttcttttgtcattgcctgaccttgctattcgtgtgcttgtggttgaacattttcatttatggtggttggagtaattgcaggttcaacaataggccagattttctataatttgtacttggtcattgctgtctggttcatggttttgattaactgatagagagttatgttatttgatggctgtaactaatcagctatgagcttgttaaaacgtggcagacaattcttcatataatgctatgaaagtatataccatgatttaaatttttaaaactctcttgttgtagccagcagcatcccagttgtgaaagaggttgaagcaatagttgatccagcatcattcactgttgtacgatttgctttgtctgccatcccattcatcccatttgtactgctatcagtatcacaaaaggacgttgatacccgcaattctggagttgagttgggtttttgggtcagtctaggatatctgatgcaggcagtagggttgcttacatctgatgccggccgtgcatcctttctatcaatgctcacagtaagtttttaatgttaataatattaccactattgcaagtccttttgatctgtgggagtacctgaaggtacagaatttggatgctttggctggattgatcaggtaatcgtggttccattgcttgatggtatgctaggagcagtagttcctgcccgtacttggtttgcagctttcatggctatcataggagttgcaatgctggaatccagtggatctcccccttgtgtaagtgcatttagtttgtacggatatcttgtgattaaaaaaattgtgagagaagggaagtaagttaaatcctactggaaaattgcctgcacataattgattaaaggtgacatgttactctgtatctctctctctctctcaagagtcaatttatgattaactttttcaggttggagatcttttgaacttcttaagtgcgctgttttttggtgtgcatatgataagaacagaacatatagcacgaagcaccaaaaaggacaaattcttagctctccttggataccaggttagtgtatatgtgtacatcgtatatatattctgcaacttgttttatattggtcatgcagcactaatttttttcgaattctctgatggtccatttaggtatgtgttgtgtccatcctgtcaacaacattttatcttgttggaggttggtcagggggcttacaagagtatgatccatcattatggtcttggacaaacttttggaattggatggttgccttcccttggatacctgcgatatacactggccttttctcatctgggttatgcttatggggagaggtattctatttactctcaatccttagaaaacaaataaatttgaaagacttcgggagtgagcttatcttgtccagtcccaaatcttcaaatttactttacttcatttctggaaagggtttctaaaatgctcacttcacttcattcgaatgaattggttggctatgtaagcgtcgtgagctctctcattgtaatacgtataccaatggtcattagtgtgtccataaataacaactcttctggtgccatttcaccggaggaaagaaagctgaagctgtaggactggaacatgaaataaaagttaaataaatctctagtcttttcgtgcctttagttaagggctttttcttgcgagtatatagatctttataagagattacctacagcttgttggcaccctccaaatgtagcgtttccaaccgtaatttttatgtacagatggctgcaatgcgtgatgtgtcagctacagaaactgcaattatttatgccttagagccagtctggggtggaggttttgcatggtttctccttggcgaaaggtggggtactgcaggttgggttggtgctgctcttgttctaggtaaaactatgtttatagcgagatctcgaggatttgtttgttgttaaaattccaaatctgc

SEQ ID NO: 38321 - DNA, 4536 bp, Cannabis sativa
aatttggtaataggcataccatcgactttcaaagtcatgataggactgccagatctgtatgacttgaaaaatgcaacttccatctaccaaatttgtgtcaagttccctaccaaaatgggtttggatgtataaaaggagaccagtggataaatcgtcggtgttacaacattgcgctcactaaggcgaagaaggaagacaagttcaaccaaagttcaaaggccaaacaaattgaaaacaaataggaatttgctcaaggtggggataatgagattgatctctgctttgaggacctgatactagaatatggttggtggatgaactagaagacgtagagatagaaccaaccatgccgaccacaacaatgaagatatggcaaggtttaccaagtgaaataaaattttctttgatcgaatttctaaggaaaaacctcaatgtatttgcatggctgcataatgatatggtcagaatctgtccatgtgtaatctttcacgccttaaatattgatgcatgcaacttttgaccaatacatcaaaaacagaggctgcttgacaaggaaagagcccaaactcttaaagaggaagtggaaaaactctaaactaaaaaattcatcataaaggcattttacttgatttgggtatcaaacccagtgctcatcccataacccaacagtaaatggcgagtatgcatagaattaaccgacctatttaagtcatacccaaaggattgtttcccactttttaggattgatcaattggtggatgcttttgcttgtcatgatcttacgctttatggatgcctactcaagctataattagatcaagatgttcccaccaattaaataacacattagcttccaaacagatgttggtctatattgttacaaggttatgccatttagtctaaaaaattgctggagcaacctaccagtgcttggtcaactgaatgtttaaagattagattggacaaaacatggaattatatgtagatgacatgcttgtcaagtccaaaaaggctaggggcacatagagaatttggatgaatacttcaaaatactgagaaaatatagtatgaagctcaaccctctcaaatgttcattcagggtaggatcggacaagttcttaggctcattaaccctcaaatagcgcatcctcttaagaggcaaagagaggaggaatttgatggtttttgtactaagaaaagtcggtatgattctaagaatcatcgagacccatatgtgtttaaagcttccattccatctcattgaaatgtaggcagtgaagaccaaccacttgctcaggcaaagtaacttgttgaagatgaagtagttgctcaggtggagtaactaatggatatttcccaaaaggtcacacacacagatttagatagcttacatgagttggtgagagaccttgctgcctcgagaggtatcgtagagagtctcaatagagataagctatctccactctcgagaagggtcatcgcattgaccatcttgatcaggatgctgaaatggagtatgtatgtaggaaagggagaccctctttctgacatacataatttcaaagtgcagatcaatctgcaaggtgtttgagatgattctcgatgttaagtcttttcatccaccctgttagtaacaacacatcagtagtatatcaagctttctctaggatctattaattattatggagcaattgcaagagcgttctatgacaatttctcaccatcaagagaaagaccaatcaagcccaacaatttggtatgtatcaagcaagagtaagatgagcctcaaaagaattatatataatgatttttagaggcatccactcagacgagggtactcagtgaagacattaaattcatggcaatggcagtaggacttgctactatgagtccattatggcaaaacttgaaactcaaaacagtgtacactatttaagagtttctagacaaagctgatggtttcatcaagatcaaagaggccaccgagaagtttggtggcattgatccacttacagcattgcattactttgcttatctgattcctaatttgagtttaaatacatgatcttgaaaattgtaaaagatatgtttatttcagtaaagtttatgttatttataaaatttaaattaatcacatttttcactaatctatatgataagaaaaggttggcacagtaatttggaaaacactgaagcgcgcctaaccaagtagggcattacaattttagaaactgatatataatgtaataaagctaatgaaatagatcaaaaacaaaaaataacacaggagtttttacatggttcaaggattaacgacctctagtccacgagtcaatattattatgaggcttaaaaagccttttgatttacataagtattttgtcaagtgcttgaaccttagaattttccttagctcccaagtttctagattttaaccctttgcatgaatgagttttcttatatttatagagttagggttctcatatgtaaatcttgcccactagtggggtaaaaataaataacatattgactttaggtttctttggtgaagcccgacccatgaggcctttatcttctactaacgtggattccacatcatgttgatagttgtcaaaacatgtcctacctttgtcaataataaagacacataaatgcttgattgatgattactccatttatttacttataatattcgattctcagacatgatcttggaaataagtcttgatattatgggatttgataataaataagtgagatacggagctagatatctgaacgtcccttaagcactctctctgaagcactacttgatgttatctagagagatgttatgctggatgcttatctcatctagacgagatcttcatccatcatctagatggcttgacctagctaatggatgcaatccattatcttggctaggcctacatttagacctatttgtagctgaactaaaccatcttcgaattacacgtgtcttctgtacaaaaacacagataatatttatccctaagccttcagaactttagggttttagaggcttgtagtctcctttcagatggcttgaggccatgtggaggctaaaacggtggaaacctttttaaattctaagtagaaaagttgtggttgacaacttgttgctttttgaaatggagcgacatgtagaattttttcatttgctcatgcaaattacgcttactaaaaaggtgtgtgaagcgtgggtttgcaaaaaaacgacaaatgatcatgtcagcgattatcctgaggcaaatattatcattcaaatatcttggttccaggcaatgaatcaaatgtaaatttgatagctttttggaccgtcgaatgcattttatgtttttttggatacaatttgagccattgatttaagggcacatggatcgccatttcagtactataaatatcgtagaaatcgtatgtttaccacttttgcttatttttaattttgcattcaaatttttagagaatgaaccattacttcaacaagtatctttgtcctcttcttcagatttgtgcacgtgaatactcaggagtgccacccccagttttaaccattgactctttaaatctatcatgaccactggatcttcaagcagagatcgaagcgctcattaataaattctcattcccttaatactaggcttgtgcaccttgaccaactttccttggtgggagtatctttaagaccgatgcacgacgttcaaatttcctattcaaatcctccaccacccctaagttcttcatctttatcaagtaagtgatctttaagtatctaaaattctaaacaatgtttgaattttgttttccttacttgatgatgttcactctaggagttaaaagaataagatttagctatttggggaagttatgaacatcctttcaaaatagagaccttttacatatactatttgtaaacattgttaggttcttagaaatattgtcttcattagtgaatttatggttatatagccaaatgtcagcaatatatgcgtttcattttaaatcctttgtctgggattcttatggttctggaagatatactttggaacaatgttctttgagaatcttgcttctggatgtagggtccggtggggacctctccaggcagtgataaaggaggactctcccatacccttgttatcttctttagtgtgggtatttagttgtttgttttttttattctttttaagtttctattatgggtgaagctgctcaaatcgaggaggccaaaattttggaacaagaggaaattacagctctaagagtagtgtataattcatctccaggggagatggatcaacataacgagccctcaagaacatccctggcttattctggaataagctttccatcttgggggaatttccatgtcaatgcgctaattgtttcagtgtttggatcataaggagatgggagctcatcttccttttagaagttacttcatgtacttctgtgcggaagtagggatcgcgcccttccaggtgatcccttaagtttacaagttgttggtgggtt

SEQ ID NO: 38322 - DNA, 1878 bp, Cannabis sativa
tggccccccctgccacttcggcaggcaccacgaacctggcaagtacaactggccaggtcgacacgaccaatccagttagtctcaatgatcgacctatgccacccagggaggaccctccactagcacctcgtactaaacaaatgacccatgtggagtaaccctcaggcatcacaattagattttgtccctagtattatgctagagagatgggcctagaaattgacaagtcagccattgtgcgggccccatgtagacttcaaagaagatatcgagttatctagacttagataagccatctgacaagtcgcccaatcgaagaaccacgcgttgttggctgctatttacacaacagagacacaaatttatagattgatggataatcaagtttacatcctctgatctcaccaggcagagctggactgccataattaagaagctagcgatctaataaggtagtaaaatgagagaactgttggacgaggtcaggatctcattaaatatcctctacaagggagatattcaatagatcagggagggtctatcaataaactatccaaccaggttcctaggaaccaggacagaccttcccttacctgaaggaggacatgtcttgccacgaagattttgtggcgagaacacctagattctaaaaaccagcggtctaaggggttgatcaacaatctcaagctcaacaacacccctaattggttaacctctggctggcgatccccttggtggtacacctctggtcggcaagtagggtaaactcccatcccggggcccctaggaaatagtaacccaaatgccaatctttaactagctaggttcaagaatgggtgaaaacacccaagataacaacttgaaaagtgagtctaatcacttcaatatctagatacacctaactccagcaactggtgtgatttactccctatcaacacacaggctacatcagctaatcaagggagaacgggtggccaaaccctacccaacatagggttggttagccatgaaaaattgcccataatgggattggtgggccaaggctagtccacctctctaggaatggccaaccaaaccttggcccattcgaggttacaacccaatcaagaggggtcaatcatccaagtcgctgcagttgcagatccttctgtgcaagcataattggattaaataagagacatgatcaagggcctagctagcctaaaacctttcgaccttgaactggataggtcaaggggatcaccattctcggtatatatcaatgccttgcccttacccatgcctaagtttaagatgctgatatgaaagatgtataccgaacaagaagatgcactagctcacatcaagtacttcgagatgcaaatcgatgtccagaaaattactagtgatgtggggtgttgaattttcccagcaacgctaatagaaatagcttagcaatggtactttaatctatctctaagaaaattcaattctgggaatgagttttctcgagaattctactgttgttctcaaaaagtgatcaaccgatagctgggtcatatagatctgatacttgccacgtgttacacaaatagaataaaaaaagcaataaacatagagttttgtcatagaggtttggcccccttgtgatagcgagtaatgacctactccccttttggttgtattgatacctagagataatactattcaaatcactataggtgggatctgatatagctctctataaggatacaaaacatgaatcaataggtagatcattaatgagagagtgagattgtcttagaggtgtgtgagagaaatgaagagaagagagggagagagagccttattgagcgtgtacaagagagagagagagagagagagagagggagagagact

SEQ ID NO: 38323 - DNA, 3765 bp, Cannabis sativa
tttatgttcgtagtcgttgtagttattaaagatatctgtcgaaattttgagaaattcaaaaaatttaacacgtcaaaaataagattcaaagacacgtgtgattttttattttatacgcatgtgaaatagacagtttgaacattaaattctaaattgtaaattattccaactttttcaaaattttacaagatgtgttaaataactataacatccacgactataaaaaaattaaactaaatttttttgctaaaacagttaaagattgtgtcagtacattcattttagtgggacgcattgtaaaatcattcaatatttatatatttataatattaaatgttagaacctgtccccaagccaattgggttttgatgccatgagaatcgccttacgtagagacccaattaaattcctatcgtaagtgatgattataaattaataagtcgatctgtttatatatataattatgttgtcaattaatataaatcagtgaaagacatgtttctccttaacgaaagattcggtacttttagctgaatgttctttatccaactcacatttatatttaattattgagggtcacctataaatcataatctgttttaaaagaaaatcagaacacatgatttatgatagctataaaatatttacatgcataaatatatacagcagacagtttggaagtatgcatgcattgcttaacttttctcatctcatctttggttttctttatggtttttataatatataccaacttacatatgtcgttttgtatataaggcattagtcaattgagttagttcttgacttttgtaatataatattaacaatttttttttgatttcatttttgtttgattattcatatttaaactcatatttctttgctggccatgcactcatacttagttttattttaaattactaagttaatattacgtgcaatatattaaaaagttctcttaattattattttggttatatataatttgaagaataattaaaaaaatttcttttaaacttttgacatttgatcttaccccctaaaatatacagtttgttaaaaatctctcgaaattttttacatttattaaagttgagtcatttttaggttctgtcttattattccgtttaaatgctaacacatccttgtaaattagcaactttgccctaaactttgacaactatcaaattatactcctccaaataaaaatgagaatgattcaacatattattttggtgtatcttaaaaaattaatttcgatcttaaaaaaagattattttgaatgattaacaaaattaaaaaaaaatcaattttgttttttttaagaaaataaaatttagagatttttgtaaaaactaaataacgggaacaaatttgagtttactttttttctccaaaaatctagatttgtttaaataagcataatttttttaagttttatttcgatttttttaaaaaataattttatacttttgttgaatttctaattatttttatttatttttaggacatgatttgtaaacacaaataagcttcattttctcgtcacaaaatcttattttgtttaaattatttattgaattttcaataattttagtttgattttttaagatatatgtttataaataaaataaagtttaaaaattttattcttaggaataatttaagtttttctttttttaaagtaaacttagtattttttaattaatttaatacttttatcaaaatttttaatcattttttttcaaaattaataagaaaattataattttgaaattataatttttttataaaagggagaaaatttagtattgttctaagttcacggagtaaaaatgctaaaatttttaacggttaaattaacgaaacctaatatgaagggcatgattatgtaactgttatattttaagaagaatttttaactagccgtatattttaagagataggatcaagtagtgttgaaagtttaggggacaaatatactaattatttaatttttaattatataattatttttatgttaattatttaataaataacattattttttgtttttttttaatttacgtgttacttataaaagaaaacagactgacaaaacctattaattataattttattttacttgtaatacttttaattttataatacttttaattttcttagaaattaatatccaaacaatttttttccactttttttttaaaaaacataattatataaatatattttttggtaactacaccatagataacagggtcacaatagtaattctttaaaaaatataaacactttttttttttatttttttatttttttattttattgcttaaaatgaaaacaataatagaaaaatattttattagatatgtgaattgagttaaaaaaaatgataataaaaagggtttaaatttaaattgtaatgtttaaaaaattatgttatagccacatttaatataagataaaaatatcaaaaagatatgtgtagtgattattgaattgtaatattttaaaaaaataacactttttattatatagtctcatttaatataacataaaaactgcacaatagtattaaataggaatacacatttttcccatggggatggggtctcgtggaccgacccgtggaccgaccctaacggggaccctaacggggacccgtttaatttattaattattttttattaatattttataatttataatatgtgtttgtattttttagtataatagtgtcatttttataattttttaagtcgtgtttttgtatagtaattagtatattgaataataattaatgtgtaatattttaagttttaggtaatttaatacttttttatatttaaattttaaaataaattttaattttacattaaggaattctccacctcacatctacgccattatggaattccccaccccgtctccatagaaaataacggggatagggattaaaatccttaacaagtatggggacgggggaagtactctttgcaaattccctgtccccatgtgtatccctgtcaataggtaatatagtcacaataatgattctttaagaaacataaatactttttttttttttaattttattttattgtttacaaataaaacaatcatagaagaatatttttataaatgtgtggattgagttaaaaaaaattgataatagaaaaagtttaaatttaaattgtaatgttttaaaaaatattttatgttatatagccacatttaatataagataaaagataaaaaaaaatatgtgtagtgagttaaatttaaattgtcatgtttaaaaaaaataacactttttgttatatagtcacatttaatataatatagatatatttaaattttttaatgtcatatatagttaaaaaataaataaagtttaatatagaggtgaaagaataaaacgcaatagtaatttgaaaaataaaattaattaaaatattgagtaaagtttaagaaataaaatgaaaaattaatgctagtattatatattaaagcaataatagtaaaggttataaaattgaaagcaaaataatgtgtaaaaaaaatacacacattgtatgaagttttgaaaagtaaagtttcataaaccttaaataacaaatcatttaactgattaaaggaaaacactaaagtaagattataatttataaacgaattgttgaagtaaaccccatattatctatacactgtcaaaccagattttttacacagagattacaaaggcagtaaaaatcttatgtggcctca

SEQ ID NO: 38324 - DNA, 3233 bp, Cannabis sativa
gtatttttaccgcaaattactcaaaactttataggtaaagaacagctagatttattaattactaagagaaaatatgactagtctccaaccatcctcacaatttctttccttgttgatttttttttttcataattcattacataatttttaggaatatttatgctaaactgcacatattgtataattttatctattataattaacattctataaaaacgattataataaagttacactaaaaataatttctttgtatattcaaaaaaaaaaaaaaaaaatctgtgtagcagtttaacctttttttagataactaaagatttttcctatattttttttatgattttagaaagtgaaaagtttgatatgttatttatatcaagtattagtttttaaaaatatattttttatgattttttttatttggatttttgtattaaactaatattactttaataaataattagttttcaaaatactttgttttaattttctatgaatttaaaatattttattctccgtttttatattttaaatattttgcttcattttgtttttaacatataatgattgtttaaattttttttactaaatatattaattagttaaaataaataccaaataggaaaaattactatttaactgtaagtgattaaaataaccttaggagtataaaagtaattccacatcattcatcataaacaagggctaatataataatatcacaggttccccaaaacacacaatttcacttaaaagaaatgataactcagaaaaatggagctcagccagagaagaacgcgaagttgaacttggggaaataaagaacatatttttaagagctctgagagcgaaagtaagaaaggaaagtgcgcgaagaaacaaagaagaactaatccacatggaccaatcagaacaggagaaaagcaaaggtccaatagtccttcccgcctgtatatagacgaccccatcattcgaaaataagaaagaattcttgctcacatcaggctagttaaaattttgttggaatacatcctcgagatcatgggtgggaagcaggtccttgagctcgagaagtagacgaaccaaagagattgtagaagttgagggggaattgtgtaaactgatagaaagcatgtattttgattagaccgaacctagtgtaatgaattcaaagttagaatacaaatttgttgctgagctaatttttagctccttgagctcacatcaggtccttgagctcgggaagcagacgaaccaaagagattgtagaagttgagagggaattgtgtaaactgatagaaagcatgtattttgattagaccaaacctgatgtaaagaatttaaagtcagagtacaaatttattgttgagctaaattttttgttgttgaccaaacttaatgtattttgctcacatcaagtccttgagctcgggaagcagacgaaccaaagagattgtaaaagttgaaagggaattgtgtacactgatagaaagcatgtattttaattagaccaaacatgatctaaagaattcaaagtcagaatacaaatttgttgttgaactaatttttagcatcaacaactagtgtcgtctacaggaatcatcagaacaaaaagctgaagacaaggttacaaactaagatggaatccaagaaagcacaggagaatgtgcaaaccgaaggagatacttttaacccaataatcgatccaaccactgcattggctatagaaatgagggaatgaatcaaagaatgactgcttgagccaaacacacggaggaaatacagtgtctcatagaaaggaagttccagcaagaacagcatatggctgaggagaaatgccaacaagataaatggaaatagacaacatcaagagaatttcaatcgcactatgcaaaaaattatgattgaaatggctgacatacgagcaaaagtaaataacactcaaactcagcgagagattggcaaaaacaaatggttctgaaccacaacatacaagcaaaagattgcaacaagtaacaatcttccaatgtattgagaaagaaatgaggaatcagccaatgctaatagcaaaaggaaaaaaagtgttggaagaactaagaaagatagctacaataagtggaaatcacgatttagtgccaaaacctgtcaatgtcgttaatacgaaataggtattccaaagatacttcaatcaaggaggaagggatgagcaagtaaggatggaatgtgattcggtgataaaaggaatggcacaaaaggggccaacaatcgttattaggacgtagccttcccaaccttgtacaaatagaagatgatttatcacagataaaagagaaaatgttgaaagagatcatggttaaatttggagaaagaattattttagagttggatgatccaaacagagttgtgatgaggaatgcagctaagtatccttttgctaaatggatctttgatgaacctaagttgagagattttactatgccaacttttatgttgtttaacgacaaaggagatctgttagagaatgtgctccaatttgaacaaaagatggcattagaaacaagtaatctagcaatcagatgcaaggcattctcaacaaccttaacaaaatcaaatttgttatggttcaaataactaagagaaggatcaattaattcctttgatgagctcacatagctctttgctgcaggtatggtggaaatgtaaaagacaaaaaagaaagaaaggacctcaatccaaaagagcagaaacaaggagagtatcctcgatagttcttacaaaagtttttaaatataatgtatcaagtgagcaaggtaatctcaaatgatgcaacatgctactttaataagaatgagcttaaaggttctttactaagagagcagctcattctttccaaaccaaaaaccatgatcgaagtaataagcaaaaggagtctttgaggttatggaacagctacaaattcaagattgtcttttaggaagaatcttaatggatggagagagtagcgcagatattttatctacgagacattgattgttagggtttataccctgaaagcctataaagatatttttgatcattgaataaaaagttaaatatttgatatatgtgtgaatgttaaattgttaatatttattattgaataatttatattaaatatcagaaaattatgtattcatatatgagattgtgtcttgtagctgtacaaagaactaagaccacttagatatgaataa

SEQ ID NO: 38325 - DNA, 4796 bp, Cannabis sativa
aaatagaaataggtggcaattattgattggagggacagggttgggatagggaaatttgggacagaagatttttttcctggaatgatggaagtaccaaagtagtaataaaaatcttaaaaataagtactaggagtaattttttattttcttaaaaaattgatgtttatttttaattctattaaattttcaaggtttaacttttttttttttttttttttttgcataagcacccaacttcattgaaacaaaaattaaacactacaaccattcatatacccgtataaaaaaactaaaagaaataacataaagcagagaaaaaaaatagtaaatggattaaggttttaattctacaggcctagccactgttagatggccactaaacatagtcatccaacacactggggtctagaggggtttgcaagaccaatccaattatatcggtggtattttcccattttgcaatattatgcactataaaattacacctacaggagatatgaattacttcccactccctcagttggttgcataatctgatcaaacgccttctagctgtggagatagtatggtccatgttgataacgaatgcctttgtgaccactatgttttcacattgaaacattacatacttgtagccaaactccaccgataaatctgctacaaggcagagggcatgcacttcgctaagttttggatcagttgttatgcttttcgtggttttgatggcttgaatgtctccccattcatttctaatgaccaatgttaaaatagaattttttgtatatatcttcacatcagagttgcaactcacccatgatgttggagggggactcaaaactataatgggatcaacaatgttagaggcgaccaaagaatgctccttgattttctctctggccgtggtcatttgttgttgcaatggagttatgccttctccatgcatcttcttattctcttcccgccatgaattcgtttagagagacatttggaggttgatttgatgcttcccaggaccattgactccattctctccagtttcccacatttacttgtgtagtgataattccctaacttgtactataccacaaagctcttacataacaacactcccagaagagatggattgtgtctccacagaatttccacatagtatacatagatttgatcatatattcataaaggcagacaatttacctttagcgagtaatgcatcatgaagtagctaccaccatagatgttttagccgaggatgaagaaaatatttccatattcgtttccatataggatcaaaatcactttcaccaaatgacccttgaataatcttacacacactgatcgaatagtgaactctccacttcctttcgttggccagatccagctatcattatttggtccatctggcagatcaatgtttaaaatagccttagcatcctcatctgcataccaatcctttaccatctcctcactccatctattgtcattatgaatgaattgcttcacccaagccacaccaaaggttgcaccatattaagggactggacaacgatccatgtgggggatccaaggatcaaaccatatagaggtattagctccattcctaattttgtggcagatatcactaaacaacataggccgagtatctaaaattgccttccacatagttgaatctccaatgtttctcacaatatcaaagacaattcttcctttcatatatttttcttgcagaaccatgctccacaatttggaattgtccattaatgccttacaagcccaattgaatggaaatgctttgttcattgtttgcacacctttgaatcctaacccctccttgagctttgatcgacataggaaatgccaaacaatagtgtggagggttctttcctttgtatctccccaccaaaagtctctcaggcacttaactatcctttgtgaaattgaggtataggaataggttcagtggctacaacataggtggtaagcaaagaccccacatattgaaccagacaagtcctcctagccttagataaaagctttgttttccaattttttatccgctggagtactctatcgaccaagaattaatggtcatttattctattgagagatctaaaaagtgagagatctaggtagattgcatctcttttcatttttttcattccaagaagctccgatattttagtcgcattcttgggggctacaccttttgagaagtacaccgtagacttctaaaaattcactacttgtcctgatcaagagcaacactttgtgtaacgccctaatcactaaggacgccacacatgtgtttttgaaacatagttttataatagtagattaattaattaataaaattcatgataataataaaaacttcactataataaaactatagcaatgaataggataactcgctaaaaatttgtttcgaggatctcatgttacaaaagttttacaaaagggctaatatacagaagtaagtcaaaatacatatcaggtatcacccaatcaagtatgttgatcgacccaaatagagaaagatcaacgatcccgagccctatgtcacaacaaaaaaaggaactaattaatcaacttaacctaatttgttttaggtctttaatccaccaccgtaagttatcctataggtcactagggcaccaataccctcaacatcaagaaaacatgataaatgggggttccaaacataaccaaaagcaataagttgattagaaaacagcaagctgttttcagtgtttcctgaaaaaaaatagtttgccgttttctacaggaacgagaaacctcaagttttaacttctcaaaatcccaccaaaacctaaccaaatgattccaaacttcacagaacaatcatataacatcattataataatctttacattacagaaatcaaaatcatgcctttaataaaaaatttccatgagagcttaaaaactcaaacttcactctcacctccccacaactacaaacctatcaaatgagcatcaaaagtagtccaaaactccccaaaaataaagccataagcttacttatatcccagcaactataaaacaaaaatttaacttttagaacctaaacttttcatgaaaaaaaagaactaaatccttaccttagcttccactacaagaggcttaccctagttgttgccttaaggtgttgaggagcttctgggacagagaacaaatcaaaaaaagtttgttgtttgggtttttgacttgctcgagagaaaagaagaagaaggaggagggtttatgtttttgcttttgacttttatgtttaagcttatcaatatatacatacatattttttagcataaaaacaaagaaactaaaagaaaagaaagaaaaaagaataaagaaaataaataaaataattaatttaattaagaaaagattattttaatatttcttagccacaaagaaatctctaaccctagggcatttggtcaaccccaaatattccaaaatatcctgatatttctaacaccaacttacctcaataatcttattaagatcactaagtaaactcattgtgatatttttggcctctgatcgtgtaacgtccttctcaaaggaacgccatgtgtcatgattacaacatactaatcccgttaatcggggtctataagctaagtgatttaaaataaataataaacttaattaaataaataatttgcaataaacatacacattgagtttgaggttgggatctgagtacatgtagggtctatgcatgagtttgtgtctgagttttaggtcgatgtttgggtccaggtctaggtcctaatttgggagtcgagactgggatcaaggtccaagtttgttctaggactgagtccaggtctagaggctaggctgcaattgaggcagggctgaggttcgagtcaagtcgtggccgaggcctggtgtttgaggtccaatcaggtaggcgagagccgatgtctggggttggggtcggtgtccattcacggggtcagaatccagaatattaataaaagaaaatacaaatttataattaagaataaagaatcatgtaaataaatttttaaaatgacttttattaagaaaaaaaaaagtaatctcattttcattttaaaagttaaaaggtaaaaaatagtttatagaccatattttttgaaaatatttttatttctctaatgaataaaaataaaaaattaattggaaaagtgttacagaaagcaattttatttttcattgatatatccatttattaatgatattttaaatagaaataaatttttaattatattttctttgatcataattgattcatttctaatggttgtcatgccaaacatattttttgttttattaaacttaaaaactaaaatgtaagtaatcatttttttttaattctcacataagaaaaacgagagggagctatccttgttacacccacaatataaaaccaaaagctaacaaaaaaagagaaaaatttctatttgtggtagtgtgttttttatttaataacaaaatcagtacaaagtaaacctagatcttactaattgtattcattaagatatgattatgtaaaacttcctcacctatttaatcaacatcatacttaacactattctcaattaaaaacactcttcaaacaaaaaaaatatattatacatagctgcacaaatttctttaaatcactacatataatacgttaaagttcccaattgtgattttaaatttctcttctcatccaatcatgactatgatcaacataatagtcactatcatgatcttttattttccattttccattgcaataac

SEQ ID NO: 38326 - DNA, 2484 bp, Cannabis sativa
  modified_base (1280)..(1281): a, c, t, g, unknown or other
ttttttgtaaggactctcagttattcatttgtttataccaattatcatataaaaaaaaaatatatattattgaataaattccggggtgataccgttagtggccgtttattgtttataattaattttcatttttttaatagtactaatagtaaactaggtaggtatgacttagttcactttttatatattaattaaattaatttaattaagggtaaatttatggcatctcatagtgcaccaatacacatttttttttacatccaaataattttttttatacgatatttgcaaccaaactctttaatacttataattattattcatatgactctaataaaaaaaaatgataaaagtattttattttataattttactttagttttacatttttttgtaattaagtgtcaatacaaaaatatatgtcgacatattattagaatacatattaaataagctaaagaaatatgtcgtcacatgtaattagttgctacttacgggcttaattggcacgtaacaatcaaaaaagagtacgactaacaaaatcgtaaaataagttacttttgtcactactttttttttttttaattagaatcatatgtgcaataattttaaatgttaagaaggtttcgtcacaaatatttttgttatatatataaaaatataattgtgtacaatatagatatttaaaatgtgctgtaaattttttcaaaacttgacagatattttaaataaatatgtcaaatattagcatataaaaaaataagattaaaattatcagaatgtaaaaaacataaaaacgtaaatattcaatgtctatttcgaagaggacggtaaaatcacctgttaattaatagtagctttggtaattaatccttgtaattaatttaaaaaatgcttatttatatatataaagtgtaacgtagtagtgaagccttatatgtacagtagtaaatatcactttctctcttttttatcatgattccattaacactagatagccacacaaaaataatgatgtaattttttaaaaaaatattacataatatattaatttgtgtgtgagacgtttataaacttctcataaatattactactaatagtaagtaatttaatcatgcatctactattaatagttaagcattttgtaattaagacaattaatggaataacttcatttatcgcatctaagctaataaaactaagagcattctattagccagtggtgcctccttctcgatatgttgtgttgcgattgactagtgatactccttaaaagttannatattaaactatatgagacccgatactttgttgaaccaatagcgatactgacacataggagggtgctaaacaccactagtgccctttaatttttctctaaaactaaataaacaagaattaataaatagcaatatactttcgtttcaataagaaaaacaatgtaatgaaagctacaaataactgcatttgtaagttaaattaattattttattttcgacattctctgagaccaacattattccaacaactttttatttttcaattatttaaaagtagtattttttttaactaactatagagccctacaacattatatatgtaaaatgaaatatattgtgaaacaattttttttttcaatccaattaattatatgttataattaatgagcatgtaaatggataaggggtgacaaaaatacctcaaaaatatatatatgatattattattatcatctattgttgttaaggtatgtaaggcctgcgctttagggtcagaaactcaaaaatatatatattgttgttctaaaaatatatatttttagtaattttaattaaggctcattcaatctcaatgactcaaccaagactaatatgtaagatgtggcttaaattcgattcaaatccattattctaaaatttttaaagcatgtgttaatcgtaaaaaaacatttctaaagcatgagattcccaccgctcactacaataaaaagttatttttaatgataattttgtgttcacaacataaaatttttgtgactaaatatgatttttactcgcaataaaaacttacttgtaactagaatataatatttagatacaagttgtaactaatatagttttagtcacaataaatatattgtaactaaaaacacatttagtcacaacaaattattatttttttgactaatatatttagctactaacttttttgtaatgactgcttaactttattacgggaattaattagctgataattaggacttattgtcaaaattaggttttaaattattatttttctaaatgtgtttttaattacaatatttgatgtagaattgcttgagaaattagattttttcgaattcatcagttaaaaatggtagaccattttctaaaaacattctaccctttttagcaagcaagaccagaaaaaatggcctaccatttttagtggtgtttttctcaaaatcacatttttctatatttt

SEQ ID NO: 38327 - DNA, 3033 bp, Cannabis sativa
cacatccattctcctaattcagacagatgctcacagaattctacatctccattaaaactccttcctcccgcccctaaagcatataaatctagatttacatgcccaatgctgaaaagaaatcagcattacaaacaaagtagaagataaaaataagaaagcaaagcccaaactttagtgaaaaatttaaaaaacacgcaagaacaaaagtaaatatgacaaggtaattacactacaccttccaaaaggaaaggggataccaagcagggcagaaactgtcactgcaaagtcaagctgcaaacaagacttgaattaagtatgaatctcacaggaactaatactgcaaatcattccacactttgccttaacaaactaacatcctcacctgttggacggaattgatacacaaattcttctcatcctgaggttaaaatttgaaaaacaaatattattcagaagaaaattaatggagccattttaatattgtgaaaatttgaggaataaaaagtcaaaaggaaaaactattacaagagatagttccaccaccttataaaatcagaaaacataaacttacagaaatctttaggtagtgtttggttcacaaatgggagtacgaatggaattgctatccctaaaggggggtcattcaagtgtttggtttccttattatgattggaaaactcattccaatgaatgtaattcatgtaaactaaggaattgctttcctaaataaaatgagttgaaaacgcattccatactaactaaaaatatattgattaaaattataatgatacgttgaagcatatatgtacatttattattacaatatatgtgagaggactaaattatatgaatgatatttatgttatacttaatatttaaaataaaatagatcatcagctacttatatgtacaattttattattatttttttaataattagatctaataaaataaaattttattattatttatatgtttaactttaatttgtacaataatggtaatttgataaaacaaaaaccatttttaaaagagtgaaggacaatttgaacaacataataaaaattccattccattccatacataccaaacataataattcttcttcagttgttgattccatagtctttaccaaacaaaagaatagaaatttcatttcattccatttctattcctataaccattcccattatcccatcccaatttttattttgtaaccaaacgaaaccttagaattaattatcaatgatatctccatcgtcctcctaaatcatttatatttacatcctcctcctaaatcattaatatttctttttaccaataaagccaaattcaacaaagccactatagtcattattgccaaccataaagaactccatattaaataaaattgttgaagatctagaagcaatcaaaatgggctcaaattctagaatcactatcacaacttgtagaaaagagcaatggaatttataatctaagaggaaagcaatattctttgcaaggagataaaatgaatacaggggactaactttctgtagaggtttatactgggtactttcctacttctatctattaaggcatcagccctacaatgacataactccttaaactatccagattcggtcggacactaatatttttacatttctcttgtccattttttatggattatcttttctgtcccttttccactccttaaccagggagtaaaaagacaagatcagcaaaacaaaatggctgagcaaattgattttcaaatcaggcttaccagtacaaatgtattcataataatagcaagtattaccgatttgagttcacaagaagaagtactagatgtggatggtatagaagccggaggattcttaaagctcatggcaaagattgatgtttccacctgcttgaccccaagttggcattaataaactgtacttcagaatataagaagaaaaaaaaagtgaaagcgaaaaacatacttcttcaggagtaccccctccatgatctccatttagggtctgtccatgatcacccatcacaaacagaagagtattctcgtgtagtccaccaggttcagactcattcttcagcacttcaattactttctgaagaaactacatggtcatattctagacaatgattgataaagaaaagcattgtacaatgagataccaactattcagaaaggttagtaggacagcatatgagacaagtcttatgataatgtaagaaactgaaaactagtgcatatatgtaaaaaccacatattagggttcaaggcaagaagtccacatggaaaaccccatgctttgacagcaggctaattcaaagtactgtcccacggattagggttcaccaatgtttttttcttttcatttcttttaatagaaagaaaaaagaaggaggatatattactacaaatttgaaaaaacaaactaaaatgtttacaagaagaaactcctatacaacatgttggtgcttaatttcgttaaaatctatatagaaaagcaaagggtggaaatgtgaaacaccagttgatgttgtgcttttatgttagactcttccctcaagttttagtcaagcacaagggctatcattcagttattttttgagggatatattagaatgttattttagctattgtcccaagataagacggagaggagtgcttgtaagcgagagtccttagttgaaaaatctctttagttagagagagtggaaacacagagaatgtataattctcaagcataagcctgtggcttgccttagggggaggggaatgtcgtcccttctataggaaaacgttaagagtgtctctagaaagaagcctcagctattaatctgatcataggataagatagtctataagcctacatgagacatcattatcaggagatagaaagggagttccttttgatgctaggaaagtgggtgttaccttcagcgaaataactaatggtgggtgggcatatggcatgctttcccaacttgcgtgcacgacaaacatccctctcacaagtcaatttcctatgctta

SEQ ID NO: 38328 - DNA, 1345 bp, Cannabis sativa
  modified_base (26)..(36): a, c, t, g, unknown or other
tattcacgattttcaataacctcgtnnnnnnnnnnngagctgcacaatatgtttaaaatcacgttaacacgcctatgctagttatggtgttacactcttatctatttttcaggtctttgacgtcagttctttgttacaagtgcttcataatctttaatatatcaaagggaaatataatgaagtatttgtatacatatttttttagagaaaatttctgtataattacgtgtattttttttttgaagagtaatattgtatgacttttgagatcctaatgtaatttgtaattcatatataatacatttcatttatttatttttttattggcaggaaatatgaatataaatatatcattcatataaggatataatgcaatctaattttttttaaacacacataactttcttgattatttatgtttgattagatacataaatgagatatggtgataacaacgattttcaatatagtggtgaatataagtgagatacagtgatgacaatagtgtttatgaatataatgacgtttataagtgagatacgatgatgatgacaacaataactttgaatataatgaattcgaatatagttgagatatggtgataatttttttttgaatatagtggcgactacaagacgatgatgataacaattttgaaatcatatgattagttttatatagattcatttgttgtctttttcaattgttatgaatttttatacaatatttaaatttattttttgagtaaaaaagcaaaagaaaaatttagtagaatagttagaacatctccaatcatgcactctaaacactctttagcaagaataaagagtgagacttaaaaataagttccaaccatacaaaaaataattatactctgtaaaggttgggagctctctacttttttgttaaacttttttaatggtattttaattaaaagaattattaattttttattattatataaaattaattaatatttgataaattcaaattgcaaaatattattaaataatcaaatactaattaaagtagagagcatgattgaaacaacaacaataaaaatggttctctaaataactaaaaaaatataccattagaaatgttcttttcaatatatataaaaaaaattgaaccttcctatttcttcatcgttgtccatgatcgcatccccagtacttgcttctccatcgttctgatcctccaacaaactatcacggtaaatatctcactctttatttttctttttttctttttcgtagactgaattcattccattttatatagccgtatttcgatattatgtgaattgtgatagtgtttcagttggtgtatatactgtttgata

SEQ ID NO: 38329 - DNA, 3978 bp, Cannabis sativa
tatttcgaaattaattattttattaaaaattaaataaataactcatttaaactaaatgatgaaaagtattaaaatttaaaatatttttaactaaataaattatttaacaatgttatccctgttcttgaatgaagaagcatgtggtatagaagagaagtatgacttcaaatagtcaatgagtaagtcccctatgtgaaactaaattacggggaggctccttgaatctaggaataaatcaaagataaaggatacgcagagatttacctagcctcattatgtcttttgggacacgaaaggtttaccttcactctgggatccaaagatggccaagatcagtgtttgcccctagcgatacctggaagctggttactagaagtgtctatcatggatgctgactgtccaaaaaaatgcagaggtctgtctaccttggagatgaacccagatcgcccagcgacggttatactttttctgacacagggttagatcttgtcccgtgtgttaggccatggtagtgcgcacacccctacacctttctaccagacatttattccaggtattttctttttactgttaaatcttttggcgacacgcgtcctgtgcaagtggtggtcccctattgtccagctgcttcaacgcacgagcaaaaatccttccaaggggtctaatagtcaactctttttgcatgtattttaccccattagtggacttttttgcaaaaacctgaggtgggtcataggcatgaccatacccaccctttagcctataaatatccttctatttccgtacaaagggagaattgaaactaagatagtcgaagctttgctaaaattgctgtaagatttcctcttgttcaagagaaacaaagagtacagagttagggtttcttgcataatcactataaaaatatcaaatacgccttttaaggctaatagactgagtcgtgaactaagtctcattaattcctgaaccacgtaaaactctccagcttctttattattgctctttactatttcgtaagctctaattatattagtttctaaaaatctcaataaacattgaagggtatgggttatctggtctcggagctagtactattactgtagcttgagctagtggagtaggtacgactgaaagttgtgatctagcagcttgagggtgactactccttacagagaatttatagcaccctgttatcccaaaacgatgaacggtccatgaacaaccccttgttcgggatagatgatgggaatacggacccactgagccaggtgtcccacccttgccaagaacttgatttcatcctttaagtggccacattcattggttgtgcgtcccatgtctccgtgatactcacaactcttattttgatctcttttaagcttttccccgtgaggcatctttggaggcttcttgtaatgaaccacattgcaggtttccttgtacagattttcttagatgtccaccaattgttaggatttataccctaaaagctagtaattaatggataatatattatagaacatatgaaatacaatgatacgataaatgatacattaattataatagtataactaataaatatttaaaattccttattcatatggaaaaggtataatcttgtaaggatgtacaagagaattaagattatacaatatgaatgaaataagttggtagtgttttaaattattaggaatctttaatatggaactgctaactttggtttactatacactatacttctagtgtctgtgattttaattcagatcacatatgtggatagacatgtagtaaatgtgttgtgtataattcgattatacatgactgggctcatatgtaataaatatctttcattgacatgtcatttaccatgaaagacttattcatatcacaatgatgatcattagtagatcatcctgaatcctaagtatacatgaactcctatttgtgttcactgagttctttgattaacccgttaaagtttttcagcgatgatgattcttacaacttctattttgggagcttaatggcatgagtggttggggacatgttatacaatagtggagtctaagctttcctaacgtatcgaatattatttcccttatagtgttaattctgggagtgctagtattttgatccaaatctataataagttatagattaactattcacattaaattaatggtacataaggaattaatagataattacaagggtaaaatagtatttttgaccaactctaattatgaactaataattggagggagaactacttctattgattatatcaatggactacaagtaacaattctgtaaatataattctatattatcaaagagtacaattctatatttatagtggagtaataattgaaataataaattggattattctatttatgcgatcaataataatcaagattttattggagctttgaaatatatgtccatggtccccgagtcacctctatacaatactgtacaagggtaggttttatttgataaatggattgcaagtgagaattaatttctatgggaaataaattcttaagggcaaaataataattttaaaattattgtgctgattaattatgataattatgaattgtataattaatagtatttaactatttagttttattgcttgaaactatattaataagttaaatataatattattcctaaataatattaaagagagaaatatattattttagagaaaataatatctattttaattattgtgaaataagagattcatgataattaataaattattatttattggtaaaataaatagtaaatcttatttattaaaaaattgagaaatcaattttggactttaaaatatggcccgcacgtgtagggtgacatataaaggcccatgattaatttagtttgattattttactggttaaaattatttaaattaaattaactaattatcttttaattattaattaaatgaatgattgcataattatttaattagaagataataattaatataaaagatctaactgatatttgttactcggttattagatatttatatttaaattttaattttaattcaaattaaattaaatattttctttttattttaataaagaattaataagggttttcttaggacacactatatataggatatatagtatcacaaaaaatactgaaaagaagagtaatgtagatgctaaaatccacaataaatcgaagatgatcgtacgcgggcaccgacaacctgtagaacaaagaagagagtaatcaaaaaaccttgggacatcgagatgatgccggtgaaagggactccgacggtcaagttagcaagattgtaaacaatgtaataaaaaagataatagtaaatgactgaactaagttatcacttatcttgactacagaaataagtatgtagtttttaagataatgagagagtgaccaataagtaagaagtattgagatgaatgaaaattgatgtccttttctcagtggccaagagtgactcttataggcatccatggaaggacgttactcatgaccgctcaccccctttaaaagcgttcttctcccactttatgtgggagatcgttatttacgtggtcaattaactaaccactttaaagattgttatatgagtgataagactcggtctcgtatacgggtcagatcattgtgagctcaatgtcgggtcatgagtaatgttaatgtctgacttgactgtattgttttgggcctattgggcttggtgttgtgagtgtactatcataattagtcaaatagcctaacccgatcttgtttgagcattctttgggattattacatatgacattgagcctgagcccaattttgacctttacagtttttccctactctttaagttgagttttgctcgagttaaggaatataaatttttaactcaaataatctttagagttttgattgtgaaaagcccaaattgtgaggtcccttgttgaagtagat

SEQ ID NO: 38330 - DNA, 3148 bp, Cannabis sativa
  modified_base (2525)..(2535): a, c, t, g, unknown or other
  modified_base (2879)..(2883): a, c, t, g, unknown or other
ataaccctagcagtcgaaacccattctctcccagcttctatatattcttctcttcaaaccctagtagccacacctttaatcctcattcagccacacctttcttcttccttctctagccgatcctgtacacaaaataaacaacacataactagtagcaacaaagatctaaaatgatctttgttggttgtgctagaagtgtaacccgaaaataacaagcaaaaaaattaagagcaagaagacaaagagattgatttcggagttccctctctaaaaattagaggtacgtctccgtcaagcttccctcaaagatgcttgatctttcactatccatgtgaaaaccagttacaagggggttagagattcctagccaaagtacaacaggtaatctcaagtttttctctcttttctctatgttttttgctttgataatacaacacttatgtctctaactctctcttgttttcctctcatgaaactgagaattatttcttcacaaaaggggttgcagcaactctctagggctggaccgaagctctctcaaaaatgggcaagttgatccccttttatattgttgttgttgtgtgtgatgttgtattgagttgagcaaaaaatcggttaagaaatagttacaaaaaactgttatttgttttgcttgagttattgatagtttgttggagtattgaatgttgttatttattttttgtattgtaaagagcttataaaattttagcctgtgaaacagaaccgactactcctagagttataatggtctgttgaggcttgtaaaaaatcttactttattttctttgtaacttgtttaaggtatttccttatgagagacagttagtatggagatttatccaacaataatcataatcgtcaaacaaatcgagcataaataaaaatttattaataacacaaatgtaattacaatatatagtgtactagtttaggcttacaaaattttatacacatttctgattctatcatcaccaactatgaagcaaaaaagtatttacaaaatgaaatacactctttaatcttaagacctcaacttcaaatatcgtctagtattgctccaaaaaaaaaaaggcttaatgatatacctgcacattctaaaattacattgatgaataagcacgttaaacttgtaaacctaccatattacaaacacatcaacacaaaaaaaaaaaaaattaattattccaatatcagataaattttgtaaaattaaaatttaaaattaaacattacctaaactgtactaacgttataataaaatactaattttttttcctaaactatttacactaaattttttctttaactaaattacattacatatattttttctactaaaaaattaaacatgaacattattaaaattataatgctataaaaaaatacttatgcatttttatcacaatctaatatttatgcattttactgaaaattattctaattctatcgaaatttcggcagcataacaactgtaatcggatgctctcaaaaatttcagacatgcaataaataagaaacaaaacgcatacaaaacagtacaaaatataaacaaattaacattaataatacaaaaattatccacccaaccgcagtatacaattaatcgcagaatctacttcgctacaatgaatatctaagattttcaaactccactaaataaaaacttttaaagttttagtgataatacttttctccaataaagttaggtgctatttttgcgctcttcaatcaacaccaagaacccaatacctaaaaaataataaaaacattaatattgaaattttaaattttacaacaactatcaacttatatatatatataaatatgtatgaactaaaaatacatatatattaccgataataaggagcctctcttgaaataccgccaaaaagagaggagctcggcaaaatttggcaacgactaattaaaaagtcaataatatatataaaaaaaagtttcaataacaatttaaataacaatgaataatccaaacataaaattttccataacgatttaatgaaaaaggaaaatcaaactaatagctaaataattaataaaaactatttttaaaaatttaaataattaatataattaaaactaaatatttttattacctaacaacaaataatataattttttttattacataacaacaaataatctaaactaaatatttttcaaaatacctaaatctaaaactaaataattaaactaaaccaaaataatttttattaatgcctaaatctaaaaaaattatataattaatctaaattaaatttaaaatatatgttaaataaaggcgaattaggatttttgccccctaaactgttacatgtaccaaatcatgcccctaaacttttttggccgttaaaaattctgcctaaactattgagtttgttatatttgaggacttttgtctaatttcattcaagtttactatttcaatgattgtttatgtactaaaccatgctttccaaagtttgatatctaccaaatcatgcccnnnnnnnnnnnacatgtactaaatcatgccccatgaactttcatccatgttagactttttttactaaaatttgacaaaagtccttaaatccaacaatctcaatagttcgggagcatgatttggtaaataaagtttgaggggcaaaaatcctaattagctttaactaaataagtatgtatgtatgtgtttgtttaaaattatatagaaaatatttataaattaattttaataaataattaaatatacacctataggaggtggtgggcaccggtggccacgaggaggaaggcgaccgtggttgggaatgactggtggttgagcgaacagatcgagataagagagagagagagagagnnnnngagagagagagagagagaaagtatcactggcggtggagctcgaatgggggattcttggtgattgtccttcgtcgatggtggatgccacttcgaatggggtttctcggtggatgatgaccatcttgggtggttgatatggctttcgtctttgaggcttcaaagggagagagagagagagagagagtgtgagagagagagagagagagagagagatcaaaagagaaaaataaatagagagagatgagaaaggggaaagaaagagaga

SEQ ID NO: 38331 - DNA, 4269 bp, Cannabis sativa
ttgtatcagtttggccactatagagtcctatcaagtaatcatggttgcccataaacctacaaaggagctatggccgcccaaggtgtacaggatctggctgcccaaggtttatagggtctgggcaaccaagggctccaggacttggtaggtcaaggcctataagacctagagggtcactatagctctacctagaggaggccagactcgtggcgcctattatggtgacaatattcaacacatctgcagtgttcatcgagattccaattgtgactggaacctgagaatctggacctacattttgtgagtcttgagcgagacccaaagatgcaaatggtgcgatgggagttcttcttgtcttaatcatgttatttgatcagatacggtatccacactctcaatgaaagcacaccaaactgttgacctcaaaaagtgatcaaccaacagtggggtcatatggatctgatacttgccaagtgttacataaacaagaattaaaagaaataaacactaagatttgttatagaggtatggcccccttgtgataactggtaatcacctactcccctttcggttgtattgataccaagagataatactattcagattgctatagttgagatctgatttagctctctataaggatacaaagtatgaattaagaaggcaaagagagagatgaagtgagaagagagagagagccctattgggcgtgaataagggagagagagagagagagagagaggagagaatatggctttcggacttagagttatctagaggctaagtgacttaggtctctaggctagggttaagtcctttatataggaggcctaaatcctagattacaagtttaaatcctagatattaacatagttttttttgaaaattaccatagactaatgtgcccttgaatttagatattgttcagccattcttttaggcttttagggcctaatttgcagcccatgccttgtgtttacattttgggctgtacatagagtcctgccatgtcaatccaagccgcccatagacctacaaggaagtctggccggccatggtcctgctaggacctgggaggacaaggcctgtaggatttggcaagacaaggcctgcaggatctgacaagtcagtatagctccactaagaggaggccatcctttgagtgtggaggtcagccttttgcaagttgaggacaacttgtacattgtttccttgaggaggttaggttcccttggttgaacggaggctccttgtgtcaagaactcccttcttcgccggctagcatgtgcacagatcttggcagacctataggctcatccttactggcgtattggctcctcttgtctggctagagatgttggtatagctccttgaggtcttgcttcactcccttcagttgctgcttgatggttttgcaatatcttgcatggaggctctattctactattggcgggattgtacttcacctgtactctatctttggcttacgtggacatgtcacgttaggtggacaatatttgggataacaatatgtttaccgtattataactttgaaacaattcggcatcaaatataataaacattattatacctttgttaaagactcgtgctgataacgtattgtaaaatgttataatttagagaaaaaaatagagaagaaaagatgatttttttagtatcttattctaatgagtaattttctatttatacacatatgaaggtcaaagattaagaaactttaaaaaatagaatataaattataattaatggtaatataataaaagatttagatatttatatatttatcaatatttattacaaataaataaacattttgtttttttttttttgctaaaatttaatatgtaaatgttatatggatcaaaatagaataaataatttaatcgataaataatttaaggctaatgttaaggacatgtaaatttcaatgatgaccaagtggttaactttgattcaatttttgattacatagatgcaaatttgagagttttaaaatgaatgatgcatttgaattgtgcccgccgaaatacttgaccttacaaatgtggcaaaagcaataataaaccagtactagtcactttcaattggaaaataattaaacactaagaatgaaatataagaaccctttcttacttgttgctggtcctagacctcatggccctgctcctttttaaatgtagaattttttttatattcataattttgttgttgcaatgttgctggtccttgtcctactttttttttcttctcccatttaaaatttaatttaataatggagggctaccttgaaaatacatgtgaaggaaatcagttcacttgaatatcaaactcgaggcaccatctgaattgttattggtcttagtttgatgtggttgatgtcattggacataaatttaagatcatccattagtaacatattattggttgccaactcacacaactccccacttgtcacattaatgcccataaaacaattagtatctcatggtactatgtcccggcataatgaccaaatttggattttctatgtgcatacataatttatgttggtaatacttttgtgttttattagaaatacaatatccaaatttaacatcttcactttttctttcatcatatttaccaaaatttttgaaaaataaatatttaagagcttaaaaatattaaaatgcatacataaatcagataaatttttttttacgtaatttaggtgttaattaattttagtccatgaattagtctattagtctcaaaggacttatttaatgtttttaaattattttagcacgaaaccctaactctgtattttgtgtttctcttgacaaagaggaaaacctacaataatgtgagcagagtttaggttcttaggttctgccccccttcgtttcaaaataggaaggtatttatagactaaaggcaggtatgtacatgtccatgacttacctagggtttttgcaaaaagctcaatattaaagtaaaacatatgcaaaaaagagctgactgttaggcctttggagggatttgtgctcgtgcattaaaatagttggacaataggggaccactgtacgccatggacacgtgtcgccagaaggtttaacctttaaaagtaaatgccagggataaccgtcaagcaaaaaagtgtgtggggtgtgcacactgccatgtcctagcacaagggacaagatgtaatcttatgtcaaaaaagcataacagttgttgggtgatccgaattgcatccaaggtagacgcctgtgatactcttgggcagtcagcatccgcgatatgccctttaagtacccatctaggtatcatctgggtagactttgagtttggaccatttcaggttcgagaacggtaataggtcttccgtgtccaggaagctaaagaaatgcgaggtagacttccacatgtttcttggtcttgacctatccaaaattagtgaaccttctccacgattgggttttattcagggattttaattagtgtaattatgatattatctcttcctttttataccacctgtcacctatttaaaaaaacaaatataattttccccccaatctttatggactctttgagtagtgggagcttacagtcctcttctgactctcaaaaataagtttacaacacatggacggatatattccgagagctgtcatttattaaagaaccaaaaagtgaaggtacaacgggtgtggcacacatgcgacacctttaatgctttcgttgataacacgcacgtgtaggagcacgtagttttaatgatggcaggtcaattgaaatgattcttatttaatacatgcggtactcgaggtgggcaatgatgaaaaataaacactctaagcatgttttaaatgccatattttcaacttcccatcagtcagatcacatcaatttttttggagagagaatccggaccattgatttcaaatttcaaggattcagtcgaagtataaatacacttatcaaacccattttctctttttttaccacctcagactttttgaatactttgtcttcaaactcaaagccagagctcttgttctacagaaaacctttaatcttgctaccatttcaaatggtgaatgcaagaagttttcgattacctgattccatatttcttaaaagttcatttagtttgatttctagatgcaaagttagtaaaccccaaaatactccaccccagctggacgaggactttgacgttcaagttgattttgatcgcgtgattgactgggtacacaactc

SEQ ID NO: 38332 - DNA, 3298 bp, Cannabis sativa
tatcttaaatagctatgacgtacatgaatatgaaaaaaaaaaattagactaaattttttttctagatgccgaaagaagtaggagtgcatcagtacatctcttttgagggggtgtattgtagaatcaccctaaattttatttatttttattttattttttattattaaatatatagtgacaattttatcctttaaaatatatctatacaaaataactgtcatatactatagtttaactcaaaaggataattttttaattaatttaagtatttcgattatattttttaataaaataaacaagataaattaataagatattaaaaaaattaattctaattattcttatttattatgttacatttctctattgatttattcaatatttgtaatagacgtgccattaatatatatacacatttactttgtcacaattaagttgattttaccatttataaattccaagtctatccacaatgctataaatacaactatatattgttccaagtttctttcaataataaatataatatttccatcggtggaaaagttgtagaaaaatgtatatatattaaatgttttaaaaacattataattacaatttaaaagtaatgactaacaaaattggggatgtagctcaaatggtagagcgctcgctttgcatgcgagaggcacggggttcgatcccccgcatctccatataattttattattttttgcactatttttgaagaccatcaaagtcaaaaaccattacctactatcgattaaaccccattttctcttattaattctactttattttttattaatgaattctgggatttaataagtaatagcagatgtaacaaaacaaacaatagttgcctcattaatcattatttaagtagtaagattgaaagcattattttaaacattaccaacatatttgtatgttccaagtgctaaagggagctttcatgtataaaaagggctcccaaagttgagagaacatattattcacactctataaagacaagctttcattcaatagcatcggttctatccatcctcggttgaaacatttaagccgaatatggtatcctcaacgccattctttgtgcaagccaaggcctttctgcatttggatcaatgaaagaatgcataaggaactgtcctgcttcatcgtccattagctctctacaccatgtcactcgctttggagggcaactaccaggtccgaaacacctgcaagttaaccaattcgaggtttagttttggctgcaattcaacataggctcttcctgtaaatgtgttctaatgaaccagcaaaatgacaaggttttcaagtctgcaaactcttgaccgaaaatttagacaaataaaccatctaaaatgactaacaaaatatgagatagaaaaacagaacttgattaagaaagagttcacttcaaattacttggaattaagaaataaaatagactattatatagaatattgttttcaaatatatggatatagcttttccaccggaaaaaatacctaatatttacaatgctctgataattaagagtcaagatactgttgatcaacaaatgcataagtgaatatataacctacagaaaagtgggctaaatacgtctaattatctatctcttgactcgaaatgggagcaagtttgaaaaaagatcttagagtgtctaggattgggctagaatttcataacaaacaagtaatttcagataaaaacatgttaaaagagaaaaaaatgattgatatgatgcaaatgaaattgtgttttgctctcctttttagaaatcaactcttagatctcatcaaaagtttcatcaggagatagcagatggagattgagagtatacctgtactcataaaagcaagcacttctttcattctctactttattccagttatgccacccgacatgtttgacacatccatccatatatgtataggcaaaaacaactcttccgaaaggtccccatggccgtcctagatatgcatacggagttcctccattgccagtgatcacacatctacatcaatccgacacaattagatcggtaaagagcatacaaaccagttagcggttgcagcaaatgactgaatgagagaagaccgaaatagcttataagattgaaatacttgttccaataccaaggaacttgataacataaagcaaaaaagaattttccaatattacacacctcaagaacacataaccagtttcttcttgagaggacttcctactctgagcagttatgaagccagctgccttgcaatgtatatgacaatgctccaaaagggcagtgctattcccaaatatgaaatccacacttccttcaatgtaacaatctttgagatactgctttccataatgcaagtacagagtatcctgccattattaaggttgcataaattttcataacctttcacaaaccattcttgaaagggttttttatataattgatcataaaagcaatctagtcaattgaaccagcaaaactatcttactctcccaatgaaaacagtggacatacatacctgccatccaaggaatctgcaattgtagaaggcacatctgtcagctgtaactctaatcgccacagcttgacctgaaccctttgaagcataagaaaggaaaattttgtattagaaagtaaaataaagcatatatttcaagtttcaacaaaatccgaaatttggattaatgctatgtgcaattgaaatatatccaaaaaaaaagaacaaatttgtgtgtgttttgtctcacattacttgtatgatttatattacactcatagttttccccatccccacttggacaagacataacttttactagttcagataacaattaaggtgaaacagggtcaggaacaataaatctctttatctccattcgaatttatgatacattttgcaaattcgttattacacgtagttcctacaaaacaaaggattggactaatgacgtatacaatacttgaattctcaatatagatgctacataattggttaactcaatgataaatttggataattgaattaatgcagcgtttggttagaggtaatgaaataaaatagaatggaaaagaaacaattcccattcctatttctatattttcattcctcccaaataaacacctcctcagttgaaaatccaatagaatcagccaaaaggaaccccaaagaggtacaattattttctttcttcatttagcactcaaaaacctcaacctaccagcaaacgagttctacataaacaccaaagtacacaaatttccttacaaaaaaaaaaaaaa

SEQ ID NO: 38333 - DNA, 2262 bp, Cannabis sativa
cctttggatcaaagtaactgcccatccgacggttacagtacatcacggattgcaatccgtgtccgtacagtaacgggacaaaatccggtccctatatatataaaagatagatttataaattctcatctatcgtttttatccatatataattatttttattttatttgattctcttttctagctttatttgatttttaatcccatgctcattggcggcagttttcaaatcttttttttttttaaattagtttcttaattaattaggagagaaataaataatttgggcatattattaaaatgcgttaaatttgttcaaaatcacactaaataacaaaatgataatggtttctttttcttttttttttccttttgaaagctatataataaaggttccaaagaaacaaaaataacagcctagtaataataataatttacgttttctctcaaaaataaataaataataaacatttaattcaatgaaataaatgtcaattagggcaaatgtgtaacgataaacacctatgatccagaccaaatttgcagtaatgtcagctcattatacttaatttttctttttcaaatttcagacagatctgttgttaaatttttagtattataaattagaaaaaggaaaattattttacacactcaactcgagtcaggtcttcttccctaaattcgcactactagggtttctgcgaatcttagccatgaaagcttcggtcaagttccgtgacgatcataagccgctcttaagagccaaaatcccactcaacatattgggatttccttttcaatccggcattgtcgctggcgattcaaaggagctcacccttaatctcggcactttctttgaatctggaccgtccgtcagaatctcttatcgtccaaacgacacgtggaatcctttctccctcgtcgtcaagaccggaactggagcctttggttctccaatttcaagttcgatgatgatgagtgcagagtttaatttactaggtcgtggaaacccaaggttcatgcttcatttcaaaccggcttttggggatttctctttgaagaagactcattcttcagtcttcgacagcttggtgaagccccaaactggcgttgttgggcttgaaagcgatgaatcttcgtcgaaagacgtaggcgagacacctgcgatgatcggctcgtttcccggaaagaaaatctctgtactgtcatcgggaactccgttgactagctccatcgccggtctgttgggcggcatggaagtgacagcgaatacgtccatgccggttcgtggacgagccgtcgtgaattttcggtggggcgttagggctccatcagagattagaagtggagccaatctaacggctgggatttcatttcagaaaattcctttcctggtgatgaacaagatcgggatcgaacacgtggggagtcctgattcaacgacggttactactaagaacaagtccgagaattctgatgtggcagaagcttgtttcaatgtgaagcgacagctggagttgatccacgctgaaaatgggttactgaggaaagccgtggaggaactccggcaagatatatccggcgacgggagggcttactcttatccggcaggtaatgtagataggcgaagcaatgagaagaaaggttcagattttaatgggtttcagggaatgtcaactgagtcagtcgcgagtgaggagttaaagaaggcattaaagggtgcttgaaattgaaatacttggtttgaacttcttgtaatggataatgtttcactgtaaatttttgcagagtaataagagaatggcttagcagagtgagatcatcatcaaaatagggctgaattcgacccaacccaatggttttctttcatgataattatatattagatctatttctctttatacatgttgggttctttcttacaaaatatttgaagcatgctttttaggatactaatttgaaaattaggaaaacatttactttgaaatacatgtttatgttttatataggtgtggattcttacatataaaaatattgtaaaacttgggaaaaagaaacggaatttcggcaagagtgaactggtgtgcatttgaggttcttctgtcttcgacaatgagaagtttgttatagttgttattgtattatattttttttaaaaagaaaacagaacgacaggtttgagaaaatgtgagagtttcatttgaaaaaagatacaaaactggatggaacgatcttctgtgatcatcagaatagtcttctctcaaa

SEQ ID NO: 38334 - DNA, 1127 bp, Cannabis sativa
ccgccgccgattacggcggctggcagaacggtcacgccaccttctacggcggaggggatgcctctggcacaatgggtatgtaaatacacataaataattagctagtgaatttttttttatttaattgtaattaatttgtgttaattacttaattaattaatgcaggaggggcttgtgggtacggtaacttgtacagccaaggttacgggactcaaacagcagcactaagcacagctctattcaacaatggattgagctgtggtgcttgttatgaaatgaagtgtaacaatgaccctaggtggtgcctccccggaaccataaccgtcaccgccaccaacttctgtcccccgaatttcgctctctccaacgacaacggtggctggtgtaatcctcctcttcaacatttcgatttggccgagcctgctttccttaaaattgctcagtaccgcgctggaattgttcccgttgcatttagaaggtaacaaattttatcgctattggtataatttaatattaaacgaaaacataagtaactttttaaaaaaatgtacttatttttgtcacgtgacatatgtatacaaatagatacaaaacaaaaaacagaaaatgaagaaatttggtttggtttgacagggtgccatgtgtgaagaaaggaggagtaagattcacgatcaacggtcattcttacttcaacttggttttgatcaccaacgtcggcggtgcaggggatgtccatgcggtctcaattaaaggctcgaaaactgggtggcaagccatgtccagaaactggggccagaattggcaaagcaataactacctcaacggtcaggctctctcctttcaagttaccaccagtgatggtagaacggtcacagcttataacgtggcaccctctggttggcagtttggtcagactttccaaggccctcagttttaattatattagcctcattggctttatatgattaacaaaaatttagaaaaaaagaaaaaagaaaaattgtatatctaaaataattatttatataatgtatgaacttatattttgattccataatataagagtactttggctaaagactgtggtggctaaatagcacccgttatgcccttttgttttagaattt

SEQ ID NO: 38335 - DNA, 1793 bp, Cannabis sativa
  modified_base (37)..(39): a, c, t, g, unknown or other
tattctgttaaaccaagaattgccgttagatagacannnttaatatataaagatatatatcacctgctgtatccgagttgactcgatctttattttttgaatgatcatcttcaacaaaagttttcaactactctatacatttctaccaattaagacactaatttggaaagtccccacataataaatggtcacagctttaaagaaaatgaaagcaaagcaaaaacaactatggaccaatgtatatatagtaataatattaaaaaaataataatagaaagaatcttttttttttttctttagtcttggggaaagggattccaattttggacttttttttttttttttgcgacaaaaaaaatgtaatacaagcactagttaagctatttttatgactgaatattgttacttttgttattgaataaattattattattattattgaatgtgatatatatagtacttttgagtgttgacatacaaatttgcttgagtaatgataaagagagaaaaaaaagcaagacattaagaaagaaaagaattaaataaaataaaaaattgaagagattacacaggcttacaaaaaagtaaataaataagattgcatgacaatatttgaaaaaatatgagcgtttaaatataatatcatgaaccttgaatttaaaataacaaattgaattttgtactttttttaaatattacaaaatagtacattgaatttaatttttaataattttttaatataattaatttgaagataatttttaacataaacatatacacaaaatgtaattagtattattttaacaccttatatatatcacattattattaaatttaattgtaataacaaattaagataatattttgtactattttaaaaaatattaggctaaatttattatttaacaaaataaataatttaatcattgttataaaacaggtatttattttttaataaaaaacaaattataaaaaggtaaatgaatgagaagcgattttttttcaaaaaaataatgttgaaaatgtaaatgagtgatataagagaaagtgtttataaaggaaatgagagaaaaagagagagatattggctttcatgaatgttattgagggttgtgacgtaacgaaatagtagacataaaatgagtacgtggcagagtgggagagattgcaatgtaagtctttatttttaacaatatagattttggcgagtaatgcatgaggcaatgagctggaaggaattatatatttgagagtgattttttttttttttttactggaatacgtatttattaaggttcaacgtgaaaaaaaaagtttaatgatagtggctgattttattttggagatcgtgaacaatttttatggtgagttaaaagaagatatttagaattagaatatgatcagtggagaagacaacgagtaattaaaagaaattaaacttcacctatatatatttaacataaacatattaccgatcgagcaagactgaaataagaaaattaatgtgatagtttcagatattttaccatggatttatttgagtatatactaagaggtaataaaaatgggcgtagaacaaaaaggccagagaaagcacacgacaaagttaatgaattatgacataagctttttcattcatagatgcatataagagatggagtgatgaaatattcttataaataaaaataaaagagaaactaaaagcatataagtaaatacttaagatttgcttttgttttctttgtttacaatcagttaaaataatagtccaatatttaattaggatatttttt

SEQ ID NO: 38336 - DNA, 11236 bp, Cannabis sativa
  modified_base (1793)..(1800): a, c, t, g, unknown or other
attcatctctttatcaagtaatatattacttggttttaaatctctgtgaatcacttttaaccttgaatatttatgaagatataccaatccttgagcaatacccccaataatgctgaaccgtttttcccaactcaataaactccttctcctttcatctaaacaaacaaaaaagtttaatttttttttcttttctcatatgacccaaaataaaatctttacagaagaagaaaattaccaaatagaaacaagtctaaacttttgttgggcatgtactcatagatgagacttctctcctctccttcaatgcaaaatcccaaaagcctgacaagattagtgtgttggagtttggcaatgagtaaaacttcattcttgaattcaactagcccttgtcttgaactttttgaaagtctttttactgctacttcttgtccatctactaatttaccctgcaaagtttacatcagaaaaaactcaaatgattgaattattatttatctaagagtaaattttgttttttttaaccttataaacaggtccaaagccaccccctcctagcttatttgatgcagagaaaccatttgtggctgaggaaattatttcaaagcttaataactgcaattcattgccatctttactatgtcgttctccaactttgccaagttcttgcaataacaaatcctgttccattctttgcctattccttttggccttacattttctcaacacaatatacaatgaagatatcaacaatgggaaagtagctgttcctcctgttagacccgttacccatatccaccacatatccactgcataccaaccaaaactaacattaataatgtattttatttgcaaccatgatatgtaacatatatttataaaaataaaatctttaatacagtgtttctgcatattcctatctgtatcgtgtacattatagtttattgtggatattgttctatataaatggtcatatataacaacataagttactccactcatcaccttttgagatggaatctcatgattctcaacatagtatcttttgcaggcaagtgatcctattcgatcctcacttatacagatagtaatcatctctactctgatacgattcaagattggtgagcaaaaaatagccactatctaaggaggaatattgtagacattgttccacatgtaataaatggtaaagtattgagctatatataaaaattgattttgagatagaatctcatgtttctcaacatagttatttagtaacgcctataaatttttacaatattaaaaataaagtttaaattatattttatataaattatatggaattttgtagatatttacaagcaatattatatagttacaacataggtgttgaaaaaaaattcatatagatgagaaatttgggtcattattaattactagtgcatgcatgcatatgaagaaagaaaagagagatttgaggtacaacattacctgtggattcaaggagacgaatctctctgaaaccaaccaaattgctattagtaaaactggaatctttggaccaaatctcacaaccagtaccaatgtcatcatttgtagaagcataagcaacacaagaacaattctgtaagcaaatatcccaacaatctaagattgtgagattatctttttcattgaacttgaatccagtttgagacatggctcctaattttgacacaaacttattactattatccatatcaaatctgtttctacaggaaggtagcttcagctccacgcaaccaaatctcaaaggagaagaagaagaagaagannnnnnnnaagaagaagaagaagaagaactcaaacatgaaacttgtgtaaacatggcattcattccatatccctcgatttcaccatttggggtcaaactaagtcttgggaaaatagtgatttccttactaactgagtaattaaagtaagtctcttcctcattcgatacatagctaaatttatacttgtaatggttacaaaactctcctttaaacgaatcaaaacacccttctgattcttttctccatggcccactagtccaatatttactccctctccaccacatgatcatttgattttgatctgacccaatggagtgatccacagcaagagtgaatgaacccatagcaggaaaatcttcagttctccaagaagtcagagtccgattgatccctcttctcttatcaaatccaagcttcattttaggcaaaagggtatctgtagggtaatcaaagctttgccacaacggctctgttatatcatcatcatgacttcgtagaacaaagttgcctgaatcgagcagagtggctgtggcattaatcggagattgaacagagtagagagtaataatagggtgtcctgctttgtgggaaatcatcaagtttccattttgatcgattcttagtgttcctgactcgtctggaattgggttgtttcggtttgcgatccatactggtttttcgttatgtccattgttgttgtaccatattcctaagtatgaaagatttgattttgaagaagagccgagttggaagaatcctaacctgaaaataccagaagctgagaacaactgcatcccatgtttgagttgttgaccctgttctatagtgtctgtttgggaataacaaaacccaatgaagattatacagaatgagaacaagtaaattaatgggtttgtttctcttctcaccattgatgaaaaagttgagagcttgagaaatagtttcagaagtctgaaatctgaattgaacctttgaacgctaaaattatcataccaactttttctaaaaaaattatttagagaaaatagaaatatcaattaatagcaaaatcatagtctgatttgcctactaatggcaatttccatttttctctaataaaagaaaaaaaaaaagtttacaataaaatataatttggacatgaaaataatatattaataatttagacataatcatcggcatttcaaaagaattattcacttttttaaatgttttccatttgtgttatttttatttattaaacattttttttttttttatttttcttcttcctcttggtttcctggaccaaactatgatttagctcatatcctattttagtgtacttttttcaacaatttagtactaaatttattattttttatgcaacaattttaataatttaataccaagtataacaattaataaaagtattttgctttaaaatctcacattttatattatttatattaattaataattataatataattataaatattgttaacataattatattttaaaataaattaaaagaatggttaaaatatatattgaaaaaattaatatatttttaaagtatacttttttaccatatttaaatatttatatataattaattttatttccttaattatattaattttattaatttttttcttattttagtataattttatttacatgaattgttttctcatttcaatttgttatttatttgttaatttaaatttattttgaagtatgttttatacaatgaatataaaataaagaaatatatattttctaattttatatacataattatttcgaagatcaatataaaaaaaaattcaagaggtgccttttgaagtttgttttatacaatgaattttacacgtaatatgaattttaaatttgtttgtacttaaagttaaatatgaaaactttaaatttgttggcttttttttatttttttttgtttctaaattattttttggtatttgttatattatgtatatgtaaatttactttttaaaattcatatttaatctttatataaattgctcaccaaatatctttcatcaaaaaattagttttctcattaaaaaattaactttttcgttaaaaaattaattttttcattaaaaaattagttttaattatatagaggtaaaatctataataggagttcttaaattttttacccatttgattaatcaatcagagagcgcaactcaccaaaatttttttattaaaattttaaattataatttatattttgaaccacttattttaaaattttaattgatgtatcagtgattacaaactgtacacaaacatacagcttaagatattttataaatataaatggccaatcaatgatgagtaaggtcattacactatattgaaaaaaagtgtaaacaagtctctatactctatccatccatgcatatacaacatatataatagaaaagtatatatatacttagaagacaagtctcgtaattgaagaccaaaactaggtctagtagtaattagtaaactactacttattctatacaattaaacattaaaaagcaatgcaaaacaatgcatggatattacataattacaaaattggtttagaaaaataataaaaataaataaataaataaagcatatatatataatgatctgactgacatcaatcatttgttggcctaccaaataaactatatatatatataatatatatatagtcatgatgttcctattttcaaccactgctttataatgatattcgaaatttctttatatatatagtgttgtaatatacatgagcccccattctataaatatatacaacaattaatcttttattaggtgaatagatgtgataaataaaatactctaacgtgatttaaagtggaaaaggttcgtagtacatatgctaatttatataattgaacttattataattaattatatgtaaacaaaaactaataattatgaaatctgtactctctctcctcttatttatttatttaatgaaatattttatatatatggattaaatatgtaaatgttggtcccattggaagagaagacacataatgtatgtatatatatgcatgtattatgtgtatatatagtttgttgattcaatcaatatatatatataaatattccatccctaccatgtatatagttgggataatcacgtggagagagatataaattaacacacagcaagaccaattaggctttattctccccactaattgttcccattcctatacaataaaatacacaataaatattcacaactagtcactatatatatatattatcttattgttttattatgtcattgttttaaacataagacaacttattaatttgtttaattttagtggtagattcttgggttctgtcattgtatttaatcaaaattgttttagaattgagttataccgtaatatgccaacaatcattgtattttatactactcatgaaattgaaattttagaaggttttttttaatgcaaaaagttaattaatctatatgtctttattattactatttttttttcaaaaaaaattgatgtatatgtttctatgatatgaatttattatatgtttgtatgagtttatcaatctaatatttatttattaaattataataatattatatttaagttttattattattttaacttatttataatttacaaatatatatattattatttataaaaaaaattagggttatttcagacttattgtgtgtcatgtctttaaaactagtatatttgtgtttatctgtcgtgtctttcgtacttctcgtatcatattgtgcttaaatatatatttgttgtgtcgtatcgtgccaattaattatagtattatgtcgtgtcatagtttatacttttttcatgcctaatcatactactgtcttccagaatcgtctcggtttcatatagtgccaaaaaaatccaatttgtatttacaatattatatcacatacatatacattgatggaatttaaaactatcaactggtcacctttttacataataacaatattatcataattaatatattataaagtttttaaaattaataactaattatacatatacattaatggaattaaataagaaagttatgtaacaatactaaactttagcaaaaaaaaaaaaaatactaaacttgatgcttaagtttatagagagaaaatcattacttaaatgttgttgtgggacatggtactttttgcaagcttttatattttcaataacagtacttgttcatattaaagcctattattttattgttattgttattttaattcaatcaactacattctgctacacttttattacttgttcagttcccataaaattaatttaattatgacaataataatatctgcctttttcaatactaaaataatacacataaacacaaatttatgatatttatataaaaaaaattggggcacgtaactttttttaaaaaatactatcatattaaaaatataacacaatataacagagataattagtaagaccatataaacataaaaataataagtgtaatttgtagtataaatatttaagtttaattttcagttgtaaataaatacttaagtttaattttttatagaatacttaagttatattactgtaactctgtaagtatccgattgttaagtgttaactaaattaatacgtgacaattcttgattggtttaagttatgaattttaatttttttttaaaaaaattaatttaaatataataaaaatataacatgtgaataattacttaatatttaatggttaagtacttatagagttacaaaaatataacttatatattattattatcaaaaattaaacttaagtatttataatgtaaattatcaaaaataataataataataataaaaaaattaagttgtaagagtaaattcccatataataataataataatattttaaattatgatgctattgtttggttaaatggcaacatgccttatttgactaaaggaatcaatttacaattaataatgacaatgatatatttgaaaaatgaattaaaatataacaagcattagacacctcttttcctacacaacttttcaaaggatggtttattaagtttatatttttgttcatagctgtaaacagtattagtttttactcatttttatcgtttaaataactattatatatataaaatttaaatatcattaaaaaatattaataaattaaaaattatataaattattttaattttcaaaataacttatctttttgaaaactattaaaatttgtaaattaagaattatataacataacttttaaattaaaaaagtcattttttattcaacacactcagaaaagacattttaattcacaaaaaaaattatacaaattaggacaaaaaaaaaacaaatcttattgaaaaaaagaaacaaaattaaagtttggctttctttagaaaaatattgcaatgaaaaaaaaaaaacaacctcaagctaccttataaaatgaattatattaaattaattaacaatttaaaaacgaaatctttatcaatatatgaataaggtgatgttaagaaatgggtgtggggttgattacatttaaatttaattgtaatttggccccatctctaatctcatcagtcatcactgtatttttttttttttgaaaaaaaaaaattggtcacagctgtaccaacaaaaaaaaaaggaaggtgctttacttgggaagttttgttatagagaagagactttggctaaagaagacaattttttttttctctctgcaaaatcccatctgggtagtgttccaaaaccacaacattcgctaaagacactaccttttctcgtaaaagagcaaaatacccattcatacagtgctcagagaactgcccttacaccctcttcatcatcatcatccttattccatactgttgctgagctttgtgttttatctgtgtggactcttaacttaagcttcatctttactcagaagagcgaagcaagcttcttgaaaagtataaacagtgagtgatttagtttaaagggtctctttctgattgaccaaagaaagtgggttttgattggtggtgggattttgagacatggctttctccccactcttctgctgtggaaagggtttagatcggtgagatattcttttgtttattttcaaagctgagaaaattgttatttgggttttgattgttttctgttttatattattattttcacacatatattaattgtaaaatctgggttcagaaattgatttttttctggtcatgggtttttttgctaaagaaaatctctggactgacccatgagaattgattgatttgttttttatttggttattcaacaaagtttagttatttatgtgatgattgaagctagagttttaggtggtttaacagtatagattttgctgttttgattttggacacttagaaatgggaaataaaatagaataataaacgttttgaaagatacacatcattgaattgagtttgttttgatttcaatgtcattcattatttttgtgaacttggtcttcaagttcttacatttctttttatcattctataacggccacttcttctttactccaattgtatcaacaaaaggaaagggtagagttttaagtgatgttgattgtctttacatttttgtattactttatatatttatgcttgttttgatggaaagttttatgtacagtaatgaacgaaagaagaagcaaccaacatggagagtcttttccttaaaggaactacatgctgctacaaacaatttcaattatgacaacaaattgggagaaggtggatttggcagtgtttactggggtcagctttgggatggatcacaagtaatgataaattcatatttcagtttatacgttcattgataattctagtccatttattatacatcaactttactgaatcagttggtataattcttgctttagttttagcttttatgttcttttggcttttaaaaaaccatttgatattctcggactgtttaaaaatggcgtgttcggtcagttatcttaaaccgaacatgttatacattttaattatattgctagtttatgattaaatgtgctcaagaaactagtagttgggttatagaagcagctagttttattagataatacatatttatactttgatacttttatgatacatatggtgtagcatccaagtagcgctaaggatagtttttttttcttttcgaaactaggtccctcgcctaactcttcaatatttgagatccagaaaactaggtgaattgctatatgtaggtgccaatgaaagatttgatcttagaccttgtgggagtgaacctcgtgcttaaccatttcaagacgagagaataaatgaaaagttggtattagagtttcgaagtatattgtttgttattaaaattggaagtaaaggcagcagagtacaagccaacaaggataatgtaaaatttggaaattaaaaactaggtagttaatttcagggaatgattgaacaagaagaaagataatttattgagtattgatgaaaagaaaacatctgattatatcatgttggtgttcctaataacagtactagctgtcagcagttgccttaccttcttttcttgttctttgacagcctgtatttggtttgtgttttatttggattatagagaattctaactagatttggtgcaaacagattgcagtgaaaaggttgaaagtgtggagtaacaaagcagacatggaatttgctgttgaggttgagatcctggcacgagttcggcacaagaatttgctgagtttaagaggatattgtgcagaaggacaagagcgtttaattatatatgactacatgcccaatttgagcttactttctcatcttcatggacaacactcagctgaatgcctacttgattggaaccgaaggataaatatcgcaattgggtctgcagagggaattgcgtaagtactcaactcacattttttagattatgctgcattacttttagtaccggtattaacatcttagttaattttttcagctatcttcaccaccactctactccacatataatacaccgagatgtcaaagctagtaatgttctgctagactcgaacttcgttgcccaagttgctgattttggattcgcaaagctaatcccagatggtgcaactcatgtcaccacaagagttaagggtacccttggctaccttgcaccagaatatgctatgttaggaaaggcatcagagagttgtgatgtatacagctttggcattcttcttctagagcttgctagtggcaagaagcccattgagaaagtgaacgtaacacaaaagagaacgattgttgattgggcgctgccaatcgcttgcgaggggaaattcaccgagttagtggatccaaagctgaatggaaagtacgtggaagatgagctgaaaagggtcatcttagttgcactactttgcgcacatactcagcccgagagaagacctactatgcttgaggtgttggagttactaaagggagaatcgaaagagaaaatagctaaactagaaaatgatgaacttttcaagaaccccattcctgcagataaaaaagaaagctccactggaactgcggaagagacctcggatgcaattgtggaggaaaagagggttaaagatgaattgaaagtggaaactgagcctgcaattgttgaacaaatttgatgaaaaacatttaggtgcataatttggatatttgatgttttgcttttttggctttttttcaatggggttaggtggcaaggctttactgggattttacatggtagttgctcttgcttttgggaagcatttttagtggaaaaaaaaaatgagtgctgtgaatttgtgtttgtgtgcttgttctttcatttttcttatttgttccatcctgaatatatatatgaatgaaatgaattgaactgtattattatttcctgtataatttgtcaaaggaagctgaaatcacttaacacaaacatacaatgttattttctagtcgagttgtttaatttgaatatagtcttgttttgttgtgtcggtgccgttaagaactttatgaggtctgagcttttaatttatagtagtttaaaggaaatgaatgaatattttgttaccaaaaaaaaaatcagaacaatatttgtagaggaccacagtggtagggtatgacaataataaaattaataatcaatctgatactgtctaaacaataaactaaataggtcagtttagctttaacttgaaactgtataattggtatatgtcggtggtgcggttaaaaaaaatgtaaaaatccagttctttacagaaagattaataaaacttaggctaattagtaatttttctcgctgaactttgacatgtagtaaattgtgcccctgaacttttttggccgttaaaaattccactcgaactat

SEQ ID NO: 38337 - DNA, 2591 bp, Cannabis sativa
tgtttccttgtcaaagaggtcattaagttttcggatatcccagttcccatccgttaaaagtaactctgacacaagttcaggctccccttggggattatgattgagtttaggaaagaaatcactcccatggataatccaggggtcattccaaatgtttgtatctctcccatcagcaataagtttacaagcccccttcttcaagatttcttttgtacagacaacattccttcagaaccaagagtctgaattcttaactgtacaatcaaaaaaccttctgccccgaaggtatttagcacgcagcacctgacaacataaggactgttcctcatttagaagataccagccccatttggtgaaaagggcttggttccatttaggggaacaaatgagtttggttttttctttattgtgtaaattcgtaatgccttttaattatttttaatttaataaattaaaaacttttatcctctaaacgttaacatatactacattatacttattaaacttttaaagtcgttcaaaagttctactaaactatggaaactgttagattcaatgacttttattcaatttttctaacagacacttagcgtagatgaaatttagggaagtataatttcatacatgttaaaattcgaggccagcacttagtacatggataatcgtcacattagacgtttgttagtaaaattaaagaattagacagaaatttttaaatctaacgtacatttttaatagtttaagtgaaattttaatagtctgaaaagttttgcgagcaaaaattctatttaatttttgtttagttacgttatgagaaatgccaaaaaacactaatgcttagcatcacttaatgtgtcctaatattattagtgtaataaagtattaagacacaattcaattaaataactattatatggaatattgcatttacaaggtattacctcaaggtgatagtatatttcgttggtgtttaatagtaatacgatatttaaatttgtaatttatatattttaatatatataatttttataatagtgatatgtttatttttaattgttccacatctttatttgatttagttgtgtgaactttgcttttttttttttctttctttttcttacaaaatatttgtttgagctttatttattatttatttattttatttcaaaataggaactttatttgttttaattattataccttgatacaagagatagttctttgaaattttactagttatctagtctcatatttggacaaaatttgaactcaagaaggattggattggattatatatcccaaagaaaagatgaattaacataattccaacccccttcttattctttctcaaaaaaaaaaaaaaaccccttcttattcttcaattaaattttaaatataataattcgttttaattttaaaataataaaatatgtatattgaaacattttactacatattatattatttttaaaattattattctcatcaaaaattaattaatttctaactaataatctaatctaattcattcaaatcctacatactaaatgagactttaaagagtcctatctcaaatttttatatataatttaagttaatattaatcatttgaatatgactctatttatttggatttaatcttagtgttgggctaatactatgtgaggactgacgtccttcactacaagtctccttgccttgggatcagggttgtgctgggaaaattaaagcctaagaccacgtaaacttacgaggacttttttttttctttttttaaaaaatactaaaaaaaattgatcttcaaaaaaaataaaaaattagtaacataattttaaaaatcgtcatctttaaaaaataaataaaaatcatatgataatcttttttgaagaaaatattaatcaaattatgtggtgtaaatgtaatcatataatattatattaatacacatctataacaaaaatgtgatgtagtgtgatgaaaaactgttgtttatatttttcacgagatcattcgtttgattcttaatataatattttttaataaaaaaattgtttaaaaaatgagaagcctcgctaaaattcaaaatcaaaaaaaaaaaagtatttacgctaaagttactttgagatttataacgtgataaattgtatttattatatataaatttaataatattttgtgtttagggccccataaagtggggattctatgctcgaacttactttgtctacttgtaaaaccgatcttgttggggaaaactttagggcaccacttgggtgacttggtgttgattgctaatttaatgttattgccatttctatcctagatgagtagatgttgatgtaatataactataataaaaataattttaattatatttatggtaaatagtgacataaatacttacagttttaagtttataagtgacataaatttaatgtttatttttaatagcataagtattcaatatttgtaaaactgtaataatttctaatttttatttccttaaacaaagcatatataagacccaaattctaaattatttgatcaaagattaaaacatgcagtatcatcagttacttccaaatgttctt

SEQ ID NO: 38338 - DNA, 1809 bp, Cannabis sativa
aattcagggttggcgggaacggccagttttcggtaagatacgttacatgaactatgcagggtgcaaaaggaaatttgatgtggatggttacattaactatgtgaagaaatttgtgagtgaaatgaagaaaagaaaagcagagaaccagctctgtggaaagccaaaagaacttcgcagttaacattttagacctctctaatctaaaggctctaactgacagagtaaacttccgagttagcattttagaccaatttaatccaaagtcaaaggaatttttctgtacttttcagaacagaattgttaggaagcctctttttttaaaagaaattgtaccaatctgtagttttttcagtgcgagagatttcaaaccatggggttcttttaaatgtacttttgattatagaatatacaagtgtcgttatataatctgtttcttttctatatgataggattcatttacaagaatgtaaacagaatcatattcgtagtaattcaagctgcaaaatatctggttaggtgatgtaaaaaaaacagctgattgacttcatgaatttttatagctttcttatgaaatggaataatagtggagtaatgctataaattatctaaaagaagaaacgatttacaatttactctacaattattttgtctgatgctttgcccgtccgcgcccttttggctcaaagaattagaattgatgaggtgtcgagccctttgtgtggggttgaggaggaatcgatggaacacttttttctctattgtaactttgcctaccatctttggcgttcttcccaaggggagtcaatccggttcgtgaatcgggtgcccgggtttgagattgggtaacctttctttggaatttgaagtcgagtggggtggattctgtaaagcttttcctgtatgcatcaatcactacaatttggaagacccggaacgacaagattcgcaacgcctccttgagtaatattaattttgctattgattctatctctttgtgttattcagattatgcgtcttgtttatgtgcgccggcgttggctgtaacactccagtttggtcttctcttccagatgattagatcaagatcaactgtgacgttaaggttggttgttattccatgtgcgtgacagctttggctggggaccacacggggacagttttgtgggtagcagctaacatgctcaacttctctgatccactgattggcgaaactgcgacatgtcgcttaactttagatacaacagtttcgatgcgacacccttttattttggtggagagtgattctgagctagttaccaaggcattgaaaggaaccttgtcctgttagagcattgataattatattattacttataattaactctctaaacactttatgctataatttttcgtttatttttagatgtaagttcacggcccataatgtgactaactagacttttgctcagaatatttcgagtatggtggatccctcctctataccggaacttatcttttgtaatgaccgcgaggtctaaccttttccaattatataaaaaacgtactatcaaaaaaaaagaagaattgcttgatataataaaatgtaatcacaggtccttgaaaaagaagataaagttggtcaatggccttttgaatcaatcagtgtaagttaaatatttatggacacttttggtatcacacacccactgatattggcgcatgtcaaatataatacagagcccaggaactgagccagggttgagggctcattcagaaaaatgtaccaacatagtacgagccaacagaacaaatctcaagaatatacttttt

SEQ ID NO: 38339 - DNA, 4332 bp, Cannabis sativa
tttgatactggaggaattgatttgggatgtgaaggtgggtgtacaacttggcaaaattcaagaaatgctaggggtcgaattcgaaagaggctggacagggtggttgcaaaagcggaatggtgtattgattttcaaaatgcaaaagtagtcaaattccctattctaggttctgatcatgcccctatttgtttgcaaaccttgggagacaaccttaaattgagatatccttttcgattcctggaagtctggacttcgcaccctgattgtgagagagttgtcaaaggggcgtggaatcagagcgagagtctgttggttcgaaaacttgcacgtaccaaatgggagttgaagaaatggaaccaggaggtgttcggattttgtgacaggaaattggtaagcttaagacaccaattgggggaaattcaaagagatattatcactcaggaaaatgtccaaagggaagcggaagtccaattggaaatattggaaatggagggtagaatggataggatttggagacaaaagtctcgggaaaattggattcgatttggcgatgcaaactcaaaatttttccactcttctactatcatcaaccgcagacggaattttatcaacagtgttgaagtttcccctggcgtttggtcgaatgaaagggatgttatcggaggatattttaatgatcatttcctaagtctttttgagtcctcgggtagtaccattggtgtggagtttgagcctttgtttgtggaaaaggttactgaagaggataatgattttatggggcgattgccggaggtcgaagaaataagggaagtggtgttcaagttacatccgttgaaggcgcctggtccagacggcttccctggtatattttatagaaaatactggcatacggtcgggcctcaactctgcactatggttcgagaattctttacgtctggagtcctcgacaaaaagatcaaccatgcttttatttgtctcattcctaagaaagtgcaggcttctgaattcgatcattttcgccccattagtctgtgtaacttcagctataaggttatctctcggattctcacggatcggataaaagtggtaattgatcgattgatttctccttgtcagtccgcttttatgccgggaagatggattgcggaggcttctattatggctcaggaagtgctgcattcgattaaaaataagaaagggaaagttggggctatggcaatcaagaccgacatgagcaaggcgtatgatcggcttgagtgggatttcattagccatgtcctcgaggcaaacggtttcagctctaaggtgtgcaatttgataatgcaatgtattaccacagtcagattttcgattcttctcaatggggcgccattagctcccttcaatcctaaaaggggtattcgtcaaggcgatccgctttcgccatttatttttattctgtgtagtgaggtcttatccaagcttattttgaaggaggaaaggttgggtcagctttcgggggttcgtatagctagaaattctactcccatttcgcatctgttctatgctgatgactcaatatttttttgcaatgctacggttgcaaactcggagaaccttttgaattgtattcgtacctatgaagaatggtctggtcagagagttaacaaacagaaaagcggcctcgtattttctcctaatactccgagaagctgtcgagaagaaatcaaacagaagatgggaattggctgtctgaactctagtgagaaatacttgggtaacccgttcttcttctctgctaataaaagaagagatttccaattcatcaaggagaaaataacgaatcgacttgaaggctggaaagcacgtcagttggcccaagtggggagatcggttttgatcaattcagttttacagactatcccaaactactgtatgtctacggctgttgtgcctcttactctatgtaacgaactggataggattcttgcgagattttggtggcgaggcaattcggaaaagaatagatattgtgctctgaagagctggaatgatttatgtcagcctaaggcatgtgggggattgggttttagaagattggcggatatgaatgtggctctacttgccaaattgttttggatggttttgaaagaagaggataagctatgggttcagttgctcagagacaaatattgcagaattatgtccccttggaatgtcgagaaaaaagatatggattcgagggggtggaagagtatccttgaggctaggaaagtttgtttggaaggggctggtttgctagtagcagatggaaacaatgatatttgggacagaccttgggttccacatatgagcatggaggagctaaagtacggctttcagattaggccaaatcattcgtgttggcaaattaaagatcttttcgagaatggaatgcgtgtttggaatgaagagttagttcgaagctgttttactccaaccaatgcggaggcaattcttcgaatcaaacctcttgatgagggggctgatgttcttttttggaaggcgtctaaatcggggaagttttcggtgaaaagcgcttattggcttagtcaaaggcatagatttaaggagccctccaagatgtggagtagcctttggagaacaaaggttcacccccgtcttcaactgttgtgctggaaaatattttcggatagcttgccaacgaaaggaagaattggcttatgccgtggagatcagctgatgtgtagtttctgtcattcctccgaggagaccactttgcaccttttctttaagtgccaggtggttaggagtctatggtttcgaagtgggtggggtctgaggagtgatagactcaactggaactcgttgaaagattgtggggactggtggtgtagcctgacggaggataatctaattgttttcgctgcgtgtgtctgggattcgttgtggaaatggcgtaatgaagtgatccataaaggaaggacctgcaatgttgaagagatctatggagattgcatgagacggtatagtgagttccaatcgactcacttctctcctactgtggatgtaatgggtgatttgggcggggagaaaccccaccaaaatgtgaacttggttggatgccgttttcgggtggatgcatccgtggttgaagaggctgctggttttgctgcggtgtttatctctgaggatcaaccgtctgtagtggaagctggtttgcccattttgaaatcttcttttgctgtcagcaatggtccagtatatagtgttctggaaggggaacttcatggcattaagctggctttgctaatggctaaggagagtggacttgaatctgtaatcattgagacggactccaaggctgcggctgttgctttcgagtcaggacatatgcccttctgttgggatatctaccctttgttttgcgaatgtcttagactttgtaaaaatttccatagctgtgttgtgtcttttattcctcgtgagcaaaacttactagctgataagctggctaagtgggctagggagtgttctatggtttgtaagggtcggattgaggactgtgatccctctttgtttggttttgtgttgtagtttttttcttgttttttcaataaaatattcacttatcaaaaaaaaaaacacgatccggacatgctgcttttatccttttggctgatccttgaaacagacaaaattgagtgggtcaccaggaaactgcctggcatcccattcccattggccattaccatatgtaattttgattataaagcaactccgattggaacatccaacagcagtccctttcttttcttcatacagtatttaatgcgttatgtatattgtaattgtatacgtgaaacatgtgctctttctttgaatttatgtactgcttcccagttcccactcaaggtgttttaatctaatatgtttccatttccaaacccaacaaacaacttcaaataatatcatttcagttatggcactgacactgacaagaatagcttctgcatttggctacttctctacaattcctcgtctcctgttcaccaacgcaggttcccaacaattaccggcgatgtctctctgccgtttttacattttccaacctttctccgccggctctgcttcacccggtaagctattgcgttgcagtatcgctttcttaaaattattttagggttcaccaaatgtttgtgaaaatgcgtctgaggaaattcgctcgcccttcctctcctttgctggtcaaactcaatgccattaaccatttgccttaaataatcacacttcaattaactagcattcgcaaattctctgaatttcaaaaatagaggatggtgcaggagaaaa

SEQ ID NO: 38340 - DNA, 2301 bp, Cannabis sativa
taagaaaagcgtttatatattaaacaaaaaatagttagacctaacgttcatatttttttttttcaaatctaatattagcaaaaagaatatatttagagaacattagtttgaattgatgcgtgacaaacacgcataaatatatgtatatacttaaagattccttgtgacaagtagtaagtgagaatggtattttcttcaaaaatattaaaaagaatatcaattgtgcttatatcagatgtaaatttatcctacgcatgcatcctgacccttccacaccatgttttgttttttttatctaaaacaatactacatttaacaaaataaaaggccgaaagtagtagtgttagtagaacccttcgacatcatgtcattatgcaagggggtgttcgcggtgtggttggtacgggttggaacattttgtttttaaattaaattatttatgcgatttttataatttctcggactacaaccagcaaaaaccacaccgcaaaaatatagtgtggtgtggcgtgatttgagcggtttacactatcatcattatcaaatattataccaaaaatttaaaaatccatctataaagttttaacaatacaaaaaaaatcttattaaagttttaacatcataacatatatgttaatcatcaatattaatcatcaagtcattatatggaattatctctaaaaacaaataatgcaatgtatgcatatattacattgttagcctaacccaaatggcaggcccaataacattagacccaagagtgatccaagagagagccaaaggatggatagaagatgctacccaaatggaagatccgacttccccaactgaatacagcagtggtagcaaagaagaaagccaatcagccatggaggaagagagagtgcctgcacgtggaactcgtgtgcgcgttagacccaactggctccaagagtttgttataatggagtgttgatgattgtggtgcaaacttacttgcttttgttattttattttccctaaattttttgtataaagagaataaattgtaataagttgttgttgttgaacgaattagcaagaatttgctttggacattggccttgtctcgaagaaggctttttatgctaacactggtgctttcattgtatcttcatctccaccatgaagaacaaagaacttgttgccatgattcaagctttggaaatcaatttccagaaacaatcagatgagcaattcgctcgattcaatgccagattagacgagtaggtgactcatttggatggtcgaatagaccaactgcaatctcccttgtcaaaaccacaagtgggggacgggagttcagttagtggtttaaattcaccctctatgcatcgatcggaagcggctactgaccttcgtgatgtgaattcaattctcaaaattattagagtaaaggttcatcggtttgatggaacaaatttagaagattggatttacaagattaacaaattctttgacttgcacggggttctccaacgataccaggttttctatggtaccatttcatcttgatggcactccctatgcttgttttcaatggatggaaaaaggaggcaggttctcagaatgagagtcctttcttcgagcattacagttacttatcggagtatcgatttatgatgacccattgggaagaaatactaagattactcagacagggcgggtgtcaactttcaaataagaatttgaaggtttaatgactcggaacaattcttcatcaattattttgtctggggcttgaaaaatgagattcgccaggaattgatactatctaaacaagttgatttggctgatgcaatggccaaggcttagttatttgaaggccgcaatgacgatttgtaaggtcgtacttgtaacgagggtgtgcgttctgcttggtgagtaagatattcgaactcaacaataacaatgacttatcaaggtataggtttagcctccatcggatccaactctaatgtaatagtagcctcaaagattcaaaaacctagcagctcttccttaccagttaagtgaatgtctcctgcagagatcaaacaaaaacaagagaaggggttgtgttccacttgcgatgagaagtattctcttgcgcataaatgtaggaatcgagttcttgtcctttgtactcaagaaaatgattgaggtgacaatggtgaacttgaggaggaagcctcgattcaagagttagaggatgggttagatgatgaggtaagctttcattccttgtccaactctattaatcccagaatattttgcattttagctcaacatgcattcgaatcc

SEQ ID NO: 38341 - DNA, 1661 bp, Cannabis sativa
gattgttgacatattgtctgttatgtggtttaatgctccactgtccacatactagttattttcatcaggtcgagggtgttgtcaagagttagctaggaaggcttgttggttattaccatgtggggaggcagaggaagacccctgggatgtattaagagcattgtttggagggacaaaattggcatcaaccctgtagtagcatttgattatagggtgcccaggtttgatgcagagtagcacacaatgcgcctttgatttcctcaaccttgaccgcgtcctcgaccatgaaagttagataacctattagagttagagggaacaaaaggttttttttagttctagcagcaaagttagtagattgattagcaagatcagcagtagggagcgtgctagcttgatcaatgcacatatcttggctttcactactacaaaaagcccgatttgcatcggtcaatgtgtgtgtccaaaataattgatcgacgcaaaaaataggtagagattttatgcttcagaggataacccgaagctaaaagaaaccaattaacgtcaactgttactctgactctaaaagaggaactgagaaaaaaggtgaaaattataaaaattgtattttattttactttggtagaaaaaagactctaatttctttggcttcgattggaaacagaggttaaaacatttgcgactgttatccaccgaagaaaaaagatttaatttttgtatatatataataatcccaaatttcattcacgctgaaactcatttcttcctcatatcaaaattaacttgtgaaatccgagcacaacccaacttatttcttccccattttgaaagaccaccgcccacttcccagccctccctttctctttctcttggtggctctgtgtgtgtgtgcttgagcattgccctcattgtcgactctcggcacccgctccgttcaaacatgagtttgctatgcccactccatgaacatgacaccattctcctcctccctccatcgtcatgtaaaggtaagcatctcatttttttccctaatctctcactaaaatcattctctctccctctttctcttaattattctcattttttgtaggtggatggagctctttcatggcagtggcaaaaagaaggtttagattgtgttctgtataatttttttacgtttaattcttttgttattatgttcataaatattatttttattttaattttcttcttaaatttgttggcttgagattgtttcctgaatatggttttggtattgtaatttttttttttcaaatctgtggtggtctgatgcggtgtggtggtggttctgatttttttatttttctttttacccttttgctttggttcataacttagacatagtatttagatacaagttgttattaatttagtgttgtgactaaaacacttttagtcacaacaattgtaacttttgtgactaatacttttagccacagactttttagtcacaatatataactaacgatttatagttagttacaactatttcactttcaatcacaagtttgactaaaatcaaattttttggtatattattgttacaaaacaaagtgatatacattaagaaagggaaatttgattttttatgcttacatttggttaaaaaaattttcctaaacaaataataacta

SEQ ID NO: 38342 - DNA, 1449 bp, Cannabis sativa
  modified_base (38)..(41): a, c, t, g, unknown or other
cctattcccattcccattcctattcttatattttcatnnnncccaaccaaacgcctcctaagtgcatttgatcaagtgctcctatacaatattatcttgcatgacaactaaattaatttaggctacgtatcctaaaaaccatcaatgaagtgtttgagccttaccctatggttatcttcttagctacttgctctcactcctaggtatcccaattgaagatgaaatcgatgtttatgaatctaatgattcgacactcttggtgagatcacattcaagtctatgcgctacaagttcaatgaagatgaaaaaagtcaatttctactaaacaaatgtcccatgcccatgaggaagcacccttggtctcaagtgaaggtgaagaggaagagaaagaagcccaagctcaaagcgatgaggaagccgaagaggaagtgcctctaataccccaagctcttcacttcaacattgaagaggttttactaacctttccacctcaattacttccaatttcaacaacttcagaggtgaaatgaacactcaatttttcactctccaacatgagatggctaccataaggagtgacattcccaccttaaggggagacatggagcaaggttttgacaacatccaagacgaaatggcacaatagaaggcatacatggatcattttgggcctccaccaaattagttctcttgcatttttttagcatcttttttcatatttatatgtttttagtttgtgtgcaaaggcttagtgtcttttgacttttatgtgttggatgttatttttttttttggtcttgttagatgttattattattttttttgttatgttttgttggatgttatgtgtttggatcttttaatctcaagtgaatggtatgtgtttggaatatctaataccttttgaacttaagtataaaattgagggagagtttataaaagcatgcaagataaaattaaaggtaattttttacccttgtacacattaaggggtagctaatttaatatttattgcttccatttttctttttcctttttaaaataatcaaatatttgatatcatcaacaagtgagagattgttaactcaaacttttaggtctccttgttttgatgattaacaaatattttatttgattattatttgttattaatagtttgttaatttggtagcacaattaaaatgtgaaataaatttttctaaggcaaaattaactccaaagacaaaatgataattttaccaaaattctcaaaagtgacccaaagtgaattcaacaagtatattaactacttcatacttgataagagcaaaagattcatcaaggaatcaaaaattcaagtctctattcaaaagaggacttcaaacgctcaaagtcaaaagtcaatccaaaagtcaaagtcaaaatcaactctcaagaaaagtcaactttggatcaaaacatgaaaatcaa

SEQ ID NO: 38343 - DNA, 1718 bp, Cannabis sativa
  modified_base (63)..(69): a, c, t, g, unknown or other
actctgtgacagaaaggaacaaggattagagatctgaacaaaaggagtcatttaattccgctnnnnnnnatgtaaggtttctcatactttctatgtgtttaagttttatcgttttagagattcatatttaggatgttaaaaaatatacttgttagtaaatctaggtcctagtaatatatattccaacagttacttcctaataaaactaagggtagaattgtcttttggggaataaattatgcttttctaatattaattcctaaatttatctaggttttatctagctgaataaaacaaattaagtttcaataattcaactcacaaaataaaacatcaccttttcactctctctctctctcctcttgttcggccaaaccaagaaaccaagataattcagattttcctttaccattttagatcaaatattgaggattttagcatagaaatccaaaaggttttgttatccagggttgaggtaagtctctcctcctttttctcttcaattttcaagtgaaaagttaggttggagtatgtaattttaagcggatggttttgttgagtttggttattgttagaattgagttctagggattaaattatgtttttttgaactagtttagggtaggttgtgtgttgttggcaaggtttgagctaggtttaagttttgagctcaaacttagctcaactatggtaattttttatttaaggctttatagttgcaattgtttgatgaaataggtttattttagccttatttgaagttctggaaagtttggaagagattggagttattttggttgaattttagaattttgtgaaaaaagccactaagaaaatagcaggccatttctggtaaaatagcctaccgtttttcaaggcagtaaactcataaaaacgccttaccgttttcacaaaaatggcctactattttttgggatacttttcttgaaatcccatttttcagcaattttctcaatgtgtaagatttagtcatgctatttagcgatagggaaacttttagtttcaaggttagaaaccccaaaagtaatttagcggatcacttaccagttttacgtaaattgtgacttagggccttaattcatcgagcagcaattttcactcaaagttaccgacacacttgcattcagaatcaatgtaagattagtagaattatttgcactatacatgtttagtgtgcatgttagttgttgttagaataacatatcaaagtaccagtgaggtgtacatatagttgcaccgaggtactaacaaatatatgttaggcaaatcactggccatcatattagcatatcaaggtatcagtgaaatgtacatagagttgcacaaagatgtcaacatatagatgtcaagcccctaaatagtatgaagtagttgctaccacatcaatacgactagagtactgagaataggctagattcgtagttagtcatacttgtcaagaacattcctgacccaattatcatatcgtgaataggtgtatgggcacctagttacggtctagatatatatttatgtttatgattatgcttttcttactgagtctgtcgcctcacagttattacgtgtacgtgtaggtattagctagaactgaaatgggatgagtctaaagctaagggtgaagattgtacatatcaagacggttagacctggagtgttcagggtctttgggacaatttaggctcacctttttaatagtc

SEQ ID NO: 38344 - DNA, 3005 bp, Cannabis sativa
  modified_base (2796)..(2799): a, c, t, g, unknown or other
  modified_base (2898)..(2909): a, c, t, g, unknown or other
atgaaatacttgaacataatgcttctacccccctcgttgattttcaagcgttggaccaatgatgtgaagcttacaacgctaaccacaagcaatgaagttggttccactgaacaagacgagctcatacaaatggtaaggtatggctcccttaattcggacactaacttgttgaacttttatgcttcgaaactagacaactcttttgcatatgtaaaaaatgagatagcacgcctcactgcatactgtaagaatgctttcgatcaaacctcatcaaaccaagatggacaagcgtcagaatcatctcgtggacatcaagacaatccaaacattgtgagggatccgataaatgtgaaaaccaaaggcatgggaaattaacaatgtaatatatattcctgacatatgaacacaaccatttaacaatttgttttgaattttggttttgcttaataaaactttataataaaaaaaggatgaaaacaatagaaaattatgagtgacaattcttgttattgtgtcatttataggttaactgtttaattagtcaaccttaatccgatctactatactataaaaaatcttatgtttagtcacaaatcacaataaaatttgtgcctaaaagtaaaatagttgtggctaattacaaattattattcttatgttgtgacttaaaaatttgtggctaaaaatattagtcataaaaatcacaaattgttgtgcctaaatgtattttaattagtgacaatacttattgtgactaaaactaaattagtgacaacttttgtctaaatactatattttagtcacaagtaactttttgttgtgattaaaaatcacatttggtcaaaagaaaattatattgtgactaaaaaattgtcactaaaaataactattttttgtagtgatgtttagagttttaacacattaaggattcgtttggaacatcgtattataggtcgtattgtattgtattgtattatattgaattggattatacatcatattttaatataatactatattaaactttaatttatattaaaatattatatatttaggtgtccatataaaaattaaaaccacatatagttttacataaaaatattacataaaatataatttaatataataaaatacgataccatacgacctaatacggcgttgaaacgagccgtagctgtattcatatgtatcgattaaacttatcctatatatatatgcagttgatggatatagccgtagctgtattcatatgtatcgattaaacttatcctatatatatatatgcagttgatggatataattagtatcacatattttgtttttaaatatatatgtgtttattaatttgtttcatttatttgaataataaactgaataaaattatataattaaataatttatcataaaatatcaatacaaataataatcttcttaatatcaagtgtgtacaagttatcatatgtagggaattttctttctactctaaatatttttttttttcaaaaaaaaaatatattttttgtatttagttgtaaattaataattttaatcatgaaattcttaaaataaaggtcttaattcctgtcaacttcatttcacacaaattgaccctaattcatctaaaaaaattattgtgtcattggattttatttaaattttcacttctatctgtcattttatattaggtctcagctgtcatgacgtcctgaaattaattgccacaaaaataaaataaattacctttaaagttttgtaataaatttttattttaatattttgtctttctcaattcttattattaataattttttgagtaaatgattttgtttaatttataataacacctttttaaaatatatatttgatgcgcatgatgatatatgtgatgcatgcatacacacatttatacatcatatattagtgtagtattgacagtatatataattagtgtagtttcttttttctgaaaaagtataattagtgtagttggcagttgctttctttcttagtatgtatgtgttgaaggttctgctggttcaagttctaaattatatattgtaatatataaatatttaaattaaaaaatattagttatagaaaagaaaattatccttaaatttccatcatatgagagagatgccataatacgtaacgacgtatatatctacaccattatatcatcattaatatttgattttatttatttcattacattttgaaacttaaagggtattatatatttcgatgtatatatcctttgctaattatactcgatgctacctagcaatgggtttgatttttctaaagggacatacatgcctctgtaccataaacaaacattttttaaaaagaaaaatatatcttttgcgtatcaacgtttgtcaagcgaaagaaaaagtatatatatagaaagaccaaataattacaaagcgtgagaattaggcaacaataatagtactatgtatagtaattatatatgaagctgttgatgatggggcttttgttgttttgtgcacatatagacaaaaattcataattttttcacataataaatttatatacatgggttttttttcttaccaattgatcactagttataattgaattatacaatatataaccacttcaggctaactggccataaaaagttgagtttgaattcagaggagaaaacaaaatttaatgtgaaaacaaactccttactaagcaaccgaatattaaggtttatatcagccttattatatgtttatatattaaaaatgcctatttaacagcaattcttggtttaacagaatnnnnttaaaaataaaagaatattctattaaatttaacgattaggtttaatctcccgttaacaaataaacccaataattaaactaaaaaattaaacaatctttnnnnnnnnnnnnatctctttttaaattaaaaaaaaagccacatatctctaacaaacctattttcacctccctgaattcgatttttccacatatctctctgaattcgat

SEQ ID NO: 38345 - DNA, 2646 bp, Cannabis sativa
  modified_base (166)..(169): a, c, t, g, unknown or other
aattatactattttaattattattaaaataaaaaactaaaatattaaataaaactaacactacgtggcttggcacgtaacaatcacctagttacatattaaatgcacgtacatatacttcacaaagttttaattaacaccctcaaaataaaaataataataataannnnaataataataataataatagtgcatgcacttagaaatgtactaatcgaaaataaataaccaaacaaacaattttttttcttagtaactttgcttaattataaatattagagctaataatcttgtttttgttttaattgtttcatatatatgtatactaatactatataattattattcaaaaaaaaaatactatataattataatatataagatataggatcttacgcttttgtagcggcatagattgcataaagaggatgagaaggtacaacaatggcggcaccagagccaatattaacgattgcccctcttttcctatcaaccataccttttaaaacagctcttgtaactttagtagtaccttccaaattcactctaacaatattcatccaaacactctcttccacctcatgaaagtaccttgctgcagggtatgttattccaacattgttgatcaaaatccccacgtccaatcctttcacagcctcctcaacacccgccacacccgccgagatatcgcccgaaaagtcgaaaacaaccctctttatctttgtcccaggactactgagctggatttcatttgagacggtttggagcttgtttgagtttctgccaactagaatcaagtttaggcctttctcggctagttggatggcaaaggcctttcctatgccgtctgtggctcctgtgattatggcccatgaaccataggtctttaggtttttggaagatctgatgaatgttatgaacacccatttgagtaatgagatgacccttttgagggttatgaagattcctatatatgttatgagaatgagccataagggttgtgttttgatcatcatcatcatcatcatcatcatcctttgttttttaggctctatagctttagaatgataatgatggtaaatataagagatttgttgggttttggttaatgatggtgttttcagcttctttctatggatagttataatagataggggtcatattaaagaaatattaattttaactatgaagaatatgccgactgtgcataaataataaatattctaattaataataagcatgcaatatacatgtttatggtccacaccatattttttaggcttttggtaaagttagataaaggttttgatatatatatcgatatgtaatttatttgatatgtattaaattatgtttctgaacttttttaattattaaaagttctctctgaattattaaaattattgaatttaagaacttttattcaattttactaattttgtgattgttcgtgtactaaactatgctccccaaactttaatatctactaaatcatgtgactcgaactttgacatgtatcatattaagtaccctaaattttttatctatgatagacttttttttactaaaattagacaaaaatccttaaattcaataatctcgatagttcaaaagaaatttctaatagctaaaaaagttcaaataacataatttcgtgcatgttaaaattcagggacaaaaatcttaattaatttttttttatttatttattgtcttataaattctggttaacgagaattgataggactattgaaagaaaatggaatgggtaagatgtgtgatgcttgtgaatgccacaactattcaaaagagatgagagattttttaaatggaactatcccatagttcatgcaatttttgggaccagaagagagtaggtggcaattttatgtttggtagagaggacaagagaggaaagaaagttgtggacagaaaagtagagagaagagaaaaaatgtgtttggtataaggcaaaagaaggtaaaagagtgttcctattagacactaatagtgactagcattacttaaaagtgacaccgaacgattagttagtaatactctataaaaattattatattgaattatataaaacacaatatttaattgtactaataaaaatattatactttaaaatgtgataaacaccaaaaatataaattaagggaggcaaattgtaagaaaaaataatttgagagccaaattacaaaaacatacaaaaatacatataatattttttgttgggacttgggaggactacaagtgagtgcaaccggtgccttttaacatctcttttctccttttgtataagatcaaatacaaaagtgatagagtagtgagtagtgagtagtgtagtttagaaacaatgccacataatttaagatgtcaggaattggttgaatgacaaatacaattaaatgtgagcaaccaagtatgccacagaagcattaataaatcggtagatccatcactaaattgcaaagcctgtgaagctttttcaactacacttttttcagtgttaaagtgttgacagaaactctaaatgtatcaccacggcaccacctatatagaatgatagaatcaatgcaaaaattgacctcctttattgtattgtatgacacttttttctctttaatttttgtggggtcac

SEQ ID NO: 38346 - DNA, 1311 bp, Cannabis sativa
ttgaaatccacatttttcgaaagatttaagattgattccttagaggttaatttaatttccacactgaccttaaaatagaaaaatcttatacaggccatatgtaagacattatcattcttattaaaacatattacttcataccaaccaaccctaacggtaattaaataaatttatgacttatatataagaccatatccttatttatttttctttttaataattaaaatgaaaaaaataattaactagctacaattaataaataaaaaaattcccattattaaggaccatgactctagatcgactagagtactaattttaagacgtattatattaagggaaattattttatatattatttttttatttttttttctttaaatttgcagtttgagtttgtaaagtggtttctccggtggtttctatatatgtaggttgctatacgatttttggttgcgatttaagttgctctagttacaatagaagtttctatataaaattccataaaataataatacaaaataaattgtatttaagtgtaaaaataaaaaaaaatcccttatattaattatacaactattaattaattattcaagtgtaattagtgtgttattaattatggaatataatggactgttttagtcaatttgaacttttatccttttagaattaacgaagcttctcatgtctaatgaaaatatatatactaaaattatcaattaactatctttttttttttttttaatatatatacttataaatatttcgaaacaccacactaatacatatataatcatcaatttgagtaatattaattatttgcattgttgccaatttgttgttttgcagctttgcttgactttttatgccattatattagaaaacattaaaattatttaggagtgttaattaagaatttttattcaatttaattctgtttaagattacatattgtcagaatattttttataataatattcgttatagttataatattatttttgtaaatttttaaaaaattctaaatatatagtttatagtaacaaaaatagaattcctgatattgtattttaccatgtattcaaaaaatttcaaataaaaaagattcaaaaaatcttaaaaatttattacaaagatgatattgtaaacataacgaaaatatttcatttacaaaaattaactagaattttacaacaagaaattaacgatatcacttttataatagttattattaattaattatagccaatttaacaacttcttgctcgcttgtacgtaacatatataattatatgattaatgttatatatatat

SEQ ID NO: 38347 - DNA, 2749 bp, Cannabis sativa
gatcttatgacgaccttggaggcatatacaattgtggccttactcgtggtttctcttagaaactctgtataaggccaggtagtgagtccattatagttaattatacaacttaagacttactatacatccttacttacggtacttggtcgatgattgaccttgtacattgtgttttacctggaaggtatcgttaggtattgttgacttgaatgtgtttgtagctttgtcaggttgttcacctcctcttatttcttccatgtaagtagcaccaagtgttgaatagggagggtgatagccgcgtagatccctatttacttttgtatttatggccagaacaaagcagaccctccatagggtgcctccatatgaccatcacgtggccaaggtggcgagaaggggtcaaattaagatggtggaggagactgctcagccccgtgctgatgttgagctagagattgaccaaggtgctgagagttttgatattgaatctgatctagaggaggttgcatcggggaggagaaggaggtacaggagttgttctatcctcctagattatcgcttcggtcgctatgatgctaatggtaacccgctgaacaagctcgatcatcctttagagcttgggctggatcatgtcttagaacaatcttctgagctagagatattggacgcgagaccataaggaaatagttgggtatctcccgctttttctctttctgatgaagcctttagcgaggtcatttctagtggcttagtgaggggtgtcaattgggaaataccacatagggattatcgggtgcactagtttccccttgggtggttggcttggtatgagtgccatatcgagcatggggcagcgctaccgcttcatccttactttttagacattgttgcatactgcgggatgtgtccaaaacaatgcaccttgaaaagcatcaagtacctttcgacaatgtttgtcttatatatggagctaggcttgccatagcctactccctatgagattggatactatttttgatctgaagtctgccccgaagaaaaataggacagggtaattttattttagtcacagcagtcatcagtggttgggaaacacaaatggtaaagcaatgtcaaaagttggcaggaatgccaagaggtacttcattgcttatggccctaggaggattggccattatgacaactggcgggtgccattcttcaagcactctatccacacattgcaaaaaaaggatatggcaaaccacatcttatctcttttagaagagactagaaacatattgaggttgaccagtgtggccaacttccagaagtatggcctgtatcgtcctattcctcgagttgcaggagcactagctgtggatggggcatgccttggagatggcaagctcttgacttggacggtgatgtaactttgtctcgcattgcacagaatctatagatgaaggagaggagcttccgccagtgcttagttagcgaaggtccagttggtgatgcttctctccggatcaggcttagaggccaagcttctgagagacctactcaccccgtgcctgcatctagaggcaggggcaaggaaattttcaaggactctaatagttccccatgtgatgacgatcgtatttgatatttgatatgccatgcttttattctgtattgaatgtttatgattgcttaatgattgcttaatgactttgctactttctttttgcaaatatgtcttctagactaagaggtcttattaggggaccttcagatgagcccacgggaccagtgaaggccaaggtggcaaggacttctggcagtggagatgctgctgggtcctcactgcctcctacactatcaaggcctgcactagctgggtagcctgtgatacggcttgcaacccagggtactcggaggcctagcagaggagcagggtcaattgctgggtagagggtactgagacagccaacaggtgcatatagagggctctcccattcatttatgaggatctaaaggagctcagtgacggcgagccagataggctctaccttaccggtctttgggacctttctctggttcgttgtacttttagctttattcacctttttggcactgtatagactggctatccatgagacttgttgaatgtggatggctggccttggatgtttctgtgaggggctggccggccatagcagtcccaacgggggactggcaagccagtgttgtggctttgacactaatgttattttattttgttttcaggccttgatgaagctgagcttagcacgtgatggctcatggggatccttggattctctttgagagtagaagaagaccttggaagcttcccttgtggtgaagaacaaagccatatctgagctggaggctatcctgacgaagagacaaagaatggtttctggcttagagactatgcttggcgttagaaacatagagaacaccgcataagctgcctttatcttcgggctgaagtctcaccttgatgagtacaaggagaaactaaaggaggctcttgatggatagcaggccataagggaggagtatgctgacttatcctttgaactcccttatgagttcaagttgtgtaacccccgagctagtgtgtcatacatgagcagtgaggcttttgtggagagaatgttgccccatggaaaggcacttttcaagaactgaatggaggcagaataggttgatgcctatcgagaggggtcatcatcactcatgacgaggggctggccgaccc

SEQ ID NO: 38348 - DNA, 2124 bp, Cannabis sativa
acacagattctacattcactcatacaacgacaaaaattccaaatacgacaaacacatacacgcacacccctattttgtctctgtatactacgccacgtgaagtgtttggtgatgcggtgactggtttttgcttcggctagacacgttaatcttgagcatgccatgcaagacactggtcaccttgcatgttaaaccatagccaaatgtactttagcattagcaatattcttgaaccttcgtacttgtataaatatacaaactcatcaatccaattcctcatcagcaccgaagagaaaaacaaaaatataaacatttcaatcatggtggtgaatatgaaagctttgttactctcgtctctgttacttgctactatcacctctttagcttttgcatacgaaagcgaagggagaggacaagatagggagctgaaacgtgagctggagcaatgtcagcagcattgtcaaactcaacacagaggacaacagaggcagcagcaacagtgccaaagaggttgtgagactcgttatgaggaacgacaacaacaacaacaagaagaggaacggcgacaacagagagagcgtcgtggtgagagggacgaggaagagtttaatccacaagagcctcaacaacaactccagagatgtcgacagacttgttctcaaaggtaccaaggtgctggccaggagaaacagctttgtgatagaaggtgccaacaggtctatgaacaacaacgaaaacaacaaggagatgatgaggagttcaatccacaagaacctgagaaacgtcttcagaggtgtcaacaaacctgttctcagagccatcaaggtgttcaagagcagcagcgttgccaaagaatgtgccaagagaggtacgaacaagagcaaagagggggtcgtcgtggagggagggacgatgatgaagaagatcttaatccagaagagcccagacaaagactccagaggtgtcaacaaacctgttctcagagccagcaaggtggtcaagagcaggaacgttgccagagaatgtgccaagagagatacgaacaagaagagcaaagacagagacaaagagagggtcgtcgtggagggagggacgatgacgtagatgaggttaatccagaagagcccagagaaagactccagaggtgtcgacaaacctgttcccagagccaccaaggtggtgaggagcagcagcgttgccagagaatgtgccaaaagagatacgaacaagagcaaagtgagagccgtcgtgatgaggtgaatgaccatcatcgcgaggaccctcagcgacgattacagaggtgccgagaggattgtggtgccaagtcaagagaccaaagacaggttcaacaatgtcaactacgttgccagcaacaatacgaagaggagaggcagagacagcaagagagggacggcgtttatgatgttgagatggatagagagcgtgagcagagagagagtagaaacaacccttatcacttccagtcacagaggcttcaatctcgttttagaactgatgaaggtcaggtcaaggttctagagaagttttcacagaggtctgagcttcttagaggacttgagaactatcggttggctgttctagaggctcaacccagcacttttgttgctccacaccattgtgatgctgattctgtcttggtcgttactaagggtaagcctctactctaatgttcatttttgaaatcatgattatacaaaattacaaaggaaattttgtgatttaataacttggtttgatcatatatccaggtaagggaactatcaatgtagtgaggcaaaacaacaaagagtcccacaacattgaacgagctgatgtaattgttgtacctgctggctctactgtttacatgaccaaccaagacaacaaagagagtttacaaatagtaaagctcatcacttccatcaacatccctggccagtttgaggtaactaaaatatttttctacttattatcaaataaactttcatcaataacaatctattaaattaacataacatattaaacttggcttacttttgtgttcaggaattatttccaggtggctcaggcgaaaatcctcaatcatatttcagcgcattcagtaacaacattcttaggccatca

SEQ ID NO: 38349 - DNA, 3131 bp, Cannabis sativa
aaagaaatgatatgatcagccatgtcagcccaacacattgtggagtcatttctacaatattcaatattctcctttgtggtcctgtaatattcacctagcagtggatttaaatttgttaggatattttccctttttctattatatatgatcatgcatggtagttcaaataatttcttcccatttcatcatgcatgtaaaaattatttaactcttttttttttttgggattaatgattaaaatattttttgccttttttcttaaagaataatttaatatatatttcttttatttgggaagtatagttgtacataaacaataataaataatgtctaatccagatgaatagcataatctcacattttctggttcattgtcctatgaggttcctatgtcaattcatttgccaacaacttggcacaaaactttatcctcaacattacatatttaattaattcaaatattatagcaggaactatcagctgaacttgtaagatggatctctgaaattaattatattataataatttctattctattggataattatattaatatatatattatatatatatatgctatgtaggcactatatataaattatgaaatatatatatgtaatacatgacaagtggaagacgacttttgtgattgtgaaaaaacaacctatatgatttaacataaaaaatagttcccaccattaattaattcttacaagaaaaagaaatgtccaatttctcgaggctttagtttatgcacgttcttgtttggtttgccaactctttaagagagagaaaaagagagagagaaagaaccagaccaagatatatacaagagacaaattacagtggcacatatccaaaaggaaaaaaacaaaacaaaaatcataataataaattacaaacttttaaaactaataatcaacaaaaataatatgattcctagtagtactactacttcaaatagaggatatatggaagatatatatggagctatatacaatatatcaaaaataaatatatatataatttaaacgcttgtatttacatcaaagaaatcatcatcatcaacaacctccccaaagattaaattaaaagaaaaaagtatatatatatatattttgcagactgggaaaatataagatcagatcatagagcctcaccaaatgttcatgagtagtagtcgtcatgatcatcagcaccgaaagaaatcaagataatatataacaaaaatcatattaaaataataataataaaaaaaagcttaattaataaggtactacattagaagatgactgctacacaagttgaggtcctccaaaaccaaattgcatcacatgagaattatccaaattaggtagcaaattatggaactcatcaccagttagctcttcaaatccaagaaaaccttcaagaaaccctgttgttgtacaattactactcgaaatagcattctcatcatgacctttattattaatcatatcccacataccatgatgatgatgatgagcttcatcaacaatttcttcttcttcttcttcatcttcctcctccattttaactaccctttgatccgccatgcccagataatcaaaaccctgaaacccaccactagtagtatagtccattttcatggctattggcttagtgggaaagtaggcgtttaatttggagtaataaccaatacatcattattattattattatcataataataattactattattatctaatgatgatgatgaagaagcaggtgttgtgggaataataatatttttgactactgatgatgaattattattcttgggcttacttttggtaatactctccttcttgcagcattgatctttctcggttggttttccagtgagcctttggactaactctctgaaatttgccacatcagtcttgatgatctccggtgcaaatatatggataatcctaatcttaggcttagtggtgttaattatggtacttgatgaaacttttgatattgtttttgaatctttgcgaatggctaaagatggtgatcttagattattaatctcctccatgaaaagattataagaaaatttatgttattagataagagctttaagataaaacaaaagaaaataaagggtttttttttgggtaagggagagaaatttgtgtttgtttaggaagggttgagaaaggtttatatatataggagagaaaggaagtaaatgggttattaaaaatgtcgtttgatgggaatcagggaatactataacagaaaaaatatattttatattaattagagaagaaaaaaataaaaattataaataataataataataacaaaaagaaaaaaatataacaagctgtctgatgggagcaaggattggatgaatccctgtctgacaaaatgcacgagtcaataaagtaaatggaactcaatggtcccctaagtttcttatatttagattttgtattatttagctataaaaataataataataataatatatttctacaatatgtaattatatatttgtttttttttttgaatgaaatagcaacttcattgaattaaaagctttcagaaaacaagatatccctcaaatcgggccagatatcttgttctaaaatgcaaccatcagaaataaatcgagagtgcctagcaattgcatgggcgactcgatttgctgatcgtttaacaaaacgtaatttaacatcctgtaataaagataataacaaacgacattcctctataactataccaaaagtagaagacatcttctggttgctttttatggcttgcacacataagaggctgtcagtttcaagctcggcatttctccatgacttgttctttatccaactgagagcttccttgatccctaatgcttcaatcacttcagcagggtagctgccattacagtagctagttttggcttctatgaacctgcctaaatgatttcttgccactataccgtagccaaaagtgttgtgttgtggatagagcgccgcatcgacattaatcttgaggttgtttgttgcaggtggtgtccaaagctcagccccttcatcactattattgaaagatagtgttaaaagagcatgtttatcttgagctttcctccaatgttcaagagtaatagaagaatt

SEQ ID NO: 38350 - DNA, 3893 bp, Cannabis sativa
atagtttctcacttcaaattatttcatttgcttaaataattaattttacacattaatgtgacaaaaaatttcacccaaacttgccaataaaggattatgttttggttagttagagaactgagagctacattgaaattggcaacatctgtagaatttttaaatttgatgcctttatttatttatatatatatatttttttggaagtatccataagccaaaactatatttaattagataaaagaaaaagtgaacaacttagtctaaaccaaaaactatgtagatacaatattaatacaaaatgtatattactttcaaagggagcatgatgacaataataaaagattgagggttcaaaataaaaaaacaaaaaattacactatatatttcttttaatttgatgtttttaatttaattttaccatctctttcgaaatctattatatttatttttttttttaaatcattatatcaattttatttatatcacttcacgataattttcattcttctctaatcaaaattttacctcaactttcccacaaacttatattaaatctattatctttgaaattatgttttaattatgtgagtgtacgaggatactttgggtataatacttaaaatagatatatatttgaattaaattttatttaaaggtaaatttaattaaaatataaaaaaaatagacatttttcaacttgtcccttcaaaatatgtttcttcgaagattaaagtttaacatttaagaaatgtgtgacaaagtctaataaaagtttcataaattactaatgttttcagtttgtcacttacagggatttttcctaaaagttctgcaaaaagtgtgtttactttcatcactttgttgtgttaaaggtagtagatgatgaaaataatttcaaactactttactgacttatttttttttttagattatagtccttgtactgagctcttttatttgcttgatggaggtttaagaatgtattgatgaatgagtatctaaagttttatgtttataattaacgcatttaataatttttttagtgcataaatactcaatataaaactgtaattttcgtctaatttcgtcaaaaaagactcggttttgaattcatgttaagaatatagaagtgtatggttaaggaagtaaaaacacgtgagtgtttggtaagatacatgggatttctctcaaaaccaattagtaataagaggagcgggatgcatctcatgtacggtatttaatttttatatattatcaatgtgagactttctaacaatttatattacagagaccaataataatttagaatcttggtcttgacagaatttagactaacaaaactagacaaaaattatatttttattagcattgagtacttatagcattcaaaaaatattaagcttatgtcgcttcaaaattcaaaacttataagtatgtctatcactatttaaactattatctaatgaattattctattccataataataataatatgataagcttctacaatggcataagtaatgtgagggaatgagtggcttgttttcaaagtcagcatttaaaaatagttgattttttttcattaattacttaattaatgtagtagaaatgttaaatatggtcaaatgtgttttctttttaatttataaactatatatattccttaattaagttttcctactatagtatttgctcatgtactttggggtctatatattggttatgagccacgccaagaaattgactcaattggtacttttaatggttctactattatctgtgcaactatatgattctcattgtacgacatatgtgttctctccacgttttatttttatagataatcttcctcaagtgtttttaacattgaagaaaaaaagatactatagaatgaagttcaaatataatatacatatgttaaagtcgtatattaagtcactaaatatttcaataatttaaaaccatgaaattcaaactatatgaatactaaactttattataccagaaacaaactatgaattaatgccacaattaattcataacaacacacactatagctacttataatatgtaataataatcattgtaaattgtattaattaattaactaataataataaggttctaagaattacactattcaaagacccaatctcaagtccaatgtaatagtattagaagtattagtagaataatgatgatcaaattctgatgaggaagaagaagcaggcaagttcaaatcaagaacaccactaccactaccaccaccaccattgttattattcatggaagaagagctcaacaacgttaatggctcctcctcccagtgacacctcatgtgtccacccaaagcttgtccactaccaaaaactttaaaacaaagactacacttgtgtcctccaccactactcgatcccaattccatcatcttaatattcttcttctcttcctcctccgaaacgacgtcgtttactatttcttcatcaccaatattattggctgctatggcgaaacatcccttgacgttcttgtgactggctctgtgtcctcctaaagcttggtgagatccaaacactttcttacaactcgaacactcgaaacaagaagaagacgacgatggtggttgtggttgtgctggtggtggtgacgtcatacacagatcgtggccgtcggttattttgggtggaccgttggctagcaaaagaagacacgaagcgacttcgtattcttcgacagaataataaattgatggtgatgatgtttcgtactcgtcgtaacggttatgattgggctttgatgatgatgatgatgatcttcgaacgagatttgggggtgggttgatccctcgccattgacgctcggggtgacaacgcatgtggccgaacagagccttccatgaccagaatttcttcccgcattcgctacatggcatggtgattttgggtgccgaagggtctgggccgcctctcctcctctcctgcccctgttttgggcctgggcctgggccgccttcgattcgggccgttttggaccgtttctttttgggattaagggtgttgatggtggtcatacggtgtcgttctggtggttgtgggagaggaggaggaggaggaggaggagggaagaaagcaacagaggctgtggttgtggttgtggctgtggaaacgacgtcgttgggtggtggtggtggtggagttgggactgagagttgagaatggaagtgggagtagttgttgttgttattgttgttgttggtggtggtggccatagttagtgagaatggagattatttgaagagagggaattacgaaagccaaaaaaaggttggagtgtgggtgggagtgtgggttttgtagagagaataaaaacggttttttgttttattcctcaacggttatttgttttattctagcagttttttttttctacaatatgcatgagtttatatatataaacatggacaattgttttcaccgtcaaaaaaaaaatctgtttctgcagtttcagctcttgctcagatcattctcatctatttataaggagtttaggtgcagtttagctccgaggaataaaaacatagtactaataggaataggaactagaataaaattgaataaaatttaaaatagataaaaaaatagatattttacaattttgtatatattattttaattaattataaaatatgtgaaaaaaacttattatatccttttctcatacatttttatatataaataaaaacttttttttttaattttttttataatatatatgataataattattgattattatatatatagttttattggttatatttatttttatgtttacaattataataaatataccaataatataaaacattttatatatgtgtttattttatttt

SEQ ID NO: 38351 - DNA, 4433 bp, Cannabis sativa
  modified_base (3536)..(3536): a, c, t, g, unknown or other
ttgtgataccaaatatggaaataagcttactttaattacttgtcatttccttacctttcctcaacccacctactaacactcttcttcatcattacctactatgctattaccatatattaattttaggataattagcatttgtctcatttgtcatgtatgactttcaaatgtatatgactttaaattatacttcaatataattttatgatttttttattatattttatttaattttattataaaatcagtgacctagtaactagtaattgataaactaatacaaattaaatatcttttactttttaataaatggtaaaaacaaaatatttttttaggtttttaattgaaaaaatagttgaaattatatttaatttacatctatttatctaactactattcaccgcataacttaatccgccaactccatattgataaatgcaatgttcaactcaccaactcgtgaacctagctaactcagtcattacacgggcgggtacaggttcttgaacatcattattgttgtaacaacaatgttttgagggtgatctttcaccacaaatggtatcaaaactcagagtttagagtttaagaatcaccttcaaccaatcaagattcatcttcaacatttcaagaatcaaattcgaacttttaaaaaccagattcaagcaattaagaacttgtttgaatggcaacaccaaggtttgaggtggacaagtgttgtgaattttttaatacacaagtgcacgtatcgtttacaagtaataatagtgaaagtaaagtatcattccaatgaggactgtagttaagtaccaaataattaaattcctaattctatctggtgataataaatgaagaaatgtttaaatttaatttcaattgaatctacttcttatagcctaatataatttaattccaattccaattttcatgtaatagcgaattaactaattcaatctatattctggttaagatatatagaatctaaatcatatggtaaagtccaacacttatgtggtagattacacatataacttacattaaacacaaaaattatatgctaatttcatcctattcattttaatatgtttcttctcatttttattttgtaatatgaattttactatttaaacttgaaacaagtagaaaacaagcgtaattctgcacaaaatgaatataatcaattgaaatgcacctctaaaatactttgtaaaatgaatcctaaaactagctaaagccaagaatgatttcaacctatggagaatcaaaatgaaaggttttctggttcaccaaaggatctatgaggcacttgatgctgaagccatggaattgattgaagacaggaagaagaaacttgagatagaaggcaaggcacacagtttcattctcctcagtcttggtgatgaggttttaagggaagatttagatgaagacaaggccttgtgtctctggaacaagttggactcaatctacatgaagaaatctcttgcaaacaagtcgtatctcaagaacaagttgtacacactttgaatggatgagtcaaaaaaattgagaaagcctatagatgattataacaaaatcattcttaatctaaataatcttggggtgaaaatcgatgatgaagaccaggctatagtcctattgagtttacttcccaagatgtatgagcactttgttaatacaatcttttatggcaaagaagctctgaccacgacagaggttaatgctacattgaattctaaagaagttcaaaacaaaggagatgagaaagtagagaccaatggggaaagattactcattgttaagggaaaatttcccaagaggggatataagggaaatcagaactcaaatggctacaaaggtaaccattcaagatccaattctagaaactccacagggggtcaagctctaatggagttgtaggaaagaaatgttattactgtaagaaggagggctactttagagacgattgtttgaatttgaaggctaagttgaagagagacaatcatcaaaagtccaagaagcatggaattgctgatgttgcagatggatgtgagtcatctgatgcacttgtagtgtcgtttgatgcacttgtgatgtctaattcagatttaggtggagattggattctagattcagggtgttcatttcatatgacaccaaacaaaaaacttttcaagactctttcagataatcacgggggcacacttcttgggaacaacaaatcttgtgagatcaaaggtgtggaaataatcttgttaaagaatcatgatagagtcatgaagaccctgcaacaggtcatgtatgtttcatttctcaaaagaaatcttctttatattggtatgtttgataaaatggggtgttaaaggaaccctcgacactaggttagcttaatatgctagctgcaattcaaaagaggaagttgcagggtatgtggactatgactatgctggatgcatagacactaggagatcacttacaggttatgttttctcagctcaagctggatgcataagttagaaatcaaccatgcaaaatgcagaagctctgtcttccactgaagcagggtatatggcaatcactgaagtaattaaagaagccatatgggtgaaaggtttaactaaggaacttggcttcaatttagaaagcatcataatatattgtgacagccaaagtgccctacatttaataaagaatcccatatttcatgagaggtcaaaatatattaacatcaaggtgtatttcatccgagacatcattggccaaaatgaagtacaagtaagcaagtgaacactaaggacaatccaactagcatgttcactaaaggggttcctattagcaagcttaggcattgcctaaggctactaattattgacaccaacacctaatgcccttagggggctcttggaacgatctattcttcattggtttagcttcactaacttcaattaaaggtagatttctggtgttagttaaagttagttaagtctagctactattcagttaaaacaagaaaattccttaaagcttcaatcttgacagttaagttagttagggacaattctgtctttccaacactcttggacaatatcttgatataccaaccttttctacaatcagaaataacctttcagaacttcttcttcctcctctcctaaattcttctagtaaataaatgaaagctatagaactagatcctcatgtgagttcatagctgttggtgatcatcaccattataacaccaagtgtgaatcaataaagattgaagtcaaaggttgttccatcaggagagtaaacaattgtcattgctaagcaactgattgaacctcattaaattggtgtgatttgacttctcttttgcattttatgtttttcattctcttgattaattagtgcaatttattgcactaattgtcttctttgttcttgattgtttttcaaggtgattaaaacacaacaattacattttaatattgaattatttaatatttattaatatatatattttttcacatgactaacaacaaaataaaataaantattgttgttttatgtctccaataacaaattaaaacaaataaaaaaaataataataataaattcaaaggaagaataaaaaaatgttgtatgtataaaaaatattatattttgttttaaattatatttttcttataaataatttataaaaataaaatatacatttgatctgctaagttttaaaatatatatcatatgtattatatttttaattactagttattacaaatattaattgcatatataatttttttttttaaaatatgtataaatagtgtgaattagatttgatcggttgtttaacatgtcaatcaacattcaatcctcccaaatgtaaattttagatttttcaatctaatctaatccgcacaaattagattgaattatatattttataaacacctctatttacaatgcaaggaaaaataattttcttaattaggagttgtatcgttttatattataaaaggcacttgcacaagccttttctaattcatagttaagagctatatgtcagtaattcagcactggtaattatggtaacatttagcaaagtagtcttcatttctttcaaggcagaagatcccttattacaaatctaggccaatggccatccaccaaccacataataaaatcagttcaccttaactacatgccaaatcaacacatcccaaaatttcttcctcaataaacaaacagttgatcaggtagtaagtaatgaaaaggcaagctagctctagtaaatatataaaaacaagggtggtttgatctttgatgtggagaaaccataacttggcatgagtggcttaagagagtataataaagcaagtacatattttagtcactgtaattaattaagaatcgaacaagcaaccaaaaaactaaccttcaacagggtc

SEQ ID NO: 38352 - DNA, 3034 bp, Cannabis sativa
tagtaataaaattgtagttttaatgtacacgatttttttttctaaagagcccaattttaaaattttgcacaaggccctcaaaatgcttggatcggccctgcatacatataaaacaaatattaatacaaagaaattaaaaaatattataaaaaattattagagtaaaaataaaataaagttattacttaaaaaaatatataaaaataagattaaaaacaatttactaaaaattaacgaagaacaaatataaatataaaaaagtattaagtgtaaatttaaaataattttagttgatttatgtatgtataaatatacaaagttctttagtttattttagttctcccaccttaaattgaacaaaattaattatcactatatattcttatccaacatcaataaattactgatatggtacgtacaattaaagtaaaatcaattttaactcaatatataaatatcttagagcttattttcgtttgtaaataatgactaaaaacttaattagttcaacaaatattaatttattattagaacattaaacacaatgtataattgtgaataaaaaaaaatattatttctcttctgtaaaatagttctaatctattagtaaattaaaaatattaaattattaaattcaaagctgagaaagaatgagataatcaattaattgaaataattaacataacgaaaattaaattaagtattcatcaaaatataataaaatttattaattaattaaaaaataataagaaaaacaataatatatatatatatactagcaccattataatattagtgacttcaaatttaaaagagtatcaatataaaatattgacaaaaaaattgcatgtactcgtgttataactctcctacaaatgatatgcaaactttataaaaattataatttacaagaatacataattaatcgtaatttttgtttaaatgatgaaaaaactaaataattaaaaatatatttattctcctataaagaataaattgctaaattaatagagtaataaaataatttaattagaatggcaccaatgtagttaagttataatgttaagactattattaggtataaataagtattattttaaaaaatgacacaatatcaaaagagtgcaaaagagagtgtaaaataaaatataattagcacttctcatatatatgtgtgtatatatatatttttaaaatttaagataagacgccttatttggagttttgataaatggattggagatattataaccaaatctttttatatgaggatttatattatgctataactaggaaactaaaccgcgctttgcgcggtcttttacaataattgtaatatttttagtggctaaatctttatagtaatccgattaaacttgttaaagggtatacaaaaacttgttaaagggtactcatgcttagcaaaaatatgtttggatattgtataatagagaataaactttactctaatatgtggtttggtttgagaaaataaaaataagaatataaatagaaatgaaattaaatttaaaatatatatacatcttgcattggaatggtctttcattttatttcaaaatagaatagtaattccactaaaataatagaaaagtcattccattaaaatgacatttcgatactttaaaatacaactaaataaatgaaaaataaaaatattctttctattctattttattacctccaacaaatgccacctaagttttgtttgcattcttgttaccagcatatataagaagaatcacatgtacgtagttgtactattaaaataattagttcaatcaaagcatccataacatgaagtcgcagtacattatcaatatgtaaaattacaatagacgccttgtaaaaaaaatatataaaataaatacttaacgtaataagcaaaatgaatttacttgagatagagaagttaccataagtaaaaatgaacttgaggcaataaattttttttttttttttttttgaaatcaaggcaataaagtatttgagacacttccattgtaaaaacaaatatgttaagctgaaaaactccatattttgaaattagaaatatctttccctgctcattaaaagtaacataatatcaaaaacttaatattaataaataaacaaaaggaaaaaaagaagaatcataaacacaaattatacatgtttgctaaccaaaatttgtagactattgctaaccaaaatcttgtagacaatgtctttggcgcgctaaaaaaatagtatttactctaaaaaaaaataccaccatctactatttgaaattaaattaataggaataaaatgaaacgtaacaatttttacatatataacttccaacaccccattgtggcgtatatattattgcatggagagaaaataattgtacaaaaaataagtctcaaacaataaataaagtgaagaaagtagacataaattagataaaataaattatatttgtataatctatgtaaaacaacaacaaattgagaatatgaaaacaaattgagaatatgaaacaatagattgacttacctggtctccatgagtacagtggagtgagtggaagggagagatcaagagacagagaggttcttatggcaagatgaaaaaaaaagaactattagtggaaggagaaagttgaaatgttttttttttggtaatatatgtaagattatacaattttgtaacgggactattggtgtatttataaatattaattaataattaatattaatattgactaatataaaaaaggaaaataattggataggtcagaataatataatcagttacttaaatttgtgctttcttttatgagaaataaataaggaagaataatcggtaaataaaataaaaattaaaactcattaaaaaccaaccaattgatatttgataatgacttttgggaagaaaaaaataattaattaatgaccttaaataatattaattaaaataatctaaaaaattcacaaaatagaaaattttgaattctcaatagttaggctgccacatcatcaagcttaacaac

SEQ ID NO: 38353 - DNA, 3207 bp, Cannabis sativa
tggagaaatgcgtgtgaatgaatgaagaaaaagcaaagaaggtataagatgatctagatagttcgggttcacatttcacatgagcagtaacagacaatataatggaagatagccaattccacaatcttttgattaggacaacttccctatatatctacccttattacttttctaccctactactcaattttctttttatttttatttccaaaaataaattcaagcttacctcaatatttacctaatatttatataacttctttttattttattgactgatactacatttgctactgttcattttcattacttaaaagtatttgggatagggacggactcacttgcaagctttatgggggttgaaaaaaatttcatttgaagaaataaaaaataaattttttaatttgataattatacactacaataataaaaaaaaaaaacccacaaatattttttataacaattaaattcctacaaaattaaataaatttattaaaattaattataatttttgtttaaaggaatataattttttttttatatattgacaataaaactactagattactattttattaagcttaagtaattttacctttttagttatatatattatatattgtatttgttgaagtttagataatgaatttaattatatatttgtgacaaatattaagcaatagagtaattgatagtgaacgaaggagttgtattatttatactctcacacagtgaaaaggactaatacaataattgtagacatatatgtagtactccaactccaagtggacaattgtctgaagtatagaaaatagtctagaatattcttcaactaatctaatgacaaagcataataataactaattagataaatctaatcctttctttggtttatcaatttctgtcgtactacttacaaaaatttataggaagttggtcacaaatatccctaaattctacttttgctacatttatggcaatcttataagtgggtattcatatatgtccagcaaaaacaaaaccataaccatatatttgaatttcttctcacaatattttgcttagttaagttggaattgcatttatgtttttccagaagtgggccatattttacaggcccagtttatgcgtattgcccagcccatacgcaagcccaattcggagacccggaaacagttcgttgccagttccaccacgtttgtcttcgtcccgctttcgaaggcatcaggggtttttgaattgatcgatttcatcacacacagagagcgaaacccctaattttggagaagaacttgaactggggatgaagagaaatggcggttgaacgaagcgtttaactaagtatttggacgaagctctgttcaacagacccttcaaagatggaaggagccgaaaacgagttttcaaatgggagattgatgataccctgttatgaaggtatgttatgtcctgttatatgaattggagcaatattttctggtttcgaagtcctctcatcgtaaaatttaaattgtgaaaactaaattgggagggattcttatactgaatgtacattgttattgttcaaggttaagctgcagactatatattgtaatgtctgttcaatgtacatttgtctcattcattcaatgatttaagatagattatacctttgtaatgaagaattgggttcatttttctttgaataaaatatgaagggtttgagacccttttcttagttcctctttaagttttgtacttggtaaattattaatataacagctctcagaatcaatggaaaacaggggaacgaacaagacactcagtgatctgggtcttcatcttattttgttgatctacctaaattatcaaggaaccatctgtgttatggtgcattactcaattgttactgcaaggaattaatgactgaagaagctgaagctcttatggagaagatgaaagaaatcaatctttctctatgcaccataaccatgccttataatagctttattgacactatgaaaagtcagagaagcctgaaaaaatacctgccatcatacaagaaatgagggctagcagtgttaggctgtgtggatgtgagctcatgctgctgtcaatgacatctgtggggttgaaggggttattttgatgagatgaagagggatggtcgagttgtcactgattggactacttatggcaaagctggcttgtttaagaaggcagaagctgcagttaaggaattggagaagtaaactgcacacaaggatctttctgcttttcaattcctcattacattgtatggtcgaacaggaaatcttcttgaagtttatcgtgtacggtgatctctaagattggcatttcttataattgctaatgtaagctacttaaacatgaatcaagtgttggtcaatttaaatgacctacctggtgcagagaaatgattcaggaaatgggaatcatggtgctcaacatatgataatagtgttgcaaattgcttatgctaaagatggtttactagacaaggctctggagctgaagaagcatgctcgctgaagagggtccaaacccaatggcagatctttcttgattattatttgaagaatggagattttaagtaggcagttgactgcgttggcaatgcaatttccactggccgaagtaatggtgagaagccaattccacctgtgctgaaatcgttactactttaatgcagaatttcgagctagaggaagatcatgttaatggcaaagaaggttttctggagctcataaaaaaggttataagaaaagttattggacctaattcaccctaacaaatctagcttgttaggggaggattgtctcactttattatgcggatcaagtatatatcaccagccaatgtaagactctaatacgactcctcatgcatagcatgggccatgccaaacaactacgaacaaatcaataccaaaacttggcccgctctgatagcatattagaaaagttattcagcctaacccaacaaaatcggtttgagagataggtccaataaggacttaatgcttctacgggaaggacaagtggtgaatgggtaagtgtatgaagctagtaagaagttgtttgagtcaaatatgtgctgagtgatttttcttcaattatctctaagttttcttaagtagatattaaattcatgcattctgatggagaatgccccattgactagtaagctctttccattaaagtgaag

SEQ ID NO: 38354 - DNA, 2194 bp, Cannabis sativa
aaatatattaagtccttagacacaacaagaaacatgtgtccaaattcagtcaacattggatacaaaagatgtatagaatctaaatgtcttttttttttttttatcaagaatggattgattattgttgcccatcaaagcatcaacttttcctttattgccccaattttcttctttgtctagtatctcatatgcactttgtatgtgctccttcatgataattgaatagagtcaaacaattaactataaaagagagcaaaaaaccaaaggagattgagaaaatattaggttacaaacaacaaagccaaaaaatgtagaccctactttgacactcccaaaaataaatactttaaaaacttctttaatttttaattcatataactaaaaaaatagtactattttttttgtcagggtaaaccgattaaatgttaaaataataaatataactaagttgcgtaataagtgaaagatttttttttcatcttaaaaagttcattatctattctaagggcatgaagaaatatcacagaaaaattagataataaaacattaatatgagaaaaaataaaaataaaataaaataacttctaacttgtaacttgtaacttttcatctcaccactagaacacctacaaaattaaaattgaaaaacaattagtataaaatatttaatgaatatatgaaaatttaattaatattgtcatacataatcttaaagtttgattttggaccaaaataatcttaattagggtttgtgtttgttagaatgtttctaagtttataattataatgttattgcctatctatgaattataatcatgtaagataataatgtttgattgtgcataataatcaagaagggaaatattgataagaatataataactataattttatgattttcaatattaatgaaaaattacaatatcactcacataaatttatctaattttttttttttatagggcaagaaatacaaaaatcattcataactacataaatgtacacaatggctatataattacttatattacagttatataaaaaatgaaaaaaaaaacacttattttaaaaatgcataacaaatgcaatataattataaaaaaaaatatgaggggtataataaatgtgaaatgtataataaataaaaaagcattgaacttgaaaataagcttatccttgccactggtcaatggctataaaaatagaaaaaagaagaaaaattaaagtacagtagaaactctgtctaagactactttatttaaaaataatctctaatttattataaataaaaataacatttaaaatataattaattatacagtttttaaatcttatattaaaaaagtatacctctaataaacatatttatatggtttataaatttatttatgtaaaattaatatatttattttaaattcgaatacatttataaatattatatttacttaattataattttattatgatatagtattaatgattgtttatttttatttttgttatattttatacttttaggtgttttgattttttttaatgtatctttatttaattatattcttttaattagaatataatttattttgttttattctaagtatattcttagatagagattctactatattttaaatttttaaagttaaccaaaaaataataaagaaaagtttttctcttttgcttaaaaaaatctttttttttttttgtgaaaagtttataccaattgtgaaacacatgtattaccaaatgcaaatctaaaaagatgtgtattaccaagtactctttcttttttcttttttcttttttcttttattgaaaatatgtattaccaaatactcgtgcaaagcatatttaataatgtattcccttcaaaatataataataatagtggactagtgatgtccactaacaatgtgagaacttgaaattaccacctacaaataattttgagataaattaagaaatatttattttttatccattaataaaaaatactcttattttttttttgggtaaattttatattaacttaatgagtataataagaacattaggtatatcttaaagaatataaaaataaaagtaaaaattaaaacaaataaaataaaatgagtatacaatataatttcctcaataatttttttataaaattataataattattatatttaaatatacaaaactctctctatat
